United States Patent Application Publication US 2011/0183924 A1 - sequence listing, part 288

SEQ ID NO: 911686 - protein, 1616 aa, Homo sapiens
MKLRGVSLAAGLFLLALSLWGQPAEAAACYGCSPGSKCDCSGIKGEKGERGFPGLEGHPGLPGFPGPEGPPGPRGQKGDDGIPGPPGPKGIRGPPGLPGFPGTPGLPGMPGHDGAPGPQGIPGCNGTKGERGFPGSPGFPGLQGPPGPPGIPGMKGEPGSIIMSSLPGPKGNPGYPGPPGIQGLPGPTGIPGPIGPPGPPGLMGPPGPPGLPGPKGNMGLNFQGPKGEKGEQGLQGPPGPPGQISEQKRPIDVEFQKGDQGLPGDRGPPGPPGIRGPPGPPGGEKGEKGEQGEPGKRGKPGKDGENGQPGIPGLPGDPGYPGEPGRDGEKGQKGDTGPPGPPGLVIPRPGTGITIGEKGNIGLPGLPGEKGERGFPGIQGPPGLPGPPGAAVMGPPGPPGFPGERGQKGDEGPPGISIPGPPGLDGQPGAPGLPGPPGPAGPHIPPSDEICEPGPPGPPGSPGDKGLQGEQGVKGDKGDTCFNCIGTGISGPPGQPGLPGLPGPPGSLGFPGQKGEKGQAGATGPKGLPGIPGAPGAPGFPGSKGEPGDILTFPGMKGDKGELGSPGAPGLPGLPGTPGQDGLPGLPGPKGEPGGITFKGERGPPGNPGLPGLPGNIGPMGPPGFGPPGPVGEKGIQGVAGNPGQPGIPGPKGDPGQTITQPGKPGLPGNPGRDGDVGLPGDPGLPGQPGLPGIPGSKGEPGIPGIGLPGPPGPKGFPGIPGPPGAPGTPGRIGLEGPPGPPGFPGPKGEPGFALPGPPGPPGLPGFKGALGPKGDRGFPGPPGPPGRTGLDGLPGPKGDVGPNGQPGPMGPPGLPGIGVQGPPGPPGIPGPIGQPGLHGIPGEKGDPGPPGLDVPGPPGERGSPGIPGAPGPIGPPGSPGLPGKAGASGFPGTKGEMGMMGPPGPPGPLGIPGRSGVPGLKGDDGLQGQPGLPGPTGEKGSKGEPGLPGPPGPMDPNLLGSKGEKGEPGLPGIPGVSGPKGYQGLPGDPGQPGLSGQPGLPGPPGPKGNPGLPGQPGLIGPPGLKGTIGDMGFPGPQGVEGPPGPSGVPGQPGSPGLPGQKGDKGDPGISSIGLPGLPGPKGEPGLPGYPGNPGIKGSVGDPGLPGLPGTPGAKGQPGLPGFPGTPGPPGPKGISGPPGNPGLPGEPGPVGGGGHPGQPGPPGEKGKPGQDGIPGPAGQKGEPGQPGFGNPGPPGLPGLSGQKGDGGLPGIPGNPGLPGPKGEPGFHGFPGVQGPPGPPGSPGPALEGPKGNPGPQGPPGRPGYEGLPGPEGPPGLPGNGGIKGEKGNPGQPGLPGLPGLKGDQGPPGLQGNPGRPGLNGMKGDPGLPGVPGFPGMKGPSGVPGSAGPEGEPGLIGPPGPPGLPGPSGQSIIIKGDAGPPGIPGQPGLKGLPGPQGPQGLPGPTGPPGDPGRNGLPGFDGAGGRKGDPGLPGQPGTRGLDGPPGPDGLQGPPGPPGTSSVAHGFLITRHSQTTDAPQCPQGTLQVYEGFSLLYVQGNKRAHGQDLGTAGSCLRRFSTMPFMFCNINNVCNFASRNDYSYWLSTPEPMPMSMQPLKGQSIQPFISRCAVCEAPAVVIAVHSQTIQIPHCPQGWDSLWIGYSFMMVFYTLPCICHHS

SEQ ID NO: 911687 - protein, 105 aa, Homo sapiens
RGEGRVAPSSSSFFFLPLLKSFFLFTQASLSLSGSSSLHINPQDYVNWLEPAGNFVRVLKELREPEKNETAWSQPGCRLVLTGPESLGAACRGCGLLWVLSRIKV

SEQ ID NO: 911688 - protein, 1604 aa, Homo sapiens
MKLRGVSLAAGLFLLALSLWGQPAEAAACYGCSPGSKCDCSGIKGEKGERGFPGLEGHPGLPGFPGPEGPPGPRGQKGDDGIPGPPGPKGIRGPPGLPGFPGTPGLPGMPGHDGAPGPQGIPGCNGTKGERGFPGSPGFPGLQGPPGPPGIPGMKGEPGSIIMSSLPGPKGNPGYPGPPGIQGLPGPTGIPGPIGPPGPPGLMGPPGPPGLPGPKGNMGLNFQGPKGEKGEQGLQGPPGPPGQISEQKRPIDVEFQKGDQGLPGDRGPPGPPGIRGPPGPPGGEKGEKGEQGEPGKRGKPGKDGENGQPGIPGLPGDPGYPGEPGRDGEKGQKGDTGPPGPPGLVIPRPGTGITIGEKGNIGLPGLPGEKGERGFPGIQGPPGLPGPPGAAVMGPPGPPGFPGERGQKGDEGPPGISIPGPPGLDGQPGAPGLPGPPGPAGPHIPPSDEICEPGPPGPPGSPGDKGLQGEQGVKGDKGDTCFNCIGTGISGPPGQPGLPGLPGPPGSLGFPGQKGEKGQAGATGPKGLPGIPGAPGAPGFPGSKGEPGDILTFPGMKGDKGELGSPGAPGLPGLPGTPGQDGLPGLPGPKGEPGGITFKGERGPPGNPGLPGLPGNIGPMGPPGFGPPGPVGEKGIQGVAGNPGQPGIPGPKGDPGQTITQPGKPGLPGNPGRDGDVGLPGDPGLPGQPGLPGIPGSKGEPGIPGIGLPGPPGPKGFPGIPGPPGAPGTPGRIGLEGPPGPPGFPGPKGEPGFALPGPPGPPGLPGFKGALGPKGDRGFPGPPGPPGRTGLDGLPGPKGDVGPNGQPGPMGPPGLPGIGVQGPPGPPGIPGPIGQPGLHGIPGEKGDPGPPGLDVPGPPGERGSPGIPGAPGPIGPPGSPGLPGKAGASGFPGTKGEMGMMGPPGPPGPLGIPGRSGVPGLKGDDGLQGQPGLPGPTGEKGSKGEPGLPGPPGPMDPNLLGSKGEKGEPGLPGIPGVSGPKGYQGLPGDPGQPGLSGQPGLPGPPGPKGNPGLPGQPGLIGPPGLKGTIGDMGFPGPQGVEGPPGPSGVPGQPGSPGLPGQKGDKGDPGISSIGLPGLPGPKGEPGLPGYPGNPGIKGSVGDPGLPGLPGTPGAKGQPGLPGFPGTPGPPGPKGISGPPGNPGLPGEPGPVGGGGHPGQPGPPGEKGKPGQDGIPGPAGQKGEPGQPGFGNPGPPGLPGLSGQKGDGGLPGIPGNPGLPGPKGEPGFHGFPGVQGPPGPPGSPGPALEGPKGNPGPQGPPGRPGYEGLPGPEGPPGLPGNGGIKGEKGNPGQPGLPGLPGLKGDQGPPGLQGNPGRPGLNGMKGDPGLPGVPGFPGMKGPSGVPGSAGPEGEPGLIGPPGPPGLPGPSGQSIIIKGDAGPPGIPGQPGLKGLPGPQGPQGLPGPTGPPGDPGRNGLPGFDGAGGRKGDPGLPGQPGTRGLDGPPGPDGLQGPPGPPGTSSVAHGFLITRHSQTTDAPQCPQGTLQVYEGFSLLYVQGNKRAHGQDLGTAGSCLRRFSTMPFMFCNINNVCNFASRNDYSYWLSTPEPMPMSMQPLKGQSIQPFISRCAVCEAPAVVIAVHSQTIQIPHCPQGWDSLWIGYSFMM

SEQ ID NO: 911689 - protein, 1361 aa, Homo sapiens
MVKRPKGDTGPPGPPGLVIPRPGTGITIGEKGNIGLPGLPGEKGERGFPGIQGPPGLPGPPGAAVMGPPGPPGFPGERGQKGDEGPPGISIPGPPGLDGQPGAPGLPGPPGPAGPHIPPSDEICEPGPPGPPGSPGDKGLQGEQGVKGDKGDTCFNCIGTGISGPPGQPGLPGLPGPPGSLGFPGQKGEKGQAGATGPKGLPGIPGAPGAPGFPGSKGEPGDILTFPGMKGDKGELGSPGAPGLPGLPGTPGQDGLPGLPGPKGEPGGITFKGERGPPGNPGLPGLPGNIGPMGPPGFGPPGPVGEKGIQGVAGNPGQPGIPGPKGDPGQTITQPGKPGLPGNPGRDGDVGLPGDPGLPGQPGLPGIPGSKGEPGIPGIGLPGPPGPKGFPGIPGPPGAPGTPGRIGLEGPPGPPGFPGPKGEPGFALPGPPGPPGLPGFKGALGPKGDRGFPGPPGPPGRTGLDGLPGPKGDVGPNGQPGPMGPPGLPGIGVQGPPGPPGIPGPIGQPGLHGIPGEKGDPGPPGLDVPGPPGERGSPGIPGAPGPIGPPGSPGLPGKAGASGFPGTKGEMGMMGPPGPPGPLGIPGRSGVPGLKGDDGLQGQPGLPGPTGEKGSKGEPGLPGPPGPMDPNLLGSKGEKGEPGLPGIPGVSGPKGYQGLPGDPGQPGLSGQPGLPGPPGPKGNPGLPGQPGLIGPPGLKGTIGDMGFPGPQGVEGPPGPSGVPGQPGSPGLPGQKGDKGDPGISSIGLPGLPGPKGEPGLPGYPGNPGIKGSVGDPGLPGLPGTPGAKGQPGLPGFPGTPGPPGPKGISGPPGNPGLPGEPGPVGGGGHPGQPGPPGEKGKPGQDGIPGPAGQKGEPGQPGFGNPGPPGLPGLSGQKGDGGLPGIPGNPGLPGPKGEPGFHGFPGVQGPPGPPGSPGPALEGPKGNPGPQGPPGRPGYKGLPGPEGPPGLPGNGGIKGEKGNPGQPGLPGLPGLKGDQGPPGLQGNPGRPGLNGMKGDPGLPGVPGFPGMKGPSGVPGSAGPEGEPGLIGPPGPPGLPGPSGQSIIIKGDAGPPGIPGQPGLKGLPGPQGPQGLPGPTGPPGDPGRNGLPGFDGAGGRKGDPGLPGQPGTRGLDGPPGPDGLQGPPGPPGTSSVAHGFLITRHSQTTDAPQCPQGTLQVYEGFSLLYVQGNKRAHGQDLGTAGSCLRRFSTMPFMFCNINNVCNFASRNDYSYWLSTPEPMPMSMQPLKGQSIQPFISRCAVCEAPAVVIAVHSQTIQIPHCPQGWDSLWIGYSFMMHTSAGAEGSGQALASPGSCLEEFRSAPFIECHGRGTCNYYANSYSFWLATVDVSDMFSKPQSETLKAGDLRTRISRCQVCMKRT

SEQ ID NO: 911690 - protein, 383 aa, Homo sapiens [sequence omitted]

SEQ ID NO: 911691 - protein, 1087 aa, Homo sapiens
MKLRGVSLAAGLFLLALSLWGQPAEAAACYGCSPGSKCDCSGIKGEKGERGFPGLEGHPGLPGFPGPEGPPGPRGQKGDDGIPGPPGPKGIRGPPGLPGFPGTPGLPGMPGHDGAPGPQGIPGCNGTKGERGFPGSPGFPGLQGPPGPPGIPGMKGEPGSIIMSSLPGPKGNPGYPGPPGIQGLPGPTGIPGPIGPPGPPGLMGPPGPPGLPGPKGNMGLNFQGPKGEKGEQGLQGPPGPPGQISEQKRPIDVEFQKGDQGLPGDRGPPGPPGIRGPPGPPGGEKGEKGEQGEPGKRGKPGKDGENGQPGIPGLPGDPGYPGEPGRDGEKGQKGDTGPPGPPGLVIPRPGTGITIGEKGNIGLPGLPGEKGERGFPGIQGPPGLPGPPGAAVMGPPGPPGFPGERGQKGDEGPPGISIPGPPGLDGQPGAPGLPGPPGPAGPHIPPSDEICEPGPPGPPGSPGDKGLQGEQGVKGDKGDTCFNCIGTGISGPPGQPGLPGLPGPPGSLGFPGQKGEKGQAGATGPKGLPGIPGAPGAPGFPGSKGEPGDILTFPGMKGDKGELGSPGAPGLPGLPGTPGQDGLPGLPGPKGEPGGITFKGERGPPGNPGLPGLPGNIGPMGPPGFGPPGPVGEKGIQGVAGNPGQPGIPGPKGDPGQTITQPGKPGLPGNPGRDGDVGLPGDPGLPGQPGLPGIPGSKGEPGIPGIGLPGPPGPKGFPGIPGPPGAPGTPGRIGLEGPPGPPGFPGPKGEPGFALPGPPGPPGLPGFKGALGPKGDRGFPGPPGPPGRTGLDGLPGPKGDVGPNGQPGPMGPPGLPGIGVQGPPGPPGIPGPIGQPGLHGIPGEKGDPGPPGLDVPGPPGERGSPGIPGAPGPIGPPGSPGLPGKAGASGFPGTKGEMGMMGPPGPPGPLGIPGRSGVPGLKGDDGLQGQPGLPGPTGEKGSKGEPGLPGPPGPMDPNLLGSKGEKGEPGLPGIPGVSGPKGYQGLPGDPGQPGLSGQPGLPGPPGPKGNPGLPGQPGLIGPPGLKGTIGDMGFPGPQGVEGPPGPSGVPGQPGSPGLPGQKGDKGDPGISSIGLPGLPGPKVIFGI

SEQ ID NO: 911692 - protein, 214 aa, Homo sapiens
EPTKPLVRRAGAKSRSRRKKQKKNSRQEAVPWKKPKGINSNSTANLEDPEVGDAESMAISEPIKGSRKPCVNKEELALKKPMAKCAWKGPREPPQDARAEAESPGGASESDQDGGHESPPKKKAVAWVSAKNPAPMRKKKKVSLGPVSYVLVDSEDGRKKPVMPKKGPGSRREASDQKAPRGQQPAEATASTSRGPKAKPEGSPRRATNESRKV

SEQ ID NO: 911693 - protein, 214 aa, Homo sapiens; identical to SEQ ID NO: 911692

SEQ ID NO: 911694 - protein, 214 aa, Homo sapiens; identical to SEQ ID NO: 911692

SEQ ID NO: 911695 - protein, 138 aa, Homo sapiens
MKSISCQEIPGQQSRGRTCRGRKFDGHRCAGQQQDIRHCYSIQHCPLKGSWSEWSTWGLCMPPCGPNPTRARQRLCTPLLPKYPPTVSMVEGQGEKNVTFWGRPLPRCEELQGQKLVVEEKRPCLHVPACKDPEEEEL

SEQ ID NO: 911696 - protein, 469 aa, Homo sapiens
MITEGAQAPRLLLPPLLLLLTLPATGSDPVLCFTQYEESSGKCKGLLGGGVSVEDCCLNTAFAYQKRSGGLCQPCRSPRWSLWSTWAPCSVTCSEGSQLRYRRCVGWNGQCSGKVAPGTLEWQLQACEDQQCCPEMGGWSGWGPWEPCSVTCSKGTRTRRRACNHPAPKCGGHCPGQAQESEACDTQQVCPTHGAWATWGPWTPCSASCHGGPHEPKETRSRKCSAPEPSQKPPGKPCPGLAYEQRRCTGLPPCPVAGGWGPWGPVSPCPVTCGLGQTMEQRTCNHPVPQHGGPFCAGDATRTHICNTAVPCPVDGEWDSWGEWSPCIRRNMKSISCQEIPGQQSRGRTCRGRKFDGHRCAGQQQDIRHCYSIQHCPLKGSWSEWSTWGLCMPPCGPNPTRARQRLCTPLLPKYPPTVSMVEGQGEKNVTFWGRPLPRCEELQGQKLVVEEKRPCLHVPACKDPEEEEL

SEQ ID NO: 911697 - protein, 469 aa, Homo sapiens; identical to SEQ ID NO: 911696

SEQ ID NO: 911698 - protein, 258 aa, Homo sapiens
MITEGAQAPRLLLPPLLLLLTLPATGSDPVLCFTQYEESSGKCKGLLGGGVSVEDCCLNTAFAYQKRSGGLCQPCRSPRWSLWSTWAPCSVTCSEGSQLRYRRCVGWNGQCSGKVAPGTLEWQLQACEDQQCCPEMGGWSGWGPWEPCSVTCSKGTRTRRRACNHPAPKCGGHCPGQAQESEACDTQQVCPTHGAWATWGPWTPCSASCHGGPHEPKETRSRKCSAPEPSQKPPGKPCPGLAYEQRRCTGLPPCPAAL

SEQ ID NO: 911699 - protein, 593 aa, Homo sapiens
MVSPPPGAAAVAARAGLRVGPAPRPLMGSQGRSGPPGNGGPGEGEGGEARKLQEGRVARGKRRKGKGKGKARAGQGGRGSGAEGKPGPQTAKEAAGPGADAGARACPREEAEGGRSVEEGARGIVKGVEGSAGAGKEAQGREYGKKEEWRVRARRREGARPGRAQGRGGQAWADIAGTGVAMAAAAGEEEEEEEAARESAARPAAGPALWRLPEELLLLICSYLDMRALGRLAQVCRWLRRFTSCDLLWRRIARASLNSGFTRLGTDLMTSVPVKERVKVSQNWRLGRCREGILLKWRCSQMPWMQLEDDSLYISQANFILAYQFRPDGASLNRRPLGVFAGHDEDVCHFVLANSHIVSAGGDGKIGIHKIHSTFTVKYSAHEQEVNCVDCKGGIIVSGSRDRTAKVWPLASGRLGQCLHTIQTEDRVWSIAISPLLSSFVTGTACCGHFSPLRIWDLNSGQLMTHLGSDFPPGAGVLDVMYESPFTLLSCGYDTYVRYWDLRTSVRKCVMEWEEPHDSTLYCLQTDGNHLLATGSSYYGVVRLWDRRQRACLHAFPLTSTPLSSPVYCLRLTTKHLYAALSYNLHVLDFQNP

SEQ ID NO: 911700 - protein, 325 aa, Homo sapiens
MTSVPVKERVKVSQNWRLGRCREGILLKWRCSQMPWMQLEDDSLYISQANFILAYQFRPDGASLNRRPLGVFAGHDEDVCHFVLANSHIVSAGGDGKIGIHKIHSTFTVKYSAHEQEVNCVDCKGGIIVSGSRDRTAKVWPLASGRLGQCLHTIQTEDRVWSIAISPLLSSFVTGTACCGHFSPLRIWDLNSGQLMTHLGSDFPPGAGVLDVMYESPFTLLSCGYDTYVRYWDLRTSVRKCVMEWEEPHDSTLYCLQTDGNHLLATGSSYYGVVRLWDRRQRACLHAFPLTSTPLSSPVYCLRLTTKHLYAALSYNLHVLDFQNP

SEQ ID NO: 911701 - protein, 341 aa, Homo sapiens
LCCVEPYVCRWLGTDLMTSVPVKERVKVSQNWRLGRCREGILLKWRCSQMPWMQLEDDSLYISQANFILAYQFRPDGASLNRRPLGVFAGHDEDVCHFVLANSHIVSAGGDGKIGIHKIHSTFTVKYSAHEQEVNCVDCKGGIIVSGSRDRTAKVWPLASGRLGQCLHTIQTEDRVWSIAISPLLSSFVTGTACCGHFSPLRIWDLNSGQLMTHLGSDFPPGAGVLDVMYESPFTLLSCGYDTYVRYWDLRTSVRKCVMEWEEPHDSTLYCLQTDGNHLLATGSSYYGVVRLWDRRQRACLHAFPLTSTPLSSPVYCLRLTTKHLYAALSYNLHVLDFQNP

SEQ ID NO: 911702 - protein, 353 aa, Homo sapiens
ASDLKRLCLHTTQTEDRVWSIAISPLLRMTSVPVKERVKVSQNWRLGRCREGILLKWRCSQMPWMQLEDDSLYISQANFILAYQFRPDGASLNRRPLGVFAGHDEDVCHFVLANSHIVSAGGDGKIGIHKIHSTFTVKYSAHEQEVNCVDCKGGIIVSGSRDRTAKVWPLASGRLGQCLHTIQTEDRVWSIAISPLLSSFVTGTACCGHFSPLRIWDLNSGQLMTHLGSDFPPGAGVLDVMYESPFTLLSCGYDTYVRYWDLRTSVRKCVMEWEEPHDSTLYCLQTDGNHLLATGSSYYGVVRLWDRRQRACLHAFPLTSTPLSSPVYCLRLTTKHLYAALSYNLHVLDFQNP

SEQ ID NO: 911703 - protein, 304 aa, Homo sapiens
MRGDLLKWRCSQMPWMQLEDDSLYISQANFILAYQFRPDGASLNRRPLGVFAGHDEDVCHFVLANSHIVSAGGDGKIGIHKIHSTFTVKYSAHEQEVNCVDCKGGIIVSGSRDRTAKVWPLASGRLGQCLHTIQTEDRVWSIAISPLLSSFVTGTACCGHFSPLRIWDLNSGQLMTHLGSDFPPGAGVLDVMYESPFTLLSCGYDTYVRYWDLRTSVRKCVMEWEEPHDSTLYCLQTDGNHLLATGSSYYGVVRLWDRRQRACLHAFPLTSTPLSSPVYCLRLTTKHLYAALSYNLHVLDFQNP

SEQ ID NO: 911704 - protein, 381 aa, Homo sapiens
MVSPPPGAAAVAARAGLRVGPAPRPLMGSQGRSGPPGNGGPGEGEGGEARKLQEGRVARGKRRKGKGKGKARAGQGGRGSGAEGKPGPQTAKEAAGPGADAGARACPREEAEGGRSVEEGARGIVKGVEGSAGAGKEAQGREYGKKEEWRVRARRREGARPGRAQGRGGQAWADIAGTGVAMAAAAGEEEEEEEAARESAARPAAGPALWRLPEELLLLICSYLDMRALGRLAQVCRWLRRFTSCDLLWRRIARASLNSGFTRLGTDLMTSVPVKERVKVSQNWRLGRCREGILLKWRCSQMPWMQLEDDSLYISQANFILAYQFRPDGASLNRRPLGVFAGHDEDVCHFVLANSHIVSAGGDGKIGIHKIQGILLLASLI

SEQ ID NO: 911705 - protein, 272 aa, Homo sapiens
MIYVPISAILNRMYSRKSQVNLLKEQSALCAGQLAYCSAGGDGKIGIHKIHSTFTVKYSAHEQEVNCVDCKGGIIVSGSRDRTAKVWPLASGRLGQCLHTIQTEDRVWSIAISPLLSSFVTGTACCGHFSPLRIWDLNSGQLMTHLGSDFPPGAGVLDVMYESPFTLLSCGYDTYVRYWDLRTSVRKCVMEWEEPHDSTLYCLQTDGNHLLATGSSYYGVVRLWDRRQRACLHAFPLTSTPLSSPVYCLRLTTKHLYAALSYNLHVLDFQNP

SEQ ID NO: 911706 - protein, 564 aa, Homo sapiens
MVSPPPGAAAVAARAGLRVGPAPRPLMGSQGRSGPPGNGGPGEGEGGEARKLQEGRVARGKRRKGKGKGKARAGQGGRGSGAEGKPGPQTAKEAAGPGADAGARACPREEAEGGRSVEEGARGIVKGVEGSAGAGKEAQGREYGKKEEWRVRARRREGARPGRAQGRGGQAWADIAGPALWRLPEELLLLICSYLDMRALGRLAQVCRWLRRFTSCDLLWRRIARASLNSGFTRLGTDLMTSVPVKERVKVSQNWRLGRCREGILLKWRCSQMPWMQLEDDSLYISQANFILAYQFRPDGASLNRRPLGVFAGHDEDVCHFVLANSHIVSAGGDGKIGIHKIHSTFTVKYSAHEQEVNCVDCKGGIIVSGSRDRTAKVWPLASGRLGQCLHTIQTEDRVWSIAISPLLSSFVTGTACCGHFSPLRIWDLNSGQLMTHLGSDFPPGAGVLDVMYESPFTLLSCGYDTYVRYWDLRTSVRKCVMEWEEPHDSTLYCLQTDGNHLLATGSSYYGVVRLWDRRQRACLHAFPLTSTPLSSPVYCLRLTTKHLYAALSYNLHVLDFQNP

SEQ ID NO: 911707 - protein, 325 aa, Homo sapiens; identical to SEQ ID NO: 911700

SEQ ID NO: 911708 - protein, 498 aa, Homo sapiens
MVSPPPGAAAVAARAGLRVGPAPRPLMGSQGRSGPPGNGGPGEGEGGEARKLQEGRVARGKRRKGKGKGKARAGQGGRGSGAEGKPGPQTAKEAAGPGADAGARACPREEAEGGRSVEEGARGIVKGVEGSAGAGKEAQGREYGKKEEWRVRARRREGARPGRAQGRGGQAWADIAGTGVAMAAAAGEEEEEEEAARESAARPAAGPALWRLPEELLLLICSYLDMRALGRLAQVCRWLRRFTSCDLLWRRIARASLNSGFTRLGTDLMTSVPVKERVKVSQNWRLGRCREGILLKWRCSQMPWMQLEDDSLYISQANFILAYQFRPDGASLNRRPLGVFAGHDEDVCHFVLANSHIVSAGGDGKIGIHKIHSTFTVKYSAHEQEVNCVDCKGGIIVSGSRDRTAKVWPLASGRLGQCLHTIQTEDRVWSIAISPLLSSFVTGTACCGHFSPLRIWDLNSGRFDTGVIPRAGVESYSPTHAAGDPISVPARRVSLKPY

SEQ ID NO: 911709 - protein, 468 aa, Homo sapiens
MVSPPPGAAAVAARAGLRVGPAPRPLMGSQGRSGPPGNGGPGEGEGGEARKLQEGRVARGKRRKGKGKGKARAGQGGRGSGAEGKPGPQTAKEAAGPGADAGARACPREEAEGGRSVEEGARGIVKGVEGSAGAGKEAQGREYGKKEEWRVRARRREGARPGRAQGRGGQAWADIAGTGVAMAAAAGEEEEEEEAARESAARPAAGPALWRLPEELLLLICSYLDMRALGRLAQVCRWLRRFTSCDLLWRRIARASLNSGFTRLGTDLMTSVPVKERVKVSQNWRLGRCREGILLKWRCSQMPWMQLEDDSLYISQANFILAYQFRPDGASLNRRPLGVFAGHDEDVCHFVLANSHIVSAGGDGKIGIHKIHSTFTVKYSAHEQEVNCVDCKGGIIVSGSRDRTAKVLFCDRDGLLRALLTPENLGPQQWALLTPGSDSQGWSESYSPTHAAGDPISVPARRVSLKPY

SEQ ID NO: 911710 - protein, 115 aa, Homo sapiens
MDNRKEPPFFNDDNMGPFYYRLHFCDTMELFIETLTGTCFELRVSPFETVISVKAKIRRLEGIPICRQHLIWNNMELENDYCLNDYNISEGCTLKLVLAMRGGPINTRRDLQIPR

SEQ ID NO: 911711 - protein, 585 aa, Homo sapiens
MVIFTSLHRYVIFISCIIVINWYMSRVHGMHPKETTRQLSLAVKDGLIVETLTVGCKGSKAGIEQEGYWLPGDEIDWETENHDWYCFECHLPGEVLICDLCFRVYHSKCLSDEFRLRDSSSPWQCPVCRSIKKKNTNKQEMGTYLRFIVSRMKERAIDLNKKGKDNKHPMYRRLVHSAVDVPTIQEKVNEGKYRSYEEFKADAQLLLHNTVIFYGADSEQADIARMLYKDTCHELDELQLCKNCFYLSNARPDNWFCYPCIPNHELVWAKMKGFGFWPAKVMQKEDNQVDVRFFGHHHQRAWIPSENIQDITVNIHRLHVKRSMGWKKACDELELHQRFLREGRFWKSKNEDRGEEEAESSISSTSNEQLKVTQEPRAKKGRRNQSVEPKKEEPEPETEAVSSSQEIPTMPQPIEKVSVSTQTKKLSASSPRMLHRSTQTTNDGVCQSMCHDKYTKIFNDFKDRMKSDHKRETERVVREALEKLRSEMEEEKRQAVNKAVANMQGEMDRKCKQVKEKCKEEFVEEIKKLATQHKQLISQTKKKQWCYNCEEEAMYHCCWNTSYCSIKCQQEHWHAEHKRTCRRKR

SEQ ID NO: 911712 - protein, 602 aa, Homo sapiens
MARLTKRRQADTKAIQHLWAAIEIIRNQKQIANIDRITKYMSRVHGMHPKETTRQLSLAVKDGLIVETLTVGCKGSKAGIEQEGYWLPGDEIDWETENHDWYCFECHLPGEVLICDLCFRVYHSKCLSDEFRLRDSSSPWQCPVCRSIKKKNTNKQEMGTYLRFIVSRMKERAIDLNKKGKDNKHPMYRRLVHSAVDVPTIQEKVNEGKYRSYEEFKADAQLLLHNTVIFYGADSEQADIARMLYKDTCHELDELQLCKNCFYLSNARPDNWFCYPCIPNHELVWAKMKGFGFWPAKVMQKEDNQVDVRFFGHHHQRAWIPSENIQDITVNIHRLHVKRSMGWKKACDELELHQRFLREGRFWKSKNEDRGEEEAESSISSTSNEQLKVTQEPRAKKGRRNQSVEPKKEEPEPETEAVSSSQEIPTMPQPIEKVSVSTQTKKLSASSPRMLHRSTQTTNDGVCQSMCHDKYTKIFNDFKDRMKSDHKRETERVVREALEKLRSEMEEEKRQAVNKAVANMQGEMDRKCKQVKEKCKEEFVEEIKKLATQHKQLISQTKKKQWCYNCEEEAMYHCCWNTSYCSIKCQQEHWHAEHKRTCRRKR

SEQ ID NO: 911713 - protein, 360 aa, Homo sapiens [sequence omitted]

SEQ ID NO: 911714 - protein, 727 aa, Homo sapiens
MDNRKEPPFFNDDNMGPFYYRLHFCDTMELFIETLTGTCFELRVSPFETVISVKAKIRRLEGIPICRQHLIWNNMELENDYCLNDYNISEGCTLKLVLAMRGGPINTRRVPTDDPLRKMAEYLDSSRVEVWEKTSCSKQVTFLVYQEGDQLNFFPAVDRGDGTLTPLSDSSKKIDFHLHVLRRKGEHRMSGGSMYNSDTDEDEETEPSSSGQQIIENSITMNKMKLLKAKMKNMNLSKKPKKAVKIKPHPPVAPRPSSGSTAPSRHRLLRVLPNIGQSCSPAFGNAYPPEISRNGISSLATQLSAERYISSITGEFLKEDNSWENNTLSHFSSNVKLPPQIPHLELGNDQELADSVLHLGSSLPRQTKHFLGNLPSSNGNIVLPSEECVTEQSLLPKVGSLASFAEGNADEQSSGLEGACKVNLELLLTNADKGLKAPEQHLKHVAGVLNGESVETSVLNYRELSPHKNRLLSPLRCSAPMSLHNSLVKPERQSKCFEFGKLQPSSSQSLDVQNITDSSFSRTTCFQGVKVDSLGKRSDVISKVEARDITEMTNKASKEPVGCVNNISFLASLAGSTSRNRLQSTRGAGRLQNSGTGLSTNLQHFQEENFRKSSPQLEHTGVFLSTHGVGMNGNNAAAGKSVGECTTHHLPPVKAPLQTKKKTTNHCFLCGKKTGLASSYECRCGNNFCASHRYAETHGCTYDYKSAGRRYLHEANPVVNAPKLPKI

SEQ ID NO: 911715 - protein, 602 aa, Homo sapiens; identical to SEQ ID NO: 911712

SEQ ID NO: 911716 - protein, 727 aa, Homo sapiens; identical to SEQ ID NO: 911714

SEQ ID NO: 911717 - protein, 679 aa, Homo sapiens
MDNRKEPPFFNDDNMGPFYYRLHFCDTMELFIETLTGTCFELRVSPFETVISVKAKIRRLEVPTDDPLRKMAEYLDSSRVEVWEKTSCSKQVTFLVYQEGDQLNFFPAVDRGDGTLTPLSDSSKKIDFHLHVLRRKGEHRMSGGSMYNSDTDEDEETEPSSSGQQIIENSITMNKMKLLKAKMKNMNLSKKPKKAVKIKPHPPVAPRPSSGSTAPSRHRLLRVLPNIGQSCSPAFGNAYPPEISRNGISSLATQLSAERYISSITGEFLKEDNSWENNTLSHFSSNVKLPPQIPHLELGNDQELADSVLHLGSSLPRQTKHFLGNLPSSNGNIVLPSEECVTEQSLLPKVGSLASFAEGNADEQSSGLEGACKVNLELLLTNADKGLKAPEQHLKHVAGVLNGESVETSVLNYRELSPHKNRLLSPLRCSAPMSLHNSLVKPERQSKCFEFGKLQPSSSQSLDVQNITDSSFSRTTCFQGVKVDSLGKRSDVISKVEARDITEMTNKASKEPVGCVNNISFLASLAGSTSRNRLQSTRGAGRLQNSGTGLSTNLQHFQEENFRKSSPQLEHTGVFLSTHGVGMNGNNAAAGKSVGECTTHHLPPVKAPLQTKKKTTNHCFLCGKKTGLASSYECRCGNNFCASHRYAETHGCTYDYKSAGRRYLHEANPVVNAPKLPKI

SEQ ID NO: 911718 - protein, 718 aa, Homo sapiens
MDNRKEPPFFNDDNMGPFYYRLHFCDTMELFIETLTGTCFELRVSPFETVISVKAKIRRLEGIPICRQHLIWNNMELENDYCLNDYNISEGCTLKLVLAMRGGPINTRRVPTDDPLRKMAEYLDSSRVEVWEKTSCSKQVTFLVYQEGDQLNFFPAVDRGDGTLTPLSDSSKKIDFHLHVLRRKGEHRMSGGSMYNSDTDEDEETEPSSSGQQIIENSITMNKMKLLKAKMKNMNLSKKPKKAVKIKPHPPVAPRPSSGSTAPSRHRLLRVLPNIGQSCSPAFGNAYPPEISRNGISSLATQLSAERYISSITGEFLKEDNSWENNTLSHFSSNVKLPPQIPHLELGNDQELADSVLHLGSSLPRQTKHFLGNLPSSNGNIVLPSEECVTEQSLLPKVGSLASFAEGNADEQSSGLEGACKVNLELLLTNADKGLKAPEQHLKHVAGVLNGESVETSVLNYRELSPHKNRLLSPLRCSAPMSLHNSLVKPERQSKCFEFGKLQPSSSQSLDVQNITDSSFSRTTCFQGVKVDSLGKRSDVISKVEARDITEMTNKASKEPVGCVNNISFLASLAGSTSRNRLQSTRGAGRLQNSGTGLSTNLQHFQEENFRKSSPQLEHTGVFLSTHGVGMNGNNAAAGKSVGECTTHHLPPVKAPLQTKKKTTNHCFLCGKKTGLASSYECRQVGELEKLRCFLCDNPAWGLCKIKYLNCLFITSLR

SEQ ID NO: 911719 - protein, 249 aa, Homo sapiens
MDNRKEPPFFNDDNMGPFYYRLHFCDTMELFIETLTGTCFELRVSPFETVISVKAKIRRLEGIPICRQHLIWNNMELENDYCLNDYNISEGCTLKLVLAMRGGPINTRRVPTDDPLRKMAEYLDSSRVEVWEKTSCSKQVTFLVYQEGDQLNFFPAVDRGDGTLTPLSDSSKKIDFHLHVLRRKGEHRMSGGSMYNSDTDEDEETEPSSSGQQIIENSITMNKMKLLKAKMKNMNLSKKENVLLITSHL

SEQ ID NO: 911720 - protein, 652 aa, Homo sapiens
MDNRKEPPFFNDDNMGPFYYRLHFCDTMELFIETLTGTCFELRVSPFETVISVKAKIRRLEGIPICRQHLIWNNMELENDYCLNDYNISEGCTLKLVLAMRGGPINTRRVPTDDPLRKMAEYLDSSRVEVWEKTSCSKQVTFLVYQEGDQLNFFPAVDRGDGTLTPLSDSSKKIDFHLHVLRRKGEHRMSGGSMYNSDTDEDEETEPSSSGQQIIENSITMNKMKLLKAKMKNMNLSKKPKKAVKIKPHPPVAPRPSSGSTAPSRHRLLRVLPNIGQSCSPAFGNAYPPEISRNGISSLATQLSAERYISSITGEFLKEDNSWENNTLSHFSSNVKLPPQIPHLELGNDQELADSVLHLGSSLPRQTKHFLGNLPSSNGNIVLPSEECVTEQSLLPKVGSLASFAEGNADEQSSGLEGACKVNLELLLTNADKGLKAPEQHLKHVAGVLNGESVETSVLNYRELSPHKNRLLSPLRCSAPMSLHNSLVKPERQSKCFEFGKLQPSSSQSLDVQNITDSSFSRTTCFQGVKVDSLGKRSDVISKVEARDITEMTNKASKEPVGCVNNISFLASLAGSTSRNRLQSTRGAGRLQNSGTGLSTNLQHFQEENFRKSSPQLEHTGVFLVSIFLSTCSSSYPCSDSTYLKFGFCLHK

SEQ ID NO: 911721 - protein, 132 aa, Homo sapiens
MAEYLDSSRVEVWEKTSCSKQVTFLVYQEGDQLNFFPAVDRGDGTLTPLSDSSKKIDFHLHVLRRKGEHRMSGGSMYNSDTDEDEETEPSSSGQQIIENSITMNKMKLLKAKMKNMNLSKKVKLLAFDQAYL

SEQ ID NO: 911722 - protein, 217 aa, Homo sapiens
MARLTKRRQADTKAIQHLWAAIEIIRNQKQIANIDRITKYMSRVHGMHPKETTRQLSLAVKDGLIVETLTVGCKGSKAGIEQEGYWLPGDEIDWETENHDWYCFECHLPGEVLICDLCFRVYHSKCLSDEFRLRDSSSPWQCPVCRSIKKKNTNKQEMGTYLRFIVSRMKERAIDLNKKGKDNKHPMYRRLVHSAVDVPTIQEVKSVSFISTSSTFS

SEQ ID NO: 911723 - protein, 104 aa, Homo sapiens
ALSTCRRASEPADKTAGEAELASGRQGGRPGCEPLSPAALPPPAVVGPEWRKAGVARALGAGLPGRVLSPPLALRPDAGRCCPGTGAAGRLCPGHTLWRLFLWA

SEQ ID NO: 911724 - protein, 602 aa, Homo sapiens; identical to SEQ ID NO: 911712

SEQ ID NO: 911725 - protein, 548 aa, Homo sapiens
MARLTKRRQADTKAIQHLWAAIEIIRNQKQIANIDRITKYMSRVHGMHPKETTRQLSLAVKDGLIVETLTVGCKGSKAGIEQEGYWLPGDEISIKKKNTNKQEMGTYLRFIVSRMKERAIDLNKKGKDNKHPMYRRLVHSAVDVPTIQEKVNEGKYRSYEEFKADAQLLLHNTVIFYGADSEQADIARMLYKDTCHELDELQLCKNCFYLSNARPDNWFCYPCIPNHELVWAKMKGFGFWPAKVMQKEDNQVDVRFFGHHHQRAWIPSENIQDITVNIHRLHVKRSMGWKKACDELELHQRFLREGRFWKSKNEDRGEEEAESSISSTSNEQLKVTQEPRAKKGRRNQSVEPKKEEPEPETEAVSSSQEIPTMPQPIEKVSVSTQTKKLSASSPRMLHRSTQTTNDGVCQSMCHDKYTKIFNDFKDRMKSDHKRETERVVREALEKLRSEMEEEKRQAVNKAVANMQGEMDRKCKQVKEKCKEEFVEEIKKLATQHKQLISQTKKKQWCYNCEEEAMYHCCWNTSYCSIKCQQEHWHAEHKRTCRRKR

SEQ ID NO: 911726 - protein, 585 aa, Homo sapiens; identical to SEQ ID NO: 911711

SEQ ID NO: 911727 - protein, 568 aa, Homo sapiens
MARLTKRRQADTKAIQHLWAAIEIIRNQKQIANIDRITKYMSRVHGMHPKETTRQLSLAVKDGLIVETLTVGCKGSKAGIEQEGYWLPGDEIDWETENHDWYCFECHLPGEVLICDLCFRVYHSKCLSDEFRLRDSSSPWQCPVCRSIKKKNTNKQEMGTYLRFIVSRMKERAIDLNKKGKDNKHPMYRRLVHSAVDVPTIQEKVNEGKYRSYEEFKADAQLLLHNTVIFYGADSEQADIARMLYKDTCHELDELQLCKNCFYLSNARPDNWFCYPCIPNHELVWAKMKGFGFWPAKVMQKEDNQVDVRFFGHHHQRAWIPSENIQDITVNIHRLHVKRSMGWKKACDELELHQRFLREGRFWKSKNEDRGEEEAESSISSTSNEQLKVTQEPRAKKGRRNQSVEPKKEEPEPETEAVSSSQEIPTMPQPIEKVSVSTQTKKLSASSPRMLHRSTQTTNDGVCQSMCHDKYTKIFNDFKDRMKSDHKRETERVVREALEKLRSEMEEEKRQAVNKAVANMQGEMDRKCKQVKEKCKEEFVEEIKKLATQHKQLISQTKKKQWVNTSLF

SEQ ID NO: 911728 - protein, 634 aa, Homo sapiens
MDNRKEPPFFNDDNMGPFYYRLHFCDTMELFIETLTGTCFELRVSPFETVISVKAKIRRLEGIPICRQHLIWNNMELENDYCLNDYNISEGCTLKLVLAMRGGPINTRRVPTDDPLRKMAEYLDSSRVEVWEKTSCSKQVTFLVYQEGDQLNFFPAVDRGDGTLTPLSDSSKKIDFHLHVLRRKGEHRMSGGSMYNSDTDEDEETEPSSSGQQIIENSITMNKMKLLKAKMKNMNLSKKPKKAVKIKPHPPVAPRPSSGSTAPSRHRLLRVLPNIGQSCSPAFGNAYPPEISRNGISSLATQLSAERYISSITGEFLKEDNSWENNTLSHFSSNVKLPPQIPHLELGNDQELADSVLHLGSSLPRQTKHFLGNLPSSNGNIVLPSEECVTEQSLLPKVGSLASFAEGNADEQSSGLEGACKVNLELLLTNADKGLKAPEQHLKHVAGVLNGESVETSVLNYRELSPHKNRLLSPLRCSAPMSLHNSLVKPERQSKCFEFGKLQPSSSQSLDVQNITDSSFSRTTCFQGVKVDSLGKRSDVISKVEARDITEMTNKASKEPVGCVNNISFLASLAGSTSRNRLQSTRGAGRLQNSGTGLSTNLQHFQEENFRKSSPQLEHTGVFLENVLLITSHL

SEQ ID NO: 911729 - protein, 761 aa, Homo sapiens
MDNRKEPPFFNDDNMGPFYYRLHFCDTMELFIETLTGTCFELRVSPFETVISVKAKIRRLEDPGDPTEVSGWPSPVTTSAHSVMTLEAFVCPKRFGIPICRQHLIWNNMELENDYCLNDYNISEGCTLKLVLAMRGGPINTRRVPTDDPLRKMAEYLDSSRVEVWEKTSCSKQVTFLVYQEGDQLNFFPAVDRGDGTLTPLSDSSKKIDFHLHVLRRKGEHRMSGGSMYNSDTDEDEETEPSSSGQQIIENSITMNKMKLLKAKMKNMNLSKKPKKAVKIKPHPPVAPRPSSGSTAPSRHRLLRVLPNIGQSCSPAFGNAYPPEISRNGISSLATQLSAERYISSITGEFLKEDNSWENNTLSHFSSNVKLPPQIPHLELGNDQELADSVLHLGSSLPRQTKHFLGNLPSSNGNIVLPSEECVTEQSLLPKVGSLASFAEGNADEQSSGLEGACKVNLELLLTNADKGLKAPEQHLKHVAGVLNGESVETSVLNYRELSPHKNRLLSPLRCSAPMSLHNSLVKPERQSKCFEFGKLQPSSSQSLDVQNITDSSFSRTTCFQGVKVDSLGKRSDVISKVEARDITEMTNKASKEPVGCVNNISFLASLAGSTSRNRLQSTRGAGRLQNSGTGLSTNLQHFQEENFRKSSPQLEHTGVFLSTHGVGMNGNNAAAGKSVGECTTHHLPPVKAPLQTKKKTTNHCFLCGKKTGLASSYECRCGNNFCASHRYAETHGCTYDYKSAGRRYLHEANPVVNAPKLPKI

SEQ ID NO: 911730 - protein, 813 aa, Homo sapiens
IGRWCHKGAGRGGSGALSASAFREVARRVVGPCRPVGGRASQRTRLRVQNSKHEQQYILPIFKPGLPRTGIQLPATYFRRTRKVKVMDNRKEPPFFNDDNMGPFYYRLHFCDTMELFIETLTGTCFELRVSPFETVISVKAKIRRLEGIPICRQHLIWNNMELENDYCLNDYNISEGCTLKLVLAMRGGPINTRRVPTDDPLRKMAEYLDSSRVEVWEKTSCSKQVTFLVYQEGDQLNFFPAVDRGDGTLTPLSDSSKKIDFHLHVLRRKGEHRMSGGSMYNSDTDEDEETEPSSSGQQIIENSITMNKMKLLKAKMKNMNLSKKPKKAVKIKPHPPVAPRPSSGSTAPSRHRLLRVLPNIGQSCSPAFGNAYPPEISRNGISSLATQLSAERYISSITGEFLKEDNSWENNTLSHFSSNVKLPPQIPHLELGNDQELADSVLHLGSSLPRQTKHFLGNLPSSNGNIVLPSEECVTEQSLLPKVGSLASFAEGNADEQSSGLEGACKVNLELLLTNADKGLKAPEQHLKHVAGVLNGESVETSVLNYRELSPHKNRLLSPLRCSAPMSLHNSLVKPERQSKCFEFGKLQPSSSQSLDVQNITDSSFSRTTCFQGVKVDSLGKRSDVISKVEARDITEMTNKASKEPVGCVNNISFLASLAGSTSRNRLQSTRGAGRLQNSGTGLSTNLQHFQEENFRKSSPQLEHTGVFLSTHGVGMNGNNAAAGKSVGECTTHHLPPVKAPLQTKKKTTNHCFLCGKKTGLASSYECRCGNNFCASHRYAETHGCTYDYKSAGRRYLHEANPVVNAPKLPKI

SEQ ID NO: 911731 - protein, 727 aa, Homo sapiens; identical to SEQ ID NO: 911714

SEQ ID NO: 911732 - protein, 250 aa, Homo sapiens
MDNRKEPPFFNDDNMGPFYYRLHFCDTMELFIETLTGTCFELRVSPFETVISVKAKIRRLEGIPICRQHLIWNNMELENDYCLNDYNISEGCTLKLVLAMRGGPINTRRVPTDDPLRKMAEYLDSSRVEVWEKTSCSKQVTFLVYQEGDQLNFFPAVDRGDGTLTPLSDSSKKIDFHLHVLRRKGEHRMSGGSMYNSDTDEDEETEPSSSGQQIIENSITMNKMKLLKAKMKNMNLSKKVKLLAFDQAYL

SEQ ID NO: 911733 - protein, 1884 aa, Homo sapiens
GCLCCSSEQLQELPSRELQDAFPVPLAQLPQQTTEKTVTMGDVKLVASSHISKTSLSVDPSRVDSMPLTEAPAFILPPRNLCIKEGATAKFEGRVRGYPEPQVTWHRNGQPITSGGRFLLDCGIRGTFSLVIHAVHEEDRGKYTCEATNGSGARQVTVELTVEGSFAKQLGQPVVSKTLGDRFSASAVETRPSIWGECPPKFATKLGRVVVKEGQMGRFSCKITGRPQPQVTWLKGNVPLQPSARVSVSEKNGMQVLEIHGVNQDDVGVYTCLVVNGSGKASMSAELSIQGLDSANRSFVRETKATNSDVRKEVTNVISKESKLDSLEAAAKSKNCSSPQRGGSPPWAANSQPQPPRESKLESCKDSPRTAPQTPVLQKTSSSITLQAARVQPEPRAPGLGVLSPSGEERKRPAPPRPATFPTRQPGLGSQDVVSKAANRRIPMEGQRDSAFPKFESKPQSQEVKENQTVKFRCEGLAVMEVAPSFSSVLKDCAVIEGQDFVLQCSVRGTPVPRITWLLNGQPIQYARSTCEAGVAELHIQDALPEDHGTYTCLAENALGQVSCSAWVTVHEKKSSRKSEYLLPVAPSKPTAPIFLQGLSDLKVMDGSQVTMTVQVSGNPPPEVIWLHNGNEIQESEDFHFEQRGTQHSLWIQEVFPEDTGTYTCEAWNSAGEVRTQAVLTVQEPHDGTQPWFISKPRSVTASLGQSVLISCAIAGDPFPTVHWLRDGKALCKDTGHFEVLQNEDVFTLVLKKVQPWHAGQYEILLKNRVGECSCQVSLMLQNSSARALPRGREPASCEDLCGGGVGADGGGSDRYGSLRPGWPARGQGWLEEEDGEDVRGVLKRRVETRQHTEEAIRQQEVEQLDFRDLLGKKVSTKTLSEDDLKEIPAEQMDFRANLQRQVKPKTVSEEERKVHSPQQVDFRSVLAKKGTSKTPVPEKVPPPKPATPDFRSVLGGKKKLPAENGSSSAETLNAKAVESSKPLSNAQPSGPLKPVGNAKPAETLKPMGNAKPAETLKPMGNAKPDENLKSASKEELKKDVKNDVNCKRGHAGTTDNEKRSESQGTAPAFKQKLQDVHVAEGKKLLLQCQVSSDPPATIIWTLNGKTLKTTKFIILSQEGSLCSVSIEKALPEDRGLYKCVAKNDAGQAECSCQVTVDDAPASENTKAPEMKSRRPKSSLPPVLGTESDATVKKKPAPKTPPKAAMPPQIIQFPEDQKVRAGESVELFGKVTGTQPITCTWMKFRKQIQESEHMKVENSENGSKLTILAARQEHCGCYTLLVENKLGSRQAQVNLTVVDKPDPPAGTPCASDIRSSSLTLSWYGSSYDGGSAVQSYSIEIWDSANKTWKELATCRSTSFNVQDLLPDHEYKFRVRAINVYGTSEPSQESELTTVGEKPEEPKDEVEVSDDDEKEPEVDYRTVTINTEQKVSDFYDIEERLGSGKFGQVFRLVEKKTRKVWAGKFFKAYSAKEKENIRQEISIMNCLHHPKLVQCVDAFEEKANIVMVLEIVSGGELFERIIDEDFELTERECIKYMRQISEGVEYIHKQGIVHLDLKPENIMCVNKTGTRIKLIDFGLARRLENAGSLKVLFGTPEFVAPEVINYEPIGYATDMWSIGVICYILVSGLSPFMGDNDNETLANVTSATWDFDDEAFDEISDDAKDFISNLLKKDMKNRLDCTQCLQHPWLMKDTKNMEAKKLSKDRMKKYMARRKWQKTGNAVRAIGRLSSMAMISGLSGRKSSTGSPTSPLNAEKLESEEDVSQAFLEAVAEEKPHVKPYFSKTIRDLEVVEGSAARFDCKIEGYPDPEVVWFKDDQSIRESRHFQIDYDEDGNCSLIISDVCGDDDAKYTCKAVNSLGEATCTAELIVETMEEGEGEGEEEEE

SEQ ID NO: 911734 - protein, 1833 aa, Homo sapiens
GCLCCSSEQLQELPSRELQDAFPVPLAQLPQQTTEKTVTMGDVKLVASSHISKTSLSVDPSRVDSMPLTEAPAFILPPRNLCIKEGATAKFEGRVRGYPEPQVTWHRNGQPITSGGRFLLDCGIRGTFSLVIHAVHEEDRGKYTCEATNGSGARQVTVELTVEGSFAKQLGQPVVSKTLGDRFSASAVETRPSIWGECPPKFATKLGRVVVKEGQMGRFSCKITGRPQPQVTWLKGNVPLQPSARVSVSEKNGMQVLEIHGVNQDDVGVYTCLVVNGSGKASMSAELSIQGLDSANRSFVRETKATNSDVRKEVTNVISKESKLDSLEAAAKSKNCSSPQRGGSPPWAANSQPQPPRESKLESCKDSPRTAPQTPVLQKTSSSITLQAARVQPEPRAPGLGVLSPSGEERKRPAPPRPATFPTRQPGLGSQDVVSKAANRRIPMEGQRDSAFPKFESKPQSQEVKENQTVKFRCEGLAVMEVAPSFSSVLKDCAVIEGQDFVLQCSVRGTPVPRITWLLNGQPIQYARSTCEAGVAELHIQDALPEDHGTYTCLAENALGQVSCSAWVTVHEKKSSRKSEYLLPVAPSKPTAPIFLQGLSDLKVMDGSQVTMTVQVSGNPPPEVIWLHNGNEIQESEDFHFEQRGTQHSLWIQEVFPEDTGTYTCEAWNSAGEVRTQAVLTVQEPHDGTQPWFISKPRSVTASLGQSVLISCAIAGDPFPTVHWLRDGKALCKDTGHFEVLQNEDVFTLVLKKVQPWHAGQYEILLKNRVGECSCQVSLMLQNSSARALPRGREPASCEDLCGGGVGADGGGSDRYGSLRPGWPARGQGWLEEEDGEDVRGVLKRRVETRQHTEEAIRQQEVEQLDFRDLLGKKVSTKTLSEDDLKEIPAEQMDFRANLQRQVKPKTVSEEERKVHSPQQVDFRSVLAKKGTSKTPVPEKVPPPKPATPDFRSVLGGKKKLPAENGSSSAETLNAKAVESSKPLSNAQPSGPLKPVGNAKPAETLKPMGNAKPAETLKPMGNAKPDENLKSASKEELKKDVKNDVNCKRGHAGTTDNEKRSESQGTAPAFKQKLQDVHVAEGKKLLLQCQVSSDPPATIIWTLNGKTLKTTKFIILSQEGSLCSVSIEKALPEDRGLYKCVAKNDAGQAECSCQVTVDDAPASENTKAPEMKSRRPKSSLPPVLGTESDATVKKKPAPKTPPKAAMPPQIIQFPEDQKVRAGESVELFGKVTGTQPITCTWMKFRKQIQESEHMKVENSENGSKLTILAARQEHCGCYTLLVENKLGSRQAQVNLTVVDKPDPPAGTPCASDIRSSSLTLSWYGSSYDGGSAVQSYSIEIWDSANKTWKELATCRSTSFNVQDLLPDHEYKFRVRAINVYGTSEPSQESELTTVGEKPEEPKDEVEVSDDDEKEPEVDYRTVTINTEQKVSDFYDIEERLGSGKFGQVFRLVEKKTRKVWAGKFFKAYSAKEKENIRQEISIMNCLHHPKLVQCVDAFEEKANIVMVLEIVSGGELFERIIDEDFELTERECIKYMRQISEGVEYIHKQGIVHLDLKPENIMCVNKTGTRIKLIDFGLARRLENAGSLKVLFGTPEFVAPEVINYEPIGYATDMWSIGVICYILNRLDCTQCLQHPWLMKDTKNMEAKKLSKDRMKKYMARRKWQKTGNAVRAIGRLSSMAMISGLSGRKSSTGSPTSPLNAEKLESEEDVSQAFLEAVAEEKPHVKPYFSKTIRDLEVVEGSAARFDCKIEGYPDPEVVWFKDDQSIRESRHFQIDYDEDGNCSLIISDVCGDDDAKYTCKAVNSLGEATCTAELIVETMEEGEGEGEEEEE

SEQ ID NO: 911735 - protein, 115 aa, Homo sapiens
TLTVLSRARLGSLLWQNLGSQEVLVPGNSCFSGAGLYSLQPLALPSWNQGQRLSPTLVSIFQKTGNAVRAIGRLSSMAMISGLSGRKSSTGSPTSPLNAEKLESEGKEVCPSQLV

SEQ ID NO: 911736 - protein, 75 aa, Homo sapiens
SVPTVDDAPASENTKAPEMKSRRPKSSLPPVLGTESDATVKKKPAPKTPPKAGNWPRHYLGSKKSSTMGVLPLPC

SEQ ID NO: 911737 - protein, 1676 aa, Homo sapiens
MIILFSPLLTHPTPTLTTNRSFVRETKATNSDVRKEVTNVISKESKLDSLEAAAKSKNCSSPQRGGSPPWAANSQPQPPRESKLESCKDSPRTAPQTPVLQKTSSSITLQAARVQPEPRAPGLGVLSPSGEERKRPAPPRPATFPTRQPGLGSQDVVSKAANRRIPMEGQRDSAFPKFESKPQSQEVKENQTVKFRCEVSGIPKPEVAWFLEGTPVRRQEGSIEVYEDAGSHYLCLLKARTRDSGTYSCTASNAQGQVSCSWTLQVERLAVMEVAPSFSSVLKDCAVIEGQDFVLQCSVRGTPVPRITWLLNGQPIQYARSTCEAGVAELHIQDALPEDHGTYTCLAENALGQVSCSAWVTVHEKKSSRKSEYLLPVAPSKPTAPIFLQGLSDLKVMDGSQVTMTVQVSGNPPPEVIWLHNGNEIQESEDFHFEQRGTQHSLWIQEVFPEDTGTYTCEAWNSAGEVRTQAVLTVQEPHDGTQPWFISKPRSVTASLGQSVLISCAIAGDPFPTVHWLRDGKALCKDTGHFEVLQNEDVFTLVLKKVQPWHAGQYEILLKNRVGECSCQVSLMLQNSSARALPRGREPASCEDLCGGGVGADGGGSDRYGSLRPGWPARGQGWLEEEDGEDVRGVLKRRVETRQHTEEAIRQQEVEQLDFRDLLGKKVSTKTLSEDDLKEIPAEQMDFRANLQRQVKPKTVSEEERKVHSPQQVDFRSVLAKKGTSKTPVPEKVPPPKPATPDFRSVLGGKKKLPAENGSSSAETLNAKAVESSKPLSNAQPSGPLKPVGNAKPAETLKPMGNAKPAETLKPMGNAKPDENLKSASKEELKKDVKNDVNCKRGHAGTTDNEKRSESQGTAPAFKQKLQDVHVAEGKKLLLQCQVSSDPPATIIWTLNGKTLKTTKFIILSQEGSLCSVSIEKALPEDRGLYKCVAKNDAGQAECSCQVTVDDAPASENTKAPEMKSRRPKSSLPPVLGTESDATVKKKPAPKTPPKAAMPPQIIQFPEDQKVRAGESVELFGKVTGTQPITCTWMKFRKQIQESEHMKVENSENGSKLTILAARQEHCGCYTLLVENKLGSRQAQVNLTVVDKPDPPAGTPCASDIRSSSLTLSWYGSSYDGGSAVQSYSIEIWDSANKTWKELATCRSTSFNVQDLLPDHEYKFRVRAINVYGTSEPSQESELTTVGEKPEEPKDEVEVSDDDEKEPEVDYRTVTINTEQKVSDFYDIEERLGSGKFGQVFRLVEKKTRKVWAGKFFKAYSAKEKENIRQEISIMNCLHHPKLVQCVDAFEEKANIVMVLEIVSGGELFERIIDEDFELTERECIKYMRQISEGVEYIHKQGIVHLDLKPENIMCVNKTGTRIKLIDFGLARRLENAGSLKVLFGTPEFVAPEVINYEPIGYATDMWSIGVICYILVSGLSPFMGDNDNETLANVTSATWDFDDEAFDEISDDAKDFISNLLKKDMKNRLDCTQCLQHPWLMKDTKNMEAKKLSKDRMKKYMARRKWQKTGNAVRAIGRLSSMAMISGLSGRKSSTGSPTSPLNAEKLESEEDVSQAFLEAVAEEKPHVKPYFSKTIRDLEVVEGSAARFDCKIEGYPDPEVVWFKDDQSIRESRHFQIDYDEDGNCSLIISDVCGDDDAKYTCKAVNSLGEATCTAELIVETMEEGEGEGEEEEE

SEQ ID NO: 911738 - protein, 1608 aa, Homo sapiens
MIILFSPLLTHPTPTLTTNRSFVRETKATNSDVRKEVTNVISKESKLDSLEAAAKSKNCSSPQRGGSPPWAANSQPQPPRESKLESCKDSPRTAPQTPVLQKTSSSITLQAARVQPEPRAPGLGVLSPSGEERKRPAPPRPATFPTRQPGLGSQDVVSKAANRRIPMEGQRDSAFPKFESKPQSQEVKENQTVKFRCEVSGIPKPEVAWFLEGTPVRRQEGSIEVYEDAGSHYLCLLKARTRDSGTYSCTASNAQGQVSCSWTLQVERLAVMEVAPSFSSVLKDCAVIEGQDFVLQCSVRGTPVPRITWLLNGQPIQYARSTCEAGVAELHIQDALPEDHGTYTCLAENALGQVSCSAWVTVHEKKSSRKSEYLLPVAPSKPTAPIFLQGLSDLKVMDGSQVTMTVQVSGNPPPEVIWLHNGNEIQESEDFHFEQRGTQHSLWIQEVFPEDTGTYTCEAWNSAGEVRTQAVLTVQEPHDGTQPWFISKPRSVTASLGQSVLISCAIAGDPFPTVHWLRDGKALCKDTGHFEVLQNEDVFTLVLKKVQPWHAGQYEILLKNRVGECSCQVSLMLQNSSARALPRGREPASCEDLCGGGVGADGGGSDRYGSLRPGWPARGQGWLEEEDGEDVRGVLKRRVETRQHTEEAIRQQEVEQLDFRDLLGKKVSTKTLSEDDLKEIPAEQMDFRANLQRQVKPKTVSEEERKVHSPQQVDFRSVLAKKGTSKTPVPEKVPPPKPATPDFRSVLGGKKKLPAENGSSSAETLNAKAVESSKPLSNAQPSGPLKPVGNAKPAETLKPMGNAKPAETLKPMGNAKPDENLKSASKEELKKDVKNDVNCKRGHAGTTDNEKRSESQGTAPAFKQKLQDVHVAEGKKLLLQCQVSSDPPATIIWTLNGKTLKTTKFIILSQEGSLCSVSIEKALPEDRGLYKCVAKNDAGQAECSCQVTVDDAPASENTKAPEMKSRRPKSSLPPVLGTESDATVKKKPAPKTPPKAAMPPQIIQFPEDQKVRAGESVELFGKVTGTQPITCTWMKFRKQIQESEHMKVENSENGSKLTILAARQEHCGCYTLLVENKLGSRQAQVNLTVVDKPDPPAGTPCASDIRSSSLTLSWYGSSYDGGSAVQSYSIEIWDSANKTWKELATCRSTSFNVQDLLPDHEYKFRVRAINVYGTSEPSQESELTTVGEKPEEPKDEVEVSDDDEKEPEVDYRTVTINTEQKVSDFYDIEERLGSVSGGELFERIIDEDFELTERECIKYMRQISEGVEYIHKQGIVHLDLKPENIMCVNKTGTRIKLIDFGLARRLENAGSLKVLFGTPEFVAPEVINYEPIGYATDMWSIGVICYILVSGLSPFMGDNDNETLANVTSATWDFDDEAFDEISDDAKDFISNLLKKDMKNRLDCTQCLQHPWLMKDTKNMEAKKLSKDRMKKYMARRKWQKTGNAVRAIGRLSSMAMISGLSGRKSSTGSPTSPLNAEKLESEEDVSQAFLEAVAEEKPHVKPYFSKTIRDLEVVEGSAARFDCKIEGYPDPEVVWFKDDQSIRESRHFQIDYDEDGNCSLIISDVCGDDDAKYTCKAVNSLGEATCTAELIVETMEEGEGEGEEEEE

SEQ ID NO: 911739 - protein, 615 aa, Homo sapiens
DLHVDWKTSKKKRGGLFVEQIIIHGAFRTDKPDPPAGTPCASDIRSSSLTLSWYGSSYDGGSAVQSYSIEIWDSANKTWKELATCRSTSFNVQDLLPDHEYKFRVRAINVYGTSEPSQESELTTVGEKPEEPKDEVEVSDDDEKEPEVDYRTVTINTEQKVSDFYDIEERLGSGKFGQVFRLVEKKTRKVWAGKFFKAYSAKEKENIRQEISIMNCLHHPKLVQCVDAFEEKANIVMVLEIVSGGELFERIIDEDFELTERECIKYMRQISEGVEYIHKQGIVHLDLKPENIMCVNKTGTRIKLIDFGLARRLENAGSLKVLFGTPEFVAPEVINYEPIGYATDMWSIGVICYILVSGLSPFMGDNDNETLANVTSATWDFDDEAFDEISDDAKDFISNLLKKDMKNRLDCTQCLQHPWLMKDTKNMEAKKLSKDRMKKYMARRKWQKTGNAVRAIGRLSSMAMISGLSGRKSSTGSPTSPLNAEKLESEEDVSQAFLEAVAEEKPHVKPYFSKTIRDLEVVEGSAARFDCKIEGYPDPEVVWFKDDQSIRESRHFQIDYDEDGNCSLIISDVCGDDDAKYTCKAVNSLGEATCTAELIVETMEEGEGEGEEEEE

SEQ ID NO: 911740 - protein, 402 aa, Homo sapiens
MNCLHHPKLVQCVDAFEEKANIVMVLEIVSGGELFERIIDEDFELTERECIKYMRQISEGVEYIHKQGIVHLDLKPENIMCVNKTGTRIKLIDFGLARRLENAGSLKVLFGTPEFVAPEVINYEPIGYATDMWSIGVICYILVSGLSPFMGDNDNETLANVTSATWDFDDEAFDEISDDAKDFISNLLKKDMKNRLDCTQCLQHPWLMKDTKNMEAKKLSKDRMKKYMARRKWQKTGNAVRAIGRLSSMAMISGLSGRKSSTGSPTSPLNAEKLESEEDVSQAFLEAVAEEKPHVKPYFSKTIRDLEVVEGSAARFDCKIEGYPDPEVVWFKDDQSIRESRHFQIDYDEDGNCSLIISDVCGDDDAKYTCKAVNSLGEATCTAELIVETMEEGEGEGEEEEE

SEQ ID NO: 911741 - protein, 499 aa, Homo sapiens
EPAPLIRHNGRRETEEPKDEVEVSDDEKEPEVDYRTVTINTEQKVSDFYDIEERLGSGKFGQVFRLVEKKTRKVWAGKFFKAYSAKEKENIRQEISIMNCLHHPKLVQCVDAFEEKANIVMVLEIVSGGELFERIIDEDFELTERECIKYMRQISEGVEYIHKQGIVHLDLKPENIMCVNKTGTRIKLIDFGLARRLENAGSLKVLFGTPEFVAPEVINYEPIGYATDMWSIGVICYILVSGLSPFMGDNDNETLANVTSATWDFDDEAFDEISDDAKDFISNLLKKDMKNRLDCTQCLQHPWLMKDTKNMEAKKLSKDRMKKYMARRKWQKTGNAVRAIGRLSSMAMISGLSGRKSSTGSPTSPLNAEKLESEEDVSQAFLEAVAEEKPHVKPYFSKTIRDLEVVEGSAARFDCKIEGYPDPEVVWFKDDQSIRESRHFQIDYDEDGNCSLIISDVCGDDDAKYTCKAVNSLGEATCTAELIVETMEEGEGEGEEEEE

SEQ ID NO: 911742 - protein, 961 aa, Homo sapiens
MIILFSPLLTHPTPTLTTNRSFVRETKATNSDVRKEVTNVISKESKLDSLEAAAKSKNCSSPQRGGSPPWAANSQPQPPRESKLESCKDSPRTAPQTPVLQKTSSSITLQAARVQPEPRAPGLGVLSPSGEERKRPAPPRPATFPTRQPGLGSQDVVSKAANRRIPMEGQRDSAFPKFESKPQSQEVKENQTVKFRCEVSGIPKPEVAWFLEGTPVRRQEGSIEVYEDAGSHYLCLLKARTRDSGTYSCTASNAQGQVSCSWTLQVERLAVMEVAPSFSSVLKDCAVIEGQDFVLQCSVRGTPVPRITWLLNGQPIQYARSTCEAGVAELHIQDALPEDHGTYTCLAENALGQVSCSAWVTVHEKKSSRKSEYLLPVAPSKPTAPIFLQGLSDLKVMDGSQVTMTVQVSGNPPPEVIWLHNGNEIQESEDFHFEQRGTQHSLWIQEVFPEDTGTYTCEAWNSAGEVRTQAVLTVQEPHDGTQPWFISKPRSVTASLGQSVLISCAIAGDPFPTVHWLRDGKALCKDTGHFEVLQNEDVFTLVLKKVQPWHAGQYEILLKNRVGECSCQVSLMLQNSSARALPRGREPASCEDLCGGGVGADGGGSDRYGSLRPGWPARGQGWLEEEDGEDVRGVLKRRVETRQHTEEAIRQQEVEQLDFRDLLGKKVSTKTLSEDDLKEIPAEQMDFRANLQRQVKPKTVSEEERKVHSPQQVDFRSVLAKKGTSKTPVPEKVPPPKPATPDFRSVLGGKKKLPAENGSSSAETLNAKAVESSKPLSNAQPSGPLKPVGNAKPAETLKPMGNAKPAETLKPMGNAKPDENLKSASKEELKKDVKNDVNCKRGHAGTTDNEKRSESQGTAPAFKQKLQDVHVAEGKKLLLQCQVSSDPPATIIWTLNGKTLKTTKFIILSQEGSLCSVSIEKALPEDRGLYKCVAKNDAGQAECSCQVTVDDFANGSKLGSY

SEQ ID NO: 911743 - protein, 951 aa, Homo sapiens
MIILFSPLLTHPTPTLTTNRSFVRETKATNSDVRKEVTNVISKESKLDSLEAAAKSKNCSSPQRGGSPPWAANSQPQPPRESKLESCKDSPRTAPQTPVLQKTSSSITLQAARVQPEPRAPGLGVLSPSGEERKRPAPPRPATFPTRQPGLGSQDVVSKAANRRIPMEGQRDSAFPKFESKPQSQEVKENQTVKFRCEVSGIPKPEVAWFLEGTPVRRQEGSIEVYEDAGSHYLCLLKARTRDSGTYSCTASNAQGQVSCSWTLQVERLAVMEVAPSFSSVLKDCAVIEGQDFVLQCSVRGTPVPRITWLLNGQPIQYARSTCEAGVAELHIQDALPEDHGTYTCLAENALGQVSCSAWVTVHEKKSSRKSEYLLPVAPSKPTAPIFLQGLSDLKVMDGSQVTMTVQVSGNPPPEVIWLHNGNEIQESEDFHFEQRGTQHSLWIQEVFPEDTGTYTCEAWNSAGEVRTQAVLTVQEPHDGTQPWFISKPRSVTASLGQSVLISCAIAGDPFPTVHWLRDGKALCKDTGHFEVLQNEDVFTLVLKKVQPWHAGQYEILLKNRVGECSCQVSLMLQNSSARALPRGREPASCEDLCGGGVGADGGGSDRYGSLRPGWPARGQGWLEEEDGEDVRGVLKRRVETRQHTEEAIRQQEVEQLDFRDLLGKKVSTKTLSEDDLKEIPAEQMDFRANLQRQVKPKTVSEEERKVHSPQQVDFRSVLAKKGTSKTPVPEKVPPPKPATPDFRSVLGGKKKLPAENGSSSAETLNAKAVESSKPLSNAQPSGPLKPVGNAKPAETLKPMGNAKPAETLKPMGNAKPDENLKSASKEELKKDVKNDVNCKRGHAGTTDNEKRSESQGTAPAFKQKLQDVHVAEGKKLLLQCQVSSDPPATIIWTLNGKTLKTTKFIILSQEGSLCSVSIEKALPEDRGLYKCVAKNDAGQAECSCQVTVDG

SEQ ID NO: 911744 - protein, 76 aa, Homo sapiens
MASNVIRMPETLLPRSLSPCPPSAMPPQIIQFPEDQKVRAGESVELFGKVTGTQPITCTWMKFRKQVSDGMGWALG

SEQ ID NO: 911745 - protein, 1953 aa, Homo sapiens
GCLCCSSEQLQELPSRELQDAFPVPLAQLPQQTTEKTVTMGDVKLVASSHISKTSLSVDPSRVDSMPLTEAPAFILPPRNLCIKEGATAKFEGRVRGYPEPQVTWHRNGQPITSGGRFLLDCGIRGTFSLVIHAVHEEDRGKYTCEATNGSGARQVTVELTVEGSFAKQLGQPVVSKTLGDRFSASAVETRPSIWGECPPKFATKLGRVVVKEGQMGRFSCKITGRPQPQVTWLKGNVPLQPSARVSVSEKNGMQVLEIHGVNQDDVGVYTCLVVNGSGKASMSAELSIQGLDSANRSFVRETKATNSDVRKEVTNVISKESKLDSLEAAAKSKNCSSPQRGGSPPWAANSQPQPPRESKLESCKDSPRTAPQTPVLQKTSSSITLQAARVQPEPRAPGLGVLSPSGEERKRPAPPRPATFPTRQPGLGSQDVVSKAANRRIPMEGQRDSAFPKFESKPQSQEVKENQTVKFRCEVSGIPKPEVAWFLEGTPVRRQEGSIEVYEDAGSHYLCLLKARTRDSGTYSCTASNAQGQVSCSWTLQVERLAVMEVAPSFSSVLKDCAVIEGQDFVLQCSVRGTPVPRITWLLNGQPIQYARSTCEAGVAELHIQDALPEDHGTYTCLAENALGQVSCSAWVTVHEKKSSRKSEYLLPVAPSKPTAPIFLQGLSDLKVMDGSQVTMTVQVSGNPPPEVIWLHNGNEIQESEDFHFEQRGTQHSLWIQEVFPEDTGTYTCEAWNSAGEVRTQAVLTVQEPHDGTQPWFISKPRSVTASLGQSVLISCAIAGDPFPTVHWLRDGKALCKDTGHFEVLQNEDVFTLVLKKVQPWHAGQYEILLKNRVGECSCQVSLMLQNSSARALPRGREPASCEDLCGGGVGADGGGSDRYGSLRPGWPARGQGWLEEEDGEDVRGVLKRRVETRQHTEEAIRQQEVEQLDFRDLLGKKVSTKTLSEDDLKEIPAEQMDFRANLQRQVKPKTVSEEERKVHSPQQVDFRSVLAKKGTSKTPVPEKVPPPKPATPDFRSVLGGKKKLPAENGSSSAETLNAKAVESSKPLSNAQPSGPLKPVGNAKPAETLKPMGNAKPAETLKPMGNAKPDENLKSASKEELKKDVKNDVNCKRGHAGTTDNEKRSESQGTAPAFKQKLQDVHVAEGKKLLLQCQVSSDPPATIIWTLNGKTLKTTKFIILSQEGSLCSVSIEKALPEDRGLYKCVAKNDAGQAECSCQVTVDDAPASENTKAPEMKSRRPKSSLPPVLGTESDATVKKKPAPKTPPKAAMPPQIIQFPEDQKVRAGESVELFGKVTGTQPITCTWMKFRKQIQESEHMKVENSENGSKLTILAARQEHCGCYTLLVENKLGSRQAQVNLTVVDKPDPPAGTPCASDIRSSSLTLSWYGSSYDGGSAVQSYSIEIWDSANKTWKELATCRSTSFNVQDLLPDHEYKFRVRAINVYGTSEPSQESELTTVGEKPEEPKDEVEVSDDDEKEPEVDYRTVTINTEQKVSDFYDIEERLGSGKFGQVFRLVEKKTRKVWAGKFFKAYSAKEKENIRQEISIMNCLHHPKLVQCVDAFEEKANIVMVLEIVSGGELFERIIDEDFELTERECIKYMRQISEGVEYIHKQGIVHLDLKPENIMCVNKTGTRIKLIDFGLARRLENAGSLKVLFGTPEFVAPEVINYEPIGYATDMWSIGVICYILVSGLSPFMGDNDNETLANVTSATWDFDDEAFDEISDDAKDFISNLLKKDMKNRLDCTQCLQHPWLMKDTKNMEAKKLSKDRMKKYMARRKWQKTGNAVRAIGRLSSMAMISGLSGRKSSTGSPTSPLNAEKLESEEDVSQAFLEAVAEEKPHVKPYFSKTIRDLEVVEGSAARFDCKIEGYPDPEVVWFKDDQSIRESRHFQIDYDEDGNCSLIISDVCGDDDAKYTCKAVNSLGEATCTAELIVETMEEGEGEGEEEEE

SEQ ID NO: 911746 - protein, 1902 aa, Homo sapiens
GCLCCSSEQLQELPSRELQDAFPVPLAQLPQQTTEKTVTMGDVKLVASSHISKTSLSVDPSRVDSMPLTEAPAFILPPRNLCIKEGATAKFEGRVRGYPEPQVTWHRNGQPITSGGRFLLDCGIRGTFSLVIHAVHEEDRGKYTCEATNGSGARQVTVELTVEGSFAKQLGQPVVSKTLGDRFSASAVETRPSIWGECPPKFATKLGRVVVKEGQMGRFSCKITGRPQPQVTWLKGNVPLQPSARVSVSEKNGMQVLEIHGVNQDDVGVYTCLVVNGSGKASMSAELSIQGLDSANRSFVRETKATNSDVRKEVTNVISKESKLDSLEAAAKSKNCSSPQRGGSPPWAANSQPQPPRESKLESCKDSPRTAPQTPVLQKTSSSITLQAARVQPEPRAPGLGVLSPSGEERKRPAPPRPATFPTRQPGLGSQDVVSKAANRRIPMEGQRDSAFPKFESKPQSQEVKENQTVKFRCEVSGIPKPEVAWFLEGTPVRRQEGSIEVYEDAGSHYLCLLKARTRDSGTYSCTASNAQGQVSCSWTLQVERLAVMEVAPSFSSVLKDCAVIEGQDFVLQCSVRGTPVPRITWLLNGQPIQYARSTCEAGVAELHIQDALPEDHGTYTCLAENALGQVSCSAWVTVHEKKSSRKSEYLLPVAPSKPTAPIFLQGLSDLKVMDGSQVTMTVQVSGNPPPEVIWLHNGNEIQESEDFHFEQRGTQHSLWIQEVFPEDTGTYTCEAWNSAGEVRTQAVLTVQEPHDGTQPWFISKPRSVTASLGQSVLISCAIAGDPFPTVHWLRDGKALCKDTGHFEVLQNEDVFTLVLKKVQPWHAGQYEILLKNRVGECSCQVSLMLQNSSARALPRGREPASCEDLCGGGVGADGGGSDRYGSLRPGWPARGQGWLEEEDGEDVRGVLKRRVETRQHTEEAIRQQEVEQLDFRDLLGKKVSTKTLSEDDLKEIPAEQMDFRANLQRQVKPKTVSEEERKVHSPQQVDFRSVLAKKGTSKTPVPEKVPPPKPATPDFRSVLGGKKKLPAENGSSSAETLNAKAVESSKPLSNAQPSGPLKPVGNAKPAETLKPMGNAKPAETLKPMGNAKPDENLKSASKEELKKDVKNDVNCKRGHAGTTDNEKRSESQGTAPAFKQKLQDVHVAEGKKLLLQCQVSSDPPATIIWTLNGKTLKTTKFIILSQEGSLCSVSIEKALPEDRGLYKCVAKNDAGQAECSCQVTVDDAPASENTKAPEMKSRRPKSSLPPVLGTESDATVKKKPAPKTPPKAAMPPQIIQFPEDQKVRAGESVELFGKVTGTQPITCTWMKFRKQIQESEHMKVENSENGSKLTILAARQEHCGCYTLLVENKLGSRQAQVNLTVVDKPDPPAGTPCASDIRSSSLTLSWYGSSYDGGSAVQSYSIEIWDSANKTWKELATCRSTSFNVQDLLPDHEYKFRVRAINVYGTSEPSQESELTTVGEKPEEPKDEVEVSDDDEKEPEVDYRTVTINTEQKVSDFYDIEERLGSGKFGQVFRLVEKKTRKVWAGKFFKAYSAKEKENIRQEISIMNCLHHPKLVQCVDAFEEKANIVMVLEIVSGGELFERIIDEDFELTERECIKYMRQISEGVEYIHKQGIVHLDLKPENIMCVNKTGTRIKLIDFGLARRLENAGSLKVLFGTPEFVAPEVINYEPIGYATDMWSIGVICYILNRLDCTQCLQHPWLMKDTKNMEAKKLSKDRMKKYMARRKWQKTGNAVRAIGRLSSMAMISGLSGRKSSTGSPTSPLNAEKLESEEDVSQAFLEAVAEEKPHVKPYFSKTIRDLEVVEGSAARFDCKIEGYPDPEVVWFKDDQSIRESRHFQIDYDEDGNCSLIISDVCGDDDAKYTCKAVNSLGEATCTAELIVETMEEGEGEGEEEEE

SEQ ID NO: 911747 - protein, 350 aa, Homo sapiens
MIILFSPLLTHPTPTLTTNRSFVRETKATNSDVRKEVTNVISKESKLDSLEAAAKSKNCSSPQRGGSPPWAANSQPQPPRESKLESCKDSPRTAPQTPVLQKTSSSITLQAARVQPEPRAPGLGVLSPSGEERKRPAPPRPATFPTRQPGLGSQDVVSKAANRRIPMEGQRDSAFPKFESKPQSQEVKENQTVKFRCEGLAVMEVAPSFSSVLKDCAVIEGQDFVLQCSVRGTPVPRITWLLNGQPIQYARSTCEAGVAELHIQDALPEDHGTYTCLAENALGQVSCSAWVTVHEKKSSRKSEYLLPVAPSKPTAPIFLQGLSDLKVMDGSQVTMTVQVSGLSLQLSLGD

SEQ ID NO: 911748 - protein, 81 aa, Homo sapiens
VKAGPGESPWRRKAIPTSLWGNQKTQLRREAAPEGPSAGSLCSVSIEKALPEDRGLYKCVAKNDAGQAECSCQVTVDDAPA

SEQ ID NO: 911749 - protein, 915 aa, Homo sapiens
MSRLASGFQGSHQPLSNAQPSGPLKPVGNAKPAETLKPMGNAKPAETLKPMGNAKPDENLKSASKEELKKDVKNDVNCKRGHAGTTDNEKRSESQGTAPAFKQKLQDVHVAEGKKLLLQCQVSSDPPATIIWTLNGKTLKTTKFIILSQEGSLCSVSIEKALPEDRGLYKCVAKNDAGQAECSCQVTVDDAPASENTKAPEMKSRRPKSSLPPVLGTESDATVKKKPAPKTPPKAAMPPQIIQFPEDQKVRAGESVELFGKVTGTQPITCTWMKFRKQIQESEHMKVENSENGSKLTILAARQEHCGCYTLLVENKLGSRQAQVNLTVVDKPDPPAGTPCASDIRSSSLTLSWYGSSYDGGSAVQSYSIEIWDSANKTWKELATCRSTSFNVQDLLPDHEYKFRVRAINVYGTSEPSQESELTTVGEKPEEPKDEVEVSDDDEKEPEVDYRTVTINTEQKVSDFYDIEERLGSGKFGQVFRLVEKKTRKVWAGKFFKAYSAKEKENIRQEISIMNCLHHPKLVQCVDAFEEKANIVMVLEIVSGGELFERIIDEDFELTERECIKYMRQISEGVEYIHKQGIVHLDLKPENIMCVNKTGTRIKLIDFGLARRLENAGSLKVLFGTPEFVAPEVINYEPIGYATDMWSIGVICYILVSGLSPFMGDNDNETLANVTSATWDFDDEAFDEISDDAKDFISNLLKKDMKNRLDCTQCLQHPWLMKDTKNMEAKKLSKDRMKKYMARRKWQKTGNAVRAIGRLSSMAMISGLSGRKSSTGSPTSPLNAEKLESEEDVSQAFLEAVAEEKPHVKPYFSKTIRDLEVVEGSAARFDCKIEGYPDPEVVWFKDDQSIRESRHFQIDYDEDGNCSLIISDVCGDDDAKYTCKAVNSLGEATCTAELIVETMEEGEGEGEEEEE

SEQ ID NO: 911750 - protein, 737 aa, Homo sapiens
ERGPCGRLPRGDAPASENTKAPEMKSRRPKSSLPPVLGTESDATVKKKPAPKTPPKAAMPPQIIQFPEDQKVRAGESVELFGKVTGTQPITCTWMKFRKQIQESEHMKVENSENGSKLTILAARQEHCGCYTLLVENKLGSRQAQVNLTVVDKPDPPAGTPCASDIRSSSLTLSWYGSSYDGGSAVQSYSIEIWDSANKTWKELATCRSTSFNVQDLLPDHEYKFRVRAINVYGTSEPSQESELTTVGEKPEEPKDEVEVSDDDEKEPEVDYRTVTINTEQKVSDFYDIEERLGSGKFGQVFRLVEKKTRKVWAGKFFKAYSAKEKENIRQEISIMNCLHHPKLVQCVDAFEEKANIVMVLEIVSGGELFERIIDEDFELTERECIKYMRQISEGVEYIHKQGIVHLDLKPENIMCVNKTGTRIKLIDFGLARRLENAGSLKVLFGTPEFVAPEVINYEPIGYATDMWSIGVICYILVSGLSPFMGDNDNETLANVTSATWDFDDEAFDEISDDAKDFISNLLKKDMKNRLDCTQCLQHPWLMKDTKNMEAKKLSKDRMKKYMARRKWQKTGNAVRAIGRLSSMAMISGLSGRKSSTGSPTSPLNAEKLESEEDVSQAFLEAVAEEKPHVKPYFSKTIRDLEVVEGSAARFDCKIEGYPDPEVVWFKDDQSIRESRHFQIDYDEDGNCSLIISDVCGDDDAKYTCKAVNSLGEATCTAELIVETMEEGEGEGEEEEE

SEQ ID NO: 911751 - protein, 1676 aa, Homo sapiens; identical to SEQ ID NO: 911737

SEQ ID NO: 911752 - protein, 318 aa, Homo sapiens
TSSCRSCRDFGLARRLENAGSLKVLFGTPEFVAPEVINYEPIGYATDMWSIGVICYILVSGLSPFMGDNDNETLANVTSATWDFDDEAFDEISDDAKDFISNLLKKDMKNRLDCTQCLQHPWLMKDTKNMEAKKLSKDRMKKYMARRKWQKTGNAVRAIGRLSSMAMISGLSGRKSSTGSPTSPLNAEKLESEEDVSQAFLEAVAEEKPHVKPYFSKTIRDLEVVEGSAARFDCKIEGYPDPEVVWFKDDQSIRESRHFQIDYDEDGNCSLIISDVCGDDDAKYTCKAVNSLGEATCTAELIVETMEEGEGEGEEEEE

SEQ ID NO: 911753 - protein, 859 aa, Homo sapiens
MIILFSPLLTHPTPTLTTNRSFVRETKATNSDVRKEVTNVISKESKLDSLEAAAKSKNCSSPQRGGSPPWAANSQPQPPRESKLESCKDSPRTAPQTPVLQKTSSSITLQAARVQPEPRAPGLGVLSPSGEERKRPAPPRPATFPTRQPGLGSQDVVSKAANRRIPMEGQRDSAFPKFESKPQSQEVKENQTVKFRCEVSGIPKPEVAWFLEGTPVRRQEGSIEVYEDAGSHYLCLLKARTRDSGTYSCTASNAQGQVSCSWTLQVERLAVMEVAPSFSSVLKDCAVIEGQDFVLQCSVRGTPVPRITWLLNGQPIQYARSTCEAGVAELHIQDALPEDHGTYTCLAENALGQVSCSAWVTVHEKKSSRKSEYLLPVAPSKPTAPIFLQGLSDLKVMDGSQVTMTVQVSGNPPPEVIWLHNGNEIQESEDFHFEQRGTQHSLWIQEVFPEDTGTYTCEAWNSAGEVRTQAVLTVQEPHDGTQPWFISKPRSVTASLGQSVLISCAIAGDPFPTVHWLRDGKALCKDTGHFEVLQNEDVFTLVLKKVQPWHAGQYEILLKNRVGECSCQVSLMLQNSSARALPRGREPASCEDLCGGGVGADGGGSDRYGSLRPGWPARGQGWLEEEDGEDVRGVLKRRVETRQHTEEAIRQQEVEQLDFRDLLGKKVSTKTLSEDDLKEIPAEQMDFRANLQRQVKPKTVSEEERKVHSPQQVDFRSVLAKKGTSKTPVPEKVPPPKPATPDFRSVLGGKKKLPAENGSSSAETLNAKAVESSKPLSNAQPSGPLKPVGNAKPAETLKPMGNAKPAETLKPMGNAKPDENLKSASKEEQLMRLRKQAEKNVEKKIDKYTEVLKTHGLLV

SEQ ID NO: 911754 - protein, 88 aa, Homo sapiens
MEPRMESCLAQVLQKDVGKRLQVGQELIDYFSDKQKSADLEHDQTMLDKLVDGLATSWVNSSNYKVSCALEGTFGGGWAALVDQNWPL

SEQ ID NO: 911755 - protein, 1716 aa, Homo sapiens
MEPRMESCLAQVLQKDVGKRLQVGQELIDYFSDKQKSADLEHDQTMLDKLVDGLATSWVNSSNYKVVLLGMDILSALVTRLQDRFKAQIGTVLPSLIDRLGDAKDSVREQDQTLLLKIMDQAANPQYVWDRMLGGFKHKNFRTREGICLCLIATLNASGAQTLTLSKIVPHICNLLGDPNSQVRDAAINSLVEIYRHVGERVRADLSKKGLPQSRLNVIFTKFDEVQKSGNMIQSANDKNFDDEDSVDGNRPSSASSTSSKAPPSSRRNVGMGTTRRLGSSTLGSKSSAAKEGAGAVDEEDFIKAFDDVPVVQIYSSRDLEESINKIREILSDDKHDWEQRVNALKKIRSLLLAGAAEYDNFFQHLRLLDGAFKLSAKDLRSQVVREACITLGHLSSVLGNKFDHGAEAIMPTIFNLIPNSAKIMATSGVVAVRLIIRHTHIPRLIPVITSNCTSKSVAVRRRCFEFLDLLLQEWQTHSLERHISVLAETIKKGIHDADSEARIEARKCYWGFHSHFSREAEHLYHTLESSYQKALQSHLKNSDSIVSLPQSDRSSSSSQESLNRPLSAKRSPTGSTTSRASTVSTKSVSTTGSLQRSRSDIDVNAAASAKSKVSSSSGTTPFSSAAALPPGSYASLGRIRTRRQSSGSATNVASTPDNRGRSRAKVVSQSQRSRSANPAGAGSRSSSPGKLLGSGYGGLTGGSSRGPPVTPSSEKRSKIPRSQGCSRETSPNRIGLARSSRIPRPSMSQGCSRDTSRESSRDTSPARGFPPLDRFGLGQPGRIPGSVNAMRVLSTSTDLEAAVADALKKPVRRRYEPYGMYSDDDANSDASSVCSERSYGSRNGGIPHYLRQTEDVAEVLNHCASSNWSERKEGLLGLQNLLKSQRTLSRVELKRLCEIFTRMFADPHSKRVFSMFLETLVDFIIIHKDDLQDWLFVLLTQLLKKMGADLLGSVQAKVQKALDVTRDSFPFDQQFNILMRFIVDQTQTPNLKVKVAILKYIESLARQMDPTDFVNSSETRLAVSRIITWTTEPKSSDVRKAAQIVLISLFELNTPEFTMLLGALPKTFQDGATKLLHNHLKNSSNTSVVSALVTIGAYVMSMTSAEPLSRTYSNRIPRFLVLFQEMSSILEDGAILSPSEGMNLIFKYAVFSQVVQSTTFSLGYPVSHSFTELVLFFNTGKMQVLNFVCHSSTPNINHLTPGGLYDDYSFLVYITLKIGLMILREKKNHPGQILPIYLHVGKKTKERIEYILYTALNNDAYSASPQGSPSNTIGRTPSRHTSSRTSPLTSPTNCSHGGLSPSRLWGWSADGLAKHPPPFSQPNSIPTAPSHKALRRSYSPSMLDYDTENLNSEEIYSSLRGVTEAIEKFSFRSQEDLNEPIKRDGKKECDIVSRDGGAASPATEGRGGSEVEGGRTALDNKTSLLNTQPPRAFPGPRARDYNPYPYSDAINTYDKTALKEAVFDDDMEQLRDVPIDHSDLVADLLKELSNHNERVEERKGALLELLKITREDSLGVWEEHFKTILLLLLETLGDKDHSIRALALRVLREILRNQPARFKNYAELTIMKTLEAHKDSHKEVVRAAEEAASTLASSIHPEQCIKVLCPIIQTADYPINLAAIKMQTKVVERIAKESLLQLLVDIIPGLLQGYDNTESSVRKASVFCLVAIYSVIGEDLKPHLAQLTGSKMKLLNLYIKRAQTTNSNSSSSSDVSTHS

SEQ ID NO: 911756 - protein, 1683 aa, Homo sapiens
MEPRMESCLAQVLQKDVGKRLQVGQELIDYFSDKQKSADLEHDQTMLDKLVDGLATSWVNSSNYKVVLLGMDILSALVTRLQDRFKAQIGTVLPSLIDRLGDAKDSVREQDQTLLLKIMDQAANPQYVWDRMLGGFKHKNFRTREGICLCLIATLNASGAQTLTLSKIVPHICNLLGDPNSQVRDAAINSLVEIYRHVGERVRADLSKKGLPQSRLNVIFTKFDEVQKSGNMIQSANDKNFDDEDSVDGNRPSSASSTSSKAPPSSRRNVGMGTTRRLGSSTLGSKSSAAKEGAGAVDEEDFIKAFDDVPVVQIYSSRDLEESINKIREILSDDKHDWEQRVNALKKIRSLLLAGAAEYDNFFQHLRLLDGAFKLSAKDLRSQVVREACITLGHLSSVLGNKFDHGAEAIMPTIFNLIPNSAKIMATSGVVAVRLIIRHTHIPRLIPVITSNCTSKSVAVRRRCFEFLDLLLQEWQTHSLERHISVLAETIKKGIHDADSEARIEARKCYWGFHSHFSREAEHLYHTLESSYQKALQSHLKNSDSIVSLPQSDRSSSSSQESLNRPLSAKRSPTGSTTSRASTVSTKSVSTTGSLQRSRSDIDVNAAASAKSKVSSSSGTTPFSSAAALPPGSYASLGRIRTRRQSSGSATNVASTPDNRGRSRAKVVSQSQRSRSANPAGAGSRSSSPGKLLGSGYGGLTGGSSRGPPVTPSSEKRSKIPRSQGCSRETSPNRIGLARSSRIPRPSMSQGCSRDTSRESSRDTSPARGFPPLDRFGLGQPGRIPGSVNAMRVLSTSTDLEAAVADALKKPVRRRYEPYGMYSDDDANSDASSVCSERSYGSRNGGIPHYLRQTEDVAEVLNHCASSNWSERKEGLLGLQNLLKSQRTLSRVELKRLCEIFTRMFADPHSKEKMGADLLGSVQAKVQKALDVTRDSFPFDQQFNILMRFIVDQTQTPNLKVKVAILKYIESLARQMDPTDFVNSSETRLAVSRIITWTTEPKSSDVRKAAQIVLISLFELNTPEFTMLLGALPKTFQDGATKLLHNHLKNSSNTSVVSALVTIGAYVMSMTSAEPLSRTYSNRIPRFLVLFQEMSSILEDGAILSPSEGMNLIFKYAVFSQVVQSTTFSLGYPVSHSFTELVLFFNTGKMQVLNFVCHSSTPNINHLTPGGLYDDYSFLVYITLKIGLMILREKKNHPGQILPIYLHVGSKTKERIEYILYTALNNDAYSASPQGSPSNTIGRTPSRHTSSRTSPLTSPTNCSHGGLSPSRLWGWSADGLAKHPPPFSQPNSIPTAPSHKALRRSYSPSMLDYDTENLNSEEIYSSLRGVTEAIEKFSFRSQEDLNEPIKRDGKKECDIVSRDGGAASPATEGRGGSEVEGGRTALDNKTSLLNTQPPRAFPGPRARDYNPYPYSDAINTYDKTALKEAVFDDDMEQLRDVPIDHSDLVADLLKELSNHNERVEERKGALLELLKITREDSLGVWEEHFKTILLLLLETLGDKDHSIRALALRVLREILRNQPARFKNYAELTIMKTLEAHKDSHKEVVRAAEEAASTLASSIHPEQCIKVLCPIIQTADYPINLAAIKMQTKVVERIAKESLLQLLVDIIPGLLQGYDNTESSVRKASVFCLVAIYSVIGEDLKPHLAQLTGSKMKLLNLYIKRAQTTNSNSSSSSDVSTHS

SEQ ID NO: 911757 - protein, 1716 aa, Homo sapiens; identical to SEQ ID NO: 911755

SEQ ID NO: 911758 - protein, 112 aa, Homo sapiens [sequence omitted]

SEQ ID NO: 911759 - protein, 1106 aa, Homo sapiens
MEPRMESCLAQVLQKDVGKRLQVGQELIDYFSDKQKSADLEHDQTMLDKLVDGLATSWVNSSNYKVVLLGMDILSALVTRLQDRFKAQIGTVLPSLIDRLGDAKDSVREQDQTLLLKIMDQAANPQYVWDRMLGGFKHKNFRTREGICLCLIATLNASGAQTLTLSKIVPHICNLLGDPNSQVRDAAINSLVEIYRHVGERVRADLSKKGLPQSRLNVIFTKFDEVQKSGNMIQSANDKNFDDEDSVDGNRPSSASSTSSKAPPSSRRNVGMGTTRRLGSSTLGSKSSAAKEGAGAVDEEDFIKAFDDVPVVQIYSSRDLEESINKIREILSDDKHDWEQRVNALKKIRSLLLAGAAEYDNFFQHLRLLDGAFKLSAKDLRSQVVREACITLGHLSSVLGNKFDHGAEAIMPTIFNLIPNSAKIMATSGVVAVRLIIRHTHIPRLIPVITSNCTSKSVAVRRRCFEFLDLLLQEWQTHSLERHISVLAETIKKGIHDADSEARIEARKCYWGFHSHFSREAEHLYHTLESSYQKALQSHLKNSDSIVSLPQSDRSSSSSQESLNRPLSAKRSPTGSTTSRASTVSTKSVSTTGSLQRSRSDIDVNAAASAKSKVSSSSGTTPFSSAAALPPGSYASLGRIRTRRQSSGSATNVASTPDNRGRSRAKVVSQSQRSRSANPAGAGSRSSSPGKLLGSGYGGLTGGSSRGPPVTPSSEKRSKIPRSQGCSRETSPNRIGLARSSRIPRPSMSQGCSRDTSRESSRDTSPARGFPPLDRFGLGQPGRIPGSVNAMRVLSTSTDLEAAVADALKKPVRRRYEPYGMYSDDDANSDASSVCSERSYGSRNGGIPHYLRQTEDVAEVLNHCASSNWSERKEGLLGLQNLLKSQRTLSRVELKRLCEIFTRMFADPHSKRVFSMFLETLVDFIIIHKDDLQDWLFVLLTQLLKKMGADLLGSVQAKVQKALDVTRDSFPFDQQFNILMRFIVDQTQTPNLKVKVAILKYIESLARQMDPTDFVNSSETRLAVSRIITWTTEPKSSDVRKAAQIVLISLFELNTPEFTMLLGALPKTFQDGATKLLHNHLKNSSNTSVVSALVTIGAYVMSMTSA

SEQ ID NO: 911760 - protein, 839 aa, Homo sapiens
MEPRMESCLAQVLQKDVGKRLQVGQELIDYFSDKQKSADLEHDQTMLDKLVDGLATSWVNSSNYKVVLLGMDILSALVTRLQDRFKAQIGTVLPSLIDRLGDAKDSVREQDQTLLLKIMDQAANPQYVWDRMLGGFKHKNFRTREGICLCLIATLNASGAQTLTLSKIVPHICNLLGDPNSQVRDAAINSLVEIYRHVGERVRADLSKKGLPQSRLNVIFTKFDEVQKSGNMIQSANDKNFDDEDSVDGNRPSSASSTSSKAPPSSRRNVGMGTTRRLGSSTLGSKSSAAKEGAGAVDEEDFIKAFDDVPVVQIYSSRDLEESINKIREILSDDKHDWEQRVNALKKIRSLLLAGAAEYDNFFQHLRLLDGAFKLSAKDLRSQVVREACITLGHLSSVLGNKFDHGAEAIMPTIFNLIPNSAKIMATSGVVAVRLIIRHTHIPRLIPVITSNCTSKSVAVRRRCFEFLDLLLQEWQTHSLERHISVLAETIKKGIHDADSEARIEARKCYWGFHSHFSREAEHLYHTLESSYQKALQSHLKNSDSIVSLPQSDRSSSSSQESLNRPLSAKRSPTGSTTSRASTVSTKSVSTTGSLQRSRSDIDVNAAASAKSKVSSSSGTTPFSSAAALPPGSYASLGRIRTRRQSSGSATNVASTPDNRGRSRAKVVSQSQRSRSANPAGAGSRSSSPGKLLGSGYGGLTGGSSRGPPVTPSSEKRSKIPRSQGCSRETSPNRIGLARSSRIPRPSMSQGCSRDTSRESSRDTSPARGFPPLDRFGLGQPGRIPGSVNAMRVLSTSTDLEAAVADALVRGTVCMYTVFLKYSSAFLSVLTGNCPQIRL

SEQ ID NO: 911761 - protein, 109 aa, Homo sapiens
MEPRMESCLAQVLQKDVGKRLQVGQELIDYFSDKQKSADLEHDQTMLDKLVDGLATSWVNSSNYKVVLLGMDILSALVTRLQDRFKAQIGTGELRHLWSGPGPFRPPAE

SEQ ID NO: 911762 - protein, 1538 aa, Homo sapiens
MEPRMESCLAQVLQKDVGKRLQVGQELIDYFSDKQKSADLEHDQTMLDKLVDGLATSWVNSSNYKVVLLGMDILSALVTRLQDRFKAQIGTVLPSLIDRLGDAKDSVREQDQTLLLKIMDQAANPQYVWDRMLGGFKHKNFRTREGICLCLIATLNASGAQTLTLSKIVPHICNLLGDPNSQVRDAAINSLVEIYRHVGERVRADLSKKGLPQSRLNVIFTKFDEVQKSGNMIQSANDKNFDDEDSVDGNRPSSASSTSSKAPPSSRRNVGMGTTRRLGSSTLGSKSSAAKEGAGAVDEEDFIKAFDDVPVVQIYSSRDLEESINKIREILSDDKHDWEQRVNALKKIRSLLLAGAAEYDNFFQHLRLLDGAFKLSAKDLRSQVVREACITLGHLSSVLGNKFDHGAEAIMPTIFNLIPNSAKIMATSGVVAVRLIIRHTHIPRLIPVITSNCTSKSVAVRRRCFEFLDLLLQEWQTHSLERHISVLAETIKKGIHDADSEARIEARKCYWGFHSHFSREAEHLYHTLESSYQKALQSHLKNSDSIVSLPQSDRSSSSSQESLNRPLSAKRSPTGSTTSRASTVSTKSVSTTGSLQRSRSDIDVNAAASAKSKVSSSSGTTPFSSAAALPPGSYASLGRIRTRRQSSGSATNVASTPDNRGRSRAKVVSQSQRSRSANPAGAGSRSSSPGKLLGSGYGGLTGGSSRGPPVTPSSEKRSKIPRSQGCSRETSPNRIGLARSSRIPRPSMSQGCSRDTSRESSRDTSPARGFPPLDRFGLGQPGRIPGSVNAMRVLSTSTDLEAAVADALKKPVRRRYEPYGMYSDDDANSDASSVCSERSYGSRNGGIPHYLRQTEDVAEVLNHCASSNWSERKEGLLGLQNLLKSQRTLSRVELKRLCEIFTRMFADPHSKRVFSMFLETLVDFIIIHKDDLQDWLFVLLTQLLKKMGADLLGSVQAKVQKALDVTRDSFPFDQQFNILMRFIVDQTQTPNLKVKVAILKYIESLARQMDPTDFVNSSETRLAVSRIITWTTEPKSSDVRKAAQIVLISLFELNTPEFTMLLGALPKTFQDGATKLLHNHLKNSSNTSVGSPSNTIGRTPSRHTSSRTSPLTSPTNCSHGGLSPSRLWGWSADGLAKHPPPFSQPNSIPTAPSHKALRRSYSPSMLDYDTENLNSEEIYSSLRGVTEAIEKFSFRSQEDLNEPIKRDGKKECDIVSRDGGAASPATEGRGGSEVEGGRTALDNKTSLLNTQPPRAFPGPRARDYNPYPYSDAINTYDKTALKEAVFDDDMEQLRDVPIDHSDLVADLLKELSNHNERVEERKGALLELLKITREDSLGVWEEHFKTILLLLLETLGDKDHSIRALALRVLREILRNQPARFKNYAELTIMKTLEAHKDSHKEVVRAAEEAASTLASSIHPEQCIKVLCPIIQTADYPINLAAIKMQTKVVERIAKESLLQLLVDIIPGLLQGYDNTESSVRKASVFCLVAIYSVIGEDLKPHLAQLTGSKMKLLNLYIKRAQTTNSNSSSSSDVSTHS

SEQ ID NO: 911763 - protein, 1707 aa, Homo sapiens
MEPRMESCLAQVLQKDVGKRLQVGQELIDYFSDKQKSADLEHDQTMLDKLVDGLATSWVNSSNYKVVLLGMDILSALVTRLQDRFKAQIGTVLPSLIDRLGDAKDSVREQDQTLLLKIMDQAANPQYVWDRMLGGFKHKNFRTREGICLCLIATLNASGAQTLTLSKIVPHICNLLGDPNSQVRDAAINSLVEIYRHVGERVRADLSKKGLPQSRLNVIFTKFDEVQKSGNMIQSANDKNFDDEDSVDGNRPSSASSTSSKAPPSSRRNVGMGTTRRLGSSTLGSKSSAAKEGAGAVDEEDFIKAFDDVPVVQIYSSRDLEESINKIREILSDDKHDWEQRVNALKKIRSLLLAGAAEYDNFFQHLRLLDGAFKLSAKDLRLRHLSSVLGNKFDHGAEAIMPTIFNLIPNSAKIMATSGVVAVRLIIRHTHIPRLIPVITSNCTSKSVAVRRRCFEFLDLLLQEWQTHSLERHISVLAETIKKGIHDADSEARIEARKCYWGFHSHFSREAEHLYHTLESSYQKALQSHLKNSDSIVSLPQSDRSSSSSQESLNRPLSAKRSPTGSTTSRASTVSTKSVSTTGSLQRSRSDIDVNAAASAKSKVSSSSGTTPFSSAAALPPGSYASLGRIRTRRQSSGSATNVASTPDNRGRSRAKVVSQSQRSRSANPAGAGSRSSSPGKLLGSGYGGLTGGSSRGPPVTPSSEKRSKIPRSQGCSRETSPNRIGLARSSRIPRPSMSQGCSRDTSRESSRDTSPARGFPPLDRFGLGQPGRIPGSVNAMRVLSTSTDLEAAVADALKKPVRRRYEPYGMYSDDDANSDASSVCSERSYGSRNGGIPHYLRQTEDVAEVLNHCASSNWSERKEGLLGLQNLLKSQRTLSRVELKRLCEIFTRMFADPHSKRVFSMFLETLVDFIIIHKDDLQDWLFVLLTQLLKKMGADLLGSVQAKVQKALDVTRDSFPFDQQFNILMRFIVDQTQTPNLKVKVAILKYIESLARQMDPTDFVNSSETRLAVSRIITWTTEPKSSDVRKAAQIVLISLFELNTPEFTMLLGALPKTFQDGATKLLHNHLKNSSNTSVVSALVTIGAYVMSMTSAEPLSRTYSNRIPRFLVLFQEMSSILEDGAILSPSEGMNLIFKYAVFSQVVQSTTFSLGYPVSHSFTELVLFFNTGKMQVLNFVCHSSTPNINAFDSRSACMMIIHFWFIYTENWPYDSKGKKKPSWADSTHLFTCGLKDQGKNRIYSIYSPWNNDAYSASPQGSPSNTIGRTPSRHTSSRTSPLTSPTNCSHGGLSPSRLWGWSADGLAKHPPPFSQPNSIPTAPSHKALRRSYSPSMLDYDTENLNSEEIYSSLRGVTEAIEKFSFRSQEDLNEPIKRDGKKECDIVSRDGGAASPATEGRGGSEVEGGRTALDNKTSLLNTQPPRAFPGPRARDYNPYPYSDAINTYDKTALKEAVFDDDMEQLRDVPIDHSDLVADLLKELSNHNERVEERKGALLELLKITREDSLGVWEEHFKTILLLLLETLGDKDHSIRALALRVLREILRNQPARFKNYAELTIMKTLEAHKDSHKEVVRAAEEAASTLASSIHPEQCIKVLCPIIQTADYPINLAAIKMQTKVVERIAKESLLQLLVDIIPGLLQGYDNTESSVRKASVFCLVAIYSVIGEDLKPHLAQLTGSKMKLLNLYIKRAQTTNSNSSSSSDVSTHS

SEQ ID NO: 911764 - protein, 1352 aa, Homo sapiens
MKALDVKWFICFTVSKKNNYSPVSFSCFRHLSSVLGNKFDHGAEAIMPTIFNLIPNSAKIMATSGVVAVRLIIRHTHIPRLIPVITSNCTSKSVAVRRRCFEFLDLLLQEWQTHSLERHISVLAETIKKGIHDADSEARIEARKCYWGFHSHFSREAEHLYHTLESSYQKALQSHLKNSDSIVSLPQSDRSSSSSQESLNRPLSAKRSPTGSTTSRASTVSTKSVSTTGSLQRSRSDIDVNAAASAKSKVSSSSGTTPFSSAAALPPGSYASLGRIRTRRQSSGSATNVASTPDNRGRSRAKVVSQSQRSRSANPAGAGSRSSSPGKLLGSGYGGLTGGSSRGPPVTPSSEKRSKIPRSQGCSRETSPNRIGLARSSRIPRPSMSQGCSRDTSRESSRDTSPARGFPPLDRFGLGQPGRIPGSVNAMRVLSTSTDLEAAVADALKKPVRRRYEPYGMYSDDDANSDASSVCSERSYGSRNGGIPHYLRQTEDVAEVLNHCASSNWSERKEGLLGLQNLLKSQRTLSRVELKRLCEIFTRMFADPHSKRVFSMFLETLVDFIIIHKDDLQDWLFVLLTQLLKKMGADLLGSVQAKVQKALDVTRDSFPFDQQFNILMRFIVDQTQTPNLKVKVAILKYIESLARQMDPTDFVNSSETRLAVSRIITWTTEPKSSDVRKAAQIVLISLFELNTPEFTMLLGALPKTFQDGATKLLHNHLKNSSNTSVVSALVTIGAYVMSMTSAEPLSRTYSNRIPRFLVLFQEMSSILRMGPSSAPVNEMNLIFKYAVFSQVVQSTTFSLGYPVSHSFTELVLFFNTGKMQVLNFVCHSSTPNINHLTPGGLYDDYSFLVYITLKIGLMILREKKNHPGQILPIYLHVGKKTKERIEYFYIQPLNNDAYSASPQGSPSNTIGRTPSRHTSSRTSPLTSPTNCSHGGLSPSRLWGWSADGLAKHPPPFSQPNSIPTAPSHKALRRSYSPSMLDYDTENLNSEEIYSSLRGVTEAIEKFSFRSQEDLNEPIKRDGKKECDIVSRDGGAASPATEGRGGSEVEGGRTALDNKTSLLNTQPPRAFPGPRARDYNPYPYSDAINTYDKTALKEAVFDDDMEQLRDVPIDHSDLVADLLKELSNHNERVEERKGALLELLKITREDSLGVWEEHFKTILLLLLETLGDKDHSIRALALRVLREILRNQPARFKNYAELTIMKTLEAHKDSHKEVVRAAEEAASTLASSIHPEQCIKVLCPIIQTADYPINLAAIKMQTKVVERIAKESLLQLLVDIIPGLLQGYDNTESSVRKASVFCLVAIYSVIGEDLKPHLAQLTGSKMKLLNLYIKRAQTTNSNSSSSSDVSTHS

SEQ ID NO: 911765 - protein, 1724 aa, Homo sapiens
MEPRMESCLAQVLQKDVGKRLQVGQELIDYFSDKQKSADLEHDQTMLDKLVDGLATSWVNSSNYKVVLLGMDILSALVTRLQDRFKAQIGTVLPSLIDRLGDAKDSVREQDQTLLLKIMDQAANPQYVWDRMLGGFKHKNFRTREGICLCLIATLNASGAQTLTLSKIVPHICNLLGDPNSQVRDAAINSLVEIYRHVGERVRADLSKKGLPQSRLNVIFTKFDEVQKSGNMIQSANDKNFDDEDSVDGNRPSSASSTSSKAPPSSRRNVGMGTTRRLGSSTLGSKSSAAKEGAGAVDEEDFIKAFDDVPVVQIYSSRDLEESINKIREILSDDKHDWEQRVNALKKIRSLLLAGAAEYDNFFQHLRLLDGAFKLSAKDLRSQVVREACITLGHLSSVLGNKFDHGAEAIMPTIFNLIPNSAKIMATSGVVAVRLIIRHTHIPRLIPVITSNCTSKSVAVRRRCFEFLDLLLQEWQTHSLERHISVLAETIKKGIHDADSEARIEARKCYWGFHSHFSREAEHLYHTLESSYQKALQSHLKNSDSIVSLPQSDRSSSSSQESLNRPLSAKRSPTGSTTSRASTVSTKSVSTTGSLQRSRSDIDVNAAASAKSKVSSSSGTTPFSSAAALPPGSYASLGRIRTRRQSSGSATNVASTPDNRGRSRAKVVSQSQRSRSANPAGAGSRSSSPGKLLGSGYGGLTGGSSRGPPVTPSSEKRSKIPRSQGCSRETSPNRIGLARSSRIPRPSMSQGCSRDTSRESSRDTSPARGFPPLDRFGLGQPGRIPGSVNAMRVLSTSTDLEAAVADALKKPVRRRYEPYGMYSDDDANSDASSVCSERSYGSRNGGIPHYLRQTEDVAEVLNHCASSNWSERKEGLLGLQNLLKSQRTLSRVELKRLCEIFTRMFADPHSKRVFSMFLETLVDFIIIHKDDLQDWLFVLLTQLLKKMGADLLGSVQAKVQKALDVTRDSFPFDQQFNILMRFIVDQTQTPNLKVKVAILKYIESLARQMDPTDFVNSSETRLAVSRIITWTTEPKSSDVRKAAQIVLISLFELNTPEFTMLLGALPKTFQDGATKLLHNHLKNSSNTSVVSALVTIGAYVMSMTSAEPLSRTYSNRIPRFLVLFQEMSSILEDGAILSPSEGMNLIFKYAVFSQVVQSTTFSLGYPVSHSFTELVLFFNTGKMQVLNFVCHSSTPNINHLTPGGLYDDYSFLVYITLKIGLMILREKKNHPGQILPIYLHVGKKTKERIEYILYTALNNDAYSASPQGSPSNTIGRTPSRHTSSRTSPLTSPTNCSHGGLSPSRLWGWSADGLAKHPPPFSQPNSIPTAPSHKALRRSYSPSMLDYDTENLNSEEIYSSLRGVTEAIEKFSFRSQEDLNEPIKRDGKKECDIVSRDGGAASPATEGRGGSEVEGGRTALDNKTSLLNTQPPRAFPGPRARDYNPYPYSDAINTYDKTALKEAVFDDDMEQLRDVPIDHSDLVADLLKELSNHNERVEERKGALLELLKITREDSLGVWEEHFKTILLLLLETLGDKDHSIRALALRVLREILRNQPARFKNYAELTIMKTLEAHKDSHKEVVRAAEEAASTLASSIHPEQCIKVLCPIIQTADYPINLAAIKMQTKVVERIAKESLLQLLVDIIPGLLQGYDNTESSVRKASVFCLVAIYSVIGEDLKPHLAQLTGSKMKLLNLYIKRAQTTNSNSSTTRTAAPPGQQHHRRYR

SEQ ID NO: 911766 - protein, 654 aa, Homo sapiens
MKLSLVAAMLLLLSAARAEEEDKKEDVGTVVGIDLGTTYSCVGVFKNGRVEIIANDQGNRITPSYVAFTPEGERLIGDAAKNQLTSNPENTVFDAKRLIGRTWNDPSVQQDIKFLPFKVVEKKTKPYIQVDIGGGQTKTFAPEEISAMVLTKMKETAEAYLGKKVTHAVVTVPAYFNDAQRQATKDAGTIAGLNVMRIINEPTAAAIAYGLDKREGEKNILVFDLGGGTFDVSLLTIDNGVFEVVATNGDTHLGGEDFDQRVMEHFIKLYKKKTGKDVRKDNRAVQKLRREVEKAKRALSSQHQARIEIESFYEGEDFSETLTRAKFEELNMDLFRSTMKPVQKVLEDSDLKKSDIDEIVLVGGSTRIPKIQQLVKEFFNGKEPSRGINPDEAVAYGAAVQAGVLSGDQDTGDLVLLDVCPLTLGIETVGGVMTKLIPRNTVVPTKKSQIFSTASDNQPTVTIKVYEGERPLTKDNHLLGTFDLTGIPPAPRGVPQIEVTFEIDVNGILRVTAEDKGTGNKNKITITNDQNRLTPEEIERMVNDAEKFAEEDKKLKERIDTRNELESYAYSLKNQIGDKEKLGGKLSSEDKETMEKAVEEKIEWLESHQDADIEDFKAKKKELEEIVQPIISKLYGSAGPPPTGEEDTAEKDEL

SEQ ID NO: 911767 - protein, 654 aa, Homo sapiens; identical to SEQ ID NO: 911766

SEQ ID NO: 911768 - protein, 654 aa, Homo sapiens; identical to SEQ ID NO: 911766

SEQ ID NO: 911769 - protein, 654 aa, Homo sapiens; identical to SEQ ID NO: 911766

SEQ ID NO: 911770 - protein, 420 aa, Homo sapiens
MKLSLVAAMLLLLSAARAEEEDKKEDVGTVVGIDLGTTYSCVGVFKNGRVEIIANDQGNRITPSYVAFTPEGERLIGDAAKNQLTSNPENTVFDAKRLIGRTWNDPSVQQDIKFLPFKVVEKKTKPYIQVDIGGGQTKTFAPEEISAMVLTKMKETAEAYLGKKVTHAVVTVPAYFNDAQRQATKDAGTIAGLNVMRIINEPTAAAIAYGLDKREGEKNILVFDLGGGTFDVSLLTIDNGVFEVVATNGDTHLGGEDFDQRVMEHFIKLYKKKTGKDVRKDNRAVQKLRREVEKAKRALSSQHQARIEIESFYEGEDFSETLTRAKFEELNMDLFRSTMKPVQKVLEDSDLKKSDIDEIVLVGGSTRIPKIQQLVKEFFNGKEPSRGINPDEAVAYGAAVQAGVLSGDQDTGRSSSQHLS

SEQ ID NO: 911771 - protein, 654 aa, Homo sapiens; identical to SEQ ID NO: 911766

SEQ ID NO: 911772 - protein, 459 aa, Homo sapiens
MRIINEPTAAAIAYGLDKREGEKNILVFDLGGGTFDVSLLTIDNGVFEVVATNGDTHLGGEDFDQRVMEHFIKLYKKKTGKDVRKDNRAVQKLRREVEKAKRALSSQHQARIEIESFYEGEDFSETLTRAKFEELNMDLFRSTMKPVQKVLEDSDLKKSDIDEIVLVGGSTRIPKIQQLVKEFFNGKEPSRGINPDEAVAYGAAVQAGVLSGDQDTGDLVLLDVCPLTLGIETVGGVMTKLIPRNTVVPTKKSQIFSTASDNQPTVTIKVYEGERPLTKDNHLLGTFDLTGIPPAPRGVPQIEVTFEIDVNGILRVTAEDKGTGNKNKITITNDQNRLTPEEIERMVNDAEKFAEEDKKLKERIDTRNELESYAYSLKNQIGDKEKLGGKLSSEDKETMEKAVEEKIEWLESHQDADIEDFKAKKKELEEIVQPIISKLYGSAGPPPTGEEDTAEKDEL

SEQ ID NO: 911773 - protein, 461 aa, Homo sapiens
APPFWWWAPPSIGSYLVRISKNEMSPSMKEDLSESLTRAKFEELNMDLFRSTMKPVQKVLEDSGFDQRVMEHFIKLYKKKTGKDVRKDNRAVQKLRREVEKAKRALSSQHQARIEIESFYEGEDFSETLTRAKFEELNMDLFRSTMKPVQKVLEDSDLKKSDIDEIVLVGGSTRIPKIQQLVKEFFNGKEPSRGINPDEAVAYGAAVQAGVLSGDQDTGDLVLLDVCPLTLGIETVGGVMTKLIPRNTVVPTKKSQIFSTASDNQPTVTIKVYEGERPLTKDNHLLGTFDLTGIPPAPRGVPQIEVTFEIDVNGILRVTAEDKGTGNKNKITITNDQNRLTPEEIERMVNDAEKFAEEDKKLKERIDTRNELESYAYSLKNQIGDKEKLGGKLSSEDKETMEKAVEEKIEWLESHQDADIEDFKAKKKELEEIVQPIISKLYGSAGPPPTGEEDTAEKDEL

SEQ ID NO: 911774 - protein, 537 aa, Homo sapiens
MKLSLVAAMLLLLSAARAEEEDKKEDVGTVVGIDLGTTYSCVGVFKNGRVEIIANDQGNRITPSYVAFTPEGERLIGDAAKNQLTSNPENTVFDAKRLIGRTWNDPSVQQDIKFLPFKVVEKKTKPYIQVDIGGGQTKTFAPEEISAMVLTKMKETAEAYLGKKVTHAVVTVPAYFNDAQRQATKDAGTIAGLNVMRIINEPTAAAIAYGLDKREGEKNILVFDLGGGTFDVSLLTIDNGVFEVVATNGDTHLGGEDFDQRVMEHFIKLYKKKTGKDVRKDNRAVQKLRREVEKAKRALSSQHQARIEIESFYEGEDFSETLTRAKFEELNMDLFRSTMKPVQKVLEDSDLKKSDIDEIVLVGGSTRIPKIQQLVKEFFNGKEPSRGINPDEAVAYGAAVQAGVLSGDQDTGDLVLLDVCPLTLGIETVGGVMTKLIPRNTVVPTKKSQIFSTASDNQPTVTIKVYEGERPLTKDNHLLGTFDLTGIPPAPRGVPQIEVTFEIDVNGILRVTAEDKGTGNKNKITITNTHKWNRNRK

SEQ ID NO: 911775 - protein, 335 aa, Homo sapiens
SISDFFKFEELNMDLFRSTMKPVQKVLEDSDLKKSDIDEIVLVGGSTRIPKIQQLVKEFFNGKEPSRGINPDEAVAYGAAVQAGVLSGDQDTGDLVLLDVCPLTLGIETVGGVMTKLIPRNTVVPTKKSQIFSTASDNQPTVTIKVYEGERPLTKDNHLLGTFDLTGIPPAPRGVPQIEVTFEIDVNGILRVTAEDKGTGNKNKITITNDQNRLTPEEIERMVNDAEKFAEEDKKLKERIDTRNELESYAYSLKNQIGDKEKLGGKLSSEDKETMEKAVEEKIEWLESHQDADIEDFKAKKKELEEIVQPIISKLYGSAGPPPTGEEDTAEKDEL

SEQ ID NO: 911776 - protein, 207 aa, Homo sapiens
MVLLSRLVCNQPTVTIKVYEGERPLTKDNHLLGTFDLTGIPPAPRGVPQIEVTFEIDVNGILRVTAEDKGTGNKNKITITNDQNRLTPEEIERMVNDAEKFAEEDKKLKERIDTRNELESYAYSLKNQIGDKEKLGGKLSSEDKETMEKAVEEKIEWLESHQDADIEDFKAKKKELEEIVQPIISKLYGSAGPPPTGEEDTAEKDEL

SEQ ID NO: 911777 - protein, 181 aa, Homo sapiens
CHSKNTIHIYLKGDFNLWDPTRSRRNSSQIDVNGILRVTAEDKGTGNKNKITITNDQNRLTPEEIERMVNDAEKFAEEDKKLKERIDTRNELESYAYSLKNQIGDKEKLGGKLSSEDKETMEKAVEEKIEWLESHQDADIEDFKAKKKELEEIVQPIISKLYGSAGPPPTGEEDTAEKDEL

SEQ ID NO: 911778 - protein, 145 aa, Homo sapiens
NISPTKPITLLTQVVCHHLDQNRLTPEEIERMVNDAEKFAEEDKKLKERIDTRNELESYAYSLKNQIGDKEKLGGKLSSEDKETMEKAVEEKIEWLESHQDADIEDFKAKKKELEEIVQPIISKLYGSAGPPPTGEEDTAEKDEL

SEQ ID NO: 911779 - protein, 573 aa, Homo sapiens
MKLSLVAAMLLLLSAARAEEEDKKEDVGTVVGIDLGTTYSCVGVFKNGRVEIIANDQGNRITPSYVAFTPEGERLIGDAAKNQLTSNPENTVFDAKRLIGRTWNDPSVQQDIKFLPFKVVEKKTKPYIQVDIGGGQTKTFAPEEISAMVLTKMKETAEAYLGKKVTHAVVTVPAYFNDAQRQATKDAGTIAGLNVMRIINEPTAAAIAYGLDKREGEKNILVFDLGGGTFDVSLLTIDNGVFEVVATNGDTHLGGEDFDQRVMEHFIKLYKKKTGKDVRKDNRAVQKLRREVEKAKRALSSQHQARIEIESFYEGEDFSETLTRAKFEELNMDLFRSTMKPVQKVLEDSDLKKSDIDEIVLVGGSTRIPKIQQLVKEFFNGKEPSRGINPDEAVAYGAAVQAGVLSGDQDTGDLVLLDVCPLTLGIETVGGVMTKLIPRNTVVPTKKSQIFSTASDNQPTVTIKVYEGERPLTKDNHLLGTFDLTGIPPAPRGVPQIEVTFEIDVNGILRVTAEDKGTGNKNKITITNDQNRLTPEEIERMVNDAEKFAEEDKKLKERIDTRNELESYRYGGL

SEQ ID NO: 911780 - protein, 420 aa, Homo sapiens; identical to SEQ ID NO: 911770

SEQ ID NO: 911781 - protein, 125 aa, Homo sapiens
APPFWWWAPPSIGSYLVRISKNEMSPSMKEDLSESLTRAKFEELNMDLFRSTMKPVQKVLEDSGFDQRVMEHFIKLYKKKTGKDVRKDNRAVQKLRREVEKAKRALSSQHQARIGHLKKRVKNLG

SEQ ID NO: 911782 - protein, 654 aa, Homo sapiens; identical to SEQ ID NO: 911766

SEQ ID NO: 911783 - protein, 654 aa, Homo sapiens; identical to SEQ ID NO: 911766

SEQ ID NO: 911784 - protein, 654 aa, Homo sapiens; identical to SEQ ID NO: 911766

SEQ ID NO: 911785 - protein, 692 aa, Homo sapiens
MKLSLVAAMLLLLSAARAEEEDKKEDVGTVVGIDLGTTYSCVGVFKNGRVEIIANDQGNRITPSYVAFTPEGERLIGDAAKNQLTSNPENTVFDAKRLIGRTWNDPSVQQDIKFLPFKVVEKKTKPYIQVDIGGGQTKTFAPEEISAMVLTKMKETAEAYLGKKVTHAVVTVPAYFNDAQRQATKDAGTIAGLNVMRIINEPTAAAIAYGLDKREGEKNILVFDLGGGTFDVSLLTIDNGVFEVVATNGDTHLGGEDFDQRVMEHFIKLYKKKTGKDVRKDNRAVQKLRREVEKAKRALSSQHQARIEIESFYEGEDFSETLTRAKFEELNMVMFLVFCFANEISLDSEFRTLHLDTEITDITVTMSFFYDLFRSTMKPVQKVLEDSDLKKSDIDEIVLVGGSTRIPKIQQLVKEFFNGKEPSRGINPDEAVAYGAAVQAGVLSGDQDTGDLVLLDVCPLTLGIETVGGVMTKLIPRNTVVPTKKSQIFSTASDNQPTVTIKVYEGERPLTKDNHLLGTFDLTGIPPAPRGVPQIEVTFEIDVNGILRVTAEDKGTGNKNKITITNDQNRLTPEEIERMVNDAEKFAEEDKKLKERIDTRNELESYAYSLKNQIGDKEKLGGKLSSEDKETMEKAVEEKIEWLESHQDADIEDFKAKKKELEEIVQPIISKLYGSAGPPPTGEEDTAEKDEL

SEQ ID NO: 911786 - protein, 459 aa, Homo sapiens; identical to SEQ ID NO: 911772

SEQ ID NO: 911787 - protein, 400 aa, Homo sapiens
MKLSLVAAMLLLLSAARAEEEDKKEDVGTVVGIDLGTTYSCVGVFKNGRVEIIANDQGNRITPSYVAFTPEGERLIGDAAKNQLTSNPENTVFDAKRLIGRTWNDPSVQQDIKFLPFKVVEKKTKPYIQVDIGGGQTKTFAPEEISAMVLTKMKETAEAYLGKKVTHAVVTVPAYFNDAQRQATKDAGTIAGLNVMRIINEPNQPTVTIKVYEGERPLTKDNHLLGTFDLTGIPPAPRGVPQIEVTFEIDVNGILRVTAEDKGTGNKNKITITNDQNRLTPEEIERMVNDAEKFAEEDKKLKERIDTRNELESYAYSLKNQIGDKEKLGGKLSSEDKETMEKAVEEKIEWLESHQDADIEDFKAKKKELEEIVQPIISKLYGSAGPPPTGEEDTAEKDEL

SEQ ID NO: 911788 - protein, 449 aa, Homo sapiens
MKLSLVAAMLLLLSAARAEEEDKKEDVGTVVGIDLGTTYSCVGVFKNGRVEIIANDQGNRITPSYVAFTPEGERLIGDAAKNQLTSNPENTVFDAKRLIGRTWNDPSVQQDIKFLPFKVVEKKTKPYIQVDIGGGQTKTFAPEEISAMVLTKMKETAEAYLGKKVTHAVVTVPAYFNDAQRQATKDAGTIAGLNVMRIINEPTAAAIAYGLDKREGEKNILVFDLGGGTFDVSLLTIDNGVFEVVATNGDTHLGGEDFDQRVMEHFIKLYKKKTGKDVRKDNRAVQKLRREVEKAKRALSSQHQARIEIESFYEGEDFSETLTRAKFEELNMDLFRSTMKPVQKVLEDSDLKKSDIDEIVLVGGSTRIPKIQQLVKEFFNGKEPSRGINPDEAVAYGAAVQAGVLSGDQDTGDLVLLDVCPLTLGIETVGGVMTKLIPRNTVVPTKKFC

SEQ ID NO: 911789 - protein, 368 aa, Homo sapiens
APPFWWWAPPSIGSYLVRISKNEMSPSMKEDLSESLTRAKFEELNMDLFRSTMKPVQKVLEDSDLKKSDIDEIVLVGGSTRIPKIQQLVKEFFNGKEPSRGINPDEAVAYGAAVQAGVLSGDQDTGDLVLLDVCPLTLGIETVGGVMTKLIPRNTVVPTKKSQIFSTASDNQPTVTIKVYEGERPLTKDNHLLGTFDLTGIPPAPRGVPQIEVTFEIDVNGILRVTAEDKGTGNKNKITITNDQNRLTPEEIERMVNDAEKFAEEDKKLKERIDTRNELESYAYSLKNQIGDKEKLGGKLSSEDKETMEKAVEEKIEWLESHQDADIEDFKAKKKELEEIVQPIISKLYGSAGPPPTGEEDTAEKDEL

SEQ ID NO: 911790 - protein, 657 aa, Homo sapiens
MKLSLVAAMLLLLSAARAEEEDKKEDVGTVVGIDLGTTYSCVGVFKNGRVEIIANDQGNRITPSYVAFTPEGERLIGDAAKNQLTSNPENTVFDAKRLIGRTWNDPSVQQDIKFLPFKVVEKKTKPYIQVDIGGGQTKTFAPEEISAMVLTKMKETAEAYLGKKVTHAVVTVPAYFNDAQRQATKDAGTIAGLNVMRIINEPTAAAIAYGLDKREGEKNILVFDLGGGTFDVSLLTIDNGVFEVVATNGDTHLGGEDFDQRVMEHFIKLYKKKTGKDVRKDNRAVQKLRREVEKAKRALSSQHQARIEIESFYEGEDFSETLTRAKFEELNMDLFRSTMKPVQKVLEDSDLKKSDIDEIVLVGGSTRIPKIQQLVKEFFNGKEPSRGINPDEAVAYGAAVQAGVLSGDQDTGDLVLLDVCPLTLGIETVGGVMTKLIPRNTVVPTKKSQIFSTASDNQPTVTIKVYEGERPLTKDNHLLGTFDLTGIPPAPRGVPQIEVTFEIDVNGILRVTAEDKGTGNKNKITITNDQNRLTPEEIERMVNDAEKFAEEDKKLKERIDTRNELESYAYSLKNQIGDKEKLGGKLSSEDKETMEKAVEEKIEWLESHQDADIEDFKAKKKELEEIVQPIISKLYGSAGPPPTGEEDTAELHHHHHH

SEQ ID NO: 911791 - protein, 114 aa, Homo sapiens
MVNDAEKFAEEDKKLKERIDTRNELESYAYSLKNQIGDKEKLGGKLSSEDKETMEKAVEEKIEWLESHQDADIEDFKAKKKELEEIVQPIISKLYGSAGPPPTGEEDTAEKDEL

SEQ ID NO: 911792 - protein, 483 aa, Homo sapiens
MKLSLVAAMLLLLSAARAEEEDKKEDVGTVVGIDLGTTYSCVGVFKNGRVEIIANDQGNRITPSYVAFTPEGERLIGDAAKNQLTSNPENTVFDAKRLIGRTWNDPSVQQDIKFLPFKVVEKKTKPYIQVDIGGGQTKTFAPEEISAMVLTKMKETAEAYLGKKVTHAVVTVPAYFNDAQRQATKDAGTIAGLNVMRIINEPTAAAIAYGLDKREGEKNILVFDLGGGTFDVSLLTIDNGVFEVVATNGDTHLGGEDFDQRVMEHFIKLYKKKTGKDVRKDNRAVQKLRREVEKAKRALSSQHQARIEIESFYEGEDFSETLTRAKFEELNMDLFRSTMKPVQKVLEDSDLKKSDIDEIVLVGGSTRIPKIQQLVKEFFNGKEPSRGINPDEAVAYGAAVQAGVLSGDQDTGDLVLLDVCPLTLGIETVGGVMTKLIPRNTVVPTKKSQIFSTASDNQPTVTIKVYEGERPLTKDLDCNSWRP

SEQ ID NO: 911793 - protein, 68 aa, Homo sapiens
ADSGGSLDDEAVEEKIEWLESHQDADIEDFKAKKKELEEIVQPIISKLYGSAGPPPTGEEDTAEKDEL

SEQ ID NO: 911794 - protein, 494 aa, Homo sapiens
MGPWGWKLRWTVALLLAAAGTAVGDRCERNEFQCQDGKCISYKWVCDGSAECQDGSDESQETCLSVTCKSGDFSCGGRVNRCIPQFWRCDGQVDCDNGSDEQGCPPKTCSQDEFRCHDGKCISRQFVCDSDRDCLDGSDEASCPVLTCGPASFQCNSSTCIPQLWACDNDPDCEDGSDEWPQRCRGLYVFQGDSSPCSAFEFHCLSGECIHSSWRCDGGPDCKDKSDEENCGQIHSSAFRGRSAPSAKAGHIRPPLERQASGYPARQPSPPRSLSGLAARAWGGEEGEGAAGSLAASALPGRADGWKVEPRPSLGAEPQRQGLKAMAPGPTAPQIGDAGDRALPLRPVIDLREGFTQGRLPGFLSSRSIIAWTRRRSAQLQCWSREVQSAALSLPVPGLRVGPRHLGASSLATPQRLGRAPAPGPGEWSDRPPSAASSWGTENLFARLPPERARASSLQVLPRPPGSPISHTPRLTVHTQIPESQPLVTPFGEF

SEQ ID NO: 911795 - protein, 136 aa, Homo sapiens
TCHHGRLILFYFWEETKSCYVGLAGLKLRVQAILPPQPSKLLGLQAWATVPSLLEVFLTCNSPTCPLERASQGRGSGSHVVGAASPGAFLLGPWQGVFLPGAAWPGPQDPLGLASARDLSLSTCVSRSPQWPPLLG

SEQ ID NO: 911796 - protein, 948 aa, Homo sapiens
MGPWGWKLRWTVALLLAAAGTAVGDRCERNEFQCQDGKCISYKWVCDGSAECQDGSDESQETCLSVTCKSGDFSCGGRVNRCIPQFWRCDGQVDCDNGSDEQGCPPKTCSQDEFRCHDGKCISRQFVCDSDRDCLDGSDEASCPVLTCGPASFQCNSSTCIPQLWACDNDPDCEDGSDEWPQRCRGLYVFQGDSSPCSAFEFHCLSGECIHSSWRCDGGPDCKDKSDEENCAVATCRPDEFQCSDGNCIHGSRQCDREYDCKDMSDEVGCVNVTLCEGPNKFKCHSGECITLDKVCNMARDCRDWSDEPIKECGTNECLDNNGGCSHVCNDLKIGYECLCPDGFQLVAQRRCEDIDECQDPDTCSQLCVNLEGGYKCQCEEGFQLDPHTKACKAVGSIAYLFFTNRHEVRKMTLDRSEYTSLIPNLRNVVALDTEVASNRIYWSDLSQRMICSTQLDRAHGVSSYDTVISRDIQAPDGLAVDWIHSNIYWTDSVLGTVSVADTKGVKRKTLFRENGSKPRAIVVDPVHGFMYWTDWGTPAKIKKGGLNGVDIYSLVTENIQWPNGITLDLLSGRLYWVDSKLHSISSIDVNGGNRKTILEDEKRLAHPFSLAVFEDKVFWTDIINEAIFSANRLTGSDVNLLAENLLSPEDMVLFHNLTQPRGVNWCERTTLSNGGCQYLCLPAPQINPHSPKFTCACPDGMLLARDMRSCLTEAEAAVATQETSTVRLKVSSTAVRTQHTTTRPVPDTSRLPGATPGLTTVEIVTMSHQALGDVAGRGNEKKPSSVRALSIVLPIATELGLWSRGQLCDRACLSLQCSSSSFAWGSSFYGRTGGLRTSTASTLTTPSIRRPQRMRSTFATTRTATATPRDRWSVWRMTWREHLPGVPSLPRTLPETSPALFYSKTEKTKALPARALFYIFIHLGGRTGFGQCPCNGLGWDFGFFLSS

SEQ ID NO: 911797 - protein, 782 aa, Homo sapiens
ISGASSVRPDVRPKQDCDNGSDEQGCPPKTCSQDEFRCHDGKCISRQFVCDSDRDCLDGSDEASCPVLTCGPASFQCNSSTCIPQLWACDNDPDCEDGSDEWPQRCRGLYVFQGDSSPCSAFEFHCLSGECIHSSWRCDGGPDCKDKSDEENCAVATCRPDEFQCSDGNCIHGSRQCDREYDCKDMSDEVGCVNVTLCEGPNKFKCHSGECITLDKVCNMARDCRDWSDEPIKECGTNECLDNNGGCSHVCNDLKIGYECLCPDGFQLVAQRRCEDIDECQDPDTCSQLCVNLEGGYKCQCEEGFQLDPHTKACKAVGSIAYLFFTNRHEVRKMTLDRSEYTSLIPNLRNVVALDTEVASNRIYWSDLSQRMICSTQLDRAHGVSSYDTVISRDIQAPDGLAVDWIHSNIYWTDSVLGTVSVADTKGVKRKTLFRENGSKPRAIVVDPVHGFMYWTDWGTPAKIKKGGLNGVDIYSLVTENIQWPNGITLDLLSGRLYWVDSKLHSISSIDVNGGNRKTILEDEKRLAHPFSLAVFEDKVFWTDIINEAIFSANRLTGSDVNLLAENLLSPEDMVLFHNLTQPRGVNWCERTTLSNGGCQYLCLPAPQINPHSPKFTCACPDGMLLARDMRSCLTEAEAAVATQETSTVRLKVSSTAVRTQHTTTRPVPDTSRLPGATPGLTTVEIVTMSHQALGDVAGRGNEKKPSSVRALSIVLPIVLLVFLCLGVFLLWKNWRLKNINSINFDNPVYQKTTEDEVHICHNQDGYSYPSRQMVSLEDDVA

SEQ ID NO: 911798 - protein, 596 aa, Homo sapiens
MGPWGWKLRWTVALLLAAAGTAVGDRCERNEFQCQDGKCISYKWVCDGSAECQDGSDESQETCLSVTCKSGDFSCGGRVNRCIPQFWRCDGQVDCDNGSDEQGCPPKTCSQDEFRCHDGKCISRQFVCDSDRDCLDGSDEASCPVLTCGPASFQCNSSTCIPQLWACDNDPDCEDGSDEWPQRCRGLYVFQGDSSPCSAFEFHCLSGECIHSSWRCDGGPDCKDKSDEENCAVATCRPDEFQCSDGNCIHGSRQCDREYDCKDMSDEVGCVNVTLCEGPNKFKCHSGECITLDKVCNMARDCRDWSDEPIKECGTNECLDNNGGCSHVCNDLKIGYECLCPDGFQLVAQRRCEDIDECQDPDTCSQLCVNLEGGYKCQCEEGFQLDPHTKACKAVGSIAYLFFTNRHEVRKMTLDRSEYTSLIPNLRNVVALDTEVASNRIYWSDLSQRMICSTQLDRAHGVSSYDTVISRDIQAPDGLAVDWIHSNIYWTDSVLGTVSVADTKGVKRKTLFRENGSKPRAIVVDPVHGFMYWTDWGTPAKIKKGGLNGVDIYSLVTENIQWPNGITLGQSILDRYHQRSHFQCQPPHRFRCQLVG

SEQ ID NO: 911799 - protein, 418 aa, Homo sapiens
TCHHGRLILFYFWEETKSCYVGLAGLKLRVQAILPPQPSKLLGLQAWATVPSLLEVFLTCNSPTCPLERASQGRGSGSHVVGAASPGAFLLGPWQGVFLPGAAWPGPRTLWDWHQHVTSPYPLVCLDLLSGRLYWVDSKLHSISSIDVNGGNRKTILEDEKRLAHPFSLAVFEDKVFWTDIINEAIFSANRLTGSDVNLLAENLLSPEDMVLFHNLTQPRGVNWCERTTLSNGGCQYLCLPAPQINPHSPKFTCACPDGMLLARDMRSCLTEAEAAVATQETSTVRLKVSSTAVRTQHTTTRPVPDTSRLPGATPGLTTVEIVTMSHQALGDVAGRGNEKKPSSVRALSIVLPIVLLVFLCLGVFLLWKNWRLKNINSINFDNPVYQKTTEDEVHICHNQDGYSYPSRQMVSLEDDVA

SEQ ID NO: 911800 - protein, 203 aa, Homo sapiens
MVFCHVDQASLKLLDSLKRSSCLGLPRSFETFVIRRTPMRRACRHVALRRRLFILSEAEAAVATQETSTVRLKVSSTAVRTQHTTTRPVPDTSRLPGATPGLTTVEIVTMSHQALGDVAGRGNEKKPSSVRALSIVLPIVLLVFLCLGVFLLWKNWRLKNINSINFDNPVYQKTTEDEVHICHNQDGYSYPSRQMVSLEDDVA

SEQ ID NO: 911801 - protein, 834 aa, Homo sapiens
MGPWGWKLRWTVALLLAAAGTAVGDRCERNEFQCQDGKCISYKWVCDGSAECQDGSDESQETCLSVTCKSGDFSCGGRVNRCIPQFWRCDGQVDCDNGSDEQGCPPKTCSQDEFRCHDGKCISRQFVCDSDRDCLDGSDEASCPVLTCGPASFQCNSSTCIPQLWACDNDPDCEDGSDEWPQRCRGLYVFQGDSSPCSAFEFHCLSGECIHSSWRCDGGPDCKDKSDEENCAVATCRPDEFQCSDGNCIHGSRQCDREYDCKDMSDEVGCVNVTLCEGPNKFKCHSGECITLDKVCNMARDCRDWSDEPIKECGTNECLDNNGGCSHVCNDLKIGYECLCPDGFQLVAQRRCEDIDECQDPDTCSQLCVNLEGGYKCQCEEGFQLDPHTKACKAVGSIAYLFFTNRHEVRKMTLDRSEYTSLIPNLRNVVALDTEVASNRIYWSDLSQRMICSTQLDRAHGVSSYDTVISRDIQAPDGLAVDWIHSNIYWTDSVLGTVSVADTKGVKRKTLFRENGSKPRAIVVDPVHGFMYWTDWGTPAKIKKGGLNGVDIYSLVTENIQWPNGITLDLLSGRLYWVDSKLHSISSIDVNGGNRKTILEDEKRLAHPFSLAVFEDKVFWTDIINEAIFSANRLTGSDVNLLAENLLSPEDMVLFHNLTQPRGVNWCERTTLSNGGCQYLCLPAPQINPHSPKFTCACPDGMLLARDMRSCLTEAEAAVATQETSTVRLKVSSTAVRTQHTTTRPVPDTSRLPGATPGLTTVEIVTMSHQALGDVAGRGNEKKPSSVRALSIVLPIVLLVFLCLGVFLLWKNWRLKNINSINFDNPVSTKNTKN

SEQ ID NO: 911802 - protein, 860 aa, Homo sapiens [sequence omitted]

SEQ ID NO: 911803 - protein, 825 aa, Homo sapiens
MGPWGWKLRWTVALLLAAAGTAVGDRCERNEFQCQDGKCISYKWVCDGSAECQDGSDESQETCLSVTCKSGDFSCGGRVNRCIPQFWRCDGQVDCDNGSDEQGCPPKTCSQDEFRCHDGKCISRQFVCDSDRDCLDGSDEASCPVLTCGPASFQCNSSTCIPQLWACDNDPDCEDGSDEWPQRCRGLYVFQGDSSPCSAFEFHCLSGECIHSSWRCDGGPDCKDKSDEENCAVATCRPDEFQCSDGNCIHGSRQCDREYDCKDMSDEVGCVNVTLCEGPNKFKCHSGECITLDKVCNMARDCRDWSDEPIKECGTNECLDNNGGCSHVCNDLKIGYECLCPDGFQLVAQRRCEDIDECQDPDTCSQLCVNLEGGYKCQCEEGFQLDPHTKACKAVGSIAYLFFTNRHEVRKMTLDRSEYTSLIPNLRNVVALDTEVASNRIYWSDLSQRMICSTQLDRAHGVSSYDTVISRDIQAPDGLAVDWIHSNIYWTDSVLGTVSVADTKGVKRKTLFRENGSKPRAIVVDPVHGFMYWTDWGTPAKIKKGGLNGVDIYSLVTENIQWPNGITLDLLSGRLYWVDSKLHSISSIDVNGGNRKTILEDEKRLAHPFSLAVFEDKVFWTDIINEAIFSANRLTGSDVNLLAENLLSPEDMVLFHNLTQPRGVNWCERTTLSNGGCQYLCLPAPQINPHSPKFTCACPDGMLLARDMRSCLTEAEAAVATQETSTVRLKVSSTAVRTQHTTTRPVPDTSRLPGATPGLTTVEIVTMSHQGKDWALPRPLFTQRRVPSVATNILVTRWSPGVVLTPLLTFSHLGRVSLGPQFPYL

SEQ ID NO: 911804 - protein, 556 aa, Homo sapiens
MGPWGWKLRWTVALLLAAAGTAVGDRCERNEFQCQDGKCISYKWVCDGSAECQDGSDESQETCLSVTCKSGDFSCGGRVNRCIPQFWRCDGQVDCDNGSDEQGCPPKTCSQDEFRCHDGKCISRQFVCDSDRDCLDGSDEASCPVLTCGPASFQCNSSTCIPQLWACDNDPDCEDGSDEWPQRCRGLYVFQGDSSPCSAFEFHCLSGECIHSSWRCDGGPDCKDKSDEENCAVATCRPDEFQCSDGNCIHGSRQCDREYDCKDMSDEVGCVNVTLCEGPNKFKCHSGECITLDKVCNMARDCRDWSDEPIKECGTNECLDNNGGCSHVCNDLKIGYECLCPDGFQLVAQRRCEDIDECQDPDTCSQLCVNLEGGYKCQCEEGFQLDPHTKACKAVGSIAYLFFTNRHEVRKMTLDRSEYTSLIPNLRNVVALDTEVASNRIYWSDLSQRMICSTQLDRAHGVSSYDTVISRDIQAPDGLAVDWIHSNIYWTDSVLGTVSVADTKGVKRKTLFRENGSKPRAIVVDPVHGCVSTTLRAAEGMEVAVSQDSPTALQPG

SEQ ID NO: 911805 - protein, 80 aa, Homo sapiens
NVIQGERLQAKGHRGGSCSWVRIHDAEGCRGNGGSRKELQELVSGLGMVAQSTCNPSTLGGQGGWIIKTSLTNMVKPRLY

SEQ ID NO: 911806 - protein, 860 aa, Homo sapiens [sequence omitted]

SEQ ID NO: 911807 - protein, 116 aa, Homo sapiens
MGPWGWKLRWTVALLLAAAGTAVGDRCERNEFQCQDGKCISYKWVCDGSAECQDGSDESQETCLSVTCKSGDFSCGGRVNRCIPQFWRCDGQVDCDNGSDEQGCRKCGPAFAIEPI

SEQ ID NO: 911808 - protein, 860 aa, Homo sapiens [sequence omitted]

SEQ ID NO: 911809 - protein, 563 aa, Homo sapiens
MARDCRDWSDEPIKECGTNECLDNNGGCSHVCNDLKIGYECLCPDGFQLVAQRRCEDIDECQDPDTCSQLCVNLEGGYKCQCEEGFQLDPHTKACKAVGSIAYLFFTNRHEVRKMTLDRSEYTSLIPNLRNVVALDTEVASNRIYWSDLSQRMICSTQLDRAHGVSSYDTVISRDIQAPDGLAVDWIHSNIYWTDSVLGTVSVADTKGVKRKTLFRENGSKPRAIVVDPVHGFMYWTDWGTPAKIKKGGLNGVDIYSLVTENIQWPNGITLDLLSGRLYWVDSKLHSISSIDVNGGNRKTILEDEKRLAHPFSLAVFEDKVFWTDIINEAIFSANRLTGSDVNLLAENLLSPEDMVLFHNLTQPRGVNWCERTTLSNGGCQYLCLPAPQINPHSPKFTCACPDGMLLARDMRSCLTEAEAAVATQETSTVRLKVSSTAVRTQHTTTRPVPDTSRLPGATPGLTTVEIVTMSHQALGDVAGRGNEKKPSSVRALSIVLPIVLLVFLCLGVFLLWKNWRLKNINSINFDNPVYQKTTEDEVHICHNQDGYSYPSRQMVSLEDDVA

SEQ ID NO: 911810 - protein, 860 aa, Homo sapiens [sequence omitted]

SEQ ID NO: 911811 - protein, 209 aa, Homo sapiens [sequence omitted]

SEQ ID NO: 911812 - protein, 142 aa, Homo sapiens
APFSRLRTPVPWSPTHVLTDRVGEASPRMHHHPGLVPILPTPTHFHSRGLLALSQFRVVHCVHLAFVLLFCTVFCRVCWDGIPGQGKPVSMNAGDREGQVDRDFKAVIVNIENCHCRLYVRPPSASTSMQMPPSHSLPQSCR

SEQ ID NO: 911813 - protein, 854 aa, Homo sapiens
MGPWGWKLRWTVALLLAAAGTAVGDRCERNEFQCQDGKCISYKWVCDGSAECQDGSDESQETCLSVTCKSGDFSCGGRVNRCIPQFWRCDGQVDCDNGSDEQGCPPKTCSQDEFRCHDGKCISRQFVCDSDRDCLDGSDEASCPVLTCGPASFQCNSSTCIPQLWACDNDPDCEDGSDEWPQRCRGLYVFQGDSSPCSAFEFHCLSGECIHSSWRCDGGPDCKDKSDEENCAVATCRPDEFQCSDGNCIHGSRQCDREYDCKDMSDEVGCVNVTLCEGPNKFKCHSGECITLDKVCNMARDCRDWSDEPIKECGTNECLDNNGGCSHVCNDLKIGYECLCPDGFQLVAQRRCEDIDECQDPDTCSQLCVNLEGGYKCQCEEGFQLDPHTKACKAVGSIAYLFFTNRHEVRKMTLDRSEYTSLIPNLRNVVALDTEVASNRIYWSDLSQRMICSTQLDRAHGVSSYDTVISRDIQAPDGLAVDWIHSNIYWTDSVLGTVSVADTKGVKRKTLFRENGSKPRAIVVDPVHGFMYWTDWGTPAKIKKGGLNGVDIYSLVTENIQWPNGITLDLLSGRLYWVDSKLHSISSIDVNGGNRKTILEDEKRLAHPFSLAVFEDKVFWTDIINEAIFSANRLTGSDVNLLAENLLSPEDMVLFHNLTQPRGVNWCERTTLSNGGCQYLCLPAPQINPHSPKFTCACPDGMLLARDMRSCLTEAEAAVATQETSTVRLKVSSTAVRTQHTTTRPVPDTSRLPGATPGLTTVEIVTMSHQALGDVAGRGNEKKPSSVRALSIVLPIVLLVFLCLGVFLLWKNWRLKNINSINFDNPVYQKTTEDEVHICHNQDGYSYPSVSDPL

SEQ ID NO: 911814 - protein, 637 aa, Homo sapiens
MGPWGWKLRWTVALLLAAAGTAVGDRCERNEFQCQDGKCISYKWVCDGSAECQDGSDESQETCLSVTCKSGDFSCGGRVNRCIPQFWRCDGQVDCDNGSDEQGCPPKTCSQDEFRCHDGKCISRQFVCDSDRDCLDGSDEASCPVLTCGPASFQCNSSTCIPQLWACDNDPDCEDGSDEWPQRCRGLYVFQGDSSPCSAFEFHCLSGECIHSSWRCDGGPDCKDKSDEENCAVATCRPDEFQCSDGNCIHGSRQCDREYDCKDMSDEVGCVNVTLCEGPNKFKCHSGECITLDKVCNMARDCRDWSDEPIKECGTNECLDNNGGCSHVCNDLKIGYECLCPDGFQLVAQRRCEDIDECQDPDTCSQLCVNLEGGYKCQCEEGFQLDPHTKACKAVGSIAYLFFTNRHEVRKMTLDRSEYTSLIPNLRNVVALDTEVASNRIYWSDLSQRMICSTQLDRAHGVSSYDTVISRDIQAPDGLAVDWIHSNIYWTDSVLGTVSVADTKGVKRKTLFRENGSKPRAIVVDPVHGFMYWTDWGTPAKIKKGGLNGVDIYSLVTENIQWPNGITLDLLCAVPPLCCPTAQRRPRLTCPDARAQAHCSHAHAHCQPIHPGYCHLHLSTLPGSGPEEELIPAPSHP

SEQ ID NO: 911815 - protein, 144 aa, Homo sapiens
SHPKTISPETLDISTSLIAVLIITFCIVTVLGREALTKGALWAVFLLAGSALLCAVVTGVIWRQPESKTKLSFKVPFLPVLPILSIFVNVYLMMQLDQGTWVRFAVWMLIGFIIYFGYGLWHSEEASLDADQARTPDGNLDQCK

SEQ ID NO: 911816 - protein, 629 aa, Homo sapiens
MGCKVLLNIGQQMLRRKVVDCSREETRLSRCLNTFDLVALGVGSTLGAGVYVLAGAVARENAGPAIVISFLIAALASVLAGLCYGEFGARVPKTGSAYLYSYVTVGELWAFITGWNLILSYIIGTSSVARAWSATFDELIGRPIGEFSRTHMTLNAPGVLAENPDIFAVIIILILTGLLTLGVKESAMVNKIFTCINVLVLGFIMVSGFVKGSVKNWQLTEEDFGNTSGRLCLNNDTKEGKPGVGGFMPFGFSGVLSGAATCFYAFVGFDCIATTGEEVKNPQKAIPVGIVASLLICFIAYFGVSAALTLMMPYFCLDNNSPLPDAFKHVGWEGAKYAVAVGSLCALSASLLGSMFPMPRVIYAMAEDGLLFKFLANVNDRTKTPIIATLASGAVAAVMAFLFDLKDLVDLMSIGTLLAYSLVAACVLVLRYQPEQPNLVYQMASTSDELDPADQNELASTNDSQLGFLPEAEMFSLKTILSPKNMEPSKISGLIVNISTSLIAVLIITFCIVTVLGREALTKGALWAVFLLAGSALLCAVVTGVIWRQPESKTKLSFKVPFLPVLPILSIFVNVYLMMQLDQGTWVRFAVWMLIGFIIYFGYGLWHSEEASLDADQARTPDGNLDQCK

SEQ ID NO: 911817 - protein, 235 aa, Homo sapiens
MGCKVLLNIGQQMLRRKVVDCSREETRLSRCLNTFDLVALGVGSTLGAGVYVLAGAVARENAGPAIVISFLIAALASVLAGLCYGEFGARVPKTGSAYLYSYVTVGELWAFITGWNLILSYIIGTSSVARAWSATFDELIGRPIGEFSRTHMTLNAPGVLAENPDIFAVIIILILTGLLTLGVKESAMVNKIFTCINVLVLGFIMVSGFVKGSVKNWQLTEEDFGNTSGRLCLNK

SEQ ID NO: 911818 - protein, 629 aa, Homo sapiens; identical to SEQ ID NO: 911816

SEQ ID NO: 911819 - protein, 564 aa, Homo sapiens [sequence omitted]

SEQ ID NO: 911820 - protein, 148 aa, Homo sapiens
MAPFEPLASGILLLLWLIAPSRACTCVPPHPQTAFCNSDLVIRAKFVGTPEVNQTTLYQRYEIKMTKMYKGFQALGDAADIRFRLHPRHGECLRILPQVPQPQRGVSHCWKTAGWTLAHHYLQVLWLPGNSLSFSSAPGLHQDLHCWL

SEQ ID NO: 911821 - protein, 116 aa, Homo sapiens
SSAQRDTRVIRAKFVGTPEVNQTTLYQRYEIKMTKMYKGFQALGDAADIRFRLHPRHGECLRILPQVPQPQRGVSHCWKTAGWTLAHHYLQVLWLPGNSLSFSSAPGLHQDLHCWL

SEQ ID NO: 911822 - protein, 147 aa, Homo sapiens
AYYNPPLSHGVNGMPFTQPTMAPFEPLASGILLLLWLIAPSRACTCVPPHPQTAFCNSDLVIRAKFVGTPEVNQTTLYQRYEIKMTKMYKGFQALGDAADIRFRLHPRHVNGMPFTPWRQRRVVVARRGLQRWGLCVVVYGLEFFGR

SEQ ID NO: 911823 - protein, 80 aa, Homo sapiens
GRLLLLNSRPLDPRPTLLAVRYAQCFPVYPSPANCRVALIACGRTSSSKALKRASSPVTLPACLGSQGCAPGKSLRSQIA

SEQ ID NO: 911824 - protein, 168 aa, Homo sapiens
AYYNPPLSHGVNGMPFTQPTMAPFEPLASGILLLLWLIAPSRACTCVPPHPQTAFCNSDLVIRAKFVGTPEVNQTTLYQRYEIKMTKMYKGFQALGDAADIRFRLHPRHGECLRILPQVPQPQRGVSHCWKTAGWTLAHHYLQVLWLPGNSLSFSSAPGLHQDLHCWL

SEQ ID NO: 911825 - protein, 178 aa, Homo sapiens
ELGCSLGAGHQARALPCQMPVYSAWPAEPTMAPFEPLASGILLLLWLIAPSRACTCVPPHPQTAFCNSDLVIRAKFVGTPEVNQTTLYQRYEIKMTKMYKGFQALGDAADIRFRLHPRHGECLRILPQVPQPQRGVSHCWKTAGWTLAHHYLQVLWLPGNSLSFSSAPGLHQDLHCWL

SEQ ID NO: 911826 - protein, 148 aa, Homo sapiens; identical to SEQ ID NO: 911820

SEQ ID NO: 911827 - protein, 148 aa, Homo sapiens; identical to SEQ ID NO: 911820

SEQ ID NO: 911828 - protein, 148 aa, Homo sapiens; identical to SEQ ID NO: 911820

SEQ ID NO: 911829 - protein, 116 aa, Homo sapiens
MIRLELSTLIRAKFVGTPEVNQTTLYQRYEIKMTKMYKGFQALGDAADIRFRLHPRHGECLRILPQVPQPQRGVSHCWKTAGWTLAHHYLQVLWLPGNSLSFSSAPGLHQDLHCWL

SEQ ID NO: 911830 - protein, 148 aa, Homo sapiens; identical to SEQ ID NO: 911820

SEQ ID NO: 911831 - protein, 148 aa, Homo sapiens; identical to SEQ ID NO: 911820

SEQ ID NO: 911832 - protein, 110 aa, Homo sapiens
MAPFEPLASGILLLLWLIAPSRACTCVPPHPQTAFCNSDLVIRAKFVGTPEVNQTTLYQRYEIKMTKMYKGFQALGDAADIRFRLHPRHGECLRILPQVPQPQRGVSHCW

SEQ ID NO: 911833 - protein, 148 aa, Homo sapiens; identical to SEQ ID NO: 911820

SEQ ID NO: 911834 - protein, 148 aa, Homo sapiens; identical to SEQ ID NO: 911820

SEQ ID NO: 911835 - protein, 112 aa, Homo sapiens
MMMHGHGRSFSWSENCRMDSCTSLPASFVAPWEQPELKLSAGASPRPTLLAVRNAQCFPVYPSPANCRVALIACGRTSSSKALKRASSPVTLPACLGSQGCAPGKSLRSQIA

SEQ ID NO: 911836 - protein, 124 aa, Homo sapiens
SSAQRDTREPTMAPFEPLASGILLLLWLIAPSRACTCVPPHPQTAFCNSDLVIRAKFVGTPEVNQTTLYQRYEIKMTKMYKGFQALGDAADIRFRLHPRHGECLRILPQVPQPQRGVSHCWGTA

SEQ ID NO: 911837 - protein, 148 aa, Homo sapiens; identical to SEQ ID NO: 911820

SEQ ID NO: 911838 - protein, 116 aa, Homo sapiens; identical to SEQ ID NO: 911821

SEQ ID NO: 911839 - protein, 106 aa, Homo sapiens
MYLGGVRASLPSGSVLKAEERKFCSTGEAGRSPQRCFPPPFQVFPCLSIPCKLQSGTHCLWTDQLLQGSEKGFQSRHLACLPREPGLCTWQVPAVPDSLNPARSGS

SEQ ID NO: 911840 - protein, 143 aa, Homo sapiens
  misc_feature (2)..(2): Xaa can be any naturally occurring amino acid
  misc_feature (77)..(77): Xaa can be any naturally occurring amino acid
  misc_feature (83)..(83): Xaa can be any naturally occurring amino acid
  misc_feature (88)..(88): Xaa can be any naturally occurring amino acid
  misc_feature (120)..(120): Xaa can be any naturally occurring amino acid
NXPIPLPQAPGPAGQWLGETVHRACTCVPPHPQTAFCNSDLVIRAKFVGTPEVNQTTLYQRYEIKMTKSGMSAGPHXPFPVSXTRCIXVFTGGIIFHLLMFISHPWFQPRFWFLFLRPPXPPPQFSGGHNVLLHVPPGRPPWG

SEQ ID NO: 911841 - protein, 160 aa, Homo sapiens
NRARTLPFTQPTMAPFEPLASGILLLLWLIAPSRACTCVPPHPQTAFCNSDLVIRAKFVGTPEVNQTTLYQRYEIKMTKMYKGFQALGDAADIRFRLHPRHGECLRILPQVPQPQRGVSHCWKTAGWTLAHHYLQVLWLPGNSLSFSSAPGLHQDLHCWL

SEQ ID NO: 911842 - protein, 148 aa, Homo sapiens; identical to SEQ ID NO: 911820

SEQ ID NO: 911843 - protein, 148 aa, Homo sapiens; identical to SEQ ID NO: 911820

SEQ ID NO: 911844 - protein, 121 aa, Homo sapiens
LGTPSTVFCNSDLVIRAKFVGTPEVNQTTLYQRYEIKMTKMYKGFQALGDAADIRFRLHPRHGECLRILPQVPQPQRGVSHCWKTAGWTLAHHYLQVLWLPGNSLSFSSAPGLHQDLHCWL

SEQ ID NO: 911845 - protein, 125 aa, Homo sapiens
SSVQCTPKTDGLLVIPDVIRAKFVGTPEVNQTTLYQRYEIKMTKMYKGFQALGDAADIRFRLHPRHGECLRILPQVPQPQRGVSHCWKTAGWTLAHHYLQVLWLPGNSLSFSSAPGLHQDLHCWL

SEQ ID NO: 911846 - protein, 148 aa, Homo sapiens; identical to SEQ ID NO: 911820

SEQ ID NO: 911847 - protein, 148 aa, Homo sapiens; identical to SEQ ID NO: 911820

SEQ ID NO: 911848 - protein, 197 aa, Homo sapiens
MAPFEPLASGILLLLWLIAPSRACTCVPPHPQTAFCNSDLVIRAKFVGTPEVNQTTLYQRYEIKMTKMYKGFQALGDAADIRFRLHPRHGECLRILPQENCRMDSCTSLPASFVAPWEQPELKLSAGASPRPTLLAVRNAQCFPVYPSPANCRVALIACGRTSSSKALKRASSPVTLPACLGSQGCAPGKSLRSQIA

SEQ ID NO: 911849 - protein, 166 aa, Homo sapiens
MAPFEPLASGILLLLWLIAPSRACTCVPPHPQTAFCNSDLVIRAKFVGTPEVNQTTLYQRYEIKMTKMYKGFQALGDAADIRFRLHPRHGECLRILPQVPQPQRGVSHCWCFPVYPSPANCRVALIACGRTSSSKALKRASSPVTLPACLGSQGCAPGKSLRSQIA

SEQ ID NO: 911850 - protein, 110 aa, Homo sapiens; identical to SEQ ID NO: 911832

SEQ ID NO: 911851 - protein, 147 aa, Homo sapiens
  misc_feature (124)..(124): Xaa can be any naturally occurring amino acid
MAPFEPLASGILLLLWLIAPSRACTCVPPHPQTAFCNSDLVIRAKFVGTPEVNQTTLYQRYEIKMTKMYKGFQALGDAADIRFRLHPRHVWGKKILKQGYNNHNEEVFRGRKTSSEMDSLHSYXPAVSWRCAESSPVLTRRAPGASR

SEQ ID NO: 911852 - protein, 442 aa, Homo sapiens
MALPGARARGWAAAARAAQRRRRVENAGGSPSPEPAGRRAALYVHWPYCEKRCSYCNFNKYIPRRLEEAAMQKCLVTEAQTLLRLSGVQRVESVFFGGGTPSLASPHTVAAVLEAVAQAAHLPADLEVTLEANPTSAPGSRLAEFGAAGVNRLSIGLQSLDDTELRLLGRTHSACDALRTLAEARRLFPGRVSVDLMLGLPAQQVGPWLGQLQELLHHCDDHLSLYQLSLERGTALFAQVQRGALPAPDPELAAEMYQRGRAVLREAGFHQYEVSNFARNGALSTHNWTYWQCGQYLGVGPGAHGRFMPQGAGGHTREARIQTLEPDNWMKEVMLFGHGTRKRVPLGRLELLEEVLALGLRTDVGITHQHWQQFEPQLTLWDVFGANKEVQELLERGLLQLDHRGLRCSWEGLAVLDSLLLTLLPQLQEAWQQRTPSPVPGG

SEQ ID NO: 911853 - protein, 353 aa, Homo sapiens
  misc_feature (282)..(282): Xaa can be any naturally occurring amino acid
  misc_feature (289)..(289): Xaa can be any naturally occurring amino acid
  misc_feature (295)..(295): Xaa can be any naturally occurring amino acid
  misc_feature (307)..(307): Xaa can be any naturally occurring amino acid
  misc_feature (312)..(314): Xaa can be any naturally occurring amino acid
  misc_feature (317)..(319): Xaa can be any naturally occurring amino acid
  misc_feature (350)..(350): Xaa can be any naturally occurring amino acid
MALPGARARGWAAAARAAQRRRRVENAGGSPSPEPAGRRAALYVHWPYCEKRCSYCNFNKYIPRRLEEAAMQKCLVTEAQTLLRLSGVQRVESVFFGGGTPSLASPHTVAAVLEAVAQAAHLPADLEVTLEANPTSAPGSRLAEFGAAGVNRLSIGLQSLDDTELRLLGRTHSACDALRTLAEARRLFPGRVSVDLMLGLPAQQVGPWLGQLQELLHHCDDHLSLYQLSLERGTALFAQVQRGALPAPDPELAAEMYQRGRAVLREAGFHQYEVSNFARNGXAGPTKGXEGKGGXTGAGGGGQGTGXPKGGXXXPGXXXKKGTEKGEKGGGGRHPNGPGQRNAEKGAARXQGG

SEQ ID NO: 911854 - protein, 504 aa, Homo sapiens
MALPGARARGWAAAARAAQRRRRVENAGGSPSPEPAGRRAALYVHWPYCEKRCSYCNFNKYIPRRLEEAAMQKCLVTEAQTLLRLSGVQRVESVFFGGGTPSLASPHTVAAVLEAVAQAAHLPADLEVTLEANPTSAPGSRLAEFGAAGVNRLSIGLQSLDDTELRLLGRTHSACDALRTLAEARRLFPGRVSVDLMLGLPAQQVGPWLGQLQELLHHCDDHLSLYQLSLERGTALFAQVQRGALPAPDPELAAEMYQRGRAVLREAGFHQYEVSNFARNVSSGADGWRWRMGRLQCDQGVVTFCREGSWPRWWDILTWGPLPESKNEACPLHSALFPPSPQGALSTHNWTYWQCGQYLGVGPGAHGRFMPQGAGGHTREARIQTLEPDNWMKEVMLFGHGTRKRVPLGRLELLEEVLALGLRTDVGITHQHWQQFEPQLTLWDVFGANKEVQELLERGLLQLDHRGLRCSWEGLAVLDSLLLTLLPQLQEAWQQRTPSPVPGG

SEQ ID NO: 911855 - protein, 434 aa, Homo sapiens
MALPGARARGWAAAARAAQRRRRVENAGGSPSPEPAGRRAALYVHWPYCEKRCSYCNFNKYIPRRLEEAAMQKCLVTEAQTLLRLSGVQRVESVFFGGGTPSLASPHTVAAVLEAVAQAAHLPADLEVTLEANPTSAPGSRLAEFGAAGVNRLSIGLQSLDDTELRLLGRTHSACDALRTLAEARRLFPGRVSVDLMLGLPAQQVGPWLGQLQELLHHCDDHLSLYQLSLERGTALFAQVQRGALPAPDPELAAEMYQRGRAVLREAGFHQYEVSNFARNGALSTHNWTYWQCGQYLGVGPGAHGRFMPQGAGGHTREARIQTLEPDNWMKEVMLFGHGTRKRVPLGRLELLEEVLALGLRTDVGITHQHWQQFEPQLTLWDVFGANKEVQELLERGLLQLDHRCVGGCRAEGAEAYQGALTTALHRPRRSEKD

SEQ ID NO: 911856 - protein, 246 aa, Homo sapiens [sequence omitted]

SEQ ID NO: 911857 - protein, 135 aa, Homo sapiens [sequence omitted]

SEQ ID NO: 911858 - protein, 113 aa, Homo sapiens
MSAAEISMLNWTLPHLSPYPNYVAQSSQASSPPLTLWLPQHWQQFEPQLTLWDVFGANKEVQELLERGLLQLDHRGLRCSWEGLAVLDSLLLTLLPQLQEAWQQRTPSPVPGG

SEQ ID NO: 911859 - protein, 304 aa, Homo sapiens
MALPGARARGWAAAARAAQRRRRVENAGGSPSPEPAGRRAALYVHWPYCEKRCSYCNFNKYIPRRLEEAAMQKCLVTEAQTLLRLSGVQRVESVFFGGGTPSLASPHTVAAVLEAVAQAAHLPADLEVTLEANPTSAPGSRLAEFGAAGVNRLSIGLQSLDDTELRLLGRTHSACDALRTLAEARRLFPGRVSVDLMLGLPAQQVGPWLGQLQELLHHCDDHLSLYQLSLERGTALFAQVQRGALPAPDPELAAEMYQRGRAVLREAGFHQYEVSNFARNVSSGADGWRWRMGRLQCDQGVVTF

SEQ ID NO: 911860 - protein, 317 aa, Homo sapiens
  misc_feature (288)..(288): Xaa can be any naturally occurring amino acid
  misc_feature (290)..(290): Xaa can be any naturally occurring amino acid
  misc_feature (295)..(295): Xaa can be any naturally occurring amino acid
  misc_feature (312)..(312): Xaa can be any naturally occurring amino acid
MALPGARARGWAAAARAAQRRRRVENAGGSPSPEPAGRRAALYVHWPYCEKRCSYCNFNKYIPRRLEEAAMQKCLVTEAQTLLRLSGVQRVESVFFGGGTPSLASPHTVAAVLEAVAQAAHLPADLEVTLEANPTSAPGSRLAEFGAAGVNRLSIGLQSLDDTELRLLGRTHSACDALRTLAEARRLFPGRVSVDLMLGLPAQQVGPWLGQLQELLHHCDDHLSLYQLSLERGTALFAQVQRGALPAPDPELAAEMYQRGRAVLREAGFHQYEVSNFARNGRSYHIDXWXVSYLXWLGMDIMPRAGAHRRWXKWTEL

SEQ ID NO: 911861 - protein, 355 aa, Homo sapiens
MALPGARARGWAAAARAAQRRRRVENAGGSPSPEPAGRRAALYVHWPYCEKRCSYCNFNKYIPRRLEEAAMQKCLVTEAQTLLRLSGVQRVESVFFGGGTPSLASPHTVAAVLEAVAQAAHLPADLEVTLEANPTSAPGSRLAEFGAAGVNRLSIGLQSLDDTELRLLGRTHSACDALRTLAEARRLFPGRVSVDLMLGLPAQQVGPWLGQLQELLHHCDDHLSLYQLSLERGTALFAQVQRGALPAPDPELAAEMYQRGRAVLREAGFHQYEVSNFARNGALSTHNWTYWQCGQYLGVGPGAHGRFMPQGAGGHTREARIQTLEPDNWMKEAGGSFGPGATHRCGDHSPALAAV

SEQ ID NO: 911862 - protein, 400 aa, Homo sapiens
MARYEAGVESAEDCNFNKYIPRRLEEAAMQKCLVTEAQTLLRLSGVQRVESVFFGGGTPSLASPHTVAAVLEAVAQAAHLPADLEVTLEANPTSAPGSRLAEFGAAGVNRLSIGLQSLDDTELRLLGRTHSACDALRTLAEARRLFPGRVSVDLMLGLPAQQVGPWLGQLQELLHHCDDHLSLYQLSLERGTALFAQVQRGALPAPDPELAAEMYQRGRAVLREAGFHQYEVSNFARNGALSTHNWTYWQCGQYLGVGPGAHGRFMPQGAGGHTREARIQTLEPDNWMKEVMLFGHGTRKRVPLGRLELLEEVLALGLRTDVGITHQHWQQFEPQLTLWDVFGANKEVQELLERGLLQLDHRGLRCSWEGLAVLDSLLLTLLPQLQEAWQQRTPSPVPGG

SEQ ID NO: 911863 - protein, 316 aa, Homo sapiens
MALPGARARGWAAAARAAQRRRRVENAGGSPSPEPAGRRAALYVHWPYCEKRCSYCNFNKYIPRRLEEAAMQKCLVTEAQTLLRLSGVQRVESVFFGGGTPSLASPHTVAAVLEAVAQAAHLPADLEVTLEANPTSAPGSRLAEFGAAGVNRLSIGLQSLDDTELRLLGRTHSACDALRTLAEARRLFPGRVSVDLMLGLPAQQVGPWLGQLQELLHHCDDHLSLYQLSLERGTALFAQVQRGALPAPDPELAAEDVFGANKEVQELLERGLLQLDHRGLRCSWEGLAVLDSLLLTLLPQLQEAWQQRTPSPVPGG

SEQ ID NO: 911864 - protein, 105 aa, Homo sapiens [sequence omitted]

SEQ ID NO: 911865 - protein, 379 aa, Homo sapiens
MGRRRRLCLQLYFLWLGCVVLWAQGTAGQPQPPPPKPPRPQPPPQQVRSATAGSEGGFLAPEYREEGAAVASRVRRRGQQDVLRGPNVCGSRFHSYCCPGWKTLPGGNQCIVPICRNSCGDGFCSRPNMCTCSSGQISSTCGSKSIQQCSVRCMNGGTCADDHCQCQKGYIGTYCGQPVCENGCQNGGRCIGPNRCACVYGFTGPQCERDYRTGPCFTQVNNQMCQGQLTGIVCTKTLCCATIGRAWGHPCEMCPAQPQPCRRGFIPNIRTGACQDVDECQAIPGICQGGNCINTVGSFECRCPAGHKQSETTQKCEDIDECSIIPGICETGECSNTVGSYFCVCPRGYVTSTDGSRCIDLFRIPPTCCRELDSLSPIC

SEQ ID NO: 911866 - protein, 327 aa, Homo sapiens
MGRRRRLCLQLYFLWLGCVVLWAQGTAGQPQPPPPKPPRPQPPPQQVRSATAGSEGGFLAPEYREEGAAVASRVRRRGQQDVLRGPNVCGSRFHSYCCPGWKTLPGGNQCIVPICRNSCGDGFCSRPNMCTCSSGQISSTCGSKSIQQCSVRCMNGGTCADDHCQCQKGYIGTYCGQPVCENGCQNGGRCIGPNRCACVYGFTGPQCERDYRTGPCFTQVNNQMCQGQLTGIVCTKTLCCATIGRAWGHPCEMCPAQPQPCRRGFIPNIRTGACQDVDECQAIPGICQGGNCINTVGSFECRCPAGHKQSETTQKCEGESLYFGKHA

SEQ ID NO: 911867 - protein, 142 aa, Homo sapiens
MSESLVVCDVAEDLVEKLRKFRFRKETNNAAIIMKIDKDKRLVVLDEELEGISPDELKDELPERQPRFIVYSYKYQHDDGRVSYPLCFIFSSPVGCKPEQQMMYAGSKNKLVQTAELTKVFEIRNTEDLTEEWLREKLGFFH

SEQ ID NO: 911868 - protein, 142 aa, Homo sapiens; identical to SEQ ID NO: 911867

SEQ ID NO: 911869 - protein, 142 aa, Homo sapiens; identical to SEQ ID NO: 911867

SEQ ID NO: 911870 - protein, 154 aa, Homo sapiens
MNKFVGLSNVDPKSESLVVCDVAEDLVEKLRKFRFRKETNNAAIIMKIDKDKRLVVLDEELEGISPDELKDELPERQPRFIVYSYKYQHDDGRVSYPLCFIFSSPVGCKPEQQMMYAGSKNKLVQTAELTKVFEIRNTEDLTEEWLREKLGFFH

SEQ ID NO: 911871 - protein, 142 aa, Homo sapiens; identical to SEQ ID NO: 911867

SEQ ID NO: 911872 - protein, 142 aa, Homo sapiens; identical to SEQ ID NO: 911867

SEQ ID NO: 911873 - protein, 198 aa, Homo sapiens
AGGGGQRPGGLGGRFRSQQLASAHSYEYLASAAATTPQGSIFQLGPGWTRPAGHGTRSESLVVCDVAEDLVEKLRKFRFRKETNNAAIIMKIDKDKRLVVLDEELEGISPDELKDELPERQPRFIVYSYKYQHDDGRVSYPLCFIFSSPVGCKPEQQMMYAGSKNKLVQTAELTKVFEIRNTEDLTEEWLREKLGFFH

SEQ ID NO: 911874 - protein, 142 aa, Homo sapiens; identical to SEQ ID NO: 911867

SEQ ID NO: 911875 - protein, 352 aa, Homo sapiens
MPQAASGAAAAAAQRLRGGAALPVHVLVPVVQEPREAAVLHPHDHPAGPLHVRHVRGAEPLVAGRGRPLQRHALATLPVQRGATLRHQLGVHGSAQPVHLPRPHEAQELRVTAPRDLEHLGARAGDPCWEARRLPLLPSAQWDPAQHPSPLSPSTPISDCACLHQPAGGRALRTPGAPIGALQIPRNVKLGGVREERQKLGASLPFENLRSSQSSETLLVPRPPPSEGTSCSVYVCISIYTSVLLGLPPSLGSKSQGVYVQVTPTQPHSPSSSPAVSPNLPSCCFAWLCSYGESGNPAVPKAGPQKAGQKEGGTGRQQEGRAGRQEAAACQSAEWSHWRFKLTGLQPHSHSR

SEQ ID NO: 911876 - protein, 394 aa, Homo sapiens
MKRQNVRTLALIVCTFTYLLVGAAVFDALESEPELIERQRLELRQQELRARYNLSQGGYEELERVVLRLKPHKAGVQWRFAGSFYFAITVITTIGYGHAAPSTDGGKVFCMFYALLGIPLTLVMFQSLGERINTLVRYLLHRAKKGLGMRRADVSMANMVLIGFFSCISTLCIGAAAFSHYEHWTFFQAYYYCFITLTTIGFGDYVALQKDQALQTQPQYVAFSFVYILTGLTVIGAFLNLVVLRFMTMNAEDEKRDAEHRALLTRNGQAGGGGGGGSAHTTDTASSTAAAGGGGFRNVYAEVLHFQSMCSCLWYKSREKLQYSIPMIIPRDLSTSDTCVEQSHSSPGGGGRYSDTPSRRCLCSGAPRSAISSVSTGLHSLSTFRGLMKRRSSV

SEQ ID NO: 911877 - protein, 394 aa, Homo sapiens; identical to SEQ ID NO: 911876

SEQ ID NO: 911878 - protein, 394 aa, Homo sapiens; identical to SEQ ID NO: 911876

SEQ ID NO: 911879 - protein, 535 aa, Homo sapiens
GAARGRGVGGSRAAEVAAGAQAAGAAGMAKSNGENGPRAPAAGESLSGTRESLAQGPDAATTDELSSLGSDSEANGFAERRIDKFGFIVGSQGAEGALEEVPLEVLRQRESKWLDMLNNWDKWMAKKHKKIRLRCQKGIPPSLRGRAWQYLSGGKVKLQQNPGKFDELDMSPGDPKWLDVIERDLHRQFPFHEMFVSRGGHGQQDLFRVLKAYTLYRPEEGYCQAQAPIAAVLLMHMPAEQAFWCLVQICEKYLPGYYSEKLEAIQLDGEILFSLLQKVSPVAHKHLSRQKIDPLLYMTEWFMCAFSRTLPWSSVLRVWDMFFCEGVKIIFRVGLVLLKHALGSPEKVKACQGQYETIERLRSLSPKIMQEAFLVQEVVELPVTERQIEREHLIQLRRWQETRGELQCRSPPRLHGAKAILDAEPGPRPALQPSPSIRLPLDAPLPGSKAKPKPPKQAQKEQRKQMKGRGQLEKPPAPNQAMVVAAAGDACPPQHVPPKDSAPKDSAPQDLAPQVSAHHRSQESLTSQESEDTYL

SEQ ID NO: 911880 - protein, 715 aa, Homo sapiens
GAARGRGVGGSRAAEVAAGAQAAGAAGMAKSNGENGPRAPAAGESLSGTRESLAQGPDAATTDELSSLGSDSEANGFAERRIDKFGFIVGSQGAEGALEEVPLEVLRQRESKWLDMLNNWDKWMAKKHKKIRLRCQKGIPPSLRGRAWQYLSGGKVKLQQNPGKFDELDMSPGDPKWLDVIERDLHRQFPFHEMFVSRGGHGQQDLFRVLKAYTLYRPEEGYCQAQAPIAAVLLMHMPAEQAFWCLVQICEKYLPGYYSEKLEAIQLDGEILFSLLQKVSPVAHKHLSRQKIDPLLYMTEWFMCAFSRTLPWSSVLRVWDMFFCEGVKIIFRVGLVLLKHALGSPEKVKACQGQYETIERLRSLSPKIMQEAFLVQEVVELPVTERQIEREHLIQLRRWQETRELPPSEFLQVAEATWLVLNVSSHSGAAVQAAGVTKIARSVIAPLAEHHVSVLMLSTYQTDFILVREQDLSVVIHTLAQEFDIYREVGGEPVPVTRDDSSNGFPRTQHAPPRRQPLAVLNPAPSQFFAFSLIEGYISIVMDAETQKKFPSDLLLTSSSGELWRMVRIGGQPLGFDECGIVAQIAGPLAAADISAYYISTFNFDHALGARGRYRQRHRGPPAAAGRPGFLRPMGNRAASLLSPRPRLPKTSLSYFLKLWNEPPVLLGTLVPLSVCKLRAGTGFYADTCVHSQVEWAGASLTACLPMQGNTVLGA

SEQ ID NO: 911881 - protein, 756 aa, Homo sapiens
GAARGRGVGGSRAAEVAAGAQAAGAAGMAKSNGENGPRAPAAGESLSGTRESLAQGPDAATTDELSSLGSDSEANGFAERRIDKFGFIVGSQGAEGALEEVPLEVLRQRESKWLDMLNNWDKWMAKKHKKIRLRCQKGIPPSLRGRAWQYLSGGKVKLQQNPGKFDELDMSPGDPKWLDVIERDLHRQFPFHEMFVSRGGHGQQDLFRVLKAYTLYRPEEGYCQAQAPIAAVLLMHMPAEQAFWCLVQICEKYLPGYYSEKLEAIQLDGEILFSLLQKVSPVAHKHLSRQKIDPLLYMTEWFMCAFSRTLPWSSVLRVWDMFFCEGVKIIFRVGLVLLKHALGSPEKVKACQGQYETIERLRSLSPKIMQEAFLVQEVVELPVTERQIEREHLIQLRRWQETRELPPSEFLQVAEATWLVLNVSSHSGAAVQAAGVTKIARSVIAPLAEHHVSVLMLSTYQTDFILVREQDLSVVIHTLAQEFDIYREVGGEPVPVTRDDSSNGFPRTQHGPSPTVHPIQSPQNRFCVLTLDPETLPAIATTLIDVLFYSHSTPKEAASSSPEPSSITFFAFSLIEGYISIVMDAETQKKFPSDLLLTSSSGELWRMVRIGGQPLGFDECGIVAQIAGPLAAADISAYYISTFNFDHALGARGRYRQRHRGPPAAAGRPGFLRPMGNRAASLLSPRPRLPKTSLSYFLKLWNEPPVLLGTLVPLSVCKLRAGTGFYADTCVHSQVEWAGASLTACLPMQGNTVLGA

SEQ ID NO: 911882 - protein, 485 aa, Homo sapiens
LRGLTRHYVAGFGRATLRDRNPTPADLELQEFVSYVCGSAAASVLSALEEVPLEVLRQRESKWLDMLNNWDKWMAKKHKKIRLRCQKGIPPSLRGRAWQYLSGGKVKLQQNPGKFDELDMSPGDPKWLDVIERDLHRQFPFHEMFVSRGGHGQQDLFRVLKAYTLYRPEEGYCQAQAPIAAVLLMHMPAEQAFWCLVQICEKYLPGYYSEKLEAIQLDGEILFSLLQKVSPVAHKHLSRQKIDPLLYMTEWFMCAFSRTLPWSSVLRVWDMFFCEGVKIIFRVGLVLLKHALGSPEKVKACQGQYETIERLRSLSPKIMQEAFLVQEVVELPVTERQIEREHLIQLRRWQETRGELQCRSPPRLHGAKAILDAEPGPRPALQPSPSIRLPLDAPLPGSKAKPKPPKQAQKEQRKQMKGRGQLEKPPAPNQAMVVAAAGDACPPQHVPPKDSAPKDSAPQDLAPQVSAHHRSQESLTSQESEDTYL

SEQ ID NO: 911883 - protein, 510 aa, Homo sapiens
GAARGRGVGGSRAAEVAAGAQAAGAAGMAKSNGENGPRAPAAGESLSGTRESLAQGPDAATTDELSSLGSDSEANGFAERRIDKFGFIVGSQGAEGALEEVPLEVLRQRESKWLDMLNNWDKWMAKKHKKIRLRCQKGIPPSLRGRAWQYLSGGKVKLQQNPGKFDELDMSPGDPKWLDVIERDLHRQFPFHEMFVSRGGHGQQDLFRVLKAYTLYRPEEGYCQAQAPIAAVLLMHMPAEQAFWCLVQICEKYLPGYYSEKLEAIQLDGEILFSLLQKVSPVAHKHLSRQKIDPLLYMTEWFMCAFSRTLPWSSVLRVWDMFFCEGVKIIFRVGLVLLKHALGSPEKVKACQGQYETIERLRSLSPKIMQEAFLVQEVVELPVTERQIEREHLIQLRRWQETRELPPSEFLQVAEATWLVLNVSSHSGAAVQAAGVTKIARSVIAPLAEHHVSVLMLSTYQTDFILVREQDLSVVIHTLAQEFDIYREVEWAGASLTACLPMQGNTVLGA

SEQ ID NO: 911884 - protein, 438 aa, Homo sapiens
AWHEAGRIRGLGLVGGGVGSARAAMELHILEHRVRVLSVARPGLWLYTHPLIKLLFLPRRSRCKFFSLTETPEDYTLMVDEEGFKELPPSEFLQVAEATWLVLNVSSHSGAAVQAAGVTKIARSVIAPLAEHHVSVLMLSTYQTDFILVREQDLSVVIHTLAQEFDIYREVGGEPVPVTRDDSSNGFPRTQHGPSPTVHPIQSPQNRFCVLTLDPETLPAIATTLIDVLFYSHSTPKEAASSSPEPSSITFFAFSLIEGYISIVMDAETQKKFPSDLLLTSSSGELWRMVRIGGQPLGFDECGIVAQIAGPLAAADISAYYISTFNFDHALGARGRYRQRHRGPPAAAGRPGFLRPMGNRAASLLSPRPRLPKTSLSYFLKLWNEPPVLLGTLVPLSVCKLRAGTGFYADTCVHSQVEWAGASLTACLPMQGNTVLGA

SEQ ID NO: 911885 - protein, 469 aa, Homo sapiens
MKRAAVYKHRVRMLSDLPCRSLCLCPHRILNLGLTMPQCSVAAVLLTTVDRITRCSDLLSSYNECDEEKALVYDTLAIILRWDGYSPPFNLSLAKCRPWWCHVVQSFCSPTEDTVVELPPSEFLQVAEATWLVLNVSSHSGAAVQAAGVTKIARSVIAPLAEHHVSVLMLSTYQTDFILVREQDLSVVIHTLAQEFDIYREVGGEPVPVTRDDSSNGFPRTQHGPSPTVHPIQSPQNRFCVLTLDPETLPAIATTLIDVLFYSHSTPKEAASSSPEPSSITFFAFSLIEGYISIVMDAETQKKFPSDLLLTSSSGELWRMVRIGGQPLGFDECGIVAQIAGPLAAADISAYYISTFNFDHALGARGRYRQRHRGPPAAAGRPGFLRPMGNRAASLLSPRPRLPKTSLSYFLKLWNEPPVLLGTLVPLSVCKLRAGTGFYADTCVHSQVEWAGASLTACLPMQGNTVLGA

SEQ ID NO: 911886 - protein, 400 aa, Homo sapiens
AWHEAGRIRGLGLVGGGVGSARAAMELHILEHRVRVLSVARPGLWLYTHPLIKLLFLPRRSRCKFFSLTETPEDYTLMVDEEGFKELPPSEFLQVAEATWLVLNVSSHSGAAVQAAGVTKIARSVIAPLAEHHVSVLMLSTYQTDFILVREQDLSVVIHTLAQEFDIYREVGGEPVPVTRDDSSNGFPRTQHGPSPTVHPIQSPQNRFCVLTLDPETLPAIATTLIDVLFYSHRFPSDLLLTSSSGELWRMVRIGGQPLGFDECGIVAQIAGPLAAADISAYYISTFNFDHALGARGRYRQRHRGPPAAAGRPGFLRPMGNRAASLLSPRPRLPKTSLSYFLKLWNEPPVLLGTLVPLSVCKLRAGTGFYADTCVHSQVEWAGASLTACLPMQGNTVLGA

SEQ ID NO: 911887 - protein, 275 aa, Homo sapiens
AWHEAGRIRGLGLVGGGVGSARAAMELHILEHRVRVLSVARPGLWLYTHPLIKLLFLPRRSRCKFFSLTETPEDYTLMVDEEGFKELPPSEFLQVAEATWLVLNVSSHSGAAVQAAGVTKIARSVIAPLAEHHVSVLMLSTYQTDFILVREQDLSVVIHTLAQEFDIYREVGGEPVPVTRDDSSNGFPRTQHGPSPTVHPIQSPQNRFCVLTLDPETLPAIATTLIDVLFYSHRWTLELRLCPHSTVPYTLSHHFPPIYQFCTSCLSSLGVPGSP

SEQ ID NO: 911888 - protein, 756 aa, Homo sapiens; identical to SEQ ID NO: 911881

SEQ ID NO: 911889 - protein, 677 aa, Homo sapiens
GAARGRGVGGSRAAEVAAGAQAAGAAGMAKSNGENGPRAPAAGESLSGTRESLAQGPDAATTDELSSLGSDSEANGFAERRIDKFGFIVGSQGAEGALEEVPLEVLRQRESKWLDMLNNWDKWMAKKHKKIRLRCQKGIPPSLRGRAWQYLSGGKVKLQQNPGKFDELDMSPGDPKWLDVIERDLHRQFPFHEMFVSRGGHGQQDLFRVLKAYTLYRPEEGYCQAQAPIAAVLLMHMPAEQAFWCLVQICEKYLPGYYSEKLEAIQLDGEILFSLLQKVSPVAHKHLSRQKIDPLLYMTEWFMCAFSRTLPWSSVLRVWDMFFCEGVKIIFRVGLVLLKHALGSPEKVKACQGQYETIERLRSLSPKIMQEAFLVQEVVELPVTERQIEREHLIQLRRWQETRELPPSEFLQVAEATWLVLNVSSHSGAAVQAAGVTKIARSVIAPLAEHHVSVLMLSTYQTDFILVREQDLSVVIHTLAQEFDIYREVGGEPVPVTRDDSSNGFPRTQHGSPVTFLLTSSSGELWRMVRIGGQPLGFDECGIVAQIAGPLAAADISAYYISTFNFDHALGARGRYRQRHRGPPAAAGRPGFLRPMGNRAASLLSPRPRLPKTSLSYFLKLWNEPPVLLGTLVPLSVCKLRAGTGFYADTCVHSQVEWAGASLTACLPMQGNTVLGA

SEQ ID NO: 911890 - protein, 366 aa, Homo sapiens
MSPGDPKWLDVIERDLHRQFPFHEMFVSRGGHGQQDLFRVLKAYTLYRPEEGYCQAQAPIAAVLLMHMPAEQAFWCLVQICEKYLPGYYSEKLEAIQLDGEILFSLLQKVSPVAHKHLSRQKIDPLLYMTEWFMCAFSRTLPWSSVLRVWDMFFCEGVKIIFRVGLVLLKHALGSPEKVKACQGQYETIERLRSLSPKIMQEAFLVQEVVELPVTERQIEREHLIQLRRWQETRGELQCRSPPRLHGAKAILDAEPGPRPALQPSPSIRLPLDAPLPGSKAKPKPPKQAQKEQRKQMKGRGQLEKPPAPNQAMVVAAAGDACPPQHVPPKDSAPKDSAPQDLAPQVSAHHRSQESLTSQESEDTYL

SEQ ID NO: 911891 - protein, 327 aa, Homo sapiens
GAARGRGVGGSRAAEVAAGAQAAGAAGMAKSNGENGPRAPAAGESLSGTRESLAQGPDAATTDELSSLGSDSEANGFAERRIDKFGFIVGSQGAEGALEEVPLEVLRQRESKWLDMLNNWDKWMAKKHKKIRLRCQKGIPPSLRGRAWQYLSGGKVKLQQNPGKFDELDMSPGDPKWLDVIERDLHRQFPFHEMFVSRGGHGQQDLFRVLKAYTLYRPEEGYCQAQAPIAAVLLMHMPAEQAFWCLVQICEKYLPGYYSEKLEAIQLDGEILFSLLQKVSPVAHKHLSRQKIDPLLYMTEWFMCASRAGSPYNYTVHELTFHILPTL

SEQ ID NO: 911892 - protein, 361 aa, Homo sapiens
MVDEEGFKELPPSEFLQVAEATWLVLNVSSHSGAAVQAAGVTKIARSVIAPLAEHHVSVLMLSTYQTDFILVREQDLSVVIHTLAQEFDIYREVGGEPVPVTRDDSSNGFPRTQHGPSPTVHPIQSPQNRFCVLTLDPETLPAIATTLIDVLFYSHSTPKEAASSSPEPSSITFFAFSLIEGYISIVMDAETQKKFPSDLLLTSSSGELWRMVRIGGQPLGFDECGIVAQIAGPLAAADISAYYISTFNFDHALGARGRYRQRHRGPPAAAGRPGFLRPMGNRAASLLSPRPRLPKTSLSYFLKLWNEPPVLLGTLVPLSVCKLRAGTGFYADTCVHSQVEWAGASLTACLPMQGNTVLGA

SEQ ID NO: 911893 - protein, 301 aa, Homo sapiens
MLSTYQTDFILVREQDLSVVIHTLAQEFDIYREVGGEPVPVTRDDSSNGFPRTQHGPSPTVHPIQSPQNRFCVLTLDPETLPAIATTLIDVLFYSHSTPKEAASSSPEPSSITFFAFSLIEGYISIVMDAETQKKFPSDLLLTSSSGELWRMVRIGGQPLGFDECGIVAQIAGPLAAADISAYYISTFNFDHALGARGRYRQRHRGPPAAAGRPGFLRPMGNRAASLLSPRPRLPKTSLSYFLKLWNEPPVLLGTLVPLSVCKLRAGTGFYADTCVHSQVEWAGASLTACLPMQGNTVLGA

SEQ ID NO: 911894 - protein, 158 aa, Homo sapiens
MSPGDPKWLDVIERDLHRQFPFHEMFVSRGGHGQQDLFRVLKAYTLYRPEEGYCQAQAPIAAVLLMHMPAEQAFWCLVQICEKYLPGYYSEKLEAIQLDGEILFSLLQKVSPVAHKHLSRQKIDPLLYMTEWFMCASRAGSPYNYTVHELTFHILPTL

SEQ ID NO: 911895 - protein, 460 aa, Homo sapiens
DLASMEDKTEKWSSQPEGPLKLKASSTDMPSQISVVNVDQLWEDSVLTVKFPKLMVPRFSFAAPSSEDDVFIPTVREVQCPEANIDTALCKESPGLWGASILKAGAGVPGEQPVDLNLPLEAPPISKVRVHIQGAQVESQEVTIHSIVTPEFVDLSVPRTFSTQIVRESEIPTSEIQTPSYGFSLLKVKIPEPHTQARVYTTMTQHSRTQEGTEEAPIQATPGVDSISGDLQPDTGEPFEMISSSVNVLGQQTLTFEVPSGHQLADSCSDEEPAEILEFPPDDSQEATTPLADEGRAPKDKPESKKSGLLWFWLPNIGFSSSVDETGVDSKNDVQRSAPIQTQPEARPEAELPKKQEKAGWFRFPKLGFSSSPTKKSKSTEDGAELEEQKLQEETITFFDARESFSPEEKEEGELIGPVGTGLDSRVMVTSAARTELILPEQDRKADDESKGSGLGPNEG

SEQ ID NO: 911896 - protein, 273 aa, Homo sapiens
DLASMEDKTEKWSSQPEGPLKLKASSTDMPSQISVVNVDQLWEDSVLTVKFPKLMVPRFSFAAPSSEDDVFIPTVREVQCPEANIDTALCKESPGLWGASILKAGAGVPGEQPVDLNLPLEAPPISKVRVHIQGAQVESQEVTIHSIVTPEFVDLSVPRTFSTQIVRESEIPTSEIQTPSYGFSLLKVKIPEPHTQARVYTTMTQHSRTQEGTEEAPIQATPGVDSISGDLQPDTGEPFEMISSSVNVLGSRWPEGTSNVSVCCPSTLTLEEI

SEQ ID NO: 911897 - protein, 72 aa, Homo sapiens
TKPNGKEHNSRNIRLEPEVSLKEEGELIGPVGTGLDSRVMVTSAARTELILPEQDRKADDESKGSGLGPNEG

SEQ ID NO: 911898 - protein, 460 aa, Homo sapiens; identical to SEQ ID NO: 911895

SEQ ID NO: 911899 - protein, 162 aa, Homo sapiens
RVHSHSAVYASSMSPPIAEQIIRSLKLIMGLDGTTQGLQRVQQLAKNTRYFRQRLQEMGFIIYGNENASVVPLLLYMPGKVAAFARHMLEKKIGVVVVGFPATPLAEARARFCVSAAHTREMLDTVLEALDEMGDLLQLKYSRHKKSARPELYDETSFELED

SEQ ID NO: 911900 - protein, 162 aa, Homo sapiens; identical to SEQ ID NO: 911899

SEQ ID NO: 911901 - protein, 225 aa, Homo sapiens
MDIRPNHTIYINNMNDKIKKEELKRSLYALFSQFGHVVDIVALKTMKMRGQAFVIFKELGSSTNALRQLQGFPFYGKPMRIQYAKTDSDIISKMRGTFADKEKKKEKKKAKTVEQTATTTNKKPGQGTPNSANTQGNSTPNPQVPDYPPNYILFLNNLPEETNEMMLSMLFNQFPGFKEVRLVPGRHDIAFVEFENDGQAGAARDALQGFKITPSHAMKITYAKK

SEQ ID NO: 911902 - protein, 225 aa, Homo sapiens; identical to SEQ ID NO: 911901

SEQ ID NO: 911903 - protein, 259 aa, Homo sapiens
MSVCSCEAWTTVDVRVQIGYTSLHEELNDITWIIIDQIYHNFNIIIYECTQNLERKLKRSLYALFSQFGHVVDIVALKTMKMRGQAFVIFKELGSSTNALRQLQGFPFYGKPMRIQYAKTDSDIISKMRGTFADKEKKKEKKKAKTVEQTATTTNKKPGQGTPNSANTQGNSTPNPQVPDYPPNYILFLNNLPEETNEMMLSMLFNQFPGFKEVRLVPGRHDIAFVEFENDGQAGAARDALQGFKITPSHAMKITYAKK

SEQ ID NO: 911904 - protein, 198 aa, Homo sapiens
GRLLLLLLEFKLLTMYGDMKMRGQAFVIFKELGSSTNALRQLQGFPFYGKPMRIQYAKTDSDIISKMRGTFADKEKKKEKKKAKTVEQTATTTNKKPGQGTPNSANTQGNSTPNPQVPDYPPNYILFLNNLPEETNEMMLSMLFNQFPGFKEVRLVPGRHDIAFVEFENDGQAGAARDALQGFKITPSHAMKITYAKK

SEQ ID NO: 911905 - protein, 140 aa, Homo sapiens
MDIRPNHTIYINNMNDKIKKEELKRSLYALFSQFGHVVDIVALKTMKMRGQAFVIFKELGSSTNALRQLQGFPFYGKPMRIQYAKTDSDIISKMRGTFADKEKKKEKKKAKTVEQTATTTNKKPGQVPWLQGSTSGTREA

SEQ ID NO: 911906 - protein, 140 aa, Homo sapiens; identical to SEQ ID NO: 911905

SEQ ID NO: 911907 - protein, 154 aa, Homo sapiens
MDIRPNHTIYINNMNDKIKKEELKRSLYALFSQFGHVVDIVALKTMKMRGQAFVIFKELGSSTNALRQLQGFPFYGKPMRIQYAKTDSDIISKMRGTFADKEKKKEKKKAKTVEQTATTTNKKPGQGTPNSANTQGNSTPNPQVPDYHSTLPGK

SEQ ID NO: 911908 - protein, 225 aa, Homo sapiens; identical to SEQ ID NO: 911901

SEQ ID NO: 911909 - protein, 225 aa, Homo sapiens; identical to SEQ ID NO: 911901

SEQ ID NO: 911910 - protein, 211 aa, Homo sapiens
AAAYYYYSRIQASNDVRGHGRDVIAESREQSMKMRGQAFVIFKELGSSTNALRQLQGFPFYGKPMRIQYAKTDSDIISKMRGTFADKEKKKEKKKAKTVEQTATTTNKKPGQGTPNSANTQGNSTPNPQVPDYPPNYILFLNNLPEETNEMMLSMLFNQFPGFKEVRLVPGRHDIAFVEFENDGQAGAARDALQGFKITPSHAMKITYAKK

SEQ ID NO: 911911 - protein, 173 aa, Homo sapiens
MDIRPNHTIYINNMNDKIKKEELKRSLYALFSQFGHVVDIVALKTMKMRGQAFVIFKELGSSTNALRQLQGFPFYGKPMRIQYAKTDSDIISKMRGTFADKEKKKEKKKAKTVEQTATTTNKKPGQGTPNSANTQGNSTPNPQVPDYPPNYILFLNNLPEETNEMMLSMLFNQ

SEQ ID NO: 911912 - protein, 157 aa, Homo sapiens
MDIRPNHTIYINNMNDKIKKEELKRSLYALFSQFGHVVDIVALKTMKMRGQAFVIFKELGSSTNALRQLQGFPFYGKPMRIQYAKTDSDIISKMRGTFADKEKKKEKKKAKTVEQTATTTNKKPGQGTPNSANTQGNSTPNPQVIFFPCRAYLKIRL

SEQ ID NO: 911913 - protein, 140 aa, Homo sapiens; identical to SEQ ID NO: 911905

SEQ ID NO: 911914 - protein, 583 aa, Homo sapiens
NRYKMAEGDEAARGQQPHQGLWRRRRTSDPSAAVNHVSSTTSLGENYEDDDLVNSDEVMKKPCPVQIVLAHEDDHNFELDEEALEQILLQEHIRDLNIVVVSVAGAFRKGKSFLLDFMLRYMYNKDSQSWIGGNNEPLTGFTWRGGCERETTGIQVWNEVFVIDRPNGTKVAVLLMDTQGAFDSQSTIKDCATVFALSTMTSSVQVYNLSQNIQEDDLQHLQLFTEYGRLAMEEIYQKPFQTLMFLIRDWSYPYEHSYGLEGGKQFLEKRLQVKQNQHEELQNVRKHIHNCFSNLGCFLLPHPGLKVATNPSFDGRLKDIDEDFKRELRNLVPLLLAPENLVEKEISGSKVTCRDLVEYFKAYIKIYQGEELPHPKSMLQATAEANNLAAVAGARDTYCKSMEQVCGGDKPYIAPSDLERKHLDLKEVAIKQFRSVKKMGGDEFCRRYQDQLEAEIEETYANFIKHNDGKNIFYAARTPATLFAVMFAMYIISGLTGFIGLNSIAVLCNLVMGLALIFLCTWAYVKYSGEFREIGTVIDQIAETLWEQVFSKLFEVTRRRMVHRALSSAQRQRLSSNNNKKKN

SEQ ID NO: 911915 - protein, 412 aa, Homo sapiens
MDTQGAFDSQSTIKDCATVFALSTMTSSVQVYNLSQNIQEDDLQHLQLFTEYGRLAMEEIYQKPFQTLMFLIRDWSYPYEHSYGLEGGKQFLEKRLQVKQNQHEELQNVRKHIHNCFSNLGCFLLPHPGLKVATNPSFDGRLKDIDEDFKRELRNLVPLLLAPENLVEKEISGSKVTCRDLVEYFKAYIKIYQGEELPHPKSMLQATAEANNLAAVAGARDTYCKSMEQVCGGDKPYIAPSDLERKHLDLKEVAIKQFRSVKKMGGDEFCRRYQDQLEAEIEETYANFIKHNDGKNIFYAARTPATLFAVMFAMYIISGLTGFIGLNSIAVLCNLVMGLALIFLCTWAYVKYSGEFREIGTVIDQIAETLWEQVLKPLGDNLMEENIRQSVTNSIKAGLTDQVSHHARLKTD

SEQ ID NO: 911916 - protein, 507 aa, Homo sapiens
NRYKMAEGDEAARGQQPHQGLWRRRRTSDPSAAVNHVSSTTSLGENYEDDDLVNSDEVMKKPCPVQIVLAHEDDHNFELDEEALEQILLQEHIRDLNIVVVSVAGAFRKGKSFLLDFMLRYMYNKVYNLSQNIQEDDLQHLQLFTEYGRLAMEEIYQKPFQTLMFLIRDWSYPYEHSYGLEGGKQFLEKRLQVKQNQHEELQNVRKHIHNCFSNLGCFLLPHPGLKVATNPSFDGRLKDIDEDFKRELRNLVPLLLAPENLVEKEISGSKVTCRDLVEYFKAYIKIYQGEELPHPKSMLQATAEANNLAAVAGARDTYCKSMEQVCGGDKPYIAPSDLERKHLDLKEVAIKQFRSVKKMGGDEFCRRYQDQLEAEIEETYANFIKHNDGKNIFYAARTPATLFAVMFAMYIISGLTGFIGLNSIAVLCNLVMGLALIFLCTWAYVKYSGEFREIGTVIDQIAETLWEQVLKPLGDNLMEENIRQSVTNSIKAGLTDQVSHHARLKTD

SEQ ID NO: 911917 - protein, 210 aa, Homo sapiens [sequence omitted]

SEQ ID NO: 911918 - protein, 587 aa, Homo sapiens
NRYKMAEGDEAARGQQPHQGLWRRRRTSDPSAAVNHVSSTTSLGENYEDDDLVNSDEVMKKPCPVQIVLAHEDDHNFELDEEALEQILLQEHIRDLNIVVVSVAGAFRKGKSFLLDFMLRYMYNKDSQSWIGGNNEPLTGFTWRGGCERETTGIQVWNEVFVIDRPNGTKVAVLLMDTQGAFDSQSTIKDCATVFALSTMTSSVQVYNLSQNIQEDDLQHLQLFTEYGRLAMEEIYQKPFQTLMFLIRDWSYPYEHSYGLEGGKQFLEKRLQVKQNQHEELQNVRKHIHNCFSNLGCFLLPHPGLKVATNPSFDGRLKDIDEDFKRELRNLVPLLLAPENLVEKEISGSKVTCRDLVEYFKAYIKIYQGEELPHPKSMLQATAEANNLAAVAGARDTYCKSMEQVCGGDKPYIAPSDLERKHLDLKEVAIKQFRSVKKMGGDEFCRRYQDQLEAEIEETYANFIKHNDGKNIFYAARTPATLFAVMFAMYIISGLTGFIGLNSIAVLCNLVMGLALIFLCTWAYVKYSGEFREIGTVIDQIAETLWEQVLKPLGDNLMEENIRQSVTNSIKAGLTDQVSHHARLKTD

SEQ ID NO: 911919 - protein, 583 aa, Homo sapiens; identical to SEQ ID NO: 911914

SEQ ID NO: 911920 - protein, 149 aa, Homo sapiens [sequence omitted]

SEQ ID NO: 911921 - protein, 141 aa, Homo sapiens
LLGRAGLFPGGAWGLRPRTALAATNMETLYRVPFLVLECPNLKLKKPPWLHMPSAMTVYALVVVSYFLITGGIIYDVIVEPPSVGSMTDEHGHQRPVAFCGLQSKWTIYYGRTCIQLPIYNGRFRFHNPGPIECTKYPKTQ

SEQ ID NO: 911922 - protein, 141 aa, Homo sapiens; identical to SEQ ID NO: 911921

SEQ ID NO: 911923 - protein, 141 aa, Homo sapiens; identical to SEQ ID NO: 911921

SEQ ID NO: 911924 - protein, 72 aa, Homo sapiens
RGAEGEKVLDAANMGTLYRVAHYRLASVLTWKHRKKRGLVETMSDRTMNMCIVHVLVSVLTFPRSIGGNHLE

SEQ ID NO: 911925 - protein, 142 aa, Homo sapiens
LLGRAGLFPGGAWGLRPRTALAATNMETLYRVPFLVLECPNLKLKKPPWLHMPSAMTVYALVVVSYFLITGGIIYDVIVEPPSVGSMTDEHGHQRPVAFCGLQSKWTIYYGRTCIQLPIYNGRFRFHNPGPIECTKYPFFHG

SEQ ID NO: 911926 - protein, 141 aa, Homo sapiens; identical to SEQ ID NO: 911921

SEQ ID NO: 911927 - protein, 141 aa, Homo sapiens; identical to SEQ ID NO: 911921

SEQ ID NO: 911928 - protein, 141 aa, Homo sapiens
  misc_feature (130)..(130): Xaa can be any naturally occurring amino acid
  misc_feature (137)..(137): Xaa can be any naturally occurring amino acid
LLGRAGLFPGGAWGLRPRTALAATNMETLYRVPFLVLECPNLKLKKPPWLHMPSAMTVYALVVVSYFLITGGIIYDVIVEPPSVGSMTDEHGHQRPVAFCGLQSKWTIYYGRTCIQLPIYNGRFLRAFHXPWDPGSXWPTP

SEQ ID NO: 911929 - protein, 141 aa, Homo sapiens; identical to SEQ ID NO: 911921

SEQ ID NO: 911930 - protein, 179 aa, Homo sapiens
RKLVISTHLIRGHRRTEDERRISDEKGDTRIQLSKYSEDGIAGFGITRSAWGLRPRTALAATNMETLYRVPFLVLECPNLKLKKPPWLHMPSAMTVYALVVVSYFLITGGIIYDVIVEPPSVGSMTDEHGHQRPVAFCGLQSKWTIYYGRTCIQLPIYNGRFRFHNPGPIECTKYPKTQ

SEQ ID NO: 911931 - protein, 99 aa, Homo sapiens
RKLVISTHLIRGHRRTEDERRISDEKGDTRIQLSKYSEDGIAGFGITRSAWGLRPRTALAATNMETLYRVPFLVLECPNLKLKKPPWLHMPSAMTVNNL

SEQ ID NO: 911932 - protein, 148 aa, Homo sapiens
AVSGEAGGGLRRITDLGDYLYAKLVHLVFQYCIALYLSTYTESLEEESRAWLRNAVRTEDLCMLVCGCLYLPLSTGGHKFYVCSSSEPPSVGSMTDEHGHQRPVAFCGLQSKWTIYYGRTCIQLPIYNGRFRFHNPGPIECTKYPKTQ

SEQ ID NO: 911933 - protein, 112 aa, Homo sapiens
LLGRAGLFPGGAWGLRPRTALAATNMETLYRVPFLVLECPNLKLKKPPWLHMPSAMTVYALVVVSYFLITGGIIYDVIVEPPSVGSMTDEHGHQRPVAFCGLQGLSDGLECL

SEQ ID NO: 911934 - protein, 112 aa, Homo sapiens; identical to SEQ ID NO: 911933

SEQ ID NO: 911935 - protein, 411 aa, Homo sapiens
MAEGSRGGPTCSGVGGRQDPVSGSGGCNFPEYELPELNTRAFHVGAFGELWRGRLRGAGDLSLREPPASALPGSQAADSDREDAAVARDLDCSLEAAAELRAVCGLDKLKCLEDGEDPEVIPENTDLVTLGVRKRFLEHREETITIDRACRQETFVYEMESHAIGKKPENSADMIEEGELILSVNILYPVIFHKHKEHKPYQTMLVLGSQKLTQLRDSIRCVSDLQIGGEFSNTPDQAPEHISKDLYKSAFFYFEGTFYNDKRYPECRDLSRTIIEWSESHDRGYGKFQTARMEDFTFNDLCIKLGFPYLYCHQGDCEHVIVITDIRLVHHDDCLDRTLYPLLIKKHWLWTRKCFVCKMYTARWVTNNDSFAPEDPCFFCDVCFRMLHYDSEGNKLGEFLAYPYVDPGTFN

SEQ ID NO: 911936 - protein, 291 aa, Homo sapiens
MAEGSRGGPTCSGVGGRQDPVSGSGGCNFPEYELPELNTRAFHVGAFGELWRGRLRGAGDLSLREPPASALPGSQAADSDREDAAVARDLDCSLEAAAELRAVCGLDKLKCLEDGEDPEVIPENTDLVTLGVRKRFLEHREETITIDRACRQETFVYEMESHAIGKKPENSADMIEEGELILSVNILYPVIFHKHKEHKPYQTMLVLGSQKLTQLRDSIRCVSDLQIGGEFSNTPDQAPEHISKDLYKSAFFYFEGTFYNDKRYPECRDLSRTIIDVGKSPMDREANGKGS

SEQ ID NO: 911937 - protein, 411 aa, Homo sapiens; identical to SEQ ID NO: 911935

SEQ ID NO: 911938 - protein, 411 aa, Homo sapiens; identical to SEQ ID NO: 911935

SEQ ID NO: 911939 - protein, 171 aa, Homo sapiens
MAEGSRGGPTCSGVGGRQDPVSGSGGCNFPEYELPELNTRAFHVGAFGELWRGRLRGAGDLSLREPPASALPGSQAADSDREDAAVARDLDCSLEAAAELRAVCGLDKLKCLEDGEDPEVIPENTDLVTLGVRKRFLEHREETITIDRACRQETFVYEMVIKSLIFFTLFS

SEQ ID NO: 911940 - protein, 411 aa, Homo sapiens; identical to SEQ ID NO: 911935

SEQ ID NO: 911941 - protein, 169 aa, Homo sapiens
TLELDPIGAPLLTAPEHISKDLYKSAFFYFEGTFYNDKRYPECRDLSRTIIEWSESHDRGYGKFQTARMEDFTFNDLCIKLGFPYLYCHQGDCEHVIVITDIRLVHHDDCLDRTLYPLLIKKHWLWTRKCFVCKMYTARWVTNNDSFAPEDPCFFCECSCQCAHGQQHS

SEQ ID NO: 911942 - protein, 361 aa, Homo sapiens
MAEGSRGGPTCSGVGGRQDPVSGSGGCNFPEYELPELNTRAFHVGAFGELWRGRLRGAGDLSLREPPASALPGSQAADSDREDAAVARDLDCSLEAAAELRAVCGLDKLKCLEDGEDPEVIPENTDLVTLGVRKRFLEHREETITIDRACRQETFVYEMESHAIGKKPENSADMIEEGELILSVNILYPVIFHKDLYKSAFFYFEGTFYNDKRYPECRDLSRTIIEWSESHDRGYGKFQTARMEDFTFNDLCIKLGFPYLYCHQGDCEHVIVITDIRLVHHDDCLDRTLYPLLIKKHWLWTRKCFVCKMYTARWVTNNDSFAPEDPCFFCDVCFRMLHYDSEGNKLGEFLAYPYVDPGTFN

SEQ ID NO: 911943 - protein, 212 aa, Homo sapiens
SRRQSVRRPGGTRSHSPTHGRRDAGARLTMWKLGRGRVLLDEPPEEEDGLRGGPPPAAAAAAQVQGASFRGWKEVTSLFNKDDEQHLLERCKSPKSKGTNLRLKEELKAEKKSGFWDNLVLKQNIQSKKPDEIEGWEPPKLALEDISADPEDTVGGHPSWSGWEDDAKGSTKYTSLASSANSSRWSLRAAGRLVSIRRQSKGHLTDSPEEAE

SEQ ID NO: 911944 - protein, 212 aa, Homo sapiens; identical to SEQ ID NO: 911943

SEQ ID NO: 911945 - protein, 212 aa, Homo sapiens; identical to SEQ ID NO: 911943

SEQ ID NO: 911946 - protein, 212 aa, Homo sapiens; identical to SEQ ID NO: 911943

SEQ ID NO: 911947 - protein, 203 aa, Homo sapiens
MGGSLRVAVLGAPGVGKTAIIRQFLFGDYPERHRPTDGPRLYRPAVLLDGAVYDLSIRDGDVAGPGSSPGGPEEWPDAKDWSLQDTDAFVLVYDICSPDSFDYVKALRQRIAETRPAGAPEAPILVVGNKRDRQRLRFGPRRALAALVRRGWRCGYLECSAKYNWHVLRLFRELLRCALVRARPAHPALRLQGALHPARCSLM

SEQ ID NO: 911948 - protein, 197 aa, Homo sapiens
MCSLAHMGLGFRWGGGGGGVSGRRKGMRLRVYTHWGNSPAVGSPRLSSPFGPQAGGRARSAHPRGRQQAGQAAAALRTAARAGRPSAQGLALRLPRVLRQVQLARAASLPRAAALRSGARAPCTPGPAPAGGAASRALQPHVTRSDSAIHGPHLVTGTIRDLDWTGSPNFTGTGQGSLRPDWMRKAPTQSPKRLAPF

SEQ ID NO: 911949 - protein, 84 aa, Homo sapiens
SRSASPCALGRPARAAVRGAASRALQPHVTRSDSAIHGPHLVTGTIRDLDWTGSPNFTGTGQGSLRPDWMRKAPTQSPKRLAPF

SEQ ID NO: 911950 - protein, 203 aa, Homo sapiens; identical to SEQ ID NO: 911947

SEQ ID NO: 911951 - protein, 333 aa, Homo sapiens
MGGSLRVAVLGAPGVGKTAIIRQFLFGDYPERHRPTDGPRLYRPAVLLDGAVYDLSIRDGDVAGPGSSPGGPEEWPDAKDWSLQDTDAFVLVYDICSPDSFDYVKALRQRIAETRKGPGSSGGGELGQVWQGLCLRRVCRVSQRRGPGLQAFARGKVLSCMCSLAHMGLGFRWGGGGGGVSGRRKGMRLRVYTHWGNSPAVGSPRLSSPFGPQAGGRARSAHPRGRQQAGQAAAALRTAARAGRPSAQGLALRLPRVLRQVQLARAASLPRAAALRSGARAPCTPGPAPAGGAASRALQPHVTRSDSAIHGPHLVTGTIRDLDWTGSPNLHWR

SEQ ID NO: 911952 - protein, 186 aa, Homo sapiens
PASAPGWRELGVSCLSQSGFGDSCVLRLFMEEMSGESVVSSAVPAAATRTTSFKGTSPSSKYVKLNVGGALYYTTMQTLTKQDTMLKAMFSGRMEVLTDSEGWILIDRCGKHFGTILNYLRDGAVPLPESRREIEELLAEAKYYLVQGLVEECQAALQFTGGENPSLFPAMTAPSPLARACPAGQL

SEQ ID NO: 911953 - protein, 342 aa, Homo sapiens
PASAPGWRELGVSCLSQSGFGDSCVLRLFMEEMSGESVVSSAVPAAATRTTSFKGTSPSSKYVKLNVGGALYYTTMQTLTKQDTMLKAMFSGRMEVLTDSEGWILIDRCGKHFGTILNYLRDGAVPLPESRREIEELLAEAKYYLVQGLVEECQAALQNKDTYEPFCKVPVITSSKEEQKLIATSNKPAVKLLYNRSNNKYSYTSNSDDNMLKNIELFDKLSLRFNGRVLFIKDVIGDEICCWSFYGQGRKIAEVCCTSIVYATEKKQTKVEFPEARIYEETLNILLYEAQDGRGPDNALLEATGGAAGRSHHLDEDEERERIERVRRIHIKRPDDRAHLHQ

SEQ ID NO: 911954 - protein, 342 aa, Homo sapiens; identical to SEQ ID NO: 911953

SEQ ID NO: 911955 - protein, 342 aa, Homo sapiens; identical to SEQ ID NO: 911953

SEQ ID NO: 911956 - protein, 342 aa, Homo sapiens; identical to SEQ ID NO: 911953

SEQ ID NO: 911957 - protein, 342 aa, Homo sapiens; identical to SEQ ID NO: 911953

SEQ ID NO: 911958 - protein, 765 aa, Homo sapiens
FPSPFEEVPEAHRASPREGTSGGERLQDLVKSKMSETSRTAFGGRRAVPPNNSNAAEDDLPTVELQGVVPRGVNLQEFLNVTSVHLFKERWDTNKVDHHTDKYENNKLIVRRGQSFYVQIDFSRPYDPRRDLFRVEYVIGRYPQENKGTYIPVPIVSELQSGKWGAKIVMREDRSVRLSIQSSPKCIVGKFRMYVAVWTPYGVLRTSRNPETDTYILFNPWCEDDAVYLDNEKEREEYVLNDIGVIFYGEVNDIKTRSWSYGQFEDGILDTCLYVMDRAQMDLSGRGNPIKVSRVGSAMVNAKDDEGVLVGSWDNIYAYGVPPSAWTGSVDILLEYRSSENPVRYGQCWVFAGVFNTFLRCLGIPARIVTNYFSAHDNDANLQMDIFLEEDGNVNSKLTKDSVWNYHCWNEAWMTRPDLPVGFGGWQAVDSTPQENSDGMYRCGPASVQAIKHGHVCFQFDAPFVFAEVNSDLIYITAKKDGTHVVENVDATHIGKLIVTKQIGGDGMMDITDTYKFQEGQEEERLALETALMYGAKKPLNTEGVMKSRSNVDMDFEVENAVLGKDFKLSITFRNNSHNRYTITAYLSANITFYTGVPKAEFKKETFDVTLEPLSFKKEAVLIQAGEYMGQLLEQASLHFFVTARINETRDVLAKQKSTVLTIPEIIIKVRGTQVVGSDMTVTVEFTNPLKETLRNVWVHLDGPGVTRPMKKMFREIRPNSTVQWEEVCRPWVSGHRKLIASMSSDSLRHVYGELDVQIQRRPSM

SEQ ID NO: 911959 - protein, 765 aa, Homo sapiens; identical to SEQ ID NO: 911958

SEQ ID NO: 911960 - protein, 326 aa, Homo sapiens
MYRCGPASVQAIKHGHVCFQFDAPFVFAEVNSDLIYITAKKDGTHVVENVDATHIGKLIVTKQIGGDGMMDITDTYKFQEGQEEERLALETALMYGAKKPLNTEGVMKSRSNVDMDFEVENAVLGKDFKLSITFRNNSHNRYTITAYLSANITFYTGVPKAEFKKETFDVTLEPLSFKKEAVLIQAGEYMGQLLEQASLHFFVTARINETRDVLAKQKSTVLTIPEIIIKVRGTQVVGSDMTVTVEFTNPLKETLRNVWVHLDGPGVTRPMKKMFREIRPNSTVQWEEVCRPWVSGHRKLIASMSSDSLRHVYGELDVQIQRRPSM

SEQ ID NO: 911961 - protein, 232 aa, Homo sapiens
SAAASGGEDEEEASSPDSGHLKDGIRRGRPRADTVRDLINEGEHSSSRIRCNICNRVFPREKSLQAHKRTHTGERPYLCDYPDCGKAFVQSGQLKTHQRLHTGEKPFVCSENGCLSRFTHANRHCPKHPYARLKREEPTDTLSKHQAADNKAAAEWLARYWEMREQRTPTLKGKLVQKADQEQQDPLEYLQSDEEDDEKRGAQRRLQEQRERLHGALALIELANLTGAPLRQ

SEQ ID NO: 911962 - protein, 119 aa, Homo sapiens
MPQSKSRKIAILGYRSVGKSSLTIQFVEGQFVDSYDPTIENTFTKLITVNGQEYHLQLVDTAGQDEYSIFPQTYSIDINGYILVYSVTSIKSFEVIKVIHGQIVGYGGESTNTYYVGWE

SEQ ID NO: 911963 - protein, 119 aa, Homo sapiens; identical to SEQ ID NO: 911962

SEQ ID NO: 911964 - protein, 119 aa, Homo sapiens; identical to SEQ ID NO: 911962

SEQ ID NO: 911965 - protein, 119 aa, Homo sapiens; identical to SEQ ID NO: 911962

SEQ ID NO: 911966 - protein, 119 aa, Homo sapiens; identical to SEQ ID NO: 911962

SEQ ID NO: 911967 - protein, 119 aa, Homo sapiens; identical to SEQ ID NO: 911962

SEQ ID NO: 911968 - protein, 108 aa, Homo sapiens
MGTFNLGKSSLTIQFVEGQFVDSYDPTIENTFTKLITVNGQEYHLQLVDTAGQDEYSIFPQTYSIDINGYILVYSVTSIKSFEVIKVIHGQIVGYGGESTNTYYVGWE

SEQ ID NO: 911969 - protein, 108 aa, Homo sapiens; identical to SEQ ID NO: 911968

SEQ ID NO: 911970 - protein, 103 aa, Homo sapiens
MPQSKSRKIAILGYRSVGKSSLTIQFVEGQFVDSYDPTIENIVDTAGQDEYSIFPQTYSIDINGYILVYSVTSIKSFEVIKVIHGQIVGYGGESTNTYYVGWE

SEQ ID NO: 911971 - protein, 156 aa, Homo sapiens
MGDGVSDTSSRGCAGAVQSALGENGVIKKRRKKGEGHDAASFSRDFSGGIAASPFFAFKVKRRPDAPPAYFGGRRRRATARRGAVLTPAGHVGVLWGGGAPPRGRFRAVGSARASEREAAAPAAAPALYAALSRRGRRRSQQQEPPPPRLMWLGRG

SEQ ID NO: 911972 - protein, 76 aa, Homo sapiens
PRAAGFGTSGNKKDLHMERVISYEEGKALAESWNAAFLESSAKENQTAVDVFRRIILEAEKMDGAASQGKSSCSVM

SEQ ID NO: 911973 - protein, 116 aa, Homo sapiens
MPQSKSRKIAILGYRSVGKSSLTIQFVEGQFVDSYDPTIENTFTKLITVNGQEYHLQLVDTAGQVSDLWYLRILYSISDILVLALIFKSTSYAKKTPQVVCRQSLTPNGLACSGST

SEQ ID NO: 911974 - protein, 132 aa, Homo sapiens
RRVVSEIPVLKTNAGPRDRELWVQRLKEEYQPLSGKSSLTIQFVEGQFVDSYDPTIENTFTKLITVNGQEYHLQLVDTAGQDEYSIFPQTYSIDINGYILVYSVTSIKSFEVMVPRSGEQSLLLGNLAKVNK

SEQ ID NO: 911975 - protein, 119 aa, Homo sapiens; identical to SEQ ID NO: 911962

SEQ ID NO: 911976 - protein, 119 aa, Homo sapiens; identical to SEQ ID NO: 911962

SEQ ID NO: 911977 - protein, 119 aa, Homo sapiens; identical to SEQ ID NO: 911962

SEQ ID NO: 911978 - protein, 119 aa, Homo sapiens; identical to SEQ ID NO: 911962

SEQ ID NO: 911979 - protein, 119 aa, Homo sapiens; identical to SEQ ID NO: 911962

SEQ ID NO: 911980 - protein, 156 aa, Homo sapiens
MGDGVSDTSSRGCAGAVQSALGENGVIKKRRKKGEGHDAASFSRDFSGGIAASPFFAFKVKRRPDAPPAYFGGRRRRATARRGAVLTPAGHVGVLWGGGAPPRGRFRAVGSARASEREAAAPAAAPALYAALVQVPEDRDPGLPVCGEILIDDSIC

SEQ ID NO: 911981 - protein, 119 aa, Homo sapiens; identical to SEQ ID NO: 911962

SEQ ID NO: 911982 - protein, 165 aa, Homo sapiens
MPQSKSRKIAILGYRSVGKSSLTIQFVEGQFVDSYDPTIENTFTKLITVNGQEYHLQLVDTAGQDEYSIFPQTYSIDINGYILVYSVTSIKRIPIMLVGNKKDLHMERVISYEEGKALAESWNAAFLESSAKENQTAVDVFRRIILEAEKMDGAASQGKSSCSVM

SEQ ID NO: 911983 - protein, 119 aa, Homo sapiens; identical to SEQ ID NO: 911962

SEQ ID NO: 911984 - protein, 312 aa, Homo sapiens [sequence omitted]

SEQ ID NO: 911985 - protein, 183 aa, Homo sapiens
MACAAVMIPGLLRCSVGAIRIEAASLRLTLSTLRHLTLTSIMKSKRKTDHMERTASVLRREIVAAAKVCGAASESPSVKSLRLLVADQDFSFKAGQWVDFFIPGVSVVGGFSICSSPRLLEQERVIELAVKYTNHPPALWVHNTCTLDCEVAVRVGGEFFFDPQPADASRNKADERIKEIDTF

SEQ ID NO: 911986 - protein, 312 aa, Homo sapiens [sequence omitted]

SEQ ID NO: 911987 - protein, 174 aa, Homo sapiens
MACAAVMIPGLLRCSVGAIRIEAASLRLTLSTLRHLTLTSIMKSKRKTDHMERTASVLRREIVAAAKVCGAASESPSVKSLRLLVADQDFSFKAGQWVDFFIPGVSVVGGFSICSSPRLLEQERVIELAVKYTNHPPALWVHNTCTLDCEVAVRVGGEFFFDPQPADASRKKYP

SEQ ID NO: 911988 - protein, 574 aa, Homo sapiens
MATLVVNKLGAGVDSGRQGSRGTAVVKVLECGVCEDVFSLQGDKVPRLLLCGHTVCHDCLTRLPLHGRAIRCPFDRQVTDLGDSGVWGLKKNFALLELLERLQNGPIGQYGAAEESIGISGESIIRCDEDEAHLASVYCTVCATHLCSECSQVTHSTKTLAKHRRVPLADKPHEKTMCSQHQVHAIEFVCLEEGCQTSPLMCCVCKEYGKHQGHKHSVLEPEANQIRASILDMAHCIRTFTEEISDYSRKLVGIVQHIEGGEQIVEDGIGMAHTEHVPGTAENARSCIRAYFYDLHETLCRQEEMALSVVDAHVREKLIWLRQQQEDMTILLSEVSAACLHCEKTLQQDDCRVVLAKQEITRLLETLQKQQQQFTEVADHIQLDASIPVTFTKDNRVHIGPKMEIRVVTLGLDGAGKTTILFKLKQDEFMQPIPTIGFNVETVEYKNLKFTIWDVGGKHKLRPLWKHYYLNTQAVVFVVDSSHRDRISEAHSELAKLLTEKELRDALLLIFANKQDVAGALSVEEITELLSLHKLCCGRSWYIQGCDARSGMGLYEGLDWLSRQLVAAGVLDVA

SEQ ID NO: 911989 - protein, 546 aa, Homo sapiens
MATLVVNKLGAGVDSGRQGSRGTAVVKVLECGVCEDVFSLQGDKVPRLLLCGHTVCHDCLTRLPLHGRAIRCPFDRQVTDLGDSGVWGLKKNFALLELLERLQNGPIGQYGAAEESIGISGESIIRCDEDEAHLASVYCTVCATHLCSECSQVTHSTKTLAKHRRVPLADKPHEKTMCSQHQVHAIEFVCLEEGCQTSPLMCCVCKEYGKHQGHKHSVLEPEANQIRASILDMAHCIRTFTEEISDYSRKLVGIVQHIEGGEQIVEDGIGMAHTEHVPGTAENARSCIRAYFYDLHETLCRQEEMALSVVDAHVREKLIWLRQQQEDMTILLSEVSAACLHCEKTLQQDDCRVVLAKQEITRLLETLQKQQQQFTEVADHIQLDASIPVTFTKDNRVHIGPKMEIRVVTLGLDGAGKTTILFKLKQDEFMQPIPTIGFNVETVEYKNLKFTIWDVGGKHKLRPLWKHYYLNTQAVVFVVDSSHRDRISEAHSELAKLLTEKELRDALLLIFANKQDVAGALSVEEITELLSLHKLCCGRSCFSDNM

SEQ ID NO: 911990 - protein, 398 aa, Homo sapiens
MCSQHQVHAIEFVCLEEGCQTSPLMCCVCKEYGKHQGHKHSVLEPEANQIRASILDMAHCIRTFTEEISDYSRKLVGIVQHIEGGEQIVEDGIGMAHTEHVPGTAENARSCIRAYFYDLHETLCRQEEMALSVVDAHVREKLIWLRQQQEDMTILLSEVSAACLHCEKTLQQDDCRVVLAKQEITRLLETLQKQQQQFTEVADHIQLDASIPVTFTKDNRVHIGPKMEIRVVTLGLDGAGKTTILFKLKQDEFMQPIPTIGFNVETVEYKNLKFTIWDVGGKHKLRPLWKHYYLNTQAVVFVVDSSHRDRISEAHSELAKLLTEKELRDALLLIFANKQDVAGALSVEEITELLSLHKLCCGRSWYIQGCDARSGMGLYEGLDWLSRQLVAAGVLDVA

SEQ ID NO: 911991 - protein, 369 aa, Homo sapiens
MATLVVNKLGAGVDSGRQGSRGTAVVKVLECGVCEDVFSLQGDKVPRLLLCGHTVCHDCLTRLPLHGRAIRCPFDRQVTDLGDSGVWGLKKNFALLELLERLQNGPIGQYGAAEESIGISGESIIRCDEDEAHLASVYCTVCATHLCSECSQVTHSTKTLAKHRRVPLADKPHEKTMCSQHQVHAIEFVCLEEGCQTSPLMCCVCKEYGKHQGHKHSVLEPEANQIRASILDMAHCIRTFTEEISDYSRKLVGIVQHIEGGEQIVEDGIGMAHTEHVPGTAENARSCIRAYFYDLHETLCRQEEMALSVVDAHVREKLIWLRQQQEDMTILLSEVSAACLHCEKTLQQFPLQRKLNRGMDGTSQIDLHF

SEQ ID NO: 911992 - protein, 569 aa, Homo sapiens
MATLVVNKLGAGVDSGRQGSRGTAVVKVLECGVCEDVFSLQGDKVPRLLLCGHTVCHDCLTRLPLHGRAIRCPFDRQVTDLGDSGVWGLKKNFALLELLERLQNGPIGQYGAAEESIGISGESIIRCDEDEAHLASVYCTVCATHLCSECSQVTHSTKTLAKHRRVPLADKPHEKTMCSQHQVHAIEFVCLEEGCQTSPLMCCVCKEYGKHQGHKHSVLEPEANQIRASILDMAHCIRTFTEEISDYSRKLVGIVQHIEGGEQIVEDGIGMAHTEHVPGTAENARSCIRAYFYDLHETLCRQEEMALSVVDAHVREKLIWLRQQQEDMTILLSEVSAACLHCEKTLQQDDCRVVLAKQEITRLLETLQKQQQQFTEVADHIQLDASIPVTFTKDNRVHIGPKMEIRVVTLGLDGAGKTTILFKLKQDEFMQPIPTIGFNVETVEYKNLKFTIWDVGGKHKLRPLWKHYYLNTQAVVFVVDSSHRDRISEAHSELAKLLTEKELRDALLLIFANKQDVAGALSVEEITELLSLHKLCCGRSWYIQGCDARSVFQIICDQYTGKEVVTEKG

SEQ ID NO: 911993 - protein, 574 aa, Homo sapiens; identical to SEQ ID NO: 911988

SEQ ID NO: 911994 - protein, 574 aa, Homo sapiens; identical to SEQ ID NO: 911988

SEQ ID NO: 911995 - protein, 256 aa, Homo sapiens
MFQTGGLIVFYGLLAQTMAQFGGLPVPLDQTLPLNVNPALPLSPTGLAGSLTNALSNGLLSGGLLGILENLPLLDILKPGGGTSGGLLGGLLGKVTSVIPGLNNIIDIKVTDPQLLELGLVQSPDGHRLYVTIPLGIKLQVNTPLVGASLLRLAVKLDITAEILAVRDKQERIHLVLGDCTHSPGSLQISLLDGLGPLPIQGLLDSLTGILNKVLPELVQGNVCPLVNEVLRGLDITLVHDIVNMLIHGLQFVIKV

SEQ ID NO: 911996 - protein, 206 aa, Homo sapiens
LCELLVSRIAFREIPRIHFTSCLSALMVFCSLELLVFSLYGSWCKGDSLLEEKQKLIRPEHRRMNLAAPCGRHCVPFLLWDHWEGIKGSRVGLPLVGASLLRLAVKLDITAEILAVRDKQERIHLVLGDCTHSPGSLQISLLDGLGPLPIQGLLDSLTGILNKVLPELVQGNVCPLVNEVLRGLDITLVHDIVNMLIHGLQFVIKV

SEQ ID NO: 911997 - protein, 256 aa, Homo sapiens; identical to SEQ ID NO: 911995

SEQ ID NO: 911998 - protein, 93 aa, Homo sapiens
PGSPATPAFGSHWLPRPAVGCTRVHPSSLGRGNKRLPLPTSPAAQDPQQRRRLQQGDQEGVRQGRGCLSWRRPWWPSSTFSTNILEGRETSTS

SEQ ID NO: 911999 - protein, 93 aa, Homo sapiens; identical to SEQ ID NO: 911998

SEQ ID NO: 912000 - protein, 115 aa, Homo sapiens
MESPYVAQAGLKLPVLKLSSCLSFPKCWDYRKSKSRRLWTKSWKHWTMMETANVTSRNSWPLLPWLLLPATSSLNMSEIRKQPNLSCNRDGHARKQTARACSLVGAELSSRVVAN

SEQ ID NO: 912001 - protein, 93 aa, Homo sapiens; identical to SEQ ID NO: 911998

SEQ ID NO: 912002 - protein, 93 aa, Homo sapiens; identical to SEQ ID NO: 911998

SEQ ID NO: 912003 - protein, 93 aa, Homo sapiens; identical to SEQ ID NO: 911998

SEQ ID NO: 912004 - protein, 93 aa, Homo sapiens; identical to SEQ ID NO: 911998

SEQ ID NO: 912005 - protein, 102 aa, Homo sapiens
LSTFAEDIEIAIILFLGEWSHSILALEYVCHHSDSSWRLPEMTVPLNGVIRQHKTDKPDQVFLKDLSSTPMASNNTASIAQARKLVEQLKMEANIDRIKEVH

SEQ ID NO: 912006 - protein, 98 aa, Homo sapiens
NGNEREKKQAANSYQEEEEVGDALLPVERTLIEDKAGWGLVPGLQPLLHILTTLPPRSVGNSYYCWAGLGWAGLRRSSPAQISSGEGKTTLLGPSLGS

SEQ ID NO: 912007 - protein, 98 aa, Homo sapiens; identical to SEQ ID NO: 912006

SEQ ID NO: 912008 - protein, 98 aa, Homo sapiens; identical to SEQ ID NO: 912006

SEQ ID NO: 912009 - protein, 134 aa, Homo sapiens
MVYLIYSRASILYCAHASYSTRQGQYDEPPDARESFVISRHAMKSYCVEAHLSQQQRIDPAVHCCLHNSDLLSCDCHSAWADAACLVSLLPGFRFACCQGRLIRVASSSNPSVDAPSAKRRRPLKSLRAPGTLM

SEQ ID NO: 912010 - protein, 98 aa, Homo sapiens; identical to SEQ ID NO: 912006

SEQ ID NO: 912011 - protein, 633 aa, Homo sapiens
MEESPLSRAPSRGGVNFLNVARTYIPNTKVECHYTLPPGTMPSASDWIGIFKVEAACVRDYHTFVWSSVPESTTDGSPIHTSVQFQASYLPKPGAQLYQFRYVNRQGQVCGQSPPFQFREPRPMDELVTLEEADGGSDILLVVPKATVLQNQLDESQQERNDLMQLKLQLEGQVTELRSRVQELERALATARQEHTELMEQYKGISRSHGEITEERDILSRQQGDHVARILELEDDIQTISEKVLTKEVELDRLRDTVKALTREQEKLLGQLKEVQADKEQSEAELQVAQQENHHLNLDLKEAKSWQEEQSAQAQRLKDKVAQMKDTLGQAQQRVAELEPLKEQLRGAQELAASSQQKATLLGEELASAAAARDRTIAELHRSRLEVAEVNGRLAELGLHLKEEKCQWSKERAGLLQSVEAEKDKILKLSAEILRLEKAVQEERTQNQVFKTELAREKDSSLVQLSESKRELTELRSALRVLQKEKEQLQEEKQELLEYMRKLEARLEKVADEKWNEDATTEDEEAAVGLSCPAALTDSEDESPEDMRLPPYGLCERGDPGSSPAGPREASPLVVISQPAPISPHLSGPAEDSSSDSEAEDEKSVLMAAVQSGGEEANLLLPELGSAFYDMAR

SEQ ID NO: 912012 - protein, 115 aa, Homo sapiens
MEESPLSRAPSRGGVNFLNVARTYIPNTKVECHYTLPPGTMPSASDWIGIFKVEAACVRDYHTFVWSSVPESTTDGSPIHTSVQFQGTREDGKLGERSQGSGGLKEGSGLRNIKS

SEQ ID NO: 912013 - protein, 548 aa, Homo sapiens [sequence omitted]

SEQ ID NO: 912014 - protein, 553 aa, Homo sapiens
MEESPLSRAPSRGGVNFLNVARTYIPNTKVECHYTLPPGTMPSASDWIGIFKVEAACVRDYHTFVWSSVPESTTDGSPIHTSVQFQASYLPKPGAQLYQFRYVNRQGQVCGQSPPFQFREPRPMDELVTLEEADGGSDILLVVPKATVLQNQLDESQQERNDLMQLKLQLEGQVTELRSRVQELERALATARQEHTELMEQYKGISRSHGEITEERDILSRQQGDHVARILELEDDIQTISEKVLTKEVELDRLRDTVKALTREQEKLLGQLKEVQADKEQSEAELQVAQQENHHLNLDLKEAKSWQEEQSAQAQRLKDKVAQMKDTLGQAQQRVAELEPLKEQLRGAQELAASSQQKATLLGEELASAAAARDRTIAELHRSRLEVAEVNGRLAELGLHLKEEKCQWSKERAGLLQSVEAEKDKILKLSAEILRLEKAVQEDEEAAVGLSCPAALTDSEDESPEDMRLPPYGLCERGDPGSSPAGPREASPLVVISQPAPISPHLSGPAEDSSSDSEAEDEKSVLMAAVQSGGEEANLLLPELGSAFYDMAR

SEQ ID NO: 912015 - protein, 633 aa, Homo sapiens; identical to SEQ ID NO: 912011

SEQ ID NO: 912016 - protein, 621 aa, Homo sapiens
MVRTHYMVTSIIMIMIEGQWVWERKEGEGQAERREKSMACGRWRREETVYGTPSKGLGPRTVDYWGPGSILLPTASYLPKPGAQLYQFRYVNRQGQVCGQSPPFQFREPRPMDELVTLEEADGGSDILLVVPKATVLQNQLDESQQERNDLMQLKLQLEGQVTELRSRVQELERALATARQEHTELMEQYKGISRSHGEITEERDILSRQQGDHVARILELEDDIQTISEKVLTKEVELDRLRDTVKALTREQEKLLGQLKEVQADKEQSEAELQVAQQENHHLNLDLKEAKSWQEEQSAQAQRLKDKVAQMKDTLGQAQQRVAELEPLKEQLRGAQELAASSQQKATLLGEELASAAAARDRTIAELHRSRLEVAEVNGRLAELGLHLKEEKCQWSKERAGLLQSVEAEKDKILKLSAEILRLEKAVQEERTQNQVFKTELAREKDSSLVQLSESKRELTELRSALRVLQKEKEQLQEEKQELLEYMRKLEARLEKVADEKWNEDATTEDEEAAVGLSCPAALTDSEDESPEDMRLPPYGLCERGDPGSSPAGPREASPLVVISQPAPISPHLSGPAEDSSSDSEAEDEKSVLMAAVQSGGEEANLLLPELGSAFYDMAR

SEQ ID NO: 912017 - protein, 633 aa, Homo sapiens; identical to SEQ ID NO: 912011

SEQ ID NO: 912018 - protein, 633 aa, Homo sapiens; identical to SEQ ID NO: 912011

SEQ ID NO: 912019 - protein, 633 aa, Homo sapiens; identical to SEQ ID NO: 912011

SEQ ID NO: 912020 - protein, 360 aa, Homo sapiens
MEESPLSRAPSRGGVNFLNVARTYIPNTKVECHYTLPPGTMPSASDWIGIFKVEAACVRDYHTFVWSSVPESTTDGSPIHTSVQFQASYLPKPGAQLYQFRYVNRQGQVCGQSPPFQFREPRPMDELVTLEEADGGSDILLVVPKATVLQNQLDESQQERNDLMQLKLQLEGQVTELRSRVQELERALATARQEHTELMEQYKGISRSHGEITEERDILSRQQGDHVARILELEDDIQTISEKVLTKEVELDRLRDKVEPSSALACLTSSTCVMFLCAESDVYTLLQVLCLALVWILKSTVAAIIFPVMILALELSEKGVDYLFSQHDLSFLDDVIPDKDTDQEGWMTMTWEDDDGKSGR

SEQ ID NO: 912021 - protein, 222 aa, Homo sapiens
MEESPLSRAPSRGGVNFLNVARTYIPNTKVECHYTLPPGTMPSASDWIGIFKVEAACVRDYHTFVWSSVPESTTDGSPIHTSVQFQASYLPKPGAQLYQFRYVNRQGQVCGQSPPFQFREPRPMDELVTLEEADGGSDILLVVPKATVLQNQLDESQQERNDLMQLKLQLEGQVTELRSRVQELERALATARQEHTELMEQYKVGAGPGRGQGLAAHPASKI

SEQ ID NO: 912022 - protein, 123 aa, Homo sapiens
DRMGTDLEGQTYVLETKSDTSKMSRNPQGLETRYALSPGVVAGAVSVWCWSCGGKEVDWKDFRLSTLSFIGGQISQGQDGRITTKPGTIPWWSQLSQCSPDLHPQHQGGMSLHPSPRHHAQCQ

SEQ ID NO: 912023 - protein, 691 aa, Homo sapiens
MEESPLSRAPSRGGVNFLNVARTYIPNTKVECHYTLPPGTMPSASDWIGIFKVEAACVRDYHTFVWSSVPESTTDGSPIHTSVQFQASYLPKPGAQLYQFRYVNRQGQVCGQSPPFQFREPRPMDELVTLEEADGGSDILLVVPKATVLQNQLDESQQERNDLMQLKLQLEGQVTELRSRVQELERALATARQEHTELMEQYKGISRSHGEITEERDILSRQQGDHVARILELEDDIQTISEKVLTKEVELDRLRDTVKALTREQEKLLGQLKEVQADKEQSEAELQVAQQENHHLNLDLKEAKSWQEEQSAQAQRLKDKVAQMKDTLGQAQQRVAELEPLKEQLRGAQELAASSQQKATLLGEELASAAAARDRTIAELHRSRLEVAEVNGRLAELGLHLKEEKCQWSKERAGLLQSVEAEKDKILKLSAEILRLEKAVQEERTQNQVFKTELAREKDSSLVQLSESKRELTELRSALRVLQKEKEQLQEEKQELLEYMRKLEARLEKVADEKWNEDATTEDEEAAVGLSCPAALTDSEDESPEDMRLPPYGLCERGDPGSSPAGPREASPLVVISQPAPISPHLSGPAEDSSSDSEAEDEKSVLMAAVQSGGEEANLLLPELGSAFYDMASGFTVGTLSETSTGGPATPTWKECPICKERFPAESDKDALEDHMDGHFFFSTQDPFTFE

SEQ ID NO: 912024 - protein, 720 aa, Homo sapiens
RYAPDLPGMNRDRAPLASVCWEDRYLKARMEESPLSRAPSRGGVNFLNVARTYIPNTKVECHYTLPPGTMPSASDWIGIFKVEAACVRDYHTFVWSSVPESTTDGSPIHTSVQFQASYLPKPGAQLYQFRYVNRQGQVCGQSPPFQFREPRPMDELVTLEEADGGSDILLVVPKATVLQNQLDESQQERNDLMQLKLQLEGQVTELRSRVQELERALATARQEHTELMEQYKGISRSHGEITEERDILSRQQGDHVARILELEDDIQTISEKVLTKEVELDRLRDTVKALTREQEKLLGQLKEVQADKEQSEAELQVAQQENHHLNLDLKEAKSWQEEQSAQAQRLKDKVAQMKDTLGQAQQRVAELEPLKEQLRGAQELAASSQQKATLLGEELASAAAARDRTIAELHRSRLEVAEVNGRLAELGLHLKEEKCQWSKERAGLLQSVEAEKDKILKLSAEILRLEKAVQEERTQNQVFKTELAREKDSSLVQLSESKRELTELRSALRVLQKEKEQLQEEKQELLEYMRKLEARLEKVADEKWNEDATTEDEEAAVGLSCPAALTDSEDESPEDMRLPPYGLCERGDPGSSPAGPREASPLVVISQPAPISPHLSGPAEDSSSDSEAEDEKSVLMAAVQSGGEEANLLLPELGSAFYDMASGFTVGTLSETSTGGPATPTWKECPICKERFPAESDKDALEDHMDGHFFFSTQDPFTFE

SEQ ID NO: 912025 - protein, 633 aa, Homo sapiens; identical to SEQ ID NO: 912011

SEQ ID NO: 912026 - protein, 769 aa, Homo sapiens
MEESPLSRAPSRGGVNFLNVARTYIPNTKVECHYTLPPGTMPSASDWIGIFKVEAACVRDYHTFVWSSVPESTTDGSPIHTSVQFQASYLPKPGAQLYQFRYVNRQGQVCGQSPPFQFREPRPMDELVTLEEADGGSDILLVVPKATVLQNQLDESQQERNDLMQLKLQLEGQVTELRSRVQELERALATARQEHTELMEQYKVGAGPGRGQGLAAHPASKIEPSEEGEGEMLVGFYNGSGIKEIGLRGVAGIKLDVTRDMFQTCNETQFFEHRNAGVKVEVATLIGKGMFPYSFFFKEGNVIARWKQSDPGVLFLKPLFHHLRDESQPPFSSGGNLIQGISRSHGEITEERDILSRQQGDHVARILELEDDIQTISEKVLTKEVELDRLRDTVKALTREQEKLLGQLKEVQADKEQSEAELQVAQQENHHLNLDLKEAKSWQEEQSAQAQRLKDKVAQMKDTLGQAQQRVAELEPLKEQLRGAQELAASSQQKATLLGEELASAAAARDRTIAELHRSRLEVAEVNGRLAELGLHLKEEKCQWSKERAGLLQSVEAEKDKILKLSAEILRLEKAVQEERTQNQVFKTELAREKDSSLVQLSESKRELTELRSALRVLQKEKEQLQEEKQELLEYMRKLEARLEKVADEKWNEDATTEDEEAAVGLSCPAALTDSEDESPEDMRLPPYGLCERGDPGSSPAGPREASPLVVISQPAPISPHLSGPAEDSSSDSEAEDEKSVLMAAVQSGGEEANLLLPELGSAFYDMAR

SEQ ID NO: 912027 - protein, 662 aa, Homo sapiens
RYAPDLPGMNRDRAPLASVCWEDRYLKARMEESPLSRAPSRGGVNFLNVARTYIPNTKVECHYTLPPGTMPSASDWIGIFKVEAACVRDYHTFVWSSVPESTTDGSPIHTSVQFQASYLPKPGAQLYQFRYVNRQGQVCGQSPPFQFREPRPMDELVTLEEADGGSDILLVVPKATVLQNQLDESQQERNDLMQLKLQLEGQVTELRSRVQELERALATARQEHTELMEQYKGISRSHGEITEERDILSRQQGDHVARILELEDDIQTISEKVLTKEVELDRLRDTVKALTREQEKLLGQLKEVQADKEQSEAELQVAQQENHHLNLDLKEAKSWQEEQSAQAQRLKDKVAQMKDTLGQAQQRVAELEPLKEQLRGAQELAASSQQKATLLGEELASAAAARDRTIAELHRSRLEVAEVNGRLAELGLHLKEEKCQWSKERAGLLQSVEAEKDKILKLSAEILRLEKAVQEERTQNQVFKTELAREKDSSLVQLSESKRELTELRSALRVLQKEKEQLQEEKQELLEYMRKLEARLEKVADEKWNEDATTEDEEAAVGLSCPAALTDSEDESPEDMRLPPYGLCERGDPGSSPAGPREASPLVVISQPAPISPHLSGPAEDSSSDSEAEDEKSVLMAAVQSGGEEANLLLPELGSAFYDMAR

SEQ ID NO: 912028 - protein, 121 aa, Homo sapiens [sequence omitted]

SEQ ID NO: 912029 - protein, 633 aa, Homo sapiens; identical to SEQ ID NO: 912011

SEQ ID NO: 912030 - protein, 253 aa, Homo sapiens
MEESPLSRAPSRGGVNFLNVARTYIPNTKVECHYTLPPGTMPSASDWIGIFKVEAACVRDYHTFVWSSVPESTTDGSPIHTSVQFQASYLPKPGAQLYQFRYVNRQGQVCGQSPPFQFREPRPMDELVTLEEADGGSDILLVVPKATVLQNQLDESQQERNDLMQLKLQLEGQVTELRSRVQELERALATARQEHTELMEQYKGISRSHGEITEERDILSRQQGDHVARILELEDDIQTISEKVLTKEVELDR

SEQ ID NO: 912031 - protein, 123 aa, Homo sapiens
MEESPLSRAPSRGGVNFLNVARTYIPNTKVECHYTLPPGTMPSASDWIGIFKVEAACVRDYHTFVWSSVPESTTDGSPIHTSVQFQASYLPKPGAQLYQFRYVNRQGQVMLSPNTCIYIQQNY

SEQ ID NO: 912032 - protein, 766 aa, Homo sapiens
MASDTPESLMALCTDFCLRNLDGTLGYLLDKETLRLHPDIFLPSEICDRLVNEYVELVNAACNFEPHESFFSLFSDPRSTRLTRIHLREDLVQDQDLEAIRKQDLVELYLTNCEKLSAKSLQTLRSFSHTLVSLSLFGCTNIFYEEENPGGCEDEYLVNPTCQVLVKDFTFEGFSRLRFLNLGRMIDWVPVESLLRPLNSLAALDLSGIQTSDAAFLTQWKDSLVSLVLYNMDLSDDHIRVIVQLHKLRHLDISRDRLSSYYKFKLTREVLSLFVQKLGNLMSLDISGHMILENCSISKMEEEAGQTSIEPSKSSIIPFRALKRPLQFLGLFENSLCRLTHIPAYKVSGDKNEEQVLNAIEAYTEHRPEITSRAINLLFDIARIERCNQLLRALKLVITALKCHKYDRNIQVTGSAALFYLTNSEYRSEQSVKLRRQVIQVVLNGMESYQEVTVQRNCCLTLCNFSIPEELEFQYRRVNELLLSILNPTRQDESIQRIAVHLCNALVCQVDNDHKEAVGKMGFVVTMLKLIQKKLLDKTCDQVMEFSWSALWNITDETPDNCEMFLNFNGMKLFLDCLKEFPEKQELHRNMLGLLGNVAEVKELRPQLMTSQFISVFSNLLESKADGIEVSYNACGVLSHIMFDGPEAWGVCEPQREEVEERMWAAIQSWDINSRRNINYRSFEPILRLLPQGISPVSQHWATWALYNLVSVYPDKYCPLLIKEGGMPLLRDIIKMATARQETKEMARKVIEHCSNFKEENMDTSR

SEQ ID NO: 912033 - protein, 766 aa, Homo sapiens; identical to SEQ ID NO: 912032

SEQ ID NO: 912034 - protein, 766 aa, Homo sapiens; identical to SEQ ID NO: 912032

SEQ ID NO: 912035 - protein, 718 aa, Homo sapiens
MPRPGYVELVNAACNFEPHESFFSLFSDPRSTRLTRIHLREDLVQDQDLEAIRKQDLVELYLTNCEKLSAKSLQTLRSFSHTLVSLSLFGCTNIFYEEENPGGCEDEYLVNPTCQVLVKDFTFEGFSRLRFLNLGRMIDWVPVESLLRPLNSLAALDLSGIQTSDAAFLTQWKDSLVSLVLYNMDLSDDHIRVIVQLHKLRHLDISRDRLSSYYKFKLTREVLSLFVQKLGNLMSLDISGHMILENCSISKMEEEAGQTSIEPSKSSIIPFRALKRPLQFLGLFENSLCRLTHIPAYKVSGDKNEEQVLNAIEAYTEHRPEITSRAINLLFDIARIERCNQLLRALKLVITALKCHKYDRNIQVTGSAALFYLTNSEYRSEQSVKLRRQVIQVVLNGMESYQEVTVQRNCCLTLCNFSIPEELEFQYRRVNELLLSILNPTRQDESIQRIAVHLCNALVCQVDNDHKEAVGKMGFVVTMLKLIQKKLLDKTCDQVMEFSWSALWNITDETPDNCEMFLNFNGMKLFLDCLKEFPEKQELHRNMLGLLGNVAEVKELRPQLMTSQFISVFSNLLESKADGIEVSYNACGVLSHIMFDGPEAWGVCEPQREEVEERMWAAIQSWDINSRRNINYRSFEPILRLLPQGISPVSQHWATWALYNLVSVYPDKYCPLLIKEGGMPLLRDIIKMATARQETKEMARKVIEHCSNFKEENMDTSR

SEQ ID NO: 912036 - protein, 766 aa, Homo sapiens; identical to SEQ ID NO: 912032

SEQ ID NO: 912037 - protein, 312 aa, Homo sapiens
MLSRSSLTRRYWNSSSSGMLKLQSVRQQFRCTVTSWEDESIQRIAVHLCNALVCQVDNDHKEAVGKMGFVVTMLKLIQKKLLDKTCDQVMEFSWSALWNITDETPDNCEMFLNFNGMKLFLDCLKEFPEKQELHRNMLGLLGNVAEVKELRPQLMTSQFISVFSNLLESKADGIEVSYNACGVLSHIMFDGPEAWGVCEPQREEVEERMWAAIQSWDINSRRNINYRSFEPILRLLPQGISPVSQHWATWALYNLVSVYPDKYCPLLIKEGGMPLLRDIIKMATARQETKEMARKVIEHCSNFKEENMDTSR

SEQ ID NO: 912038 - protein, 200 aa, Homo sapiens
TYQRHKAGIGLPEEFPEKQELHRNMLGLLGNVAEVKELRPQLMTSQFISVFSNLLESKADGIEVSYNACGVLSHIMFDGPEAWGVCEPQREEVEERMWAAIQSWDINSRRNINYRSFEPILRLLPQGISPVSQHWATWALYNLVSVYPDKYCPLLIKEGGMPLLRDIIKMATARQETKEMARKVIEHCSNFKEENMDTSR

SEQ ID NO: 912039 - protein, 176 aa, Homo sapiens
MLGLLGNVAEVKELRPQLMTSQFISVFSNLLESKADGIEVSYNACGVLSHIMFDGPEAWGVCEPQREEVEERMWAAIQSWDINSRRNINYRSFEPILRLLPQGISPVSQHWATWALYNLVSVYPDKYCPLLIKEGGMPLLRDIIKMATARQETKEMARKVIEHCSNFKEENMDTSR

SEQ ID NO: 912040 - protein, 140 aa, Homo sapiens
WGWEFFSPSTLADSCPCLQTMLKLIQKKLLDKTVSQVFTKPRYPFPTSKGPGLPLGEVCVLSGAPLPGYQEPWLSPALPSQCDQVMEFSWSALWNITDETPDNCEMFLNFNGMKLFLDCLKVVSTSCSSSCLSCPHGPSS

SEQ ID NO: 912041 - protein, 133 aa, Homo sapiens
GEVCVLSGAPLPGYQEPWLSPALPSQCDQVMEFSWSALWNITDETPDNCEMFLNFNGMKLFLDCLKVVSTSCSSSCLSCPHGPSSVPRLPTNQIRSTPHPCFLEKGSGDRLRPTHPGFAADRSSRPRWPGGAS

SEQ ID NO: 912042 - protein, 766 aa, Homo sapiens; identical to SEQ ID NO: 912032

SEQ ID NO: 912043 - protein, 766 aa, Homo sapiens; identical to SEQ ID NO: 912032

SEQ ID NO: 912044 - protein, 582 aa, Homo sapiens [sequence omitted]

SEQ ID NO: 912045 - protein, 766 aa, Homo sapiens; identical to SEQ ID NO: 912032

SEQ ID NO: 912046 - protein, 431 aa, Homo sapiens
MASDTPESLMALCTDFCLRNLDGTLGYLLDKETLRLHPDIFLPSEICDRLVNEYVELVNAACNFEPHESFFSLFSDPRSTRLTRIHLREDLVQDQDLEAIRKQDLVELYLTNCEKLSAKSLQTLRSFSHTLVSLSLFGCTNIFYEEENPGGCEDEYLVNPTCQVLVKDFTFEGFSRLRFLNLGRMIDWVPVESLLRPLNSLAALDLSGIQTSDAAFLTQWKDSLVSLVLYNMDLSDDHIRVIVQLHKLRHLDISRDRLSSYYKFKLTREVLSLFVQKLGNLMSLDISGHMILENCSISKMEEEAGQTSIEPSKSSIIPFRALKRPLQFLGLFENSLCRLTHIPAYKVSGDKNEEQVLNAIEAYTEHRPEITSRAINLLFDIARIERCNQLLRALKLVITALKCHKYDRNIQVTGSAALFYLTKCSRNRRIR

SEQ ID NO: 912047 - protein, 178 aa, Homo sapiens
MASDTPESLMALCTDFCLRNLDGTLGYLLDKETLRLHPDIFLPSEICDRLVNEYVELVNAACNFEPHESFFSLFSDPRSTRLTRIHLREDLVQDQDLEAIRKQDLVELYLTNCEKLSAKSLQTLRSFSHTLVSLSLFGCTNIFYEEENPGGCEDEYLLPPSSEPLRVAMVQSETAPAL

SEQ ID NO: 912048 - protein, 932 aa, Homo sapiens
MIPARLHRDYKGLVLLGILLGTLWETGCTQIRYSVPEELEKGSRVGDISRDLGLEPRELAERGVRIIPRGRTQLFALNPRSGSLVTAGRIDREELCMGAIKCQLNLDILMEDKVKIYGVEVEVRDINDNAPYFRESELEIKISENAATEMRFPLPHAWDPDIGKNSLQSYELSPNTHFSLIVQNGADGSKYPELVLKRALDREEKAAHHLVLTASDGGDPVRTGTARIRVMVLDANDNAPAFAQPEYRASVPENLALGTQLLVVNATDPDEGVNAEVRYSFRYVDDKAAQVFKLDCNSGTISTIGELDHEESGFYQMEVQAMDNAGYSARAKVLITVLDVNDNAPEVVLTSLASSVPENSPRGTLIALLNVNDQDSEENGQVICFIQGNLPFKLEKSYGNYYSLVTDIVLDREQVPSYNITVTATDRGTPPLSTETHISLNVADTNDNPPVFPQASYSAYIPENNPRGVSLVSVTAHDPDCEENAQITYSLAENTIQGASLSSYVSINSDTGVLYALSSFDYEQFRDLQVKVMARDNGHPPLSSNVSLSLFVLDQNDNAPEILYPALPTDGSTGVELAPRSAEPGYLVTKVVAVDRDSGQNAWLSYRLLKASEPGLFSVGLHTGEVRTARALLDRDALKQSLVVAVQDHGQPPLSATVTLTVAVADSIPQVLADLGSLESPANSETSDLTLYLVVAVAAVSCVFLAFVILLLALRLRRWHKSRLLQASGGGLTGAPASHFVGVDGVQAFLQTYSHEVSLTTDSRKSHLIFPQPNYADMLVSQESFEKSEPLLLSGDSVFSKDSHGLIEQAPPNTDWRFSQAQRPGTSGSQNGDDTGTWPNNQFDTEMLQAMILASASEAADGSSTLGGGAGTMGLSARYGPQFTLQHVPDYRQNVYIPGSNATLTNAAGKRDGKAPAGGNGNKKKSGKKEKK

SEQ ID NO: 912049 - protein, 929 aa, Homo sapiens
MGGSCAQRRRAGPRQVLFPLLLPLFYPTLCEPIRYSIPEELAKGSVVGNLAKDLGLSVLDVSARELRVSAEKLHFSVDAQSGDLLVKDRIDREQICKERRRCELQLEAVVENPLNIFHVIVVIEDVNDHAPQFRKDEINLEISESVSLGMGTILESAEDPDISMNSLSKYQLSPNEYFSLVEKDNPDGGKYPELVLQKTLDRETQSAHHLVLTALDGGDPPRSGTAQIRILVIDANDNPPVFSQDVYRVSLREDVPPGTSILRVKATDQDEGINSEITYSFFGVADKAQHVFSLDYTTGNILTQQPLDFEEVERYTINIEAKDRGSLSTRCKVIVEVVDENDNSPEIIITSLSDQIMEDSPPGVVVALFKTRDQDSGENGEVRCSLSRGVPFKIHSSSNNYYKLVTDEALDREQTPEYNVTIAATDRGKPPLSSSKTITLHITDVNDNAPVFGQSAYLVHVPENNQPGASIAQVSASDPDFGLNGRVSYSLIASDLESRTLSSYVSVSAQSGVVFAQRAFDHEQLRTFELTLQARDQGSPALSANVSLRVLVGDRNDNAPRVLYPALGPDGSALFDTVPRAAQPGYLVTKVVAVDADSGHNAWLSYHVVQASEPGLFSLGLRTGEVRMVRALGDKDSVRQRLLVAVRDGGQPPLSATATLHLVFADSLQEVLPDFSDHPTPSDSQAEMQFYLVVALALISVLFLLAVILAIALRLRQSFSPTAGDCFESVLCSKSGPVGPPNYSEGTLPYAYNFCVPGDQMNPEFNFFTSVDHCPATQDNLNKDSMLLASILTPSVEADKKILKQQAPPNTDWRFSQAQRPGTSGSQNGDDTGTWPNNQFDTEMLQAMILASASEAADGSSTLGGGAGTMGLSARYGPQFTLQHVPDYRQNVYIPGSNATLTNAAGKRDGKAPAGGNGNKKKSGKKEKK

SEQ ID NO: 912050 - protein, 923 aa, Homo sapiens
MGSGAGELGRAERLPVLFLFLLSLFCPALCEQIRYRIPEEMPKGSVVGNLATDLGFSVQELPTRKLRVSSEKPYFTVSAESGELLVSSRLDREEICGKKPACALEFEAVAENPLNFYHVNVEIEDINDHTPKFTQNSFELQISESAQPGTRFILGSAHDADIGSNTLQNYQLSPSDHFSLINKEKSDGSKYPEMVLKTPLDREKQKSYHLTLTALDFGAPPLSSTAQIHVLVTDANDNAPVFSQDVYRVSLSENVYPGTTVLQVTATDQDEGVNAEITFSFSEASQITQFDLNSNTGEITVLNTLDFEEVKEYSIVLEARDGGGMIAQCTVEVEVIDENDNAPEVIFQSLPNLIMEDAELGTHIALLKVRDKDSRHNGEVTCKLEGDVPFKILTSSRNTYKLVTDAVLDREQNPEYNITVTATDRGKPPLSSSSSITLHIGDVNDNAPVFSQSSYIVHVAENNPPGASISQVRASDPDLGPNGQVSYCIMASDLEQRELSSYVSISAESGVVFAQRAFDHEQLRAFELTLQARDQGSPALSANVSLRVLVDDRNDNAPRVLYPALGPDGSALFDMVPHAAEPGYLVTKVVAVDADSGHNAWLSYHVLQASEPGLFSLGLRTGEVRTARALGDRDAVRQRLLVAVRDGGQPPLSATATLHLVFADSLQEVLPDITDRPDPSDLQAELQFYLVVALALISVLFLVAMILAIALRLRRSSSPASWSCFQPGLCVKSESVVPPNYSEGTLPYSYNLCVAHTGKTEFNFLKCSEQLSSGQDILCGDSSGALFPLCNSSELTSHQQAPPNTDWRFSQAQRPGTSGSQNGDDTGTWPNNQFDTEMLQAMILASASEAADGSSTLGGGAGTMGLSARYGPQFTLQHVPDYRQNVYIPGSNATLTNAAGKRDGKAPAGGNGNKKKSGKKEKK

SEQ ID NO: 912051 - protein, 931 aa, Homo sapiens
MASPPRGWGCGELLLPFMLLGTLCEPGSGQIRYSMPEELDKGSFVGNIAKDLGLEPQELAERGVRIVSRGRTQLFALNPRSGSLVTAGRIDREELCAQSPLCVVNFNILVENKMKIYGVEVEIIDINDNFPRFRDEELKVKVNENAAAGTRLVLPFARDADVGVNSLRSYQLSSNLHFSLDVVSGTDGQKYPELVLEQPLDREKETVHDLLLTALDGGDPVLSGTTHIRVTVLDANDNAPLFTPSEYSVSVPENIPVGTRLLMLTATDPDEGINGKLTYSFRNEEEKISETFQLDSNLGEISTLQSLDYEESRFYLMEVVAQDGGALVASAKVVVTVQDVNDNAPEVILTSLTSSISEDCLPGTVIALFSVHDGDSGENGEIACSIPRNLPFKLEKSVDNYYHLLTTRDLDREETSDYNITLTVMDHGTPPLSTESHIPLKVADVNDNPPNFPQASYSTSVTENNPRGVSIFSVTAHDPDSGDNARVTYSLAEDTFQGAPLSSYVSINSDTGVLYALRSFDYEQLRDLQLWVTASDSGNPPLSSNVSLSLFVLDQNDNTPEILYPALPTDGSTGVELAPRSAEPGYLVTKVVAVDKDSGQNAWLSYRLLKASEPGLFAVGLHTGEVRTARALLDRDALKQSLVVAVEDHGQPPLSATFTVTVAVADRIPDILADLGSIKTPIDPEDLDLTLYLVVAVAAVSCVFLAFVIVLLVLRLRRWHKSRLLQAEGSRLAGVPASHFVGVDGVRAFLQTYSHEVSLTADSRKSHLIFPQPNYADTLLSEESCEKSEPLLMSDKVDANKEERRVQQAPPNTDWRFSQAQRPGTSGSQNGDDTGTWPNNQFDTEMLQAMILASASEAADGSSTLGGGAGTMGLSARYGPQFTLQHVPDYRQNVYIPGSNATLTNAAGKRDGKAPAGGNGNKKKSGKKEKK

SEQ ID NO: 912052 - protein, 932 aa, Homo sapiens
MAALQKLPHCRKLVLLCFLLATLWEARAGQIRYSVREEIDRGSFVGNIAKDLGLEPLALAEQGVRIVSRGRSQLFALNPRSGSLVTANRIDREELCAQSAPCLLNFNILLEDKLTIYSVEVEITDINDNAPRFGVEELELKISETTTPGFRIPLKNAHDADVGENALQKYALNPNDHFSLDVRRGADGNKYPELVLERSLDREEEAVHHLVLVASDGGDPVLSGTSRICVKVLDANDNAPVFTQPEYRISIPENTLVGTRILTVTATDADEGYYAQVVYFLEKSPGETSEVFELKSTSGELTIIKDLDYEDATFHEIDIEAQDGPGLLTRAKVIVTVLDVNDNAPEFYMTSATSSVSEDSLPGTIIGLFNVHDRDSGQNAFTTCSLPEDLPFKLEKSVDNYYRLVTTRALDREQFSFYNITLTAKDGGNPSLSTDAHILLQVADINDNAPAFSRTSYSTYIPENNPRGASVFSVTAHDPDSNDNAHVTYSFAEDTVQGAPLSSYISINSDTGVLYALRSFDYEQLRDLQVWVIARDSGNPPLSSNVSLSLFVLDQNDNAPEILYPAFPTDGSTGVELAPRSAEPGYLVTKVVAVDRDSGQNAWLSYHLLKASEPGLFSVGLHTGEVRTARALLDRDALKQSLVVAIQDHGQPPLSATVTLTVAVADRIPDILADLGSLEPSAIPNDSDLTLYLVVAVAAVSCVFLAFVIVLLAHRLRRWHKSRLLQASGGSLTGMQSSHFVGVDGVRAFLQTYSHEVSLTADSRKSHLIFPQPNYADTLISQESCEKKDFLSAPQSLLEEEREETFSQQAPPNTDWRFSQAQRPGTSGSQNGDDTGTWPNNQFDTEMLQAMILASASEAADGSSTLGGGAGTMGLSARYGPQFTLQHVPDYRQNVYIPGSNATLTNAAGKRDGKAPAGGNGNKKKSGKKEKK

SEQ ID NO: 912053 - protein, 930 aa, Homo sapiens
MGGSCAQRRRAGPRQVLFPLLLPLFYPTLSEPIRYSIPEELAKGSVVGNLAKDLGLSVLDVSARKLRVSAEKLHFSVDAESGDLLVKNRIDREQICKERRRCELQLEAVVENPLNIFHVIVVIEDVNDHAPQFDKKEIHLEIFESASAGTRLSLDPATDPDININSIKDYKINSNPYFSLMVRVNSDGGKYPELSLEKLLDREEQRSHSLILTALDGGDPPRSATAHIEISVKDTNDNPPVFSRDEYRISLSENLPPGSPVLQVTATDQDEGVNAEINYYFRSTAQSTKHMFSLDEKTGMIKNNQSFDFEDVERYTMEVEAKDGGGLSTQCKVIIEILDENDNSPEIIITSLSDQILENSPPGMVVALFKTRDLDFGGNGEVRCNIETDIPFKIYSSSNNYYKLVTDGALDREQTPEYNVTIVATDRGKPPLSSSRSITLYVADINDNAPVFDQTSYVVHVAENNPPGASIAQVSASDPDLGLNGHISYSIVASDLEPLAVSSYVSVSAQSGVVFAQRAFDHEQLRAFALTLQARDHGSPTLSANVSLRVLVGDRNDNAPRVLYPALGPDGSAFFDMVPRSAEPGYLVTKVVAVDADSGHNAWLSYHVLQASEPGLFSLGLRTGEVRTARALGDRDAARQRLLVAVRDGGQPPLSATATLHLVFADNLQEILPDLSDRPVLSDPQAELQFYLVVALALISVLFLLAVILAIALRLRRSLSPATWDCFHPGLCVKSGPVVPPNYSEGTLPYSYNLCIAHTGTKEFNFLKCSVPLHSNEDMVCSVSPGALIPPHGGEDLTSHPETLTSQAPPNTDWRFSQAQRPGTSGSQNGDDTGTWPNNQFDTEMLQAMILASASEAADGSSTLGGGAGTMGLSARYGPQFTLQHVPDYRQNVYIPGSNATLTNAAGKRDGKAPAGGNGNKKKSGKKEKK

SEQ ID NO: 912054 - protein, 931 aa, Homo sapiens
MAAPPARPDHTRLLQICLLLGVLVEIRAEQILYSVFEEQEEGSVVGNIAKDLGLAPRELAERGVRIVSRGRTQLFALNPRSGTLVTAGRIDREELCDRSPNCVTNLEILLEDTVKILRVEVEIIDVNDNPPSFGTEQREIKVAENENPGARFPLPEAFDPDVGVNSLQGYQLNSNGYFSLDVQSGADGIKYPELVLERALDREEEAVHHLVLTAFDGGDPVRSGTARILIILVDTNDNAPVFTQPEYHVSVRENVPVGTRLLTVKATDPDEGANGDVTYSFRKVRDKISQLFQLNSLSGDITILGGLDYEDSGFYDIDVEAHDGPGLRARSKVLVTVLDENDNAPEVTVTSLTSSVQESSSPGTVIALFNVHDSDSGGNGLVTCSIPDNLPFTLEKTYGNYYRLLTHRTLDREEVSEYNITVTATDQGTPPLSTETHISLQVMDINDNPPTFPHASYSAYIPENNPRGASILSMTAQDPDSGDNARITYSLAEDTFQGAPLSSYVSINSNTGILYALCSFDYEQFRDLQLLMTASDSGDPPLSSNVSLSLFVLDQNDNVPEILYPTFPTDGSTGVELAPRSADSGYLVTKVVAVDRDSGQNAWLSYSLLKSSEPGLFAVGLHTGEVRTARALLDRDALKQRLVVVVQDHGQPPLSATVTLTVAVADSIPDVLADLGSLKPSADPDDSGLTLYLVVAVAAVSCVFLAFVTVLLALKLRRWHKSRLLHAEGSRLAGVPASHFVGVDGVRAFLQTYSHEVSLTADSRKSHLIFSQPSYADTLISRESCEKSEPLLITQDLLETKGDPNLQQAPPNTDWRFSQAQRPGTSGSQNGDDTGTWPNNQFDTEMLQAMILASASEAADGSSTLGGGAGTMGLSARYGPQFTLQHVPDYRQNVYIPGSNATLTNAAGKRDGKAPAGGNGNKKKSGKKEKK

SEQ ID NO: 912055 - protein, 932 aa, Homo sapiens
MAAQPRGGDYRGFFLLSILLGTPWEAWAGRILYSVSEETDKGSFVGDIAKDLGLEPRELAERGVRIISRGRTQLFALNQRSGSLVTAGRIDREEICAQSARCLVNFNILMEDKMNLYPIDVEIIDINDNVPRFLTEEINVKIMENTAPGVRFPLSEAGDPDVGTNSLQSYQLSPNRHFSLAVQSGDDETKYPELVLERVLDREEERVHHLVLTASDGGDPPRSSTAHIQVTVVDVNDHTPVFSLPQYQVTVPENVPVGTRLLTVHAIDLDEGVNGEVTYSFRKITPKLPKMFHLNSLTGEISTLEGLDYEETAFYEMEVQAQDGPGSLTKAKVLITVLDVNDNAPEVTMTSLSSSIPEDTPLGTVIALFYLQDRDSGKNGEVTCTIPENLPFKLEKSIDNYYRLVTTKNLDRETLSLYNITLKATDGGTPPLSRETHIFMQVADTNDNPPTFPHSSYSVYIAENNPRGASIFLVTAQDHDSEDNAQITYSLAEDTIQGAPVSSYVSINSDTGVLYALQSFDYEQLRELQLRVTAHDSGDPPLSSNMSLSLFVLDQNDNPPEILYPALPTDGSTGMELAPRSAEPGYLVTKVVAVDKDSGQNAWLSYLLLKASEPGLFAVGLYTGEVRTARALLDRDALKQSLVVAVQDHGQPPLSATVTLTVAVADSIPEVLADLGSLEPSDGPYNYDLTLYLVVAVATVSCVFLAFVLVLLALRLRRWHKSRLLQASEGGLANVPTSHFVGMDGVQAFLQTYSHEVSLTADSRKSHLIFPQPNYVDMLISQESCEKNDSLLTSVDFQECKENLPSIQQAPPNTDWRFSQAQRPGTSGSQNGDDTGTWPNNQFDTEMLQAMILASASEAADGSSTLGGGAGTMGLSARYGPQFTLQHVPDYRQNVYIPGSNATLTNAAGKRDGKAPAGGNGNKKKSGKKEKK

SEQ ID NO: 912056 - protein, 849 aa, Homo sapiens
MTNCLSFRNGRGLALLCALLGTLCETGSGQIRYSVSEELDKGSFVGNIANDLGLEPRELAERGVRIVSRGRTQLFSLNPQSGSLVTAERIDREELCAQIPLCLVKINILVEDKLKIFEVEIEIKDINDNAPNFPTEELEIKIGELTVPGTRFPIKTAFDPDVGINSLQNYKLSPNDYFSLAVNSVSEGAKYPELVLERALDREKKEIHQLVLVASDGGDPVHSGNLHIQVIVLDANDNPPMFTQPEYRVSVWENVPVGTRLLTVNATDPDEGFNAQVSYILDKMPGKIAEIFHLNSVSGEVSILKSLDYEDAMFYEIKIEAQDGPGLLSRAKILVTVLDVNDNAPEITITSLTSSVPEEGTVGREIALIDVHDRDSGQNGQVEVFVLGNLPFKLEKSIDQYYRLVTATSLDREQISEYNISLRASDGGSPPLSTETHITLHVIDINDNPPTFPHLSYSAYIPENNPRGASIFSVTAQDPDSNNNARITYALTEDTLQGAPLSSFVSINSNTGVLYALRSFDYEQFRDLKLLVTASDSGNPPLSSNVSLNLFVLDQNDNAPEILYPALPTDGSTGVELAPRSAEPGYLVTKVVAVDRDSGQNAWLSYRLLKASEPGLFSVGLHTGEVRTARALLDRDALKQSLVVAVQDHGQPPLSATVTLTVAVADRIPDILADLGSLEPSAKPNDSDLTLYLVVAVAAVSCVFLAFVIVLLALRLRRWHKSRLLQASGGGLASTPGSHFVGADGVRAFLQTYSHEVSLTADSRKSHLIFPQPNYADTLISQESCEKSEPLLITQDLLEMKGDSNLLKPRPTRTGVSLRPRDPAPAAPKMAMTPAPGPTTSLTQRCCKP

SEQ ID NO: 912057 - protein, 923 aa, Homo sapiens
MGSGAGELGRAERLPVLFLFLLSLFCPALCEQIRYRIPEEMPKGSVVGNLATDLGFSVQELPTRKLRVSSEKPYFTVSAESGELLVSSRLDREEICGKKPACALEFEAVAENPLNFYHVNVEIEDINDHTPKFTQNSFELQISESAQPGTRFILEVAEDADIGLNSLQKYKLSLNPSFSLIIKEKQDGSKYPELALEKTLDREQQSYHRLVLTALDGGHPPLSGTTELRIQVTDANDNPPVFNRDVYRVSLRENVPPGTTVLQVSATDQDEGINSEITYSFYRTGQIFSLNSKSGEITTQKKLDFEETKEYSMVVEGRDGGGLVAQCTVEINIQDENDNSPEVTFHSLLEMILENAVPGTLIALIKIHDQDSGENGEVNCQLQGEVPFKIISSSKNSYKLVTDGTLDREQTPEYNVTITATDRGKPPLSSSISVILHIRDVNDNAPVFHQASYLVSVPENNPPGASIAQVCASDLDLGLNGQVSYSIMASDLEPLALASYVSMSAQSGVVFAQRAFDYEQLRTFELTLQARDQGSPALSANVSLRVLVGDRNDNAPRVLYPALGPDGSALFDMVPRAAEPGYLVTKVVAVDADSGHNAWLSYHVLQASEPGLFSLGLRTGEVRTARALGDRDAARQRLLVAVRDGGQPPLSATATLHLVFADSLQEVLPDITDRPVPSDPQAELQFYLVVALALISVLFLLAVILAVALRLRRSSSPAAWSCFQPGLCVKSGPVVPPNYSQGTLPYSYNLCVAHTGKTEFNFLKCSEQLSSGQDILCGDSSGALFPLCNSSESTSHPELQAPPNTDWRFSQAQRPGTSGSQNGDDTGTWPNNQFDTEMLQAMILASASEAADGSSTLGGGAGTMGLSARYGPQFTLQHVPDYRQNVYIPGSNATLTNAAGKRDGKAPAGGNGNKKKSGKKEKK

SEQ ID NO: 912058 - protein, 931 aa, Homo sapiens
MKIQKKLTGCSRLMLLCLSLELLLEAGAGNIHYSVPEETDKGSFVGNIAKDLGLQPQELADGGVRIVSRGRMPLFALNPRSGSLITARRIDREELCAQSMPCLVSFNILVEDKMKLFPVEVEIIDINDNTPQFQLEELEFKMNEITTPGTRVSLPFGQDLDVGMNSLQSYQLSSNPHFSLDVQQGADGPQHPEMVLQSPLDREEEAVHHLILTASDGGEPVRSGTLRIYIQVVDANDNPPAFTQAQYHINVPENVPLGTQLLMVNATDPDEGANGEVTYSFHNVDHRVAQIFRLDSYTGEISNKEPLDFEEYKMYSMEVQAQDGAGLMAKVKVLIKVLDVNDNAPEVTITSVTTAVPENFPPGTIIALISVHDQDSGDNGYTTCFIPGNLPFKLEKLVDNYYRLVTERTLDRELISGYNITITAIDQGTPALSTETHISLLVTDINDNSPVFHQDSYSAYIPENNPRGASIFSVRAHDLDSNENAQITYSLIEDTIQGAPLSAYLSINSDTGVLYALRSFDYEQFRDMQLKVMARDSGDPPLSSNVSLSLFLLDQNDNAPEILYPALPTDGSTGVELAPLSAEPGYLVTKVVAVDRDSGQNAWLSYRLLKASEPGLFSVGLHTGEVRTARALLDRDALKQSLVVAVQDHGQPPLSATVTLTVAVADRISDILADLGSLEPSAKPNDSDLTLYLVVAAAAVSCVFLAFVIVLLAHRLRRWHKSRLLQASGGGLASMPGSHFVGVDGVRAFLQTYSHEVSLTADSRKSHLIFPQPNYADTLISQESCEKKGFLSAPQSLLEDKKEPFSQQAPPNTDWRFSQAQRPGTSGSQNGDDTGTWPNNQFDTEMLQAMILASASEAADGSSTLGGGAGTMGLSARYGPQFTLQHVPDYRQNVYIPGSNATLTNAAGKRDGKAPAGGNGNKKKSGKKEKK

SEQ ID NO: 912059 - protein, 929 aa, Homo sapiens
MGNSSGWRGPAGQRRMLFLFLLSLLDQVLSEPIRYAIPEELDRGSLVGNLAKDLGFGVGDLPTRNLRVIAEKKFFTVSPENGNLLVSDRIDREEICGKKSTCVLEFEMVAEKPLNFFHVTVLIQDINDNPPTFSQNITELEISELALTGATFALESAQDPDVGVNSLQQYYLSPDPHFSLIQKENLDGSRYPELVLKAPLDREEQPHHHLVLTAVDGGEPSRSCTTQIRVIVADANDNPPVFTQDMYRVNVAENLPAGSSVLKVMAIDMDEGINAEIIYAFINIGKEVRQLFKLDSKTGELTTIGELDFEERDSYTIGVEAKDGGHHTAYCKVQIDISDENDNAPEITLASESQHIQEDAELGTAVALIKTHDLDSGFNGEILCQLKGNFPFKIVQDTKNTYRLVTDGALDREQIPEYNVTITATDKGNPPLSSSKTITLHILDVNDNVPVFHQASYTVHVAENNPPGASIAHVRASDPDLGPNGLVSYYIVASDLEPRELSSYVSVSARSGVVFAQRAFDHEQLRAFELTLQARDQGSPTLSANVSLRVLVDDRNDNAPLVLYPALGPEGSALFDMVPRSAEPGYLVTKVVAVDADSGYNAWLSYHIVQASEPGLFSLGLRTGEVRTARTLGDREAARQRLLVTVRDGGQQPLSATVMLHLIFADSLQEIQPDLSDRPTPSDPQAELQFHLVVALALISVLFLLAVILAISLRLRCSSRPATEGYFQPGVCFKTVPGVLPTYSERTLPYSYNPCAASHSSNTEFKFLNIKAENAAPQDLLCDEASWFESNDNPEMPSNSGNLQKQAPPNTDWRFSQAQRPGTSGSQNGDDTGTWPNNQFDTEMLQAMILASASEAADGSSTLGGGAGTMGLSARYGPQFTLQHVPDYRQNVYIPGSNATLTNAAGKRDGKAPAGGNGNKKKSGKKEKK

SEQ ID NO: 912060 - protein, 750 aa, Homo sapiens
MANRLQRGDRSRLLLLLCIFLGTLRGFRARQIRYSVPEETEKGSFVGNISKDLGLEPRELAKRGVRIVSRGKTQLFAVNPRSGSLITAGRIDREELCETVSSCFLNMELLVEDTLKIYGVEVEIIDINDNAPSFQEDEVEIKVSEHAIPGARFALPNARDPDVGVNSLQSYQLSPNNYFSLQLRGRTDGAKNPELVLEGSLDREKEAAHLLLLTALDGGDPIRKGAVPIRVVVLDVNDHIPMFTQSVYRVSVPENISSGTRVLMVNATDPDEGINGEVMYSFRNMESKASEIFQLDSQTGEVQVRGSLDFEKYRFYEMEIQGQDGGGLFTTTTMLITVVDVNDNAPEITITSSINSILENSPPGTVIALLNVQDQDSGENGQVSCFIPNHLPFKLEKTYGNYYKLITSRVLDRELVQSYNITLTATDQGSPPLSAETHVWLNVADDNDNPPVFPHSSYSAYIPENNPRGASIFSVTALDPDSKQNALVTYSLTDDTVQGVPLSSYVSINSNTGVLYALQSFDYEQFRDLELRVIARDSGDPPLSSNVSLSLFVLDQNDNAPEILYPALPTDGSTGVELAPRSAEPGYLVTKVVAVDKDSGQNAWLSYRLLKASEPGLFAVGEHTGEQAPPNTDWRFSQAQRPGTSGSQNGDDTGTWPNNQFDTEMLQAMILASASEAADGSSTLGGGAGTMGLSARYGPQFTLQHVPDYRQNVYIPGSNATLTNAAGKRDGKAPAGGNGNKKKSGKKEKK

SEQ ID NO: 912061 - protein, 850 aa, Homo sapiens
MAAQRNRSKESKDCSGLVLLCLFFGIPWEAGARQISYSIPEELEKGSFVGNISKDLGLAPRELAERGVRIVSRGRTQLFSLNPRSGSLITAGRIDREELCAQSARCVVSFNILVEDRVKLFGIEIEVTDINDNAPKFQAENLDVKINENVAAGMRFPLPEAIDPDVGVNSLQSYQLSPNKHFSLRVQSRANGVKYPELVLEHSLDREEEAIHHLVLTASDGGDPLRSGTVLVSVTVFDANDNAPVFTLPEYRVSVPENLPVGTQLLTVTATDRDEGANGEVTYSFRKLPDTQLLKFQLNKYTGEIKISENLDYEETGFYEIEIQAEDGGAYLATAKVLITVEDVNDNSPELTITSLFSPVTEDSPLGTVVALLNVHDLDSEQNGQVTCSILAYLPFKLEKSIDSYYRLVIHRALDREQVSSYNITVTATDGGSPPLSTEAHFMLQVADINDNPPTFSQVSYFTYIPENNARGASIFSVTALDPDSKENAQIIYSLAEDTIQGVPLSSYISINSDTGVLYALRSFDYEQFHELQMQVTASDSGDPPLSSNVSLSLFVLDQNDNAPEILYPALPTDGSTGVELAPRSAEPGYLVTKVVAVDRDSGQNAWLSYRLLKASEPGLFAVGEHTGEVRTARALLDRDALKQSLVVAVQDHGQPPLSATVTLTVAVADSIPQVLADLGSFESPANSETSDLTLYLVVAVAAVSCVFLAFVIVLLAHRLRRWHKSRLLQASGGGLTGVSGSHFVGVDGVRAFLQTYSHEVSLTADSRKSHLIFPQPNYADTLISQESCEKNDPLSLLDDSKFPIEDTPLVPVSFIFIFTFVKKKKIGFYFEVCGMMVESVNAKTLMSRI

SEQ ID NO: 912062 - protein, 808 aa, Homo sapiens
MGGSCAQRRRAGPRQVLFPLLLPLFYPTLCEPIRYSIPEELAKGSVVGNLAKDLGLSVLDVSARELRVSAEKLHFSVDAQSGDLLVKDRIDREQICKERRRCELQLEAVVENPLNIFHVIVVIEDVNDHAPQFRKDEINLEISESVSLGMGTILESAEDPDISMNSLSKYQLSPNEYFSLVEKDNPDGGKYPELVLQKTLDRETQSAHHLVLTALDGGDPPRSGTAQIRILVIDANDNPPVFSQDVYRVSLREDVPPGTSILRVKATDQDEGINSEITYSFFGVADKAQHVFSLDYTTGNILTQQPLDFEEVERYTINIEAKDRGSLSTRCKVIVEVVDENDNSPEIIITSLSDQIMEDSPPGVVVALFKTRDQDSGENGEVRCSLSRGVPFKIHSSSNNYYKLVTDEALDREQTPEYNVTIAATDRGKPPLSSSKTITLHITDVNDNAPVFGQSAYLVHVPENNQPGASIAQVSASDPDFGLNGRVSYSLIASDLESRTLSSYVSVSAQSGVVFAQRAFDHEQLRTFELTLQARDQGSPALSANVSLRVLVGDRNDNAPRVLYPALGPDGSALFDTVPRAAQPGYLVTKVVAVDADSGHNAWLSYHVVQASEPGLFSLGLRTGEVRMVRALGDKDSVRQRLLVAVRDGGQPPLSATATLHLVFADSLQEVLPDFSDHPTPSDSQAEMQFYLVVALALISVLFLLAVILAIALRLRQSFSPTAGDCFESVLCSKSGPVGPPNYSEGTLPYAYNFCVPGDQMNPEFNFFTSVDHCPATQDNLNKDSMLLASILTPSVEADKKILKQVSI

SEQ ID NO: 912063 - protein, 837 aa, Homo sapiens
MANRLQRGDRSRLLLLLCIFLGTLRGFRARQIRYSVPEETEKGSFVGNISKDLGLEPRELAKRGVRIVSRGKTQLFAVNPRSGSLITAGRIDREELCETVSSCFLNMELLVEDTLKIYGVEVEIIDINDNAPSFQEDEVEIKVSEHAIPGARFALPNARDPDVGVNSLQSYQLSPNNYFSLQLRGRTDGAKNPELVLEGSLDREKEAAHLLLLTALDGGDPIRKGAVPIRVVVLDVNDHIPMFTQSVYRVSVPENISSGTRVLMVNATDPDEGINGEVMYSFRNMESKASEIFQLDSQTGEVQVRGSLDFEKYRFYEMEIQGQDGGGLFTTTTMLITVVDVNDNAPEITITSSINSILENSPPGTVIALLNVQDQDSGENGQVSCFIPNHLPFKLEKTYGNYYKLITSRVLDRELVQSYNITLTATDQGSPPLSAETHVWLNVADDNDNPPVFPHSSYSAYIPENNPRGASIFSVTALDPDSKQNALVTYSLTDDTVQGVPLSSYVSINSNTGVLYALQSFDYEQFRDLELRVIARDSGDPPLSSNVSLSLFVLDQNDNAPEILYPALPTDGSTGVELAPRSAEPGYLVTKVVAVDKDSGQNAWLSYRLLKASEPGLFAVGEHTGEVRTARALLDRDALKQSLVVAVQDHGQPPLSATVTLTVAVADSIPEVLADLGSLESLANSETSDLSLYLVVAVAAVSCIFLVFVIVLLALRLWRWHKSRLLQASEGGLAGMPTSHFVGVDGVQAFLQTYSHEVSLIADSQKSHLIFPQPNYGDTLISQESCEKSEPLLIAEDSAIILGKCDPTSNQVRFISLPPNCWCLGTSLLRRCFLSLL

SEQ ID NO: 912064 - protein, 820 aa, Homo sapiens
MAAPPARPDHTRLLQICLLLGVLVEIRAEQILYSVFEEQEEGSVVGNIAKDLGLAPRELAERGVRIVSRGRTQLFALNPRSGTLVTAGRIDREELCDRSPNCVTNLEILLEDTVKILRVEVEIIDVNDNPPSFGTEQREIKVAENENPGARFPLPEAFDPDVGVNSLQGYQLNSNGYFSLDVQSGADGIKYPELVLERALDREEEAVHHLVLTAFDGGDPVRSGTARILIILVDTNDNAPVFTQPEYHVSVRENVPVGTRLLTVKATDPDEGANGDVTYSFRKVRDKISQLFQLNSLSGDITILGGLDYEDSGFYDIDVEAHDGPGLRARSKVLVTVLDENDNAPEVTVTSLTSSVQESSSPGTVIALFNVHDSDSGGNGLVTCSIPDNLPFTLEKTYGNYYRLLTHRTLDREEVSEYNITVTATDQGTPPLSTETHISLQVMDINDNPPTFPHASYSAYIPENNPRGASILSMTAQDPDSGDNARITYSLAEDTFQGAPLSSYVSINSNTGILYALCSFDYEQFRDLQLLMTASDSGDPPLSSNVSLSLFVLDQNDNVPEILYPTFPTDGSTGVELAPRSADSGYLVTKVVAVDRDSGQNAWLSYSLLKSSEPGLFAVGLHTGEVRTARALLDRDALKQRLVVVVQDHGQPPLSATVTLTVAVADSIPDVLADLGSLKPSADPDDSGLTLYLVVAVAAVSCVFLAFVTVLLALKLRRWHKSRLLHAEGSRLAGVPASHFVGVDGVRAFLQTYSHEVSLTADSRKSHLIFSQPSYADTLISRESCEKSEPLLITQDLLETKGDPNLQVSQSYNRSYHTEI

SEQ ID NO: 912065 - protein, 813 aa, Homo sapiens
MASPPRGWGCGELLLPFMLLGTLCEPGSGQIRYSMPEELDKGSFVGNIAKDLGLEPQELAERGVRIVSRGRTQLFALNPRSGSLVTAGRIDREELCAQSPLCVVNFNILVENKMKIYGVEVEIIDINDNFPRFRDEELKVKVNENAAAGTRLVLPFARDADVGVNSLRSYQLSSNLHFSLDVVSGTDGQKYPELVLEQPLDREKETVHDLLLTALDGGDPVLSGTTHIRVTVLDANDNAPLFTPSEYSVSVPENIPVGTRLLMLTATDPDEGINGKLTYSFRNEEEKISETFQLDSNLGEISTLQSLDYEESRFYLMEVVAQDGGALVASAKVVVTVQDVNDNAPEVILTSLTSSISEDCLPGTVIALFSVHDGDSGENGEIACSIPRNLPFKLEKSVDNYYHLLTTRDLDREETSDYNITLTVMDHGTPPLSTESHIPLKVADVNDNPPNFPQASYSTSVTENNPRGVSIFSVTAHDPDSGDNARVTYSLAEDTFQGAPLSSYVSINSDTGVLYALRSFDYEQLRDLQLWVTASDSGNPPLSSNVSLSLFVLDQNDNTPEILYPALPTDGSTGVELAPRSAEPGYLVTKVVAVDKDSGQNAWLSYRLLKASEPGLFAVGLHTGEVRTARALLDRDALKQSLVVAVEDHGQPPLSATFTVTVAVADRIPDILADLGSIKTPIDPEDLDLTLYLVVAVAAVSCVFLAFVIVLLVLRLRRWHKSRLLQAEGSRLAGVPASHFVGVDGVRAFLQTYSHEVSLTADSRKSHLIFPQPNYADTLLSEESCEKSEPLLMSDKVDANKEERRVQVSFLFR

SEQ ID NO: 912066 - protein, 878 aa, Homo sapiens
MGPKTLPQLAGKWQVLCMLSLCCWGWVSGQLRYSVVEESEPGTLVGNVAQDLGLKMTDLLSRRLQLGSEENGRYFSLSLMSGALAVNQKIDRESLCGASTSCLLPVQVVTEHPLELIRVEVEILDLNDNSPSFATPEREMRISESAASGARFPLDSAQDPDVGTNTVSFYTLSPNSHFSLNVKTLKDGKPFPELVLEQQLDREAQARHQLVLTAVDGGTPARSGTTLISVIVLDINDNAPTFQSSVLRVGIPENAPIGTLLLRLNATDPDEGTNGQLDYSFGDHTSEAVRNLFGLDPSSGAIHVLGPIDFEESRFYEIHARARDQGQPAMEGHCVIQVDVGDVNDNAPEVLLASLANPVLESTPVGTVVGLFNVRDRDSGRNGEVSLDISPDLPFQIKPSENHYSLLTSQPLDREATSHYIIELLASDAGSPSLHKHLTIRLNISDVNDNAPRFNQQLYTAYILENRPPGSLLCTVAASDPDTGDNARLTYSIVGNQVQGAPASSFVYVNPEDGRIFAQRTFDYELLQMLQIVVGVRDSGSPPLHANTSLHVFVLDENDNAPAVLHPRPDWEHSAPQRLPRSAPPGSLVTKVTAVDADAGHNAWLSYSLLPQSTAPGLFLVSTHTGEVRTARALLEDDSDTQQVVVLVRDNGDPSLSSTATVLLVLEDEDPEEMPKSSDFLIHPPERSDLTLYLIVALATVSLLSLVTFTFLSAKCLQGNADGDGGGGQCCRRQDSPSPDFYKQSSPNLQVSSDGTLKYMEVTLRPTDSQSHCYRTCFSPASDGSDFTFLRPLSVQQPTALALEPDAIRSRSNTLRERSQVRGSAPPRATPGGGTGEAARPHKGLNLHPLLSGRLGRWLRSTRFSGSLDRLRETRVAD

SEQ ID NO: 912067 - protein, 828 aa, Homo sapiens
MAAPTKCQLRGRLVLLCSLLGMLWEARASQIRYSVPEETEKGYIVGNISKDLALEPRELAERRVRIVSRGRTQLFSLNPRSGTLVTAGRIDREELCAQSPRCLVNFKVLVEDRVKLYGIEIEVTDINDSAPKFQAESLEVKINEIAVPGARYPLPEAIDPDVGVNSLQSYQLSPNHHFSLNVQTGDNGAINPELVLERALDREEATAHHLVLTASDGGEPRRSSTVRIHVTVLDTNDNAPVFAQRIYRVKVLENVPPGTWLLTATASDLDEGINGKVAYKFWKINEKQSLLFQLNENTGEISTAKSLDYEECSFYEMEIQAEDGGGLKGWTKVLISVEDVNDNRPEVTITSLFSPVREDAPQGTVILLFNAHDRDSGKNGQVVCSIQENLSFTLENSEEDYYRLLTAQILDREKASEYNITVTATDRGTPPLSTEIHITLQVTDINDNPPAFSQASYSVYLPENNARGTSIFSVIAYDPDSNENSRVIYSLAEDTIQGSPLSTYVSINSDTGVLYALCSFDYEQFRDLQMQVTASDSGSPPLSSNVSLRLFVLDQNDNAPEILYPALPTDGSTGVELAPRSAEPGYLVTKVVAVDRDSGQNAWLSYRLFKASEPGLFSVGLHTGEVRTARALLDRDALKQSLVVAVQDHGQPPLSATVTLTVAIADSIPDILADLGSLQIPADLEASDLTLYLVVAVAVVSCVFLTFVITLLALRLRHWHSSHLLRATSDGLAGVPTSHFVGVDGVRAFLQTYSQEFSLTADSRKSHLIFPQPNYADTLISQQSCEKNEPLCVSVDSKFPIEDTPLVPVSSFFFFLSFLFLFFVLFCF

SEQ ID NO: 912068 - protein, 810 aa, Homo sapiens
MQRAREAEMMKSQVLFPFLLSLFCGAISQQIRYTIPEELANGSRVGKLAKDLGLSVRELPTRKLRVSAEDYFNVSLESGDLLVNGRIDREKICGRKLECALEFETVAENPMNVFHVVVVIQDINDNAPRFVAKGIDLEICESALPGVKFSLDSAQDADVEGNSLKLYTINPNQYFSLSTKESPDGSKYPVLLLEKPLDREHQSSHRLILTAMDGGDPPLSGTTHIWIRVTDANDNAPVFSQEVYRVSLQENVPWGTSVLRVMATDQDEGINAEITYAFLNSPISTSLFNLNPNTGDITTNGTLDFEETSRYVLSVEAKDGGVHTAHCNVQIEIVDENDNAPEVTFMSFSNQIPEDSDLGTVIALIKVRDKDSGQNGMVTCYTQEEVPFKLESTSKNYYKLVIAGALNREQTADYNVTIIATDKGKPALSSRTSITLHISDINDNAPVFHQASYVVHVSENNPPGASIAQVSASDPDLGPNGRVSYSILASDLEPRELLSYVSVSPQSGVVFAQRAFDHEQLRAFELTLQARDQGSPALSANVSLRVLVGDLNDNAPRVLYPALGPDGSALFDMVPRAAEPGYLVTKVVAVDADSGHNAWLSYHVLQASEPGLFSLGLRTGEVRTARALGDRDAARQRLLVAVRDGGQPPLSATATLHLIFADSLQEVLPDLSDRPEPSDPQTELQFYLVVALALISVLFLLAVILAIALRLRRSSSLDTEGCFQTGLCSKSGPGVPPNHSEGTLPYSYNLCIASHSAKTEFNSLNLTPEMAPPQDLLCDDPSMVVCASNEDHKIAYDPSLSSHVSFCKSS

SEQ ID NO: 912069 - protein, 823 aa, Homo sapiens
MKIQKKLTGCSRLMLLCLSLELLLEAGAGNIHYSVPEETDKGSFVGNIAKDLGLQPQELADGGVRIVSRGRMPLFALNPRSGSLITARRIDREELCAQSMPCLVSFNILVEDKMKLFPVEVEIIDINDNTPQFQLEELEFKMNEITTPGTRVSLPFGQDLDVGMNSLQSYQLSSNPHFSLDVQQGADGPQHPEMVLQSPLDREEEAVHHLILTASDGGEPVRSGTLRIYIQVVDANDNPPAFTQAQYHINVPENVPLGTQLLMVNATDPDEGANGEVTYSFHNVDHRVAQIFRLDSYTGEISNKEPLDFEEYKMYSMEVQAQDGAGLMAKVKVLIKVLDVNDNAPEVTITSVTTAVPENFPPGTIIALISVHDQDSGDNGYTTCFIPGNLPFKLEKLVDNYYRLVTERTLDRELISGYNITITAIDQGTPALSTETHISLLVTDINDNSPVFHQDSYSAYIPENNPRGASIFSVRAHDLDSNENAQITYSLIEDTIQGAPLSAYLSINSDTGVLYALRSFDYEQFRDMQLKVMARDSGDPPLSSNVSLSLFLLDQNDNAPEILYPALPTDGSTGVELAPLSAEPGYLVTKVVAVDRDSGQNAWLSYRLLKASEPGLFSVGLHTGEVRTARALLDRDALKQSLVVAVQDHGQPPLSATVTLTVAVADRISDILADLGSLEPSAKPNDSDLTLYLVVAAAAVSCVFLAFVIVLLAHRLRRWHKSRLLQASGGGLASMPGSHFVGVDGVRAFLQTYSHEVSLTADSRKSHLIFPQPNYADTLISQESCEKKGFLSAPQSLLEDKKEPFSQVNFCDECISYLEKNNS

SEQ ID NO: 912070 - protein, 818 aa, Homo sapiens
MAPPQRHPQRSEQVLLLTLLGTLWGAAAAQIRYSIPEELEKGSFVGNIVKDLGLEPQELAEHGVRIVSRGRMQLFSLNPRNGSLVTAGRIDREELCAQSPRCLVSFNILVEDKLNLYPVEVEIVDINDNTPRFLKEELEVKILENAAPSSRFPLMEVYDPDVGMNSLQGFKLSGNSHFSVDVQSEAHGPKYPELVLEGTLDREGEAVYRLVLTAMDGGDPVRSSVAQILVTVLDVNDNTPMFTQPVYRVSVPENLPVGTPVLAVTATDQDEGVHGEVTYSFVKITEKISQIFCLNVLTGEISTSANLDYEDSSFYELGVEARDGPGLRDRAKVLITILDVNDNVPEVVVTSGSRTIAESAPPGTVIALFQVFDRDSGLNGLVTCSIPRSLPFELEKSVGNYYRLVTNAALDREEVFLYNITVTATDKGTPPLSTETIISLNVADTNDNPPTFPHSSYSVYVLENNPRGASIFSVNALDPDVDQNAQVSYSLAEDTLQGAPLSSYVSINSDTGILYALRSFDYEQLRDLQLWVTASDSGDPPLSSNVSLSLFVLDQNDNAPEILYPALPTDGSTGVELAPRSAEPGYLVTKVVAVDRDSGQNAWLSYRLLKASEPGLFSVGLHTGEVRTARALLDRDALKQSLVVAVQDHGQPPLSATVTLTVAVADRIPDILADLGSLEPSAKPNDSDLTLYLVVAVAAVSCVFLAFVIVLLALRLQRWHKSRLLQASGGGLASMPGSHFVGVEGVRAFLQTYSHEVSLTADSRKSHLIFPQPNYADTLINQESYEKSEPLLITQDLLETKGEPRQLQVSFFPPKREE

SEQ ID NO: 912071 - protein, 507 aa, Homo sapiens
MGPKTLPQLAGKWQVLCMLSLCCWGWVSGQLRYSVVEESEPGTLVGNVAQDLGLKMTDLLSRRLQLGSEENGRYFSLSLMSGALAVNQKIDRESLCGASTSCLLPVQVVTEHPLELIRVEVEILDLNDNSPSFATPEREMRISESAASGARFPLDSAQDPDVGTNTVSFYTLSPNSHFSLNVKTLKDGKPFPELVLEQQLDREAQARHQLVLTAVDGGTPARSGTTLISVIVLDINDNAPTFQSSVLRVGIPENAPIGTLLLRLNATDPDEGTNGQLDYSFGDHTSEAVRNLFGLDPSSGAIHVLGPIDFEESRFYEIHARARDQGQPAMEGHCVIQVDVGDVNDNAPEVLLASLANPVLESTPVGTVVGLFNVRDRDSGRNGEVSLDISPDLPFQIKPSENHYSLLTSQPLDREATSHYIIELLASDAGSPSLHKHLTIRLNISDVNDNAPHHNLQHLQQFIVKGTLGKDPSILWVDIHKGGGWGSLNLISYNGVGEAGIIPSVWI

SEQ ID NO: 912072 - protein, 849 aa, Homo sapiens
MFVNDRLDREELCGTLPSCTVTLELVVENPLELFSVEVVIQDINDNNPAFPTQEMKLEISEAVAPGTRFPLESAHDPDVGSNSLQTYELSRNEYFALRVQTREDSTKYAELVLERALDREREPSLQLVLTALDGGTPALSASLPIHIKVLDANDNAPVFNQSLYRARVLEDAPSGTRVVQVLATDLDEGPNGEIIYSFGSHNRAGVRQLFALDLVTGMLTIKGRLDFEDTKLHEIYIQAKDKGANPEGAHCKVLVEVVDVNDNAPEITVTSVYSPVPEDAPLGTVIALLSVTDLDAGENGLVTCEVPPGLPFSLTSSLKNYFTLKTSADLDRETVPEYNLSITARDAGTPSLSALTIVRVQVSDINDNPPQSSQSSYDVYIEENNLPGAPILNLSVWDPDAPQNARLSFFLLEQGAETGLVGRYFTINRDNGIVSSLVPLDYEDRREFELTAHISDGGTPVLATNISVNIFVTDRNDNAPQVLYPRPGGSSVEMLPRGTSAGHLVSRVVGWDADAGHNAWLSYSLLGSPNQSLFAIGLHTGQISTARPVQDTDSPRQTLTVLIKDNGEPSLSTTATLTVSVTEDSPEARAEFPSGSAPREQKKNLTFYLLLSLILVSVGFVVTVFGVIIFKVYKWKQSRDLYRAPVSSLYRTPGPSLHADAVRGGLMSPHLYHQVYLTTDSRRSDPLLKKPGAASPLASRQNTLRSCDPVFYRQVLGAESAPPGQQAPPNTDWRFSQAQRPGTSGSQNGDDTGTWPNNQFDTEMLQAMILASASEAADGSSTLGGGAGTMGLSARYGPQFTLQHVPDYRQNVYIPGSNATLTNAAGKRDGKAPAGGNGNKKKSGKKEKK

SEQ ID NO: 912073 - protein, 806 aa, Homo sapiens
MVPEAWRSGLEMKLEISEAVAPGTRFPLESAHDPDVGSNSLQTYELSRNEYFALRVQTREDSTKYAELVLERALDREREPSLQLVLTALDGGTPALSASLPIHIKVLDANDNAPVFNQSLYRARVLEDAPSGTRVVQVLATDLDEGPNGEIIYSFGSHNRAGVRQLFALDLVTGMLTIKGRLDFEDTKLHEIYIQAKDKGANPEGAHCKVLVEVVDVNDNAPEITVTSVYSPVPEDAPLGTVIALLSVTDLDAGENGLVTCEVPPGLPFSLTSSLKNYFTLKTSADLDRETVPEYNLSITARDAGTPSLSALTIVRVQVSDINDNPPQSSQSSYDVYIEENNLPGAPILNLSVWDPDAPQNARLSFFLLEQGAETGLVGRYFTINRDNGIVSSLVPLDYEDRREFELTAHISDGGTPVLATNISVNIFVTDRNDNAPQVLYPRPGGSSVEMLPRGTSAGHLVSRVVGWDADAGHNAWLSYSLLGSPNQSLFAIGLHTGQISTARPVQDTDSPRQTLTVLIKDNGEPSLSTTATLTVSVTEDSPEARAEFPSGSAPREQKKNLTFYLLLSLILVSVGFVVTVFGVIIFKVYKWKQSRDLYRAPVSSLYRTPGPSLHADAVRGGLMSPHLYHQVYLTTDSRRSDPLLKKPGAASPLASRQNTLRSCDPVFYRQVLGAESAPPGQQAPPNTDWRFSQAQRPGTSGSQNGDDTGTWPNNQFDTEMLQAMILASASEAADGSSTLGGGAGTMGLSARYGPQFTLQHVPDYRQNVYIPGSNATLTNAAGKRDGKAPAGGNGNKKKSGKKEKK

SEQ ID NO: 912074 - protein, 134 aa, Homo sapiens
MVPEAWRSGLQAPPNTDWRFSQAQRPGTSGSQNGDDTGTWPNNQFDTEMLQAMILASASEAADGSSTLGGGAGTMGLSARYGPQFTLQHVPDYRQNVYIPGSNATLTNAAGKRDGKAPAGGNGNKKKSGKKEKK

SEQ ID NO: 912075 - protein, 185 aa, Homo sapiens
MVPEAWRSGLVYLTTDSRRSDPLLKKPGAASPLASRQNTLRSCDPVFYRQVLGAESAPPGQQAPPNTDWRFSQAQRPGTSGSQNGDDTGTWPNNQFDTEMLQAMILASASEAADGSSTLGGGAGTMGLSARYGPQFTLQHVPDYRQNVYIPGSNATLTNAAGKRDGKAPAGGNGNKKKSGKKEKK

SEQ ID NO: 912076 - protein, 2575 aa, Homo sapiens
MGSGAGELGRAERLPVLFLFLLSLFCPALCEQIRYRIPEEMPKGSVVGNLATDLGFSVQELPTRKLRVSSEKPYFTVSAESGELLVSSRLDREEICGKKPACALEFEAVAENPLNFYHVNVEIEDINDHTPKFTQNSFELQISESAQPGTRFILGSAHDADIGSNTLQNYQLSPSDHFSLINKEKSDGSKYPEMVLKTPLDREKQKSYHLTLTALDFGAPPLSSTAQIHVLVTDANDNAPVFSQDVYRVSLSENVYPGTTVLQVTATDQDEGVNAEITFSFSEASQITQFDLNSNTGEITVLNTLDFEEVKEYSIVLEARDGGGMIAQCTVEVEVIDENDNAPEVIFQSLPNLIMEDAELGTHIALLKVRDKDSRHNGEVTCKLEGDVPFKILTSSRNTYKLVTDAVLDREQNPEYNITVTATDRGKPPLSSSSSITLHIGDVNDNAPVFSQSSYIVHVAENNPPGASISQVRASDPDLGPNGQVSYCIMASDLEQRELSSYVSISAESGVVFAQRAFDHEQLRAFELTLQARDQGSPALSANVSLRVLVDDRNDNAPRVLYPALGPDGSALFDMVPHAAEPGYLVTKVVAVDADSGHNAWLSYHVLQASEPGLFSLGLRTGEVRTARALGDRDAVRQRLLVAVRDGGQPPLSATATLHLVFADSLQEVLPDITDRPDPSDLQAELQFYLVVALALISVLFLVAMILAIALRLRRSSSPASWSCFQPGLCVKSESVVPPNYSEGTLPYSYNLCVAHTGKTEFNFLKCSEQLSSGQDILCGDSSGALFPLCNSSELTSHQVVSFKYNLMLIAYPFLHIHKKIYIFAGKYIIFRCHGSFLESCSQLKSCHIILQRRSKVGAIVWPNICLFFSQAEIYKAMRGGFNHKVKVLDSCWLSPEKVNEIFPIHFPSCCLIYDEYFFQLGYTINIKIIKPKNLSKNSTLFLTNLTGMVSIVVHCFVSCVNFPFVSKALRIRSQLDFYVHGPLVIICSVRCVCVCVCVCVREILLLRKRSTMLIEDQKQILLTCNIGVSGLICIQAHSISFIKEKTMFCVCCPSHTQPYYIMCNCLICSPKLIIARGLLIILLPLGKKYSLENCQSGVHTKYIQNTKEHYMSLLLGISKQLLQLMATLQIAERRKRLSILFVFLFFFFETESLSVTQAVVQWHNDSSLQPQTPGLKHSFCISLLTSWNSGSCHQTWLIFLFSVEKIFSFTNLTGMVSIVYPVFHMHKKIYSQENIKFSDFMSGFKKVLVSEKTIIPVFKGRVKKFICYVAQAGLEEETDFFVVILILWLLSKYYIVITFCSFLDQSVNVGKVNFRIYVKVKSALNLIISLVKGMGWSFAFYHIFICTFQVFKKKNINNVNKMQNNVISHKTAMVKAFILLKFHNFYLKILSTCNSSGIEKNNLKATTLEKACKMIKYFKPNKTISESVISSEVYFSLKINSFLVTTEVLSYLLVYIGDIYNKAESTMGNESIMFFLRPNVLQKCENLIRCYNLIILIYSDHLITLNKTFISHSLAVSFKIWVYWINQINSKQSNKQMIFFSQKSSRVLHLEVICISVQELFRTEAPLFTYWKTNATENTQISHLTKTRRCHKLTAGLQRNPTPVWRHSRFPEDCHLHSCGKKLNKTHLCTVKILRGFCSKTTMAAPQSRPRRGELILLCALLGTLWEIGRGQIRYSVPEETDKGSFVGNISKDLGLDPRKLAKHGVRIVSRGRTQLFALNPRSGSLITAGRIDREELCAQSPRCLININTLVEDKGKLFGVEIEIIDINDNNPKFQVEDLEVKINEIAVPGARYPLPEAVDPDVGVNSLQSYQLSPNHHFSLDVQTGDNGAINPELVLERALDREEEAAHHLVLTASDGGKPPRSSTVRIHVTVLDTNDNAPVFPHPIYRVKVLENMPPGTRLLTVTASDPDEGINGKVAYKFRKINEKQTPLFQLNENTGEISIAKSLDYEECSFYEMEIQAEDVGALLGRTKLLISVEDVNDNRPEVIITSLFSPVLENSLPGTVIAFLSVHDQDSGKNGQVVCYTRDNLPFKLEKSIGNYYRLVTRKYLDRENVSIYNITVMASDLGTPPLSTETQIALHVADINDNPPTFPHASYSAYILENNLRGASIFSLTAHDPDSQENAQVTYSVTEDTLQGAPLSSYISINSDTGVLYALQSFDYEQIRDLQLLVTASDSGDPPLSSNMSLSLFVLDQNDNAPEILYPALPTDGSTGVELAPRSAERGYLVTKVVAVDRDSGQNAWLSYRLLKASEPGLFSVGLHTGEVRTARALLDRDALKQSLVVAVQDHGQPPLSATVTLTVAVADSIPEVLTELGSLKPSVDPNDSSLTLYLVVAVAAISCVFLAFVAVLLGLRLRRWHKSRLLQDSGGRLVGVPASHFVGVEEVQAFLQTYSQEVSLTADSRKSHLIFPQPNYADMLISQEGCEKNDSLLTSVDFHEYKNEADHGQQAPPNTDWRFSQAQRPGTSGSQNGDDTGTWPNNQFDTEMLQAMILASASEAADGSSTLGGGAGTMGLSARYGPQFTLQHVPDYRQNVYIPGSNATLTNAAGKRDGKAPAGGNGNKKKSGKKEKK

SEQ ID NO: 912077 - protein, 2575 aa, Homo sapiens; identical to SEQ ID NO: 912076

SEQ ID NO: 912078 - protein, 2575 aa, Homo sapiens; identical to SEQ ID NO: 912076

SEQ ID NO: 912079 - protein, 2575 aa, Homo sapiens; identical to SEQ ID NO: 912076

SEQ ID NO: 912080 - protein, 871 aa, Homo sapiens
MLRKVRSWTEIWRWATLLFLFYHLGYVCGQIRYPVPEESQEGTFVGNVAQDFLLDTDSLSARRLQVAGEVNQRHFRVDLDSGALLIKNPIDREALCGLSASCIVPLEFVTEGPLEMYRAEVEIVDVNDHAPRFPRQQLDLEIGEAAPPGQRFPLEKAQDADVGSNSISSYRLSSNEHFALDVKKRSDGSLVPELLLEKPLDREKQSDYRLVLTAVDGGNPPRSGTAELRVSVLDVNDNAPAFQQSSYRISVLESAPAGMVLIQLNASDPDLGPSGNVTFYFSGHTPDRVRNLFSLHPTTGKLTLLGPLDFESENYYEFDVRARDGGSPAMEQHCSLRVDLLDVNDNAPYITVTSELGTLPESAEPGTVVALISVQDPDSGSNGDVSLRIPDHLPFALKSAFRNQFSLVTAGPLDREAKSSYDIMVTASDAGNPPLSTHRTIFLNISDVNDNPPSFFQRSHEVFVPENNRPGDLLCSLAASDPDSGLNALISYSLLEPRNRDVSASSFISLNPQTGAVHATRSFDYEQTQTLQFEVQARDRGNPPLSSTVTVRLFVLDLNDNAPAVLRPRARPGSLCPQALPPSVGAGHLITKVTAVDLDSGYNAWVSYQLLEAPDPSLFAVSRYAGEVRTAVPIPADLPPQKLVIVVKDSGSPPLSTSVTLLVSLEEDTHPVVPDLRESSAPREGESRLTLYLAVSLVAICFVSFGSFVALLSKCLRGAACGVTCFPAGTCACLTRSRRREGLPPSNGILRIQLGSDDPIKFVDVGGHSHGCTPLASAPTRSDSFMMVKSPSAPMAGEPVRPSCPPSDLLYGLEVRPLQAQQMLEGYSDPGIWLGHVLESTGLSVSAHSDVTIFVRGNYVVDAVLCNCFVN

SEQ ID NO: 912081 - protein, 685 aa, Homo sapiens
MVPEAWRSGLVSTGRVVGVLLLLGALNKASTVIHYEIPEEREKGFAVGNVVANLGLDLGSLSARRFRVVSGASRRFFEVNRETGEMFVNDRLDREELCGTLPSCTVTLELVVENPLELFSVEVVIQDINDNNPAFPTQEMKLEISEAVAPGTRFPLESAHDPDVGSNSLQTYELSRNEYFALRVQTREDSTKYAELVLERALDREREPSLQLVLTALDGGTPALSASLPIHIKVLDANDNAPVFNQSLYRARVLEDAPSGTRVVQVLATDLDEGPNGEIIYSFGSHNRAGVRQLFALDLVTGMLTIKGRLDFEDTKLHEIYIQAKDKGANPEGAHCKVLVEVVDVNDNAPEITVTSVYSPVPEDAPLGTVIALLSVTDLDAGENGLVTCEVPPGLPFSLTSSLKNYFTLKTSADLDRETVPEYNLSITARDAGTPSLSALTIVRVQVSDINDNPPQSSQSSYDVYIEENNLPGAPILNLSVWDPDAPQNARLSFFLLEQGAETGLVGRYFTINRDNGIVSSLVPLDYEDRREFELTAHISDGGTPVLATNISVNIFVTDRNDNAPQVLYPRPGGSSVEMLPRGTSAGHLVSRVVGWDADAGHNAWLSYSLLGSPNQSLFAIGLHTGQISTARPVQDTDSPRQTLTVLIKDNGEPSLSTTATLTVSVTEDSPEARAEFPSGSAPRS

SEQ ID NO: 912082 - protein, 237 aa, Homo sapiens
SSKSIRPIHPMPPSLSTTATLTVSVTEDSPEARAEFPSGSAPREQKKNLTFYLLLSLILVSVGFVVTVFGVIIFKVYKWKQSRDLYRAPVSSLYRTPGPSLHADAVRGGLMSPHLYHQVYLTTDSRRSDPLLKKPGAASPLASRQNTLRSCDPVFYRQVLGAESAPPGQQAPPNTDWRFSQAQRPGTSGSQNGDDTGTWPNNQFDTEMLQAMILASASAPSFGWCRIASSVVRCAFT

SEQ ID NO: 912083 - protein, 934 aa, Homo sapiens
MVPEAWRSGLVSTGRVVGVLLLLGALNKASTVIHYEIPEEREKGFAVGNVVANLGLDLGSLSARRFRVVSGASRRFFEVNRETGEMFVNDRLDREELCGTLPSCTVTLELVVENPLELFSVEVVIQDINDNNPAFPTQEMKLEISEAVAPGTRFPLESAHDPDVGSNSLQTYELSRNEYFALRVQTREDSTKYAELVLERALDREREPSLQLVLTALDGGTPALSASLPIHIKVLDANDNAPVFNQSLYRARVLEDAPSGTRVVQVLATDLDEGPNGEIIYSFGSHNRAGVRQLFALDLVTGMLTIKGRLDFEDTKLHEIYIQAKDKGANPEGAHCKVLVEVVDVNDNAPEITVTSVYSPVPEDAPLGTVIALLSVTDLDAGENGLVTCEVPPGLPFSLTSSLKNYFTLKTSADLDRETVPEYNLSITARDAGTPSLSALTIVRVQVSDINDNPPQSSQSSYDVYIEENNLPGAPILNLSVWDPDAPQNARLSFFLLEQGAETGLVGRYFTINRDNGIVSSLVPLDYEDRREFELTAHISDGGTPVLATNISVNIFVTDRNDNAPQVLYPRPGGSSVEMLPRGTSAGHLVSRVVGWDADAGHNAWLSYSLLGSPNQSLFAIGLHTGQISTARPVQDTDSPRQTLTVLIKDNGEPSLSTTATLTVSVTEDSPEARAEFPSGSAPREQKKNLTFYLLLSLILVSVGFVVTVFGVIIFKVYKWKQSRDLYRAPVSSLYRTPGPSLHADAVRGGLMSPHLYHQVYLTTDSRRSDPLLKKPGAASPLASRQNTLRSCDPVFYRQVLGAESAPPGQQAPPNTDWRFSQAQRPGTSGSQNGDDTGTWPNNQFDTEMLQAMILASASEAADGSSTLGGGAGTMGLSARYGPQFTLQHVPDYRQNVYIPGSNATLTNAAGKRDGKAPAGGNGNKKKSGKKEKK

SEQ ID NO: 912084 - protein, 931 aa, Homo sapiens
MKASSGRCGLVRWLQVLLPFLLSLFPGALPVQIRYSIPEELAKNSVVGNLAKDLGLSVRDLPARKLRVSAEKEYFTVNPESGDLLVSDRIDREQICGKQPLCVLDFDTVAENPLNIFYIAVIVQDINDNTPLFKQTKINLKIGESTKPGTTFPLDPALDSDVGPNSLQRYHLNDNEYFDLAEKQTPDGRKYPELILKHSLDREEHSLHQLVLTAVDGGDPPQSGTTQIRIKVTDANDNPPVFSQDVYRVTLREDVPPGFFVLQVTATDRDEGINAEITYSFHNVDEQVKHFFNLNEKTGEITTKDDLDFEIASSYTLSIEAKDPGDLAAHCSIQVEILDDNDCAPEVIVTSVSTPLPEDSPPGTVIALIKTRDRDSGENGEVYCQVLGNAKFILKSSSKNYYKLVTDGALDREEIPEYNLTITATDGGKPPLSSSIIVTLHISDVNDNAPVFQQTSYMVHVAENNPPGASIAQISASDPDLGPSGQVSYSIVASDLKPREILSYVSVSAQSGVVFAQRAFDHEQLRAFELTLQARDQGSPALSANVSLRVLVGDLNDNAPRVLYPALGPDGSALFDMVPRAAEPGYLVTKVVAVDADSGHNAWLSYHVLQASEPGLFSLGLRTGEVRTARALGDRDAARQRLLVAVRDGGQPPLSATATLHLIFADSLQEVLPDLSDRREPSDPQAKLQFYLVVALALISVLFFLAVILAISLRLRLSSRSDAWDCFQPGLSSKPGPGVLPNYSEGTLPYSYNLCVASQSAKTEFNFLNITPELVPAQDLVCDNASWEQNTNHGAAGVPFASDTILKQAPPNTDWRFSQAQRPGTSGSQNGDDTGTWPNNQFDTEMLQAMILASASEAADGSSTLGGGAGTMGLSARYGPQFTLQHVPDYRQNVYIPGSNATLTNAAGKRDGKAPAGGNGNKKKSGKKEKK

SEQ ID NO: 912085 - protein, 936 aa, Homo sapiens
MAAQRNRSKESKDCSGLVLLCLFFGIPWEAGARQISYSIPEELEKGSFVGNISKDLGLAPRELAERGVRIVSRGRTQLFSLNPRSGSLITAGRIDREELCAQSARCVVSFNILVEDRVKLFGIEIEVTDINDNAPKFQAENLDVKINENVAAGMRFPLPEAIDPDVGVNSLQSYQLSPNKHFSLRVQSRANGVKYPELVLEHSLDREEEAIHHLVLTASDGGDPLRSGTVLVSVTVFDANDNAPVFTLPEYRVSVPENLPVGTQLLTVTATDRDEGANGEVTYSFRKLPDTQLLKFQLNKYTGEIKISENLDYEETGFYEIEIQAEDGGAYLATAKVLITVEDVNDNSPELTITSLFSPVTEDSPLGTVVALLNVHDLDSEQNGQVTCSILAYLPFKLEKSIDSYYRLVIHRALDREQVSSYNITVTATDGGSPPLSTEAHFMLQVADINDNPPTFSQVSYFTYIPENNARGASIFSVTALDPDSKENAQIIYSLAEDTIQGVPLSSYISINSDTGVLYALRSFDYEQFHELQMQVTASDSGDPPLSSNVSLSLFVLDQNDNAPEILYPALPTDGSTGVELAPRSAEPGYLVTKVVAVDRDSGQNAWLSYRLLKASEPGLFAVGEHTGEVRTARALLDRDALKQSLVVAVQDHGQPPLSATVTLTVAVADSIPQVLADLGSFESPANSETSDLTLYLVVAVAAVSCVFLAFVIVLLAHRLRRWHKSRLLQASGGGLTGVSGSHFVGVDGVRAFLQTYSHEVSLTADSRKSHLIFPQPNYADTLISQESCEKNDPLSLLDDSKFPIEDTPLVPQAPPNTDWRFSQAQRPGTSGSQNGDDTGTWPNNQFDTEMLQAMILASASEAADGSSTLGGGAGTMGLSARYGPQFTLQHVPDYRQNVYIPGSNATLTNAAGKRDGKAPAGGNGNKKKSGKKEKK

SEQ ID NO: 912086 - protein, 938 aa, Homo sapiens
MLRKVRSWTEIWRWATLLFLFYHLGYVCGQIRYPVPEESQEGTFVGNVAQDFLLDTDSLSARRLQVAGEVNQRHFRVDLDSGALLIKNPIDREALCGLSASCIVPLEFVTEGPLEMYRAEVEIVDVNDHAPRFPRQQLDLEIGEAAPPGQRFPLEKAQDADVGSNSISSYRLSSNEHFALDVKKRSDGSLVPELLLEKPLDREKQSDYRLVLTAVDGGNPPRSGTAELRVSVLDVNDNAPAFQQSSYRISVLESAPAGMVLIQLNASDPDLGPSGNVTFYFSGHTPDRVRNLFSLHPTTGKLTLLGPLDFESENYYEFDVRARDGGSPAMEQHCSLRVDLLDVNDNAPYITVTSELGTLPESAEPGTVVALISVQDPDSGSNGDVSLRIPDHLPFALKSAFRNQFSLVTAGPLDREAKSSYDIMVTASDAGNPPLSTHRTIFLNISDVNDNPPSFFQRSHEVFVPENNRPGDLLCSLAASDPDSGLNALISYSLLEPRNRDVSASSFISLNPQTGAVHATRSFDYEQTQTLQFEVQARDRGNPPLSSTVTVRLFVLDLNDNAPAVLRPRARPGSLCPQALPPSVGAGHLITKVTAVDLDSGYNAWVSYQLLEAPDPSLFAVSRYAGEVRTAVPIPADLPPQKLVIVVKDSGSPPLSTSVTLLVSLEEDTHPVVPDLRESSAPREGESRLTLYLAVSLVAICFVSFGSFVALLSKCLRGAACGVTCFPAGTCACLTRSRRREGLPPSNGILRIQLGSDDPIKFVDVGGHSHGCTPLASAPTRSDSFMMVKSPSAPMAGEPVRPSCPPSDLLYGLEQAPPNTDWRFSQAQRPGTSGSQNGDDTGTWPNNQFDTEMLQAMILASASEAADGSSTLGGGAGTMGLSARYGPQFTLQHVPDYRQNVYIPGSNATLTNAAGKRDGKAPAGGNGNKKKSGKKEKK

SEQ ID NO: 912087 - protein, 935 aa, Homo sapiens
MANRLQRGDRSRLLLLLCIFLGTLRGFRARQIRYSVPEETEKGSFVGNISKDLGLEPRELAKRGVRIVSRGKTQLFAVNPRSGSLITAGRIDREELCETVSSCFLNMELLVEDTLKIYGVEVEIIDINDNAPSFQEDEVEIKVSEHAIPGARFALPNARDPDVGVNSLQSYQLSPNNYFSLQLRGRTDGAKNPELVLEGSLDREKEAAHLLLLTALDGGDPIRKGAVPIRVVVLDVNDHIPMFTQSVYRVSVPENISSGTRVLMVNATDPDEGINGEVMYSFRNMESKASEIFQLDSQTGEVQVRGSLDFEKYRFYEMEIQGQDGGGLFTTTTMLITVVDVNDNAPEITITSSINSILENSPPGTVIALLNVQDQDSGENGQVSCFIPNHLPFKLEKTYGNYYKLITSRVLDRELVQSYNITLTATDQGSPPLSAETHVWLNVADDNDNPPVFPHSSYSAYIPENNPRGASIFSVTALDPDSKQNALVTYSLTDDTVQGVPLSSYVSINSNTGVLYALQSFDYEQFRDLELRVIARDSGDPPLSSNVSLSLFVLDQNDNAPEILYPALPTDGSTGVELAPRSAEPGYLVTKVVAVDKDSGQNAWLSYRLLKASEPGLFAVGEHTGEVRTARALLDRDALKQSLVVAVQDHGQPPLSATVTLTVAVADSIPEVLADLGSLESLANSETSDLSLYLVVAVAAVSCIFLVFVIVLLALRLWRWHKSRLLQASEGGLAGMPTSHFVGVDGVQAFLQTYSHEVSLIADSQKSHLIFPQPNYGDTLISQESCEKSEPLLIAEDSAIILGKCDPTSNQQAPPNTDWRFSQAQRPGTSGSQNGDDTGTWPNNQFDTEMLQAMILASASEAADGSSTLGGGAGTMGLSARYGPQFTLQHVPDYRQNVYIPGSNATLTNAAGKRDGKAPAGGNGNKKKSGKKEKK

SEQ ID NO: 912088 - protein, 932 aa, Homo sapiens
MAAPTKCQLRGRLVLLCSLLGMLWEARASQIRYSVPEETEKGYIVGNISKDLALEPRELAERRVRIVSRGRTQLFSLNPRSGTLVTAGRIDREELCAQSPRCLVNFKVLVEDRVKLYGIEIEVTDINDSAPKFQAESLEVKINEIAVPGARYPLPEAIDPDVGVNSLQSYQLSPNHHFSLNVQTGDNGAINPELVLERALDREEATAHHLVLTASDGGEPRRSSTVRIHVTVLDTNDNAPVFAQRIYRVKVLENVPPGTWLLTATASDLDEGINGKVAYKFWKINEKQSLLFQLNENTGEISTAKSLDYEECSFYEMEIQAEDGGGLKGWTKVLISVEDVNDNRPEVTITSLFSPVREDAPQGTVILLFNAHDRDSGKNGQVVCSIQENLSFTLENSEEDYYRLLTAQILDREKASEYNITVTATDRGTPPLSTEIHITLQVTDINDNPPAFSQASYSVYLPENNARGTSIFSVIAYDPDSNENSRVIYSLAEDTIQGSPLSTYVSINSDTGVLYALCSFDYEQFRDLQMQVTASDSGSPPLSSNVSLRLFVLDQNDNAPEILYPALPTDGSTGVELAPRSAEPGYLVTKVVAVDRDSGQNAWLSYRLFKASEPGLFSVGLHTGEVRTARALLDRDALKQSLVVAVQDHGQPPLSATVTLTVAIADSIPDILADLGSLQIPADLEASDLTLYLVVAVAVVSCVFLTFVITLLALRLRHWHSSHLLRATSDGLAGVPTSHFVGVDGVRAFLQTYSQEFSLTADSRKSHLIFPQPNYADTLISQQSCEKNEPLCVSVDSKFPIEDTPLVPQAPPNTDWRFSQAQRPGTSGSQNGDDTGTWPNNQFDTEMLQAMILASASEAADGSSTLGGGAGTMGLSARYGPQFTLQHVPDYRQNVYIPGSNATLTNAAGKRDGKAPAGGNGNKKKSGKKEKK

SEQ ID NO: 912089 - protein, 927 aa, Homo sapiens
MQRAREAEMMKSQVLFPFLLSLFCGAISQQIRYTIPEELANGSRVGKLAKDLGLSVRELPTRKLRVSAEDYFNVSLESGDLLVNGRIDREKICGRKLECALEFETVAENPMNVFHVVVVIQDINDNAPRFVAKGIDLEICESALPGVKFSLDSAQDADVEGNSLKLYTINPNQYFSLSTKESPDGSKYPVLLLEKPLDREHQSSHRLILTAMDGGDPPLSGTTHIWIRVTDANDNAPVFSQEVYRVSLQENVPWGTSVLRVMATDQDEGINAEITYAFLNSPISTSLFNLNPNTGDITTNGTLDFEETSRYVLSVEAKDGGVHTAHCNVQIEIVDENDNAPEVTFMSFSNQIPEDSDLGTVIALIKVRDKDSGQNGMVTCYTQEEVPFKLESTSKNYYKLVIAGALNREQTADYNVTIIATDKGKPALSSRTSITLHISDINDNAPVFHQASYVVHVSENNPPGASIAQVSASDPDLGPNGRVSYSILASDLEPRELLSYVSVSPQSGVVFAQRAFDHEQLRAFELTLQARDQGSPALSANVSLRVLVGDLNDNAPRVLYPALGPDGSALFDMVPRAAEPGYLVTKVVAVDADSGHNAWLSYHVLQASEPGLFSLGLRTGEVRTARALGDRDAARQRLLVAVRDGGQPPLSATATLHLIFADSLQEVLPDLSDRPEPSDPQTELQFYLVVALALISVLFLLAVILAIALRLRRSSSLDTEGCFQTGLCSKSGPGVPPNHSEGTLPYSYNLCIASHSAKTEFNSLNLTPEMAPPQDLLCDDPSMVVCASNEDHKIAYDPSLSSHQAPPNTDWRFSQAQRPGTSGSQNGDDTGTWPNNQFDTEMLQAMILASASEAADGSSTLGGGAGTMGLSARYGPQFTLQHVPDYRQNVYIPGSNATLTNAAGKRDGKAPAGGNGNKKKSGKKEKK

SEQ ID NO: 912090 - protein, 944 aa, Homo sapiens
MGPKTLPQLAGKWQVLCMLSLCCWGWVSGQLRYSVVEESEPGTLVGNVAQDLGLKMTDLLSRRLQLGSEENGRYFSLSLMSGALAVNQKIDRESLCGASTSCLLPVQVVTEHPLELIRVEVEILDLNDNSPSFATPEREMRISESAASGARFPLDSAQDPDVGTNTVSFYTLSPNSHFSLNVKTLKDGKPFPELVLEQQLDREAQARHQLVLTAVDGGTPARSGTTLISVIVLDINDNAPTFQSSVLRVGIPENAPIGTLLLRLNATDPDEGTNGQLDYSFGDHTSEAVRNLFGLDPSSGAIHVLGPIDFEESRFYEIHARARDQGQPAMEGHCVIQVDVGDVNDNAPEVLLASLANPVLESTPVGTVVGLFNVRDRDSGRNGEVSLDISPDLPFQIKPSENHYSLLTSQPLDREATSHYIIELLASDAGSPSLHKHLTIRLNISDVNDNAPRFNQQLYTAYILENRPPGSLLCTVAASDPDTGDNARLTYSIVGNQVQGAPASSFVYVNPEDGRIFAQRTFDYELLQMLQIVVGVRDSGSPPLHANTSLHVFVLDENDNAPAVLHPRPDWEHSAPQRLPRSAPPGSLVTKVTAVDADAGHNAWLSYSLLPQSTAPGLFLVSTHTGEVRTARALLEDDSDTQQVVVLVRDNGDPSLSSTATVLLVLEDEDPEEMPKSSDFLIHPPERSDLTLYLIVALATVSLLSLVTFTFLSAKCLQGNADGDGGGGQCCRRQDSPSPDFYKQSSPNLQVSSDGTLKYMEVTLRPTDSQSHCYRTCFSPASDGSDFTFLRPLSVQQPTALALEPDAIRSRSNTLRERSQQAPPNTDWRFSQAQRPGTSGSQNGDDTGTWPNNQFDTEMLQAMILASASEAADGSSTLGGGAGTMGLSARYGPQFTLQHVPDYRQNVYIPGSNATLTNAAGKRDGKAPAGGNGNKKKSGKKEKK

SEQ ID NO: 912091 - protein, 932 aa, Homo sapiens
MAPPQRHPQRSEQVLLLTLLGTLWGAAAAQIRYSIPEELEKGSFVGNIVKDLGLEPQELAEHGVRIVSRGRMQLFSLNPRNGSLVTAGRIDREELCAQSPRCLVSFNILVEDKLNLYPVEVEIVDINDNTPRFLKEELEVKILENAAPSSRFPLMEVYDPDVGMNSLQGFKLSGNSHFSVDVQSEAHGPKYPELVLEGTLDREGEAVYRLVLTAMDGGDPVRSSVAQILVTVLDVNDNTPMFTQPVYRVSVPENLPVGTPVLAVTATDQDEGVHGEVTYSFVKITEKISQIFCLNVLTGEISTSANLDYEDSSFYELGVEARDGPGLRDRAKVLITILDVNDNVPEVVVTSGSRTIAESAPPGTVIALFQVFDRDSGLNGLVTCSIPRSLPFELEKSVGNYYRLVTNAALDREEVFLYNITVTATDKGTPPLSTETIISLNVADTNDNPPTFPHSSYSVYVLENNPRGASIFSVNALDPDVDQNAQVSYSLAEDTLQGAPLSSYVSINSDTGILYALRSFDYEQLRDLQLWVTASDSGDPPLSSNVSLSLFVLDQNDNAPEILYPALPTDGSTGVELAPRSAEPGYLVTKVVAVDRDSGQNAWLSYRLLKASEPGLFSVGLHTGEVRTARALLDRDALKQSLVVAVQDHGQPPLSATVTLTVAVADRIPDILADLGSLEPSAKPNDSDLTLYLVVAVAAVSCVFLAFVIVLLALRLQRWHKSRLLQASGGGLASMPGSHFVGVEGVRAFLQTYSHEVSLTADSRKSHLIFPQPNYADTLINQESYEKSEPLLITQDLLETKGEPRQLQQAPPNTDWRFSQAQRPGTSGSQNGDDTGTWPNNQFDTEMLQAMILASASEAADGSSTLGGGAGTMGLSARYGPQFTLQHVPDYRQNVYIPGSNATLTNAAGKRDGKAPAGGNGNKKKSGKKEKK

SEQ ID NO: 912092 - protein, 134 aa, Homo sapiens; identical to SEQ ID NO: 912074

SEQ ID NO: 912093 - protein, 2541 aa, Homo sapiens
MGSGAGELGRAERLPVLFLFLLSLFCPALCEQIRYRIPEEMPKGSVVGNLATDLGFSVQELPTRKLRVSSEKPYFTVSAESGELLVSSRLDREEICGKKPACALEFEAVAENPLNFYHVNVEIEDINDHTPKFTQNSFELQISESAQPGTRFILGSAHDADIGSNTLQNYQLSPSDHFSLINKEKSDGSKYPEMVLKTPLDREKQKSYHLTLTALDFGAPPLSSTAQIHVLVTDANDNAPVFSQDVYRVSLSENVYPGTTVLQVTATDQDEGVNAEITFSFSEASQITQFDLNSNTGEITVLNTLDFEEVKEYSIVLEARDGGGMIAQCTVEVEVIDENDNAPEVIFQSLPNLIMEDAELGTHIALLKVRDKDSRHNGEVTCKLEGDVPFKILTSSRNTYKLVTDAVLDREQNPEYNITVTATDRGKPPLSSSSSITLHIGDVNDNAPVFSQSSYIVHVAENNPPGASISQVRASDPDLGPNGQVSYCIMASDLEQRELSSYVSISAESGVVFAQRAFDHEQLRAFELTLQARDQGSPALSANVSLRVLVDDRNDNAPRVLYPALGPDGSALFDMVPHAAEPGYLVTKVVAVDADSGHNAWLSYHVLQASEPGLFSLGLRTGEVRTARALGDRDAVRQRLLVAVRDGGQPPLSATATLHLVFADSLQEVLPDITDRPDPSDLQAELQFYLVVALALISVLFLVAMILAIALRLRRSSSPASWSCFQPGLCVKSESVVPPNYSEGTLPYSYNLCVAHTGKTEFNFLKCSEQLSSGQDILCGDSSGALFPLCNSSELTSHQVVSFKYNLMLIAYPFLHIHKKIYIFAGKYIIFRCHGSFLESCSQLKSCHIILQRRSKVGAIVWPNICLFFSQAEIYKAMRGGFNHKVKVLDSCWLSPEKVNEIFPIHFPSCCLIYDEYFFQLGYTINIKIIKPKNLSKNSTLFLTNLTGMVSIVVHCFVSCVNFPFVSKALRIRSQLDFYVHGPLVIICSVRCVCVCVCVCVREILLLRKRSTMLIEDQKQILLTCNIGVSGLICIQAHSISFIKEKTMFCVCCPSHTQPYYIMCNCLICSPKLIIARGLLIILLPLGKKYSLENCQSGVHTKYIQNTKEHYMSLLLGISKQLLQLMATLQIAERRKRLSILFVFLFFFFETESLSVTQAVVQWHNDSSLQPQTPGLKHSFCISLLTSWNSGSCHQTWLIFLFSVEKIFSFTNLTGMVSIVYPVFHMHKKIYSQENIKFSDFMSGFKKVLVSEKTIIPVFKGRVKKFICYVAQAGLEEETDFFVVILILWLLSKYYIVITFCSFLDQSVNVGKVNFRIYVKVKSALNLIISLVKGMGWSFAFYHIFICTFQVFKKKNINNVNKMQNNVISHKTAMVKAFILLKFHNFYLKILSTCNSSGIEKNNLKATTLEKACKMIKYFKPNKTISESVISSEVYFSLKINSFLVTTEVLSYLLVYIGDIYNKAESTMGNESIMFFLRPNVLQKCENLIRCYNLIILIYSDHLITLNKTFISHSLAVSFKIWVYWINQINSKQSNKQMIFFSQKSSRVLHLEVICISVQELFRTEAPLFTYWKTNATENTQISHLTKTRRCHKLTAGLQRNPTPVWRHSRFPEDCHLHSCGKKLNKTHLCTVKILRGFCSKTTMAAPQSRPRRGELILLCALLGTLWEIGRGQIRYSVPEETDKGSFVGNISKDLGLDPRKLAKHGVRIVSRGRTQLFALNPRSGSLITAGRIDREELCAQSPRCLININTLVEDKGKLFGVEIEIIDINDNNPKFQVEDLEVKINEIAVPGARYPLPEAVDPDVGVNSLQSYQLSPNHHFSLDVQTGDNGAINPELVLERALDREEEAAHHLVLTASDGGKPPRSSTVRIHVTVLDTNDNAPVFPHPIYRVKVLENMPPGTRLLTVTASDPDEGINGKVAYKFRKINEKQTPLFQLNENTGEISIAKSLDYEECSFYEMEIQAEDVGALLGRTKLLISVEDVNDNRPEVIITSLFSPVLENSLPGTVIAFLSVHDQDSGKNGQVVCYTRDNLPFKLEKSIGNYYRLVTRKYLDRENVSIYNITVMASDLGTPPLSTETQIALHVADINDNPPTFPHASYSAYILENNLRGASIFSLTAHDPDSQENAQVTYSVTEDTLQGAPLSSYISINSDTGVLYALQSFDYEQIRDLQLLVTASDSGDPPLSSNMSLSLFVLDQNDNAPEILYPALPTDGSTGVELAPRSAERGYLVTKVVAVDRDSGQNAWLSYRLLKASEPGLFSVGLHTGEVRTARALLDRDALKQSLVVAVQDHGQPPLSATVTLTVAVADSIPEVLTELGSLKPSVDPNDSSLTLYLVVAVAAISCVFLAFVAVLLGLRLRRWHKSRLLQDSGGRLVGVPASHFVGVEEVQAFLQTYSQEVSLTADSRKSHLIFPQPNYADMLISQEGCEKNDSLLTSVDFHEYKNEADHGQVSLVLCLLLISRRILFGINYVLKNIVKIVENNFLRCITEFWVYFGGVTIKLNSNSHRLLFHLLLNDLEKIVQPFEAFQYFIPIITHSLKK

SEQ ID NO: 912094 - protein, 900 aa, Homo sapiens
MIPARLHRDYKGLVLLGILLGTLWETGCTQIRYSVPEELEKGSRVGDISRDLGLEPRELAERGVRIIPRGRTQLFALNPRSGSLVTAGRIDREELCMGAIKCQLNLDILMEDKVKIYGVEVEVRDINDNAPYFRESELEIKISENAATEMRFPLPHAWDPDIGKNSLQSYELSPNTHFSLIVQNGADGSKYPELVLKRALDREEKAAHHLVLTASDGGDPVRTGTARIRVMVLDANDNAPAFAQPEYRASVPENLALGTQLLVVNATDPDEGVNAEVRYSFRYVDDKAAQVFKLDCNSGTISTIGELDHEESGFYQMEVQAMDNAGYSARAKVLITVLDVNDNAPEVVLTSLASSVPENSPRGTLIALLNVNDQDSEENGQVICFIQGNLPFKLEKSYGNYYSLVTDIVLDREQVPSYNITVTATDRGTPPLSTETHISLNVADTNDNPPVFPQASYSAYIPENNPRGVSLVSVTAHDPDCEENAQITYSLAENTIQGASLSSYVSINSDTGVLYALSSFDYEQFRDLQVKVMARDNGHPPLSSNVSLSLFVLDQNDNAPEILYPALPTDGSTGVELAPRSAEPGYLVTKVVAVDRDSGQNAWLSYRLLKASEPGLFSVGLHTGEVRTARALLDRDALKQSLVVAVQDHGQPPLSATVTLTVAVADSIPQVLADLGSLESPANSETSDLTLYLVVAVAAVSCVFLAFVILLLALRLRRWHKSRLLQASGGGLTGAPASHFVGVDGVQAFLQTYSHEVSLTTDSRKSHLIFPQPNYADMLVSQESFEKSEPLLLSGDSVFSKDSHGLIEVSLYQIFFLFFFNCSVSQAGMQRYDHSSLQPQTPRLKQLSHLCLRCNRDYRCKPPTVCLSIYLSIYLSIYLSIYYFLACNPSTLGGRGGWIT

SEQ ID NO: 912095 - protein, 823 aa, Homo sapiens
MAALQKLPHCRKLVLLCFLLATLWEARAGQIRYSVREEIDRGSFVGNIAKDLGLEPLALAEQGVRIVSRGRSQLFALNPRSGSLVTANRIDREELCAQSAPCLLNFNILLEDKLTIYSVEVEITDINDNAPRFGVEELELKISETTTPGFRIPLKNAHDADVGENALQKYALNPNDHFSLDVRRGADGNKYPELVLERSLDREEEAVHHLVLVASDGGDPVLSGTSRICVKVLDANDNAPVFTQPEYRISIPENTLVGTRILTVTATDADEGYYAQVVYFLEKSPGETSEVFELKSTSGELTIIKDLDYEDATFHEIDIEAQDGPGLLTRAKVIVTVLDVNDNAPEFYMTSATSSVSEDSLPGTIIGLFNVHDRDSGQNAFTTCSLPEDLPFKLEKSVDNYYRLVTTRALDREQFSFYNITLTAKDGGNPSLSTDAHILLQVADINDNAPAFSRTSYSTYIPENNPRGASVFSVTAHDPDSNDNAHVTYSFAEDTVQGAPLSSYISINSDTGVLYALRSFDYEQLRDLQVWVIARDSGNPPLSSNVSLSLFVLDQNDNAPEILYPAFPTDGSTGVELAPRSAEPGYLVTKVVAVDRDSGQNAWLSYHLLKASEPGLFSVGLHTGEVRTARALLDRDALKQSLVVAIQDHGQPPLSATVTLTVAVADRIPDILADLGSLEPSAIPNDSDLTLYLVVAVAAVSCVFLAFVIVLLAHRLRRWHKSRLLQASGGSLTGMQSSHFVGVDGVRAFLQTYSHEVSLTADSRKSHLIFPQPNYADTLISQESCEKKDFLSAPQSLLEEEREETFSQVIYLFTTYVLASLLK

SEQ ID NO: 912096 - protein, 817 aa, Homo sapiens
MAAQPRGGDYRGFFLLSILLGTPWEAWAGRILYSVSEETDKGSFVGDIAKDLGLEPRELAERGVRIISRGRTQLFALNQRSGSLVTAGRIDREEICAQSARCLVNFNILMEDKMNLYPIDVEIIDINDNVPRFLTEEINVKIMENTAPGVRFPLSEAGDPDVGTNSLQSYQLSPNRHFSLAVQSGDDETKYPELVLERVLDREEERVHHLVLTASDGGDPPRSSTAHIQVTVVDVNDHTPVFSLPQYQVTVPENVPVGTRLLTVHAIDLDEGVNGEVTYSFRKITPKLPKMFHLNSLTGEISTLEGLDYEETAFYEMEVQAQDGPGSLTKAKVLITVLDVNDNAPEVTMTSLSSSIPEDTPLGTVIALFYLQDRDSGKNGEVTCTIPENLPFKLEKSIDNYYRLVTTKNLDRETLSLYNITLKATDGGTPPLSRETHIFMQVADTNDNPPTFPHSSYSVYIAENNPRGASIFLVTAQDHDSEDNAQITYSLAEDTIQGAPVSSYVSINSDTGVLYALQSFDYEQLRELQLRVTAHDSGDPPLSSNMSLSLFVLDQNDNPPEILYPALPTDGSTGMELAPRSAEPGYLVTKVVAVDKDSGQNAWLSYLLLKASEPGLFAVGLYTGEVRTARALLDRDALKQSLVVAVQDHGQPPLSATVTLTVAVADSIPEVLADLGSLEPSDGPYNYDLTLYLVVAVATVSCVFLAFVLVLLALRLRRWHKSRLLQASEGGLANVPTSHFVGMDGVQAFLQTYSHEVSLTADSRKSHLIFPQPNYVDMLISQESCEKNDSLLTSVDFQECKENLPSIQVSPALPLFP

SEQ ID NO: 912097 - protein, 820 aa, Homo sapiens
MGGSCAQRRRAGPRQVLFPLLLPLFYPTLSEPIRYSIPEELAKGSVVGNLAKDLGLSVLDVSARKLRVSAEKLHFSVDAESGDLLVKNRIDREQICKERRRCELQLEAVVENPLNIFHVIVVIEDVNDHAPQFDKKEIHLEIFESASAGTRLSLDPATDPDININSIKDYKINSNPYFSLMVRVNSDGGKYPELSLEKLLDREEQRSHSLILTALDGGDPPRSATAHIEISVKDTNDNPPVFSRDEYRISLSENLPPGSPVLQVTATDQDEGVNAEINYYFRSTAQSTKHMFSLDEKTGMIKNNQSFDFEDVERYTMEVEAKDGGGLSTQCKVIIEILDENDNSPEIIITSLSDQILENSPPGMVVALFKTRDLDFGGNGEVRCNIETDIPFKIYSSSNNYYKLVTDGALDREQTPEYNVTIVATDRGKPPLSSSRSITLYVADINDNAPVFDQTSYVVHVAENNPPGASIAQVSASDPDLGLNGHISYSIVASDLEPLAVSSYVSVSAQSGVVFAQRAFDHEQLRAFALTLQARDHGSPTLSANVSLRVLVGDRNDNAPRVLYPALGPDGSAFFDMVPRSAEPGYLVTKVVAVDADSGHNAWLSYHVLQASEPGLFSLGLRTGEVRTARALGDRDAARQRLLVAVRDGGQPPLSATATLHLVFADNLQEILPDLSDRPVLSDPQAELQFYLVVALALISVLFLLAVILAIALRLRRSLSPATWDCFHPGLCVKSGPVVPPNYSEGTLPYSYNLCIAHTGTKEFNFLKCSVPLHSNEDMVCSVSPGALIPPHGGEDLTSHPETLTSVSFSFLCVIYLIVY

SEQ ID NO: 912098 - protein, 829 aa, Homo sapiens
MTNCLSFRNGRGLALLCALLGTLCETGSGQIRYSVSEELDKGSFVGNIANDLGLEPRELAERGVRIVSRGRTQLFSLNPQSGSLVTAERIDREELCAQIPLCLVKINILVEDKLKIFEVEIEIKDINDNAPNFPTEELEIKIGELTVPGTRFPIKTAFDPDVGINSLQNYKLSPNDYFSLAVNSVSEGAKYPELVLERALDREKKEIHQLVLVASDGGDPVHSGNLHIQVIVLDANDNPPMFTQPEYRVSVWENVPVGTRLLTVNATDPDEGFNAQVSYILDKMPGKIAEIFHLNSVSGEVSILKSLDYEDAMFYEIKIEAQDGPGLLSRAKILVTVLDVNDNAPEITITSLTSSVPEEGTVGREIALIDVHDRDSGQNGQVEVFVLGNLPFKLEKSIDQYYRLVTATSLDREQISEYNISLRASDGGSPPLSTETHITLHVIDINDNPPTFPHLSYSAYIPENNPRGASIFSVTAQDPDSNNNARITYALTEDTLQGAPLSSFVSINSNTGVLYALRSFDYEQFRDLKLLVTASDSGNPPLSSNVSLNLFVLDQNDNAPEILYPALPTDGSTGVELAPRSAEPGYLVTKVVAVDRDSGQNAWLSYRLLKASEPGLFSVGLHTGEVRTARALLDRDALKQSLVVAVQDHGQPPLSATVTLTVAVADRIPDILADLGSLEPSAKPNDSDLTLYLVVAVAAVSCVFLAFVIVLLALRLRRWHKSRLLQASGGGLASTPGSHFVGADGVRAFLQTYSHEVSLTADSRKSHLIFPQPNYADTLISQESCEKSEPLLITQDLLEMKGDSNLLQVSLFISLIIKNKYENVVIIKL

SEQ ID NO: 912099 - protein, 818 aa, Homo sapiens
MGSGAGELGRAERLPVLFLFLLSLFCPALCEQIRYRIPEEMPKGSVVGNLATDLGFSVQELPTRKLRVSSEKPYFTVSAESGELLVSSRLDREEICGKKPACALEFEAVAENPLNFYHVNVEIEDINDHTPKFTQNSFELQISESAQPGTRFILEVAEDADIGLNSLQKYKLSLNPSFSLIIKEKQDGSKYPELALEKTLDREQQSYHRLVLTALDGGHPPLSGTTELRIQVTDANDNPPVFNRDVYRVSLRENVPPGTTVLQVSATDQDEGINSEITYSFYRTGQIFSLNSKSGEITTQKKLDFEETKEYSMVVEGRDGGGLVAQCTVEINIQDENDNSPEVTFHSLLEMILENAVPGTLIALIKIHDQDSGENGEVNCQLQGEVPFKIISSSKNSYKLVTDGTLDREQTPEYNVTITATDRGKPPLSSSISVILHIRDVNDNAPVFHQASYLVSVPENNPPGASIAQVCASDLDLGLNGQVSYSIMASDLEPLALASYVSMSAQSGVVFAQRAFDYEQLRTFELTLQARDQGSPALSANVSLRVLVGDRNDNAPRVLYPALGPDGSALFDMVPRAAEPGYLVTKVVAVDADSGHNAWLSYHVLQASEPGLFSLGLRTGEVRTARALGDRDAARQRLLVAVRDGGQPPLSATATLHLVFADSLQEVLPDITDRPVPSDPQAELQFYLVVALALISVLFLLAVILAVALRLRRSSSPAAWSCFQPGLCVKSGPVVPPNYSQGTLPYSYNLCVAHTGKTEFNFLKCSEQLSSGQDILCGDSSGALFPLCNSSESTSHPELVSFIYVYSFSLPTQFSVFT

SEQ ID NO: 912100 - protein, 814 aa, Homo sapiens
MGNSSGWRGPAGQRRMLFLFLLSLLDQVLSEPIRYAIPEELDRGSLVGNLAKDLGFGVGDLPTRNLRVIAEKKFFTVSPENGNLLVSDRIDREEICGKKSTCVLEFEMVAEKPLNFFHVTVLIQDINDNPPTFSQNITELEISELALTGATFALESAQDPDVGVNSLQQYYLSPDPHFSLIQKENLDGSRYPELVLKAPLDREEQPHHHLVLTAVDGGEPSRSCTTQIRVIVADANDNPPVFTQDMYRVNVAENLPAGSSVLKVMAIDMDEGINAEIIYAFINIGKEVRQLFKLDSKTGELTTIGELDFEERDSYTIGVEAKDGGHHTAYCKVQIDISDENDNAPEITLASESQHIQEDAELGTAVALIKTHDLDSGFNGEILCQLKGNFPFKIVQDTKNTYRLVTDGALDREQIPEYNVTITATDKGNPPLSSSKTITLHILDVNDNVPVFHQASYTVHVAENNPPGASIAHVRASDPDLGPNGLVSYYIVASDLEPRELSSYVSVSARSGVVFAQRAFDHEQLRAFELTLQARDQGSPTLSANVSLRVLVDDRNDNAPLVLYPALGPEGSALFDMVPRSAEPGYLVTKVVAVDADSGYNAWLSYHIVQASEPGLFSLGLRTGEVRTARTLGDREAARQRLLVTVRDGGQQPLSATVMLHLIFADSLQEIQPDLSDRPTPSDPQAELQFHLVVALALISVLFLLAVILAISLRLRCSSRPATEGYFQPGVCFKTVPGVLPTYSERTLPYSYNPCAASHSSNTEFKFLNIKAENAAPQDLLCDEASWFESNDNPEMPSNSGNLQKVSFFKPFLP

SEQ ID NO: 912101 - protein, 2575 aa, Homo sapiens; identical to SEQ ID NO: 912076

SEQ ID NO: 912102 - protein, 817 aa, Homo sapiens
MTNCLSFRNGRGLALLCALLGTLCETGSGQIRYSVSEELDKGSFVGNIANDLGLEPRELAERGVRIVSRGRTQLFSLNPQSGSLVTAERIDREELCAQIPLVSEELEIKIGELTVPGTRFPIKTAFDPDVGINSLQNYKLSPNDYFSLAVNSVSEGAKYPELVLERALDREKKEIHQLVLVASDGGDPVHSGNLHIQVIVLDANDNPPMFTQPEYRVSVWENVPVGTRLLTVNATDPDEGFNAQVSYILDKMPGKIAEIFHLNSVSGEVSILKSLDYEDAMFYEIKIEAQDGPGLLSRAKILVTVLDVNDNAPEITITSLTSSVPEEGTVGREIALIDVHDRDSGQNGQVEVFVLGNLPFKLEKSIDQYYRLVTATSLDREQISEYNISLRASDGGSPPLSTETHITLHVIDINDNPPTFPHLSYSAYIPENNPRGASIFSVTAQDPDSNNNARITYALTEDTLQGAPLSSFVSINSNTGVLYALRSFDYEQFRDLKLLVTASDSGNPPLSSNVSLNLFVLDQNDNAPEILYPALPTDGSTGVELAPRSAEPGYLVTKVVAVDRDSGQNAWLSYRLLKASEPGLFSVGLHTGEVRTARALLDRDALKQSLVVAVQDHGQPPLSATVTLTVAVADRIPDILADLGSLEPSAKPNDSDLTLYLVVAVAAVSCVFLAFVIVLLALRLRRWHKSRLLQASGGGLASTPGSHFVGADGVRAFLQTYSHEVSLTADSRKSHLIFPQPNYADTLISQESCEKSEPLLITQDLLEMKGDSNLLKPRPTRTGVSLRPRDPAPAAPKMAMTPAPGPTTSLTQRCCKP

SEQ ID NO: 912103 - protein, 294 aa, Homo sapiens
MVPEAWRSGLVSTGRVVGVLLLLGALNKASTVIHYEFPSGSAPREQKKNLTFYLLLSLILVSVGFVVTVFGVIIFKVYKWKQSRDLYRAPVSSLYRTPGPSLHADAVRGGLMSPHLYHQVYLTTDSRRSDPLLKKPGAASPLASRQNTLRSCDPVFYRQVLGAESAPPGQQAPPNTDWRFSQAQRPGTSGSQNGDDTGTWPNNQFDTEMLQAMILASASEAADGSSTLGGGAGTMGLSARYGPQFTLQHVPDYRQNVYIPGSNATLTNAAGKRDGKAPAGGNGNKKKSGKKEKK

SEQ ID NO: 912104 - protein, 128 aa, Homo sapiens
MLRKQAPPNTDWRFSQAQRPGTSGSQNGDDTGTWPNNQFDTEMLQAMILASASEAADGSSTLGGGAGTMGLSARYGPQFTLQHVPDYRQNVYIPGSNATLTNAAGKRDGKAPAGGNGNKKKSGKKEKK

SEQ ID NO: 912105 - protein, 2575 aa, Homo sapiens; identical to SEQ ID NO: 912076

SEQ ID NO: 912106 - protein, 863 aa, Homo sapiens
MVPEAWRSGLVSTGRVVGVLLLLGALNKASTVIHYEIPEEREKGFAVGNVVANLGLDLGSLSARRFRVVSGASRRFFEVNRETGEMFVNDRLDREELCGTLPSCTVTLELVVENPLELFSVEVVIQDINDNNPAFPTQEMKLEISEAVAPGTRFPLESAHDPDVGSNSLQTYELSRNEYFALRVQTREDSTKYAELVLERALDREREPSLQLVLTALDGGTPALSASLPIHIKVLDANDNAPVFNQSLYRARVLEDAPSGTRVVQVLATDLDEGPNGEIIYSFGSHNRAGVRQLFALDLVTGMLTIKGRLDFEDTKLHEIYIQAKDKGANPEGAHCKVLVEVVDVNDNAPEITVTSVYSPVPEDAPLGTVIALLSVTDLDAGENGLVTCEVPPGLPFSLTSSLKNYFTLKTSADLDRETVPEYNLSITARDAGTPSLSALTIVRVQVSDINDNPPQSSQSSYDVYIEENNLPGAPILNLSVWDPDAPQNARLSFFLLEQGAETGLVGRYFTINRDNGIVSSLVPLDYEDRREFELTAHISDGGTPVLATNISVNIFVTDRNDNAPQVLYPRPGGSSVEMLPRGTSAGHLVSRVVGWDADAGHNAWLSYSLLGSPNQSLFAIGLHTGQISTARPVQDTDSPRQTLTVLIKDNGEPSLSTTATLTVSVTEDSPEARAEFPSGSAPREQKKNLTFYLLLSLILVSVGFVVTVFGVIIFKVYKWKQSRDLYRAPVSSLYRTPGPSLHADAVRGGLMSPHLYHQVYLTTDSRRSDPLLKKPGAASPLASRQNTLRSCDPVFYRQVLGAESAPPGQVRFSKSCLTLLVLFYSYIILRKEWSCFFSDEDVFLVMHSHFQLALPRSKLVPL

SEQ ID NO: 912107 - protein, 2519 aa, Homo sapiens
MGSGAGELGRAERLPVLFLFLLSLFCPALCEQIRYRIPEEMPKGSVVGNLATDLGFSVQELPTRKLRVSSEKPYFTVSAESGELLVSSRLDREEICGKKPACALEFEAVAENPLNFYHVNVEIEDINDHTPKFTQNSFELQISESAQPGTRFILGSAHDADIGSNTLQNYQLSPSDHFSLINKEKSDGSKYPEMVLKTPLDREKQKSYHLTLTALDFGAPPLSSTAQIHVLVTDANDNAPVFSQDVYRVSLSENVYPGTTVLQVTATDQDEGVNAEITFSFSEASQITQFDLNSNTGEITVLNTLDFEEVKEYSIVLEARDGGGMIAQCTVEVEVIDENDNAPEVIFQSLPNLIMEDAELGTHIALLKVRDKDSRHNGEVTCKLEGDVPFKILTSSRNTYKLVTDAVLDREQNPEYNITVTATDRGKPPLSSSSSITLHIGDVNDNAPVFSQSSYIVHVAENNPPGASISQVRASDPDLGPNGQVSYCIMASDLEQRELSSYVSISAESGVVFAQRAFDHEQLRAFELTLQARDQGSPALSANVSLRVLVDDRNDNAPRVLYPALGPDGSALFDMVPHAAEPGYLVTKVVAVDADSGHNAWLSYHVLQASEPGLFSLGLRTGEVRTARALGDRDAVRQRLLVAVRDGGQPPLSATATLHLVFADSLQEVLPDITDRPDPSDLQAELQFYLVVALALISVLFLVAMILAIALRLRRSSSPASWSCFQPGLCVKSESVVPPNYSEGTLPYSYNLCVAHTGKTEFNFLKCSEQLSSGQDILCGDSSGALFPLCNSSELTSHQVVSFKYNLMLIAYPFLHIHKKIYIFAGKYIIFRCHGSFLESCSQLKSCHIILQRRSKVGAIVWPNICLFFSQAEIYKAMRGGFNHKVKVLDSCWLSPEKVNEIFPIHFPSCCLIYDEYFFQLGYTINIKIIKPKNLSKNSTLFLTNLTGMVSIVVHCFVSCVNFPFVSKALRIRSQLDFYVHGPLVIICSVRCVCVCVCVCVREILLLRKRSTMLIEDQKQILLTCNIGVSGLICIQAHSISFIKEKTMFCVCCPSHTQPYYIMCNCLICSPKLIIARGLLIILLPLGKKYSLENCQSGVHTKYIQNTKEHYMSLLLGISKQLLQLMATLQIAERRKRLSILFVFLFFFFETESLSVTQAVVQWHNDSSLQPQTPGLKHSFCISLLTSWNSGSCHQTWLIFLFSVEKIFSFTNLTGMVSIVYPVFHMHKKIYSQENIKFSDFMSGFKKVLVSEKTIIPVFKGRVKKFICYVAQAGLEEETDFFVVILILWLLSKYYIVITFCSFLDQSVNVGKVNFRIYVKVKSALNLIISLVKGMGWSFAFYHIFICTFQVFKKKNINNVNKMQNNVISHKTAMVKAFILLKFHNFYLKILSTCNSSGIEKNNLKATTLEKACKMIKYFKPNKTISESVISSEVYFSLKINSFLVTTEVLSYLLVYIGDIYNKAESTMGNESIMFFLRPNVLQKCENLIRCYNLIILIYSDHLITLNKTFISHSLAVSFKIWVYWINQINSKQSNKQMIFFSQKSSRVLHLEVICISVQELFRTEAPLFTYWKTNATENTQISHLTKTRRCHKLTAGLQRNPTPVWRHSRFPEDCHLHSCGKKLNKTHLCTVKILRGFCSKTTMAAPQSRPRRGELILLCALLGTLWEIGRGQIRYSVPEETDKGSFVGNISKDLGLDPRKLAKHGVRIVSRGRTQLFALNPRSGSLITAGRIDREELCAQSPRCLININTLVEDKGKLFGVEIEIIDINDNNPKFQVEDLEVKINEIAVPGARYPLPEAVDPDVGVNSLQSYQLSPNHHFSLDVQTGDNGAINPELVLERALDREEEAAHHLVLTASDGGKPPRSSTVRIHVTVLDTNDNAPVFPHPIYRVKVLENMPPGTRLLTVTASDPDEGINGKVAYKFRKINEKQTPLFQLNENTGEISIAKSLDYEECSFYEMEIQAEDVGALLGRTKLLISVEDVNDNRPEVIITSLFSPVLENSLPGTVIAFLSVHDQDSGKNGQVVCYTRDNLPFKLEKSIGNYYRLVTRKYLDRENVSIYNITVMASDLGTPPLSTETQIALHVADINDNPPTFPHASYSAYILENNLRGASIFSLTAHDPDSQENAQVTYSVTEDTLQGAPLSSYISINSDTGVLYALQSFDYEQIRDLQLLVTASDSGDPPLSSNMSLSLFVLDQNDNAPEILYPALPTDGSTGVELAPRSAERGYLVTKVVAVDRDSGQNAWLSYRLLKASEPGLFSVGLHTGEVRTARALLDRDALKQSLVVAVQDHGQPPLSATVTLTVAVADSIPEVLTELGSLKPSVDPNDSSLTLYLVVAVAAISCVFLAFVAVLLGLRLRRWHKSRLLQDSGGRLVGVPASHFVGVEEVQAFLQTYSQEVSLTADSRKSHLIFPQPNYADMLISQEGCEKNDSLLTSVDFHEYKNEADHGQQAPPNTDWRFSQAQRPGTSGSQNGDDTGTWPNNQFDTEMLQAMILASASAPSFGWCRIASSVVRCAFT

SEQ ID NO: 912108 - protein, 398 aa, Homo sapiens
MVPEAWRSGLVSTGRVVGVLLLLGALNKASTVIHYEIPEEREKGFAVGNVVANLGLDLGSLSARRFRVVSGASRRFFEVNRETGEMFVNDRLDREELCGTLPSCTVTLELVVENPLELFSVEVVIQDINDNNPAFPTQEMKLEISEAVAPGTRFPLESAHDPDVGSNSLQTYELSRNEYFALRVQTREDSTKYAELVLERALDREREPSLQLVLTALDGGTPALSASLPIHIKVLDANDNAPVFNQSLYRARVLEDAPSGTRVVQVLATDLDEGPNGEIIYSFGIPVTRDAAEEASLKSLFTLAVMSKSESPKEPEQLRKLFIGGLSFETTDESLRSHFEQWGTLTDCVVMRDPNTKRSRGFGFVTYATVEEVDAAMNARPHKVDGRVVEPKRAVSRE

SEQ ID NO: 912109 - protein, 828 aa, Homo sapiens
MTNCLSFRNGRGLALLCALLGTLCETGSGQIRYSVSEELDKGSFVGNIANDLGLEPRELAERGVRIVSRGRTQLFSLNPQSGSLVTAERIDREELCAQIPLCLVKINILVEDKLKIFEVEIEIKDINDNAPNFPTEELEIKIGELTVPGTRFPIKTAFDPDVGINSLQNYKLSPNDYFSLAVNSVSEGAKYPELVLERALDREKKEIHQLVLVASDGGDPVHSGNLHIQVIVLDANDNPPMFTQPEYRVSVWENVPVGTRLLTVNATDPDEGFNAQVSYILDKMPGKIAEIFHLNSVSGEVSILKSLDYEDAMFYEIKIEAQDGPGLLSRAKILVTVLDVNDNAPEITITSLTSSVPEEGTVGREIALIDVHDRDSGQNGQVEVFVLGNLPFKLEKSIDQYYRLVTATSLDREQISEYNISLRASDGGSPPLSTETHITLHVIDINDNPPTFPHLSYSAYIPENNPRGASIFSVTAQDPDSNNNARITYALTEDTLQGAPLSSFVSINSNTGVLYALRSFDYEQFRDLKLLVTASDSGNPPLSSNVSLNLFVLDQNDNAPEILYPALPTDGSTGVELAPRSAEPGYLVTKVVAVDRDSGQNAWLSYRLLKASEPGLFSVGLHTGEVRTARALLDRDALKQSLVVAVQDHGQPPLSATVTLTVAVADRIPDILADLGSLEPSAKPNDSDLTLYLVVAVAAVSCVFLAFVIVLLALRLRRWHKSRLLQASGGGLASTPGSHFVGADGVRAFLQTYSHEVSLTADSRKSHLIFPQPNYADTLISQESCEKSEPLLITQDLLEMKGDSNLLLDEDEDERVEKADLRQLTEMG

SEQ ID NO: 912110 - protein, 121 aa, Homo sapiens
MSTTARLGEPGIPSGQTPSLAPSGPDYCSSCSNTSAKPGVIFTSATPGLSGCTPPTVGRGTLHAAACAAAMSLVIPEKFQHILRVLNTNIDGRRKIAFAHHCPFKGVGPKICSCGVEESRH

SEQ ID NO: 912111 - protein, 103 aa, Homo sapiens
VKRAPRSFWGCETKRWSKKVCVKSQAMKASSSLVSPEFSFLRSDSAAACAAAMSLVIPEKFQHILRVLNTNIDGRRKIAFAHHCPFKGVGPKICSCGVEESRH

SEQ ID NO: 912112 - protein, 102 aa, Homo sapiens
  misc_feature (17)..(17): Xaa can be any naturally occurring amino acid
SFKPWGSTTKFHLPLQXYRSLRLCSFNSISNSAALDASSCRIRHDAACAAAMSLVIPEKFQHILRVLNTNIDGRRKIAFAHHCPFKGVGPKICSCGVEESRH

SEQ ID NO: 912113 - protein, 67 aa, Homo sapiens
RLVEAAVSRTRACAAAMSLVIPEKFQHILRVLNTNIDGRRKIAFAHHCPFKGVGPKICSCGVEESRH

SEQ ID NO: 912114 - protein, 72 aa, Homo sapiens
NLRLGTRLGVGRLHAAACAAAMSLVIPEKFQHILRVLNTNIDGRRKIAFAHHCPFKGVGPKICSCGVEESRH

SEQ ID NO: 912115 - protein, 110 aa, Homo sapiens
MEDQLPRLQMRHKIVACLRCRFRKTLAPDVATGPLERHGSERGLDNAQPGGHAPLVLQAMSLVIPEKFQHILRVLNTNIDGRRKIAFAHHCPFKGVGPKICSCGVEESRH

SEQ ID NO: 912116 - protein, 35 aa, Homo sapiens
MILRVLNTNIDGRRKIAFAITAIKGVGRRYAHVVL

SEQ ID NO: 912117 - protein, 103 aa, Homo sapiens; identical to SEQ ID NO: 912111

SEQ ID NO: 912118 - protein, 74 aa, Homo sapiens
THASRTRGSTHASRRCAAACAAAMSLVIPEKFQHILRVLNTNIDGRRKIAFAHHCPFKGVGPKICSCGVEESRH

SEQ ID NO: 912119 - protein, 90 aa, Homo sapiens
LGCSALCRSGVRTKFGINMVTSRERGTTRLPKEEVNRPRSETELTEDEVERVITHYAESHASTRSPDLVLLNRQKDVKRIGKYSPVQPGP

SEQ ID NO: 912120 - protein, 67 aa, Homo sapiens
RPLQHQNGNHTFHLILSEFSRPLGEVERVITHYAESHASTRSPDLVLLNRQKDVKRIGKYSPVQPGP

SEQ ID NO: 912121 - protein, 40 aa, Homo sapiens
MCGGKTRGVRRRTFFDEKSHYLSVGEENNFDNTHPHKSLP

SEQ ID NO: 912122 - protein, 89 aa, Homo sapiens
SRAAAYYYKIRGRVDTAARRRQKGSSTGGLHAAACAAAMSLVIPEKFQHILRVLNTNIDGRRKIAFAHHCPFKGVGPKICSCGVEESRH

SEQ ID NO: 912123 - protein, 121 aa, Homo sapiens; identical to SEQ ID NO: 912110

SEQ ID NO: 912124 - protein, 89 aa, Homo sapiens; identical to SEQ ID NO: 912122

SEQ ID NO: 912125 - protein, 89 aa, Homo sapiens; identical to SEQ ID NO: 912122

SEQ ID NO: 912126 - protein, 136 aa, Homo sapiens
MLQEARCFEDLLLRFFVCRNQGRVKRVSTEFQEAKSNKNSSDSESDDEGDVSEVISRVVSKAEGIRKPESHPLKTRPRVSFRKKNLLDRCGLCHESHTQRSPYLQGMETTQPIASVGLGSASSASTPGFHIAGPFA

SEQ ID NO: 912127 - protein, 84 aa, Homo sapiens
  misc_feature (55)..(55): Xaa can be any naturally occurring amino acid
MPSTLAFMMDGGHRNRTGTANKEESNKTKVFWKPKVPGVRRPMGKRPVKPLPLLXSRRHQLNQKTPKTTTGHRTAAPSTDNNPE

SEQ ID NO: 912128 - protein, 60 aa, Homo sapiens
MNHVDRSHRGGGTSTLRQWINIHKRARDERPDLRDKRAGGGERQQNDGDLSGYRLGESTT

SEQ ID NO: 912129 - protein, 66 aa, Homo sapiens
MGLHRPRARAPLTSTFFIGEWGSVHWGYNLRATVKHLQAGAIRSLRPYQGGRFQFYAPSGDSRQHL

SEQ ID NO: 912130 - protein, 47 aa, Homo sapiens
MFPERLKPTTFPRYTTGVYYGQCPESWGANHRFMPIVLELIPLKSRH

SEQ ID NO: 912131 - protein, 152 aa, Homo sapiens
MAGRKNNKQSGHTKRRTGQHKHAGDPSHTHPPTPHNTTRTPTGRETQQRMRGEQQQLTPPTHQRGIQLTRVIKHNAQNPPHRAQNNDRHQNSASKRIHQKRDNNSKSTEKAKEETRKKEGQWDVRGQSSEEDSEPRRPEGNGRAGDGLSETR

SEQ ID NO: 912132 - protein, 89 aa, Homo sapiens; identical to SEQ ID NO: 912122

SEQ ID NO: 912133 - protein, 89 aa, Homo sapiens; identical to SEQ ID NO: 912122

SEQ ID NO: 912134 - protein, 121 aa, Homo sapiens; identical to SEQ ID NO: 912110

SEQ ID NO: 912135 - protein, 89 aa, Homo sapiens; identical to SEQ ID NO: 912122

SEQ ID NO: 912136 - protein, 105 aa, Homo sapiens
MSTTARLGEPGIPSGQTPSLAPSGPDYCSSCSNTSAKPGVIFTSATPGLSGCTPPTVGRGTLHAAACAAAMSLVIPEKFQHILRVLNTNIDGRRKIAFAHHCPFK

SEQ ID NO: 912137 - protein, 33 aa, Homo sapiens
MQITQSRSRLVLTDRGCKMEFSSPAIACTVLSL

SEQ ID NO: 912138 - protein, 78 aa, Homo sapiens
SRAAAYYYKIRGRVDTAARRRQKGSSTGGLHAAACAAAMSLVIPEKFQHILRVLNTNIDGRRKIAFAHHCPFKVSEVG

SEQ ID NO: 912139 - protein, 89 aa, Homo sapiens; identical to SEQ ID NO: 912122

SEQ ID NO: 912140 - protein, 121 aa, Homo sapiens; identical to SEQ ID NO: 912110

SEQ ID NO: 912141 - protein, 74 aa, Homo sapiens; identical to SEQ ID NO: 912118

SEQ ID NO: 912142 - protein, 92 aa, Homo sapiens
  misc_feature (5)..(5): Xaa can be any naturally occurring amino acid
MCAEXGDKPATNSGANEQEATLVTTKRRPEGNSTKPATRGSSRTQKHTLQNKQYQKHEKHHKSRQRHNRHRSKQTRDDYEKDSAEKRQNRPD

SEQ ID NO: 912143 - protein, 117 aa, Homo sapiens
MRGGEKRGYGNGPWVIRGSLDPVFWVPGGKFGGVPLLRGRRVKYFRETARVNGLDISREENRETESEQRARTSRLRKRWTDTPQEDETTRATTSDKTEESTGHQNTKQAESRDRYKE

SEQ ID NO: 912144 - protein, 110 aa, Homo sapiens; identical to SEQ ID NO: 912115

SEQ ID NO: 912145 - protein, 70 aa, Homo sapiens
MAYHALRAQTVPSPNREVRNQYRLGPVAGQFNQTSVHGENPAYPVSNPCATATLKPILGYFYPLLRHTTY

SEQ ID NO: 912146 - protein, 66 aa, Homo sapiens
PTRRGRVGRPTRRGVRSLVIPEKFQHILRVLNTNIDGRRKIAFAHHCPFKGVGPKICSCGVEESRH

SEQ ID NO: 912147 - protein, 102 aa, Homo sapiens
LWVKNCRDLLQSSYNKQRFDQPLEASTWLKNFKTTNERFLNQIKVQEKYVWNKRELTEDEVERVITHYAESHASTRSPDLVLLNRQKDVKRIGKYSPVQPGP

SEQ ID NO: 912148 - protein, 105 aa, Homo sapiens; identical to SEQ ID NO: 912136

SEQ ID NO: 912149 - protein, 121 aa, Homo sapiens; identical to SEQ ID NO: 912110

SEQ ID NO: 912150 - protein, 121 aa, Homo sapiens; identical to SEQ ID NO: 912110

SEQ ID NO: 912151 - protein, 89 aa, Homo sapiens; identical to SEQ ID NO: 912122

SEQ ID NO: 912152 - protein, 180 aa, Homo sapiens
MEMGTWDDKHESQDPKLPGTKGGKTLAGYTHNREHRNKVSRIKDPGLKPVEYTETRKKPRTKHTRNKNTHQDESDADKNQQQKRKHQKKTKRDEEHRKKQHKKKQEAKEQRRKKTGTQEEKRKENRKRGEKRTKKKKEKAAKNEKRQKTREEEGEKEEEEEEAGARSEKKRTHQHTEHHH

SEQ ID NO: 912153 - protein, 107 aa, Homo sapiens
MLSDEQTNNGPDRDIGKETSSARETQNNSRRTRPGRDKATPSQQHDHHSRPKTRQRSAKRVRNDAHHTQTQPKPPQTHTKHTRDPPHQTPQRTRRPPRRDAPPARQQ

SEQ ID NO: 912154 - protein, 38 aa, Homo sapiens
MIGCVFYTQPGRLGRIYNTRTWRRQTHLIRVILGDSHL

SEQ ID NO: 912155 - protein, 70 aa, Homo sapiens; identical to SEQ ID NO: 912145

SEQ ID NO: 912156 - protein, 167 aa, Homo sapiens
MVWTKQAPGKNSGKRSDKNPGPCRGAGAHSRGRLAVPRGTDTPKTQWTPWERHRRDDVPQDRPLTSVRPWTRTTTSSESYQRNKERTTHAPPQRHPKERRGHQNGRSTATHADQQGRQEQLAQRNTKQNPSTHRVRQTTERTPPKNEQNQRQPQKPTGRTEQKERRT

SEQ ID NO: 912157 - protein, 121 aa, Homo sapiens; identical to SEQ ID NO: 912110

SEQ ID NO: 912158 - protein, 121 aa, Homo sapiens; identical to SEQ ID NO: 912110

SEQ ID NO: 912159 - protein, 121 aa, Homo sapiens; identical to SEQ ID NO: 912110

SEQ ID NO: 912160 - protein, 121 aa, Homo sapiens; identical to SEQ ID NO: 912110

SEQ ID NO: 912161 - protein, 131 aa, Homo sapiens
MSTTCKAGRTRDTFWPNAQFSALGSRLLQLLLQYQRQTWRDLHECNIQVSRVAHPPLWAGGPLHAAACAAAMSLVIPEKFQHILRVLNTNIDGRRKIAFAHHCPFKVLAEVCIMWFEEADITYQRPETYLG

SEQ ID NO: 912162 - protein, 125 aa, Homo sapiens
TSLASVLASPVSLASPRVLACQCTNGFQFNSECRIKCEDSDASQGLGSNVIHCRKDGTWNGSFHVCQEMQGQCSVPNELNSNLKLQCPDGYAIGSECATSCLDHNSESIILPMNVTVRDIPHWRG

SEQ ID NO: 912163 - protein, 1627 aa, Homo sapiens
MRLWSWVLHLGLLSAALGCGLAERPRRARRDPRAGRPPRPAAGPATCATRGPRPPRLAAAAAAAGRAWEAVRVPRRRQQREARGATEEPSPPSRALYFSGRGEQLRVLRADLELPRDAFTLQVWLRAEGGQRSPAVITGLYDKCSYISRDRGWVVGIHTISDQDNKDPRYFFSLKTDRARQVTTINAHRSYLPGQWVYLAATYDGQFMKLYVNGAQVATSGEQVGGIFSPLTQKCKVLMLGGSALNHNYRGYIEHFSLWKVARTQREILSDMETHGAHTALPQLLLQENWDNVKHAWSPMKDGSSPKVEFSNAHGFLLDTSLEPPLCGQTLCDNTEVIASYNQLSSFRQPKVVRYRVVNLYEDDHKNPTVTREQVDFQHHQLAEAFKQYNISWELDVLEVSNSSLRRRLILANCDISKIGDENCDPECNHTLTGHDGGDCRHLRHPAFVKKQHNGVCDMDCNYERFNFDGGECCDPEITNVTQTCFDPDSPHRAYLDVNELKNILKLDGSTHLNIFFAKSSEEELAGVATWPWDKEALMHLGGIVLNPSFYGMPGHTHTMIHEIGHSLGLYHVFRGISEIQSCSDPCMETEPSFETGDLCNDTNPAPKHKSCGDPGPGNDTCGFHSFFNTPYNNFMSYADDDCTDSFTPNQVARMHCYLDLVYQGWQPSRKPAPVALAPQVLGHTTDSVTLEWFPPIDGHFFERELGSACHLCLEGRILVQYASNASSPMPCSPSGHWSPREAEGHPDVEQPCKSSVRTWSPNSAVNPHTVPPACPEPQGCYLELEFLYPLVPESLTIWVTFVSTDWDSSGAVNDIKLLAVSGKNISLGPQNVFCDVPLTIRLWDVGEEVYGIQIYTLDEHLEIDAAMLTSTADTPLCLQCKPLKYKVVRDPPLQMDVASILHLNRKFVDMDLNLGSVYQYWVITISGTEESEPSPAVTYIHGRGYCGDGIIQKDQGEQCDDMNKINGDGCSLFCRQEVSFNCIDEPSRCYFHDGDGVCEEFEQKTSIKDCGVYTPQGFLDQWASNASVSHQDQQCPGWVIIGQPAASQVCRTKVIDLSEGISQHAWYPCTISYPYSQLAQTTFWLRAYFSQPMVAAAVIVHLVTDGTYYGDQKQETISVQLLDTKDQSHDLGLHVLSCRNNPLIIPVVHDLSQPFYHSQAVRVSFSSPLVAISGVALRSFDNFDPVTLSSCQRGETYSPAEQSCVHFACEKTDCPELAVENASLNCSSSDRYHGAQCTVSCRTGYVLQIRRDDELIKSQTGPSVTVTCTEGKWNKQVACEPVDCSIPDHHQVYAASFSCPEGTTFGSQCSFQCRHPAQLKGNNSLLTCMEDGLWSFPEALCELMCLAPPPVPNADLQTARCRENKHKVGSFCKYKCKPGYHVPGSSRKSKKRAFKTQCTQDGSWQEGACVPVTCDPPPPKFHGLYQCTNGFQFNSECRIKCEDSDASQGLGSNVIHCRKDGTWNGSFHVCQEMQGQCSVPNELNSNLKLQCPDGYAIGSECATSCLDHNSESIILPMNVTVRDIPHWLNPTRVERVVCTAGLKWYPHPALIHCVKGCEPFMGDNYCDAINNRAFCNYDGGDCCTSTVKTKKVTPFPMSCDLQGDCACRDPQAQEHSRKDLRGYSHG

SEQ ID NO: 912164 - protein, 1627 aa, Homo sapiens; identical to SEQ ID NO: 912163

SEQ ID NO: 912165 - protein, 1627 aa, Homo sapiens; identical to SEQ ID NO: 912163

SEQ ID NO: 912166 - protein, 1708 aa, Homo sapiens
MIKERGEKLIANQEELGCIFQRWGEWSTHLEEESEKEKKKEVKGGSPKKGEEAKKVEAPRLPKLAAPGGGAGAKGGAGGTSDMRLWSWVLHLGLLSAALGCGLAERPRRARRDPRAGRPPRPAAGPATCPPAARGRRASPPPPPPPGGAWEAVRVPRRRQQREARGATEEPSPPSRALYFSGRGEQLRLRADLELPRDAFTLQVWLRAEGGQRSPAVITGLYDKCSYISRDRGWVVGIHTISDQDNKDPRYFFSLKTDRARQVTTINAHRSYLPGQWVYLAATYDGQFMKLYVNGAQVATSGEQVGGIFSPLTQKCKVLMLGGSALNHNYRGYIEHFSLWKVARTQREILSDMETHGAHTALPQLLLQENWDNVKHAWSPMKDGSSPKVEFSNAHGFLLDTSLEPPLCGQTLCDNTEVIASYNQLSSFRQPKVVRYRVVNLYEDDHKNPTVTREQVDFQHHQLAEAFKQYNISWELDVLEVSNSSLRRRLILANCDISKIGDENCDPECNHTLTGHDGGDCRHLRHPAFVKKQHNGVCDMDCNYERFNFDGGECCDPEITNVTQTCFDPDSPHRAYLDVNELKNILKLDGSTHLNIFFAKSSEEELAGVATWPWDKEALMHLGGIVLNPSFYGMPGHTHTMIHEIGHSLGLYHVFRGISEIQSCSDPCMETEPSFETGDLCNDTNPAPKHKSCGDPGPGNDTCGFHSFFNTPYNNFMSYADDDCTDSFTPNQVARMHCYLDLVYQGWQPSRKPAPVALAPQVLGHTTDSVTLEWFPPIDGHFFERELGSACHLCLEGRILVQYASNASSPMPCSPSGHWSPREAEGHPDVEQPCKSSVRTWSPNSAVNPHTVPPACPEPQGCYLELEFLYPLVPESLTIWVTFVSTDWDSSGAVNDIKLLAVSGKNISLGPQNVFCDVPLTIRLWDVGEEVYGIQIYTLDEHLEIDAAMLTSTADTPLCLQCKPLKYKVVRDPPLQMDVASILHLNRKFVDMDLNLGSVYQYWVITISGTEESEPSPAVTYIHGSGYCGDGIIQKDQGEQCDDMNKINGDGCSLFCRQEVSFNCIDEPSRCYFHDGDGVCEEFEQKTSIKDCGVYTPQGFLDQWASNASVSHQDQQCPGWVIIGQPAASQVCRTKVIDLSEGISQHAWYPCTISYPYSQLAQTTFWLRAYFSQPMVAAAVIVHLVTDGTYYGDQKQETISVQLLDTKDQSHDLGLHVLSCRNNPLIIPVVHDLSQPFYHSQAVRVSFSSPLVAISGVALRSFDNFDPVTLSSCQRGETYSPAEQSCVHFACEKTDCPELAVENAYLNCSSSDRYHGAQCTVSCRTGYVLQIRRDDELIKSQTGPSVTVTCTEGKWNKQVACEPVDCSIPDHHQVYAASFSCPEGTTFGSQCSFQCRHPAQLKGNNSLLTCMEDGLWSFPEALCELMCLAPPPVPNADLQTARCRENKHKVGSFCKYKCKPGYHVPGSSRKSKKRAFKTQCTQDGSWQEGACVPVTCDPPPPKFHGLYQCTNGFQFNSECRIKCEDSDASQGLGSNVIHCRKDGTWNGSFHVCQEMQGQCSVPNELNSNLKLQCPDGYAIGSECATSCLDHNSESIILPMNVTVRDIPHWLNPTRVERVVCTAGLKWYPHPALIHCVKGCEPFMGDNYCDAINNRAFCNYDGGDCCTSTVKTKKVTPFPMSCDLQGDCACRDPQAQEHSRKDLRGYSHG

SEQ ID NO: 912167 - protein, 1708 aa, Homo sapiens; identical to SEQ ID NO: 912166

SEQ ID NO: 912168 - protein, 1708 aa, Homo sapiens; identical to SEQ ID NO: 912166

SEQ ID NO: 912169 - protein, 1708 aa, Homo sapiens; identical to SEQ ID NO: 912166

SEQ ID NO: 912170 - protein, 1708 aa, Homo sapiens; identical to SEQ ID NO: 912166

SEQ ID NO: 912171 - protein, 650 aa, Homo sapiens
MIKERGEKLIANQEELGCIFQRWGEWSTHLEEESEKEKKKEVKGGSPKKGEEAKKVEAPRLPKLAAPGGGAGAKGGAGGTSDMRLWSWVLHLGLLSAALGCGLAERPRRARRDPRAGRPPRPAAGPATCPPAARGRRASPPPPPPPGGAWEAVRVPRRRQQREARGATEEPSPPSRALYFSGRGEQLRLRADLELPRDAFTLQVWLRAEGGQRSPAVITGLYDKCSYISRDRGWVVGIHTISDQDNKDPRYFFSLKTDRARQVTTINAHRSYLPGQWVYLAATYDGQFMKLYVNGAQVATSGEQVGGIFSPLTQKCKVLMLGGSALNHNYRGYIEHFSLWKVARTQREILSDMETHGAHTALPQLLLQENWDNVKHAWSPMKDGSSPKVEFSNAHGFLLDTSLEPPLCGQTLCDNTEVIASYNQLSSFRQPKVVRYRVVNLYEDDHKNPTVTREQVDFQHHQLAEAFKQYNISWELDVLEVSNSSLRRRLILANCDISKIGDENCDPECNHTLTGHDGGDCRHLRHPAFVKKQHNGVCDMDCNYERFNFDGGECCDPEITNVTQTCFDPDSPHRAYLDVNELKNILKLDGSTHLNIFFAKSSEEELAGVATWPWDKEALMHLGGIVLNPSFYGMPGHTHTMIHEIGHSAT

SEQ ID NO: 912172 - protein, 1611 aa, Homo sapiens
MIKERGEKLIANQEELGCIFQRWGEWSTHLEEESEKEKKKEVKGGSPKKGEEAKKVEAPRLPKLAAPGGGAGAKGGAGGTSDMRLWSWVLHLGLLSAALGCGLAERPRRARRDPRAGRPPRPAAGPATCPPAARGRRASPPPPPPPGGAWEAVRVPRRRQQREARGATEEPSPPSRALYFSGRGEQLRLRADLELPRDAFTLQVWLRAEGGQRSPAVITGLYDKCSYISRDRGWVVGIHTISDQDNKDPRYFFSLKTDRARQVTTINAHRSYLPGQWVYLAATYDGQFMKLYVNGAQVATSGEQVGGIFSPLTQKCKVLMLGGSALNHNYRGYIEHFSLWKVARTQREILSDMETHGAHTALPQLLLQENWDNVKHAWSPMKDGSSPKVEFSNAHGFLLDTSLEPPLCGQTLCDNTEVIASYNQLSSFRQPKVVRYRVVNLYEDDHKNPTVTREQVDFQHHQLAEAFKQYNISWELDVLEVSNSSLRRRLILANCDISKIGDENCDPECNHTLTGHDGGDCRHLRHPAFVKKQHNGVCDMDCNYERFNFDGGECCDPEITNVTQTCFDPDSPHRAYLDVNELKNILKLDGSTHLNIFFAKSSEEELAGVATWPWDKEALMHLGGIVLNPSFYGMPGHTHTMIHEIGHSLGLYHVFRGISEIQSCSDPCMETEPSFETGDLCNDTNPAPKHKSCGDPGPGNDTCGFHSFFNTPYNNFMSYADDDCTDSFTPNQVARMHCYLDLVYQGWQPSRKPAPVALAPQVLGHTTDSVTLEWFPPIDGHFFERELGSACHLCLEGRILVQYASNASSPMPCSPSGHWSPREAEGHPDVEQPCKSSVRTWSPNSAVNPHTVPPACPEPQGCYLELEFLYPLVPESLTIWVTFVSTDWDSSGAVNDIKLLAVSGKNISLGPQNVFCDVPLTIRLWDVGEEVYGIQIYTLDEHLEIDAAMLTSTADTPLCLQCKPLKYKVVRDPPLQMDVASILHLNRKFVDMDLNLGSVYQYWVITISGTEESEPSPAVTYIHGSGYCGDGIIQKDQGEQCDDMNKINGDGCSLFCRQEVSFNCIDEPSRCYFHDGDGVCEEFEQKTSIKDCGVYTPQGFLDQWASNASVSHQDQQCPGWVIIGQPAASQVCRTKVIDLSEGISQHAWYPCTISYPYSQLAQTTFWLRAYFSQPMVAAAVIVHLVTDGTYYGDQKQETISVQLLDTKDQSHDLGLHVLSCRNNPLIIPVVHDLSQPFYHSQAVRVSFSSPLVAISGVALRSFDNFDPVTLSSCQRGETYSPAEQSCVHFACEKTDCPELAVENAYLNCSSSDRYHGAQCTVSCRTGYVLQIRRDDELIKSQTGPSVTVTCTEGKWNKQVACEPVDCSIPDHHQVYAASFSCPEGTTFGSQCSFQCRHPAQLKGNNSLLTCMEDGLWSFPEALCELMCLAPPPVPNADLQTARCRENKHKVGSFCKYKCKPGYHVPGSSRKSKKRAFKTQCTQDGSWQEGACVPVTCDPPPPKFHGLYQCTNGFQFNSECRIKCEDSDASQGLGSNVIHCRKDGTWNGSFHVCQEMQGQCSVPNELNSNLKLQCPDGYAIGSECATSCLDHNSESIILPMNVTVRDIPHWRG

SEQ ID NO: 912173 - protein, 1451 aa, Homo sapiens
MIKERGEKLIANQEELGCIFQRWGEWSTHLEEESEKEKKKEVKGGSPKKGEEAKKVEAPRLPKLAAPGGGAGAKGGAGGTSDMRLWSWVLHLGLLSAALGCGLAERPRRARRDPRAGRPPRPAAGPATCPPAARGRRASPPPPPPPGGAWEAVRVPRRRQQREARGATEEPSPPSRALYFSGRGEQLRLRADLELPRDAFTLQVWLRAEGGQRSPAVITGLYDKCSYISRDRGWVVGIHTISDQDNKDPRYFFSLKTDRARQVTTINAHRSYLPGQWVYLAATYDGQFMKLYVNGAQVATSGEQVGGIFSPLTQKCKVLMLGGSALNHNYRGYIEHFSLWKVARTQREILSDMETHGAHTALPQLLLQENWDNVKHAWSPMKDGSSPKVEFSNAHGFLLDTSLEPPLCGQTLCDNTEVIASYNQLSSFRQPKVVRYRVVNLYEDDHKNPTVTREQVDFQHHQLAEAFKQYNISWELDVLEVSNSSLRRRLILANCDISKIGDENCDPECNHTLTGHDGGDCRHLRHPAFVKKQHNGVCDMDCNYERFNFDGGECCDPEITNVTQTCFDPDSPHRAYLDVNELKNILKLDGSTHLNIFFAKSSEEELAGVATWPWDKEALMHLGGIVLNPSFYGMPGHTHTMIHEIGHSLGLYHVFRGISEIQSCSDPCMETEPSFETGDLCNDTNPAPKHKSCGDPGPGNDTCGFHSFFNTPYNNFMSYADDDCTDSFTPNQVARMHCYLDLVYQGWQPSRKPAPVALAPQVLGHTTDSVTLEWFPPIDGHFFERELGSACHLCLEGRILVQYASNASSPMPCSPSGHWSPREAEGHPDVEQPCKSSVRTWSPNSAVNPHTVPPACPEPQGCYLELEFLYPLVPESLTIWVTFVSTDWDSSGAVNDIKLLAVSGKNISLGPQNVFCDVPLTIRLWDVGEEVYGIQIYTLDEHLEIDAAMLTSTADTPLCLQCKPLKYKVVRDPPLQMDVASILHLNRKFVDMDLNLGSVYQYWVITISGTEESEPSPAVTYIHGSGYCGDGIIQKDQGEQCDDMNKINGDGCSLFCRQEVSFNCIDEPSRCYFHDGDGVCEEFEQKTSIKDCGVYTPQGFLDQWASNASVSHQDQQCPGWVIIGQPAASQVCRTKVIDLSEGISQHAWYPCTISYPYSQLAQTTFWLRAYFSQPMVAAAVIVHLVTDGTYYGDQKQETISVQLLDTKDQSHDLGLHVLSCRNNPLIIPVVHDLSQPFYHSQAVRVSFSSPLVAISGVALRSFDNFDPVTLSSCQRGETYSPAEQSCVHFACEKTDCPELAVENAYLNCSSSDRYHGAQCTVSCRTGYVLQIRRDDELIKSQTGPSVTVTCTEGKWNKQVACEPVDCSIPDHHQVYAASFSCPEGTTFGSQCSFQCRHPAQLKGNNSLPSLCQFGRATGRCRGWYTYTDLVCAAGANRPRAVGPGLPLPARW

SEQ ID NO: 912174 - protein, 1220 aa, Homo sapiens
MIKERGEKLIANQEELGCIFQRWGEWSTHLEEESEKEKKKEVKGGSPKKGEEAKKVEAPRLPKLAAPGGGAGAKGGAGGTSDMRLWSWVLHLGLLSAALGCGLAERPRRARRDPRAGRPPRPAAGPATCPPAARGRRASPPPPPPPGGAWEAVRVPRRRQQREARGATEEPSPPSRALYFSGRGEQLRLRADLELPRDAFTLQVWLRAEGGQRSPAVITGLYDKCSYISRDRGWVVGIHTISDQDNKDPRYFFSLKTDRARQVTTINAHRSYLPGQWVYLAATYDGQFMKLYVNGAQVATSGEQVGGIFSPLTQKCKVLMLGGSALNHNYRGYIEHFSLWKVARTQREILSDMETHGAHTALPQLLLQENWDNVKHAWSPMKDGSSPKVEFSNAHGFLLDTSLEPPLCGQTLCDNTEVIASYNQLSSFRQPKVVRYRVVNLYEDDHKNPTVTREQVDFQHHQLAEAFKQYNISWELDVLEVSNSSLRRRLILANCDISKIGDENCDPECNHTLTGHDGGDCRHLRHPAFVKKQHNGVCDMDCNYERFNFDGGECCDPEITNVTQTCFDPDSPHRAYLDVNELKNILKLDGSTHLNIFFAKSSEEELAGVATWPWDKEALMHLGGIVLNPSFYGMPGHTHTMIHEIGHSLGLYHVFRGISEIQSCSDPCMETEPSFETGDLCNDTNPAPKHKSCGDPGPGNDTCGFHSFFNTPYNNFMSYADDDCTDSFTPNQVARMHCYLDLVYQGWQPSRKPAPVALAPQVLGHTTDSVTLEWFPPIDGHFFERELGSACHLCLEGRILVQYASNASSPMPCSPSGHWSPREAEGHPDVEQPCKSSVRTWSPNSAVNPHTVPPACPEPQGCYLELEFLYPLVPESLTIWVTFVSTDWDSSGAVNDIKLLAVSGKNISLGPQNVFCDVPLTIRLWDVGEEVYGIQIYTLDEHLEIDAAMLTSTADTPLCLQCKPLKYKVVRDPPLQMDVASILHLNRKFVDMDLNLGSVYQYWVITISGTEESEPSPAVTYIHGSGYCGDGIIQKDQGEQCDDMNKINGDGCSLFCRQEVSFNCIDEPSRCYFHDGDGVCEEFEQKTSIKDCGVYTPQGFLDQWASNASVSHQDQQCPGWVIIGQPAASQVCRTKVIDLSEGISQHAWYPCTISYPYSQLAQTTFWLRAYFSQPMVAAAVIVHLVTDGTYYGDQKQETISVQLLDTKDQSHDLDPKKERD

SEQ ID NO: 912175 - protein, 1169 aa, Homo sapiens
MIKERGEKLIANQEELGCIFQRWGEWSTHLEEESEKEKKKEVKGGSPKKGEEAKKVEAPRLPKLAAPGGGAGAKGGAGGTSDMRLWSWVLHLGLLSAALGCGLAERPRRARRDPRAGRPPRPAAGPATCPPAARGRRASPPPPPPPGGAWEAVRVPRRRQQREARGATEEPSPPSRALYFSGRGEQLRLRADLELPRDAFTLQVWLRAEGGQRSPAVITGLYDKCSYISRDRGWVVGIHTISDQDNKDPRYFFSLKTDRARQVTTINAHRSYLPGQWVYLAATYDGQFMKLYVNGAQVATSGEQVGGIFSPLTQKCKVLMLGGSALNHNYRGYIEHFSLWKVARTQREILSDMETHGAHTALPQLLLQENWDNVKHAWSPMKDGSSPKVEFSNAHGFLLDTSLEPPLCGQTLCDNTEVIASYNQLSSFRQPKVVRYRVVNLYEDDHKNPTVTREQVDFQHHQLAEAFKQYNISWELDVLEVSNSSLRRRLILANCDISKIGDENCDPECNHTLTGHDGGDCRHLRHPAFVKKQHNGVCDMDCNYERFNFDGGECCDPEITNVTQTCFDPDSPHRAYLDVNELKNILKLDGSTHLNIFFAKSSEEELAGVATWPWDKEALMHLGGIVLNPSFYGMPGHTHTMIHEIGHSLGLYHVFRGISEIQSCSDPCMETEPSFETGDLCNDTNPAPKHKSCGDPGPGNDTCGFHSFFNTPYNNFMSYADDDCTDSFTPNQVARMHCYLDLVYQGWQPSRKPAPVALAPQVLGHTTDSVTLEWFPPIDGHFFERELGSACHLCLEGRILVQYASNASSPMPCSPSGHWSPREAEGHPDVEQPCKSSVRTWSPNSAVNPHTVPPACPEPQGCYLELEFLYPLVPESLTIWVTFVSTDWDSSGAVNDIKLLAVSGKNISLGPQNVFCDVPLTIRLWDVGEEVYGIQIYTLDEHLEIDAAMLTSTADTPLCLQCKPLKYKVVRDPPLQMDVASILHLNRKFVDMDLNLGSVYQYWVITISGTEESEPSPAVTYIHGSGYCGDGIIQKDQGEQCDDMNKINGDGCSLFCRQEVSFNCIDEPSRCYFHDGDGVCEEFEQKTSIKDCGVYTPQGFLDQWASNASVSHQDQQCPGWVIIGQPAASQVCRTKVIDLSEGISQHAWYPCTIKEFPAPARSRDPLEHF

SEQ ID NO: 912176 - protein, 1086 aa, Homo sapiens
MIKERGEKLIANQEELGCIFQRWGEWSTHLEEESEKEKKKEVKGGSPKKGEEAKKVEAPRLPKLAAPGGGAGAKGGAGGTSDMRLWSWVLHLGLLSAALGCGLAERPRRARRDPRAGRPPRPAAGPATCPPAARGRRASPPPPPPPGGAWEAVRVPRRRQQREARGATEEPSPPSRALYFSGRGEQLRLRADLELPRDAFTLQVWLRAEGGQRSPAVITGLYDKCSYISRDRGWVVGIHTISDQDNKDPRYFFSLKTDRARQVTTINAHRSYLPGQWVYLAATYDGQFMKLYVNGAQVATSGEQVGGIFSPLTQKCKVLMLGGSALNHNYRGYIEHFSLWKVARTQREILSDMETHGAHTALPQLLLQENWDNVKHAWSPMKDGSSPKVEFSNAHGFLLDTSLEPPLCGQTLCDNTEVIASYNQLSSFRQPKVVRYRVVNLYEDDHKNPTVTREQVDFQHHQLAEAFKQYNISWELDVLEVSNSSLRRRLILANCDISKIGDENCDPECNHTLTGHDGGDCRHLRHPAFVKKQHNGVCDMDCNYERFNFDGGECCDPEITNVTQTCFDPDSPHRAYLDVNELKNILKLDGSTHLNIFFAKSSEEELAGVATWPWDKEALMHLGGIVLNPSFYGMPGHTHTMIHEIGHSLGLYHVFRGISEIQSCSDPCMETEPSFETGDLCNDTNPAPKHKSCGDPGPGNDTCGFHSFFNTPYNNFMSYADDDCTDSFTPNQVARMHCYLDLVYQGWQPSRKPAPVALAPQVLGHTTDSVTLEWFPPIDGHFFERELGSACHLCLEGRILVQYASNASSPMPCSPSGHWSPREAEGHPDVEQPCKSSVRTWSPNSAVNPHTVPPACPEPQGCYLELEFLYPLVPESLTIWVTFVSTDWDSSGAVNDIKLLAVSGKNISLGPQNVFCDVPLTIRLWDVGEEVYGIQIYTLDEHLEIDAAMLTSTADTPLCLQCKPLKYKVVRDPPLQMDVASILHLNRKFVDMDLNLGSVYQYWVITISGTEESEPSPAVTYIHGSGYCGDGIIQKDQGEQCDDMNKINGDGCSLFCRQEVSFNCIDEPSRCYFHDGDGVVQLLHHP

SEQ ID NO: 912177 - protein, 992 aa, Homo sapiens
MIKERGEKLIANQEELGCIFQRWGEWSTHLEEESEKEKKKEVKGGSPKKGEEAKKVEAPRLPKLAAPGGGAGAKGGAGGTSDMRLWSWVLHLGLLSAALGCGLAERPRRARRDPRAGRPPRPAAGPATCPPAARGRRASPPPPPPPGGAWEAVRVPRRRQQREARGATEEPSPPSRALYFSGRGEQLRLRADLELPRDAFTLQVWLRAEGGQRSPAVITGLYDKCSYISRDRGWVVGIHTISDQDNKDPRYFFSLKTDRARQVTTINAHRSYLPGQWVYLAATYDGQFMKLYVNGAQVATSGEQVGGIFSPLTQKCKVLMLGGSALNHNYRGYIEHFSLWKVARTQREILSDMETHGAHTALPQLLLQENWDNVKHAWSPMKDGSSPKVEFSNAHGFLLDTSLEPPLCGQTLCDNTEVIASYNQLSSFRQPKVVRYRVVNLYEDDHKNPTVTREQVDFQHHQLAEAFKQYNISWELDVLEVSNSSLRRRLILANCDISKIGDENCDPECNHTLTGHDGGDCRHLRHPAFVKKQHNGVCDMDCNYERFNFDGGECCDPEITNVTQTCFDPDSPHRAYLDVNELKNILKLDGSTHLNIFFAKSSEEELAGVATWPWDKEALMHLGGIVLNPSFYGMPGHTHTMIHEIGHSLGLYHVFRGISEIQSCSDPCMETEPSFETGDLCNDTNPAPKHKSCGDPGPGNDTCGFHSFFNTPYNNFMSYADDDCTDSFTPNQVARMHCYLDLVYQGWQPSRKPAPVALAPQVLGHTTDSVTLEWFPPIDGHFFERELGSACHLCLEGRILVQYASNASSPMPCSPSGHWSPREAEGHPDVEQPCKSSVRTWSPNSAVNPHTVPPACPEPQGCYLELEFLYPLVPESLTIWVTFVSTDWDSSGAVNDIKLLAVSGKNISLGPQNVFCDVPLTIRLWDVGEEVYGIQIYTLDEHLEIDAAMLTSTADTPLCLQCKPLKYKVVRDPPLQMDVASILHLNRKFVDM

SEQ ID NO: 912178 - protein, 706 aa, Homo sapiens
MIKERGEKLIANQEELGCIFQRWGEWSTHLEEESEKEKKKEVKGGSPKKGEEAKKVEAPRLPKLAAPGGGAGAKGGAGGTSDMRLWSWVLHLGLLSAALGCGLAERPRRARRDPRAGRPPRPAAGPATCPPAARGRRASPPPPPPPGGAWEAVRVPRRRQQREARGATEEPSPPSRALYFSGRGEQLRLRADLELPRDAFTLQVWLRAEGGQRSPAVITGLYDKCSYISRDRGWVVGIHTISDQDNKDPRYFFSLKTDRARQVTTINAHRSYLPGQWVYLAATYDGQFMKLYVNGAQVATSGEQVGGIFSPLTQKCKVLMLGGSALNHNYRGYIEHFSLWKVARTQREILSDMETHGAHTALPQLLLQENWDNVKHAWSPMKDGSSPKVEFSNAHGFLLDTSLEPPLCGQTLCDNTEVIASYNQLSSFRQPKVVRYRVVNLYEDDHKNPTVTREQVDFQHHQLAEAFKQYNISWELDVLEVSNSSLRRRLILANCDISKIGDENCDPECNHTLTGHDGGDCRHLRHPAFVKKQHNGVCDMDCNYERFNFDGGECCDPEITNVTQTCFDPDSPHRAYLDVNELKNILKLDGSTHLNIFFAKSSEEELAGVATWPWDKEALMHLGGIVLNPSFYGMPGHTHTMIHEIGHSLGLYHVFRGISEIQSCSDPCMETEPSFETGDLCNDTNPRKTVIEAQAVTNLMGPFNAS

SEQ ID NO: 912179 - protein, 553 aa, Homo sapiens
MIKERGEKLIANQEELGCIFQRWGEWSTHLEEESEKEKKKEVKGGSPKKGEEAKKVEAPRLPKLAAPGGGAGAKGGAGGTSDMRLWSWVLHLGLLSAALGCGLAERPRRARRDPRAGRPPRPAAGPATCPPAARGRRASPPPPPPPGGAWEAVRVPRRRQQREARGATEEPSPPSRALYFSGRGEQLRLRADLELPRDAFTLQVWLRAEGGQRSPAVITGLYDKCSYISRDRGWVVGIHTISDQDNKDPRYFFSLKTDRARQVTTINAHRSYLPGQWVYLAATYDGQFMKLYVNGAQVATSGEQVGGIFSPLTQKCKVLMLGGSALNHNYRGYIEHFSLWKVARTQREILSDMETHGAHTALPQLLLQENWDNVKHAWSPMKDGSSPKVEFSNAHGFLLDTSLEPPLCGQTLCDNTEVIASYNQLSSFRQPKVVRYRVVNLYEDDHKNPTVTREQVDFQHHQLAEAFKQYNISWELDVLEVSNSSLRRRLILANCDISKIGDENCDPECNHTLTGHDGGDCRHLRHPAFVKKQHNGVCDMDCNWYSGGILYNE

SEQ ID NO: 912180 - protein, 78 aa, Homo sapiens
TGPSVTVTCTEGKWNKQVACEPVDCSIPDHHQVYAASFSCPEGTTFGSQCSFQCRHPAQLKGIKNAFPSSAFLCLWET

SEQ ID NO: 912181 - protein, 1708 aa, Homo sapiens; identical to SEQ ID NO: 912166

SEQ ID NO: 912182 - protein, 1708 aa, Homo sapiens; identical to SEQ ID NO: 912166

SEQ ID NO: 912183 - protein, 1708 aa, Homo sapiens; identical to SEQ ID NO: 912166

SEQ ID NO: 912184 - protein, 1708 aa, Homo sapiens; identical to SEQ ID NO: 912166

SEQ ID NO: 912185 - protein, 1627 aa, Homo sapiens
MIKERGEKLIANQEELGCIFQRWGEWSTHLEEESEKEKKKEVKGGSPKKGEEAKKVEAPRLPKLAAPGGGAGAKGGAGGTSDMRLWSWVLHLGLLSAALGCGLAERPRRARRDPRAGRPPRPAAGPATCPPAARGRRASPPPPPPPGGAWEAVRVPRRRQQREARGATEEPSPPSRALYFSGRGEQLRLRADLELPRDAFTLQVWLRAEGGQRSPAVITGLYDKCSYISRDRGWVVGIHTISDQDNKDPRYFFSLKTDRARQVTTINAHRSYLPGQWVYLAATYDGQFMKLYVNGAQVATSGEQVGGIFSPLTQKCKVLMLGGSALNHNYRGYIEHFSLWKVARTQREILSDMETHGAHTALPQLLLQENWDNVKHAWSPMKDGSSPKVEFSNAHGFLLDTSLEPPLCGQTLCDNTEVIASYNQLSSFRQPKVVRYRVVNLYEDDHKNPTVTREQVDFQHHQLAEAFKQYNISWELDVLEVSNSSLRRRLILANCDISKIGDENCDPECNHTLTGHDGGDCRHLRHPAFVKKQHNGVCDMDCNYERFNFDGGECCDPEITNVTQTCFDPDSPHRAYLDVNELKNILKLDGSTHLNIFFAKSSEEELAGVATWPWDKEALMHLGGIVLNPSFYGMPGHTHTMIHEIGHSLGLYHVFRGISEIQSCSDPCMETEPSFETGDLCNDTNPAPKHKSCGDPGPGNDTCGFHSFFNTPYNNFMSYADDDCTDSFTPNQVARMHCYLDLVYQGWQPSRKPAPVALAPQVLGHTTDSVTLEWFPPIDGHFFERELGSACHLCLEGRILVQYASNASSPMPCSPSGHWSPREAEGHPDVEQPCKSSVRTWSPNSAVNPHTVPPACPEPQGCYLELEFLYPLVPESLTIWVTFVSTDWDSSGAVNDIKLLAVSGKNISLGPQNVFCDVPLTIRLWDVGEEVYGIQIYTLDEHLEIDAAMLTSTADTPLCLQCKPLKYKVVRDPPLQMDVASILHLNRKFVDMDLNLGSVYQYWVITISGTEESEPSPAVTYIHGSGYCGDGIIQKDQGEQCDDMNKINGDGCSLFCRQEVSFNCIDEPSRCYFHDGDGVCEEFEQKTSIKDCGVYTPQGFLDQWASNASVSHQDQQCPGWVIIGQPAASQVCRTKVIDLSEGISQHAWYPCTISYPYSQLAQTTFWLRAYFSQPMVAAAVIVHLVTDGTYYGDQKQETISVQLLDTKDQSHDLGLHVLSCRNNPLIIPVVHDLSQPFYHSQAVRVSFSSPLVAISGVALRSFDNFDPVTLSSCQRGETYSPAEQSCVHFACEKTDCPELAVENAYLNCSSSDRYHGAQCTVSCRTGYVLQIRRDDELIKSQTGPSVTVTCTEGKWNKQVACEPVDCSIPDHHQVYAASFSCPEGTTFGSQCSFQCRHPAQLKGNNSLLTCMEDGLWSFPEALCELMCLAPPPVPNADLQTARCRENKHKVGSFCKYKCKPGYHVPGSSRKSKKRAFKTQCTQDGSWQEGACVPVTCDPPPPKFHGLYQCTNGFQFNSECRIKCEDSDASQGLGSNVIHCRKDGTWNGSFHVCQEMQGQCSVPNELNSNLKLQCPDGYAIGSECATSCLDHNSESIILPMNVTVRDIPHWLNPTRVEVSDQGHLPTCS

SEQ ID NO: 912186 - protein, 1473 aa, Homo sapiens
MIKERGEKLIANQEELGCIFQRWGEWSTHLEEESEKEKKKEVKGGSPKKGEEAKKVEAPRLPKLAAPGGGAGAKGGAGGTSDMRLWSWVLHLGLLSAALGCGLAERPRRARRDPRAGRPPRPAAGPATCPPAARGRRASPPPPPPPGGAWEAVRVPRRRQQREARGATEEPSPPSRALYFSGRGEQLRLRADLELPRDAFTLQVWLRAEGGQRSPAVITGLYDKCSYISRDRGWVVGIHTISDQDNKDPRYFFSLKTDRARQVTTINAHRSYLPGQWVYLAATYDGQFMKLYVNGAQVATSGEQVGGIFSPLTQKCKVLMLGGSALNHNYRGYIEHFSLWKVARTQREILSDMETHGAHTALPQLLLQENWDNVKHAWSPMKDGSSPKVEFSNAHGFLLDTSLEPPLCGQTLCDNTEVIASYNQLSSFRQPKVVRYRVVNLYEDDHKNPTVTREQVDFQHHQLAEAFKQYNISWELDVLEVSNSSLRRRLILANCDISKIGDENCDPECNHTLTGHDGGDCRHLRHPAFVKKQHNGVCDMDCNYERFNFDGGECCDPEITNVTQTCFDPDSPHRAYLDVNELKNILKLDGSTHLNIFFAKSSEEELAGVATWPWDKEALMHLGGIVLNPSFYGMPGHTHTMIHEIGHSLGLYHVFRGISEIQSCSDPCMETEPSFETGDLCNDTNPAPKHKSCGDPGPGNDTCGFHSFFNTPYNNFMSYADDDCTDSFTPNQVARMHCYLDLVYQGWQPSRKPAPVALAPQVLGHTTDSVTLEWFPPIDGHFFERELGSACHLCLEGRILVQYASNASSPMPCSPSGHWSPREAEGHPDVEQPCKSSVRTWSPNSAVNPHTVPPACPEPQGCYLELEFLYPLVPESLTIWVTFVSTDWDSSGAVNDIKLLAVSGKNISLGPQNVFCDVPLTIRLWDVGEEVYGIQIYTLDEHLEIDAAMLTSTADTPLCLQCKPLKYKVVRDPPLQMDVASILHLNRKFVDMDLNLGSVYQYWVITISGTEESEPSPAVTYIHGSGYCGDGIIQKDQGEQCDDMNKINGDGCSLFCRQEVSFNCIDEPSRCYFHDGDGVCEEFEQKTSIKDCGVYTPQGFLDQWASNASVSHQDQQCPGWVIIGQPAASQVCRTKVIDLSEGISQHAWYPCTISYPYSQLAQTTFWLRAYFSQPMVAAAVIVHLVTDGTYYGDQKQETISVQLLDTKDQSHDLGLHVLSCRNNPLIIPVVHDLSQPFYHSQAVRVSFSSPLVAISGVALRSFDNFDPVTLSSCQRGETYSPAEQSCVHFACEKTDCPELAVENAYLNCSSSDRYHGAQCTVSCRTGYVLQIRRDDELIKSQTGPSVTVTCTEGKWNKQVACEPVDCSIPDHHQVYAASFSCPEGTTFGSQCSFQCRHPAQLKGNNSLLTCMEDGLWSFPEALCELMCLAPPPVPNADLQTARCRENKHKVGSFCKYKCKPGYHVPGSSRKSKK

SEQ ID NO: 912187 - protein, 130 aa, Homo sapiens
IGRPDFLCTEEPYQLPSNQSLSSFYLHSHHHLFSHYPAKQRFLEADLYLQTHRVNSALLNQDPPSLFHSDLLLTNLYLPRILGKRGYLIGGQPRAHMEGIFNRVFSNLSGGGSAQFGQCICSQFHFLPGN

SEQ ID NO: 912188 - protein, 1162 aa, Homo sapiens
MIKERGEKLIANQEELGCIFQRWGEWSTHLEEESEKEKKKEVKGGSPKKGEEAKKVEAPRLPKLAAPGGGAGAKGGAGGTSDMRLWSWVLHLGLLSAALGCGLAERPRRARRDPRAGRPPRPAAGPATCPPAARGRRASPPPPPPPGGAWEAVRVPRRRQQREARGATEEPSPPSRALYFSGRGEQLRLRADLELPRDAFTLQVWLRAEGGQRSPAVITGLYDKCSYISRDRGWVVGIHTISDQDNKDPRYFFSLKTDRARQVTTINAHRSYLPGQWVYLAATYDGQFMKLYVNGAQVATSGEQVGGIFSPLTQKCKVLMLGGSALNHNYRGYIEHFSLWKVARTQREILSDMETHGAHTALPQLLLQENWDNVKHAWSPMKDGSSPKVEFSNAHGFLLDTSLEPPLCGQTLCDNTEVIASYNQLSSFRQPKVVRYRVVNLYEDDHKNPTVTREQVDFQHHQLAEAFKQYNISWELDVLEVSNSSLRRRLILANCDISKIGDENCDPECNHTLTGHDGGDCRHLRHPAFVKKQHNGVCDMDCNYERFNFDGGECCDPEITNVTQTCFDPDSPHRAYLDVNELKNILKLDGSTHLNIFFAKSSEEELAGVATWPWDKEALMHLGGIVLNPSFYGMPGHTHTMIHEIGHSLGLYHVFRGISEIQSCSDPCMETEPSFETGDLCNDTNPAPKHKSCGDPGPGNDTCGFHSFFNTPYNNFMSYADDDCTDSFTPNQVARMHCYLDLVYQGWQPSRKPAPVALAPQVLGHTTDSVTLEWFPPIDGHFFERELGSACHLCLEGRILVQYASNASSPMPCSPSGHWSPREAEGHPDVEQPCKSSVRTWSPNSAVNPHTVPPACPEPQGCYLELEFLYPLVPESLTIWVTFVSTDWDSSGAVNDIKLLAVSGKNISLGPQNVFCDVPLTIRLWDVGEEVYGIQIYTLDEHLEIDAAMLTSTADTPLCLQCKPLKYKVVRDPPLQMDVASILHLNRKFVDMDLNLGSVYQYWVITISGTEESEPSPAVTYIHGSGYCGDGIIQKDQGEQCDDMNKINGDGCSLFCRQEVSFNCIDEPSRCYFHDGDGVCEEFEQKTSIKDCGVYTPQGFLDQWASNASVSHQDQQCPGWVIIGQPAASQVCRTKVIDLSEGISQHAWYPCTIKHQHEWDPL

SEQ ID NO: 912189 - protein, 1078 aa, Homo sapiens
MIKERGEKLIANQEELGCIFQRWGEWSTHLEEESEKEKKKEVKGGSPKKGEEAKKVEAPRLPKLAAPGGGAGAKGGAGGTSDMRLWSWVLHLGLLSAALGCGLAERPRRARRDPRAGRPPRPAAGPATCPPAARGRRASPPPPPPPGGAWEAVRVPRRRQQREARGATEEPSPPSRALYFSGRGEQLRLRADLELPRDAFTLQVWLRAEGGQRSPAVITGLYDKCSYISRDRGWVVGIHTISDQDNKDPRYFFSLKTDRARQVTTINAHRSYLPGQWVYLAATYDGQFMKLYVNGAQVATSGEQVGGIFSPLTQKCKVLMLGGSALNHNYRGYIEHFSLWKVARTQREILSDMETHGAHTALPQLLLQENWDNVKHAWSPMKDGSSPKVEFSNAHGFLLDTSLEPPLCGQTLCDNTEVIASYNQLSSFRQPKVVRYRVVNLYEDDHKNPTVTREQVDFQHHQLAEAFKQYNISWELDVLEVSNSSLRRRLILANCDISKIGDENCDPECNHTLTGHDGGDCRHLRHPAFVKKQHNGVCDMDCNYERFNFDGGECCDPEITNVTQTCFDPDSPHRAYLDVNELKNILKLDGSTHLNIFFAKSSEEELAGVATWPWDKEALMHLGGIVLNPSFYGMPGHTHTMIHEIGHSLGLYHVFRGISEIQSCSDPCMETEPSFETGDLCNDTNPAPKHKSCGDPGPGNDTCGFHSFFNTPYNNFMSYADDDCTDSFTPNQVARMHCYLDLVYQGWQPSRKPAPVALAPQVLGHTTDSVTLEWFPPIDGHFFERELGSACHLCLEGRILVQYASNASSPMPCSPSGHWSPREAEGHPDVEQPCKSSVRTWSPNSAVNPHTVPPACPEPQGCYLELEFLYPLVPESLTIWVTFVSTDWDSSGAVNDIKLLAVSGKNISLGPQNVFCDVPLTIRLWDVGEEVYGIQIYTLDEHLEIDAAMLTSTADTPLCLQCKPLKYKVVRDPPLQMDVASILHLNRKFVDMDLNLGSVYQYWVITISGTEESEPSPAVTYIHGSGYCGDGIIQKDQGEQCDDMNKINGDGCSLFCRQEVSFNCIGTSFSFLVAFMKK

SEQ ID NO: 912190 - protein, 910 aa, Homo sapiens
  misc_feature (891)..(891): Xaa can be any naturally occurring amino acid
  misc_feature (898)..(898): Xaa can be any naturally occurring amino acid
MIKERGEKLIANQEELGCIFQRWGEWSTHLEEESEKEKKKEVKGGSPKKGEEAKKVEAPRLPKLAAPGGGAGAKGGAGGTSDMRLWSWVLHLGLLSAALGCGLAERPRRARRDPRAGRPPRPAAGPATCPPAARGRRASPPPPPPPGGAWEAVRVPRRRQQREARGATEEPSPPSRALYFSGRGEQLRLRADLELPRDAFTLQVWLRAEGGQRSPAVITGLYDKCSYISRDRGWVVGIHTISDQDNKDPRYFFSLKTDRARQVTTINAHRSYLPGQWVYLAATYDGQFMKLYVNGAQVATSGEQVGGIFSPLTQKCKVLMLGGSALNHNYRGYIEHFSLWKVARTQREILSDMETHGAHTALPQLLLQENWDNVKHAWSPMKDGSSPKVEFSNAHGFLLDTSLEPPLCGQTLCDNTEVIASYNQLSSFRQPKVVRYRVVNLYEDDHKNPTVTREQVDFQHHQLAEAFKQYNISWELDVLEVSNSSLRRRLILANCDISKIGDENCDPECNHTLTGHDGGDCRHLRHPAFVKKQHNGVCDMDCNYERFNFDGGECCDPEITNVTQTCFDPDSPHRAYLDVNELKNILKLDGSTHLNIFFAKSSEEELAGVATWPWDKEALMHLGGIVLNPSFYGMPGHTHTMIHEIGHSLGLYHVFRGISEIQSCSDPCMETEPSFETGDLCNDTNPAPKHKSCGDPGPGNDTCGFHSFFNTPYNNFMSYADDDCTDSFTPNQVARMHCYLDLVYQGWQPSRKPAPVALAPQVLGHTTDSVTLEWFPPIDGHFFERELGSACHLCLEGRILVQYASNASSPMPCSPSGHWSPREAEGHPDVEQPCKSSVRTWSPNSAVNPHTVPPACPEPQGCYLELEFLYPLVPESDIWGLAHAGPMTACXMCCMEKXLGYSFGAMHNWR

SEQ ID NO: 912191 - protein, 1627 aa, Homo sapiens; identical to SEQ ID NO: 912163

SEQ ID NO: 912192 - protein, 1627 aa, Homo sapiens; identical to SEQ ID NO: 912163

SEQ ID NO: 912193 - protein, 1627 aa, Homo sapiens; identical to SEQ ID NO: 912163

SEQ ID NO: 912194 - protein, 2265 aa, Homo sapiens
MVSIDLHQAGRVDSQASITQDSDSIKKPEEIKQCNDAPVSVLQEDIVGSLKSTPENHPETPKKKSDPELSKSEMKQSESRLAESKPNENRLVETKSSENKLETKVETQTEELKQNESRTTECKQNESTIVEPKQNENRLSDTKPNDNKQNNGRSETTKSRPETPKQKGESRPETPKQKSDGHPETPKQKGDGRPETPKQKGESRPETPKQKNEGRPETPKHRHDNRRDSGKPSTEKKPEVSKHKQDTKSDSPRLKSERAEALKQRPDGRSVSESLRRDHDNKQKSDDRGESERHRGDQSRVRRPETLRSSSRNEHGIKSDSSKTDKLERKHRHESGDSRERPSSGEQKSRPDSPRVKQGDSNKSRSDKLGFKSPTSKDDKRTEGNKSKVDTNKAHPDNKAEFPSYLLGGRSGALKNFVIPKIKRDKDGNVTQETKKMEMKGEPKDKVEKIGLVEDLNKGAKPVVVLQKLSLDDVQKLIKDREDKSRSSLKPIKNKPSKSNKGSIDQSVLKELPPELLAEIESTMPLCERVKMNKRKRSTVNEKPKYAEISSDEDNDSDEAFESSRKRHKKDDDKAWEYEERDRRSSGDHRRSGHSHEGRRSSGGGRYRNRSPSDSDMEDYSPPPSLSEVARKMKKKEKQKKRKAYEPKLTPEEMMDSSTFKRFTASIENILDNLEDMDFTAFGDDDEIPQELLLGKHQLNELGSESAKIKAMGIMDKLSTDKTVKVLNILEKNIQDGSKLSTLLNHNNDTEEEERLWRDLIMERVTKSADACLTTINIMTSPNMPKAVYIEDVIERVIQYTKFHLQNTLYPQYDPVYRLDPHGGGLLSSKAKRAKCSTHKQRVIVMLYNKVCDIVSSLSELLEIQLLTDTTILQVSSMGITPFFVENVSELQLCAIKLVTAVFSRYEKHRQLILEEIFTSLARLPTSKRSLRNFRLNSSDMDGEPMYIQMVTALVLQLIQCVVHLPSSEKDSNAEEDSNKKIDQDVVITNSYETAMRTAQNFLSIFLKKCGSKQGEEDYRPLFENFVQDLLSTVNKPEWPAAELLLSLLGRLLVHQFSNKSTEMALRVASLDYLGTVAARLRKDAVTSKMDQGSIERILKQVSGGEDEIQQLQKALLDYLDENTETDPSLVFSRKFYIAQWFRDTTLETEKAMKSQKDEESSEGTHHAKEIETTGQIMHRAENRKKFLRSIIKTTPSQFSTLKMNSDTVDYDDACLIVRYLASMRPFAQSFDIYLTQILRVLGENAIAVRTKAMKCLSEVVAVDPSILARLDMQRGVHGRLMDNSTSVREAAVELLGRFVLCRPQLAEQYYDMLIERILDTGISVRKRVIKILRDICIEQPTFPKITEMCVKMIRRVNDEEGIKKLVNETFQKLWFTPTPHNDKEAMTRKILNITDVVAACRDTGYDWFEQLLQNLLKSEEDSSYKPVKKACTQLVDNLVEHILKYEESLADSDNKGVNSGRLVACITTLFLFSKIRPQLMVKHAMTMQPYLTTKCSTQNDFMVICNVAKILELVVPLMEHPSETFLATIEEDLMKLIIKYGMTVVQHCVSCLGAVVNKVTQNFKFVWACFNRYYGAISKLKSQHQEDPNNTSLLTNKPALLRSLFTVGALCRHFDFDLEDFKGNSKVNIKDKVLELLMYFTKHSDEEVQTKAIIGLGFAFIQHPSLMFEQEVKNLYNNILSDKNSSVNLKIQVLKNLQTYLQEEDTRMQQADRDWKKVAKQEDLKEMGDVSSGMSSSIMQLYLKQVLEAFFHTQSSVRHFALNVIALTLNQGLIHPVQCVPYLIAMGTDPEPAMRNKADQQLVEIDKKYAGFIHMKAVAGMKMSYQVQQAINTCLKDPVRGFRQDESSSALCSHLYSMIRGNRQHRRAFLISLLNLFDDTAKTDVTMLLYIADNLACFPYQTQEEPLFIMHHIDITLSVSGSNLLQSFKESMVKDKRKERKSSPSKENESSDSEEEVSRPRKSRKRVDSDSDSDSEDDINSVMKCLPENSAPLIEFANVSQGILLLLMLKQHLKNLCGFSDSKIQKYSPSESAKVYDKAINRKTGVHFHPKQTLDFLRSDMANSKITEEVKRSIVKQYLDFKLLMEHLDPDEEEEEGEVSASTNARNKAITSLLGGGSPKNNTAAETEDDESDGEDRGGGTSGSLRRSKRNSDSTELAAQMNESVDVMDVIAICCPKYKDRPQIARVVQKTSSGFSVQWMAGSYSGSWTEAKRRDGRKLVPWVDTIKESDIIYKKIALTSANKLTNKVVQTLRSLYAAKDGTSS

SEQ ID NO: 912195 - protein, 2158 aa, Homo sapiens
MVSIDLHQAGRVDSQASITQDSDSIKKPEEIKQCNDAPVSVLQEDIVGSLKSTPENHPETPKKKSDPELSKSEMKQSESRLAESKPNENRLVETKSSENKLETKVETQTEELKQNESRTTECKQNESTIVEPKQNENRLSDTKPNDNKQNNGRSETTKSRPETPKQKGESRPETPKQKSDGHPETPKQKGDGRPETPKQKGESRPETPKQKNEGRPETPKHRHDNRRDSGKPSTEKKPEVSKHKQDTKSDSPRLKSERAEALKQRPDGRSVSESLRRDHDNKQKSDDRGESERHRGDQSRVRRPETLRSSSRNEHGIKSDSSKTDKLERKHRHESGDSRERPSSGEQKSRPDSPRVKQGDSNKSRSDKLGFKSPTSKDDKRTEGNKSKVDTNKAHPDNKAEFPSYLLGGRSGALKNFVIPKIKRDKDGNVTQETKKMEMKGEPKDKVEKIGLVEDLNKGAKPVVVLQKLSLDDVQKLIKDREDKSRSSLKPIKNKPSKSNKGSIDQSVLKELPPELLAEIESTMPLCERVKMNKRKRSTVNEKPKYAEISSDEDNDSDEAFESSRKRHKKDDDKAWEYEERDRRSSGDHRRSGHSHEGRRSSGGGRYRNRSPSDSDMEDYSPPPSLSEVARKMKKKEKQKKRKAYEPKLTPEEMMDSSTFKRFTASIENILDNLEDMDFTAFGDDDEIPQELLLGKHQLNELGSESAKIKAMGIMDKLSTDKTVKVLNILEKNIQDGSKLSTLLNHNNDTEEEERLWRDLIMERVTKSADACLTTINIMTSPNMPKAVYIEDVIERVIQYTKFHLQNTLYPQYDPVYRLDPHGGGLLSSKAKRAKCSTHKQRVIVMLYNKVCDIVSSLSELLEIQLLTDTTILQVSSMGITPFFVENVSELQLCAIKLVTAVFSRYEKHRQLILEEIFTSLARLPTSKRSLRNFRLNSSDMDGEPMYIQMVTALVLQLIQCVVHLPSSEKDSNAEEDSNKKIDQDVVITNSYETAMRTAQNFLSIFLKKCGSKQGEEDYRPLFENFVQDLLSTVNKPEWPAAELLLSLLGRLLVHQFSNKSTEMALRVASLDYLGTVAARLRKDAVTSKMDQGSIERILKQVSGGEDEIQQLQKALLDYLDENTETDPSLVFSRKFYIAQWFRDTTLETEKAMKSQKDEESSEGTHHAKEIETTGQIMHRAENRKKFLRSIIKTTPSQFSTLKMNSDTVDYDDACLIVRYLASMRPFAQSFDIYLTQILRVLGENAIAVRTKAMKCLSEVVAVDPSILARLDMQRGVHGRLMDNSTSVREAAVELLGRFVLCRPQLAEQYYDMLIERILDTGISVRKRVIKILRDICIEQPTFPKITEMCVKMIRRVNDEEGIKKLVNETFQKLWFTPTPHNDKEAMTRKILNITDVVAACRDTGYDWFEQLLQNLLKSEEDSSYKPVKKACTQLVDNLVEHILKYEESLADSDNKGVNSGRLVACITTLFLFSKIRPQLMVKHAMTMQPYLTTKCSTQNDFMVICNVAKILELVVPLMEHPSETFLATIEEDLMKLIIKYGMTVVQHCVSCLGAVVNKVTQNFKFVWACFNRYYGAISKLKSQHQEDPNNTSLLTNKPALLRSLFTVGALCRHFDFDLEDFKGNSKVNIKDKVLELLMYFTKHSDEEVQTKAIIGLGFAFIQHPSLMFEQEVKNLYNNILSDKNSSVNLKIQVLKNLQTYLQEEDTRMQQADRDWKKVAKQEDLKEMGDVSSGMSSSIMQLYLKQVLEAFFHTQSSVRHFALNVIALTLNQGLIHPVQCVPYLIAMGTDPEPAMRNKADQQLVEIDKKYAGFIHMKAVAGMKMSYQVQQAINTCLKDPVRGFRQDESSSALCSHLYSMIRGNRQHRRAFLISLLNLFDDTAKTDVTMLLYIADNLACFPYQTQEEPLFIMHHIDITLSVSGSNLLQSFKESMVKDKRKERKSSPSKENESSDSEEEVSRPRKSRKRVDSDSDSDSEDDINSVMKCLPENSAPLIEFANVSQGILLLLMLKQHLKNLCGFSDSKIQKYSPSESAKVYDKAINRKTGVHFHPKQTLDFLRSDMANSKITEEVKRSIVKQYLDFKLLMEHLDPDEEEEEGEVSASTNARNKAITSLLGGGSPKNNTAAETEDDESDGEDRGGGTSGVRRRRSQRISQRIT

SEQ ID NO: 912196 - protein, 2158 aa, Homo sapiens; identical to SEQ ID NO: 912195

SEQ ID NO: 912197 - protein, 2494 aa, Homo sapiens
ASVSSPIVAGGLRNIHDNKVSGPLSGNSANHHADNPRHGSSEDYLHMVHRLSSDDGDSSTMRNAASFPLRSPQPVCSPAGSEGTPKGSRPPLILQSQSLPCSSPRDVPPDILLDSPERKQKKQKKMKLGKDEKEQSEKAAMYDIISSPSKDSTKLTLRLSRVRSSDMDQQEDMISGVENSNVSENDIPFNVQYPGQTSKTPITPQDINRPLNAAQCLSQQEQTAFLPANQVPVLQQNTSVAAKQPQTSVVQNQQQISQQGPIYDEVELDALAEIERIERESAIERERFSKEVQDKDKPLKKRKQDSYPQEAGGATGGNRPASQETGSTGNGSRPALMVSIDLHQAGRVDSQASITQDSDSIKKPEEIKQCNDAPVSVLQEDIVGSLKSTPENHPETPKKKSDPELSKSEMKQSESRLAESKPNENRLVETKSSENKLETKVETQTEELKQNESRTTECKQNESTIVEPKQNENRLSDTKPNDNKQNNGRSETTKSRPETPKQKGESRPETPKQKSDGHPETPKQKGDGRPETPKQKGESRPETPKQKNEGRPETPKHRHDNRRDSGKPSTEKKPEVSKHKQDTKSDSPRLKSERAEALKQRPDGRSVSESLRRDHDNKQKSDDRGESERHRGDQSRVRRPETLRSSSRNEHGIKSDSSKTDKLERKHRHESGDSRERPSSGEQKSRPDSPRVKQGDSNKSRSDKLGFKSPTSKDDKRTEGNKSKVDTNKAHPDNKAEFPSYLLGGRSGALKNFVIPKIKRDKDGNVTQETKKMEMKGEPKDKVEKIGLVEDLNKGAKPVVVLQKLSLDDVQKLIKDREDKSRSSLKPIKNKPSKSNKGSIDQSVLKELPPELLAEIESTMPLCERVKMNKRKRSTVNEKPKYAEISSDEDNDSDEAFESSRKRHKKDDDKAWEYEERDRRSSGDHRRSGHSHEGRRSSGGGRYRNRSPSDSDMEDYSPPPSLSEVARKMKKKEKQKKRKAYEPKLTPEEMMDSSTFKRFTASIENILDNLEDMDFTAFGDDDEIPQELLLGKHQLNELGSESAKIKAMGIMDKLSTDKTVKVLNILEKNIQDGSKLSTLLNHNNDTEEEERLWRDLIMERVTKSADACLTTINIMTSPNMPKAVYIEDVIERVIQYTKFHLQNTLYPQYDPVYRLDPHGGGLLSSKAKRAKCSTHKQRVIVMLYNKVCDIVSSLSELLEIQLLTDTTILQVSSMGITPFFVENVSELQLCAIKLVTAVFSRYEKHRQLILEEIFTSLARLPTSKRSLRNFRLNSSDMDGEPMYIQMVTALVLQLIQCVVHLPSSEKDSNAEEDSNKKIDQDVVITNSYETAMRTAQNFLSIFLKKCGSKQGEEDYRPLFENFVQDLLSTVNKPEWPAAELLLSLLGRLLVHQFSNKSTEMALRVASLDYLGTVAARLRKDAVTSKMDQGSIERILKQVSGGEDEIQQLQKALLDYLDENTETDPSLVFSRKFYIAQWFRDTTLETEKAMKSQKDEESSEGTHHAKEIETTGQIMHRAENRKKFLRSIIKTTPSQFSTLKMNSDTVDYDDACLIVRYLASMRPFAQSFDIYLTQILRVLGENAIAVRTKAMKCLSEVVAVDPSILARLDMQRGVHGRLMDNSTSVREAAVELLGRFVLCRPQLAEQYYDMLIERILDTGISVRKRVIKILRDICIEQPTFPKITEMCVKMIRRVNDEEGIKKLVNETFQKLWFTPTPHNDKEAMTRKILNITDVVAACRDTGYDWFEQLLQNLLKSEEDSSYKPVKKACTQLVDNLVEHILKYEESLADSDNKGVNSGRLVACITTLFLFSKIRPQLMVKHAMTMQPYLTTKCSTQNDFMVICNVAKILELVVPLMEHPSETFLATIEEDLMKLIIKYGMTVVQHCVSCLGAVVNKVTQNFKFVWACFNRYYGAISKLKSQHQEDPNNTSLLTNKPALLRSLFTVGALCRHFDFDLEDFKGNSKVNIKDKVLELLMYFTKHSDEEVQTKAIIGLGFAFIQHPSLMFEQEVKNLYNNILSDKNSSVNLKIQVLKNLQTYLQEEDTRMQQADRDWKKVAKQEDLKEMGDVSSGMSSSIMQLYLKQVLEAFFHTQSSVRHFALNVIALTLNQGLIHPVQCVPYLIAMGTDPEPAMRNKADQQLVEIDKKYAGFIHMKAVAGMKMSYQVQQAINTCLKDPVRGFRQDESSSALCSHLYSMIRGNRQHRRAFLISLLNLFDDTAKTDVTMLLYIADNLACFPYQTQEEPLFIMHHIDITLSVSGSNLLQSFKESMVKDKRKERKSSPSKENESSDSEEEVSRPRKSRKRVDSDSDSDSEDDINSVMKCLPENSAPLIEFANVSQGILLLLMLKQHLKNLCGFSDSKIQKYSPSESAKVYDKAINRKTGVHFHPKQTLDFLRSDMANSKITEEVKRSIVKQYLDFKLLMEHLDPDEEEEEGEVSASTNARNKAITSLLGGGSPKNNTAAETEDDESDGEDRGGGTSGVRRRRSQRISQRIT

SEQ ID NO: 912198 - protein, 1006 aa, Homo sapiens
MKSQKDEESSEGTHHAKEIETTGQIMHRAENRKKFLRSIIKTTPSQFSTLKMNSDTVDYDDACLIVRYLASMRPFAQSFDIYLTQILRVLGENAIAVRTKAMKCLSEVVAVDPSILARLDMQRGVHGRLMDNSTSVREAAVELLGRFVLCRPQLAEQYYDMLIERILDTGISVRKRVIKILRDICIEQPTFPKITEMCVKMIRRVNDEEGIKKLVNETFQKLWFTPTPHNDKEAMTRKILNITDVVAACRDTGYDWFEQLLQNLLKSEEDSSYKPVKKACTQLVDNLVEHILKYEESLADSDNKGVNSGRLVACITTLFLFSKIRPQLMVKHAMTMQPYLTTKCSTQNDFMVICNVAKILELVVPLMEHPSETFLATIEEDLMKLIIKYGMTVVQHCVSCLGAVVNKVTQNFKFVWACFNRYYGAISKLKSQHQEDPNNTSLLTNKPALLRSLFTVGALCRHFDFDLEDFKGNSKVNIKDKVLELLMYFTKHSDEEVQTKAIIGLGFAFIQHPSLMFEQEVKNLYNNILSDKNSSVNLKIQVLKNLQTYLQEEDTRMQQADRDWKKVAKQEDLKEMGDVSSGMSSSIMQLYLKQVLEAFFHTQSSVRHFALNVIALTLNQGLIHPVQCVPYLIAMGTDPEPAMRNKADQQLVEIDKKYAGFIHMKAVAGMKMSYQVQQAINTCLKDPVRGFRQDESSSALCSHLYSMIRGNRQHRRAFLISLLNLFDDTAKTDVTMLLYIADNLACFPYQTQEEPLFIMHHIDITLSVSGSNLLQSFKESMVKDKRKERKSSPSKENESSDSEEEVSRPRKSRKRVDSDSDSDSEDDINSVMKCLPENSAPLIEFANVSQGILLLLMLKQHLKNLCGFSDSKIQKYSPSESAKVYDKAINRKTGVHFHPKQTLDFLRSDMANSKITEEVKRSIVKQYLDFKLLMEHLDPDEEEEEGEVSASTNARNKAITSLLGGGSPKNNTAAETEDDESDGEDRGGGTSGVRRRRSQRISQRIT

SEQ ID NO: 912199 - protein, 2601 aa, Homo sapiens
ASVSSPIVAGGLRNIHDNKVSGPLSGNSANHHADNPRHGSSEDYLHMVHRLSSDDGDSSTMRNAASFPLRSPQPVCSPAGSEGTPKGSRPPLILQSQSLPCSSPRDVPPDILLDSPERKQKKQKKMKLGKDEKEQSEKAAMYDIISSPSKDSTKLTLRLSRVRSSDMDQQEDMISGVENSNVSENDIPFNVQYPGQTSKTPITPQDINRPLNAAQCLSQQEQTAFLPANQVPVLQQNTSVAAKQPQTSVVQNQQQISQQGPIYDEVELDALAEIERIERESAIERERFSKEVQDKDKPLKKRKQDSYPQEAGGATGGNRPASQETGSTGNGSRPALMVSIDLHQAGRVDSQASITQDSDSIKKPEEIKQCNDAPVSVLQEDIVGSLKSTPENHPETPKKKSDPELSKSEMKQSESRLAESKPNENRLVETKSSENKLETKVETQTEELKQNESRTTECKQNESTIVEPKQNENRLSDTKPNDNKQNNGRSETTKSRPETPKQKGESRPETPKQKSDGHPETPKQKGDGRPETPKQKGESRPETPKQKNEGRPETPKHRHDNRRDSGKPSTEKKPEVSKHKQDTKSDSPRLKSERAEALKQRPDGRSVSESLRRDHDNKQKSDDRGESERHRGDQSRVRRPETLRSSSRNEHGIKSDSSKTDKLERKHRHESGDSRERPSSGEQKSRPDSPRVKQGDSNKSRSDKLGFKSPTSKDDKRTEGNKSKVDTNKAHPDNKAEFPSYLLGGRSGALKNFVIPKIKRDKDGNVTQETKKMEMKGEPKDKVEKIGLVEDLNKGAKPVVVLQKLSLDDVQKLIKDREDKSRSSLKPIKNKPSKSNKGSIDQSVLKELPPELLAEIESTMPLCERVKMNKRKRSTVNEKPKYAEISSDEDNDSDEAFESSRKRHKKDDDKAWEYEERDRRSSGDHRRSGHSHEGRRSSGGGRYRNRSPSDSDMEDYSPPPSLSEVARKMKKKEKQKKRKAYEPKLTPEEMMDSSTFKRFTASIENILDNLEDMDFTAFGDDDEIPQELLLGKHQLNELGSESAKIKAMGIMDKLSTDKTVKVLNILEKNIQDGSKLSTLLNHNNDTEEEERLWRDLIMERVTKSADACLTTINIMTSPNMPKAVYIEDVIERVIQYTKFHLQNTLYPQYDPVYRLDPHGGGLLSSKAKRAKCSTHKQRVIVMLYNKVCDIVSSLSELLEIQLLTDTTILQVSSMGITPFFVENVSELQLCAIKLVTAVFSRYEKHRQLILEEIFTSLARLPTSKRSLRNFRLNSSDMDGEPMYIQMVTALVLQLIQCVVHLPSSEKDSNAEEDSNKKIDQDVVITNSYETAMRTAQNFLSIFLKKCGSKQGEEDYRPLFENFVQDLLSTVNKPEWPAAELLLSLLGRLLVHQFSNKSTEMALRVASLDYLGTVAARLRKDAVTSKMDQGSIERILKQVSGGEDEIQQLQKALLDYLDENTETDPSLVFSRKFYIAQWFRDTTLETEKAMKSQKDEESSEGTHHAKEIETTGQIMHRAENRKKFLRSIIKTTPSQFSTLKMNSDTVDYDDACLIVRYLASMRPFAQSFDIYLTQILRVLGENAIAVRTKAMKCLSEVVAVDPSILARLDMQRGVHGRLMDNSTSVREAAVELLGRFVLCRPQLAEQYYDMLIERILDTGISVRKRVIKILRDICIEQPTFPKITEMCVKMIRRVNDEEGIKKLVNETFQKLWFTPTPHNDKEAMTRKILNITDVVAACRDTGYDWFEQLLQNLLKSEEDSSYKPVKKACTQLVDNLVEHILKYEESLADSDNKGVNSGRLVACITTLFLFSKIRPQLMVKHAMTMQPYLTTKCSTQNDFMVICNVAKILELVVPLMEHPSETFLATIEEDLMKLIIKYGMTVVQHCVSCLGAVVNKVTQNFKFVWACFNRYYGAISKLKSQHQEDPNNTSLLTNKPALLRSLFTVGALCRHFDFDLEDFKGNSKVNIKDKVLELLMYFTKHSDEEVQTKAIIGLGFAFIQHPSLMFEQEVKNLYNNILSDKNSSVNLKIQVLKNLQTYLQEEDTRMQQADRDWKKVAKQEDLKEMGDVSSGMSSSIMQLYLKQVLEAFFHTQSSVRHFALNVIALTLNQGLIHPVQCVPYLIAMGTDPEPAMRNKADQQLVEIDKKYAGFIHMKAVAGMKMSYQVQQAINTCLKDPVRGFRQDESSSALCSHLYSMIRGNRQHRRAFLISLLNLFDDTAKTDVTMLLYIADNLACFPYQTQEEPLFIMHHIDITLSVSGSNLLQSFKESMVKDKRKERKSSPSKENESSDSEEEVSRPRKSRKRVDSDSDSDSEDDINSVMKCLPENSAPLIEFANVSQGILLLLMLKQHLKNLCGFSDSKIQKYSPSESAKVYDKAINRKTGVHFHPKQTLDFLRSDMANSKITEEVKRSIVKQYLDFKLLMEHLDPDEEEEEGEVSASTNARNKAITSLLGGGSPKNNTAAETEDDESDGEDRGGGTSGSLRRSKRNSDSTELAAQMNESVDVMDVIAICCPKYKDRPQIARVVQKTSSGFSVQWMAGSYSGSWTEAKRRDGRKLVPWVDTIKESDIIYKKIALTSANKLTNKVVQTLRSLYAAKDGTSS

SEQ ID NO: 912200 - protein, 2422 aa, Homo sapiens
ASVSSPIVAGGLRNIHDNKVSGPLSGNSANHHADNPRHGSSEDYLHMVHRLSSDDGDSSTMRNAASFPLRSPQPVCSPAGSEGTPKGSRPPLILQSQSLPCSSPRDVPPDILLDSPERKQKKQKKMKLGKDEKEQSEKAAMYDIISSPSKDSTKLTLRLSRVRSSDMDQQEDMISGVENSNVSENDIPFNVQYPGQTSKTPITPQDINRPLNAAQCLSQQEQTAFLPANQVPVLQQNTSVAAKQPQTSVVQNQQQISQQGPIYDEVELDALAEIERIERESAIERERFSKEVQDKDKPLKKRKQDSYPQEAGGATGGNRPASQETGSTGNGSRPALMVSIDLHQAGRVDSQASITQDSDSIKKPEEIKQCNDAPVSVLQEDIVGSLKSTPENHPETPKKKSDPELSKSEMKQSESRLAESKPNENRLVETKSSENKLETKVETQTEELKQNESRTTECKQNESTIVEPKQNENRLSDTKPNDNKQNNGRSETTKSRPETPKQKGESRPETPKQKSDGHPETPKQKGDGRPETPKQKGESRPETPKQKNEGRPETPKHRHDNRRDSGKPSTEKKPEVSKHKQDTKSDSPRLKSERAEALKQRPDGRSVSESLRRDHDNKQKSDDRGESERHRGDQSRVRRPETLRSSSRNEHGIKSDSSKTDKLERKHRHESGDSRERPSSGEQKSRPDSPRVKQGDSNKSRSDKLGFKSPTSKDDKRTEGNKSKVDTNKAHPDNKAEFPSYLLGGRSGALKNFVIPKIKRDKDGNVTQETKKMEMKGEPKDKVEKIGLVEDLNKGAKPVVVLQKLSLDDVQKLIKDREDKSRSSLKPIKNKPSKSNKGSIDQSVLKELPPELLAEIESTMPLCERVKMNKRKRSTVNEKPKYAEISSDEDNDSDEAFESSRKRHKKDDDKAWEYEERDRRSSGDHRRSGHSHEGRRSSGGGRYRNRSPSDSDMEDYSPPPSLSEVARKMKKKEKQKKRKAYEPKLTPEEMMDSSTFKRFTASIENILDNLEDMDFTAFGDDDEIPQELLLGKHQLNELGSESAKIKAMGIMDKLSTDKTVKVLNILEKNIQDGSKLSTLLNHNNDTEEEERLWRDLIMERVTKSADACLTTINIMTSPNMPKAVYIEDVIERVIQYTKFHLQNTLYPQYDPVYRLDPHGGGLLSSKAKRAKCSTHKQRVIVMLYNKVCDIVSSLSELLEIQLLTDTTILQVSSMGITPFFVENVSELQLCAIKLVTAVFSRYEKHRQLILEEIFTSLARLPTSKRSLRNFRLNSSDMDGEPMYIQMVTALVLQLIQCVVHLPSSEKDSNAEEDSNKKIDQDVVITNSYETAMRTAQNFLSIFLKKCGSKQGEEDYRPLFENFVQDLLSTVNKPEWPAAELLLSLLGRLLVHQFSNKSTEMALRVASLDYLGTVAARLRKDAVTSKMDQGSIERILKQVSGGEDEIQQLQKALLDYLDENTETDPSLVFSRKFYIAQWFRDTTLETEKAMKSQKDEESSEGTHHAKEIETTGQIMHRAENRKKFLRSIIKTTPSQFSTLKMNSDTVDYDDACLIVRYLASMRPFAQSFDIYLTQILRVLGENAIAVRTKAMKCLSEVVAVDPSILARLDMQRGVHGRLMDNSTSVREAAVELLGRFVLCRPQLAEQYYDMLIERILDTGISVRKRVIKILRDICIEQPTFPKITEMCVKMIRRVNDEEGIKKLVNETFQKLWFTPTPHNDKEAMTRKILNITDVVAACRDTGYDWFEQLLQNLLKSEEDSSYKPVKKACTQLVDNLVEHILKYEESLADSDNKGVNSGRLVACITTLFLFSKIRPQLMVKHAMTMQPYLTTKCSTQNDFMVICNVAKILELVVPLMEHPSETFLATIEEDLMKLIIKYGMTVVQHCVSCLGAVVNKVTQNFKFVWACFNRYYGAISKLKSQHQEDPNNTSLLTNKPALLRSLFTVGALCRHFDFDLEDFKGNSKVNIKDKVLELLMYFTKHSDEEVQTKAIIGLGFAFIQHPSLMFEQEVKNLYNNILSDKNSSVNLKIQVLKNLQTYLQEEDTRMQQADRDWKKVAKQEDLKEMGDVSSGMSSSIMQLYLKQVLEAFFHTQSSVRHFALNVIALTLNQGLIHPVQCVPYLIAMGTDPEPAMRNKADQQLVEIDKKYAGFIHMKAVAGMKMSYQVQQAINTCLKDPVRGFRQDESSSALCSHLYSMIRGNRQHRRAFLISLLNLFDDTAKTDVTMLLYIADNLACFPYQTQEEPLFIMHHIDITLSVSGSNLLQSFKESMVKDKRKERKSSPSKENESSDSEEEVSRPRKSRKRVDSDSDSDSEDDINSVMKCLPENSAPLIEFANVSQGILLLLMLKQHLKNLCGFSDSSNFSWNIWTLMKKKKKGRFQLAQMLGTKQLPHCLEEAALKIIQQQRQKMMKVMGRIEEEALQG

SEQ ID NO: 912201 - protein, 271 aa, Homo sapiens [sequence omitted]

SEQ ID NO: 912202 - protein, 1847 aa, Homo sapiens
ASVSSPIVAGGLRNIHDNKVSGPLSGNSANHHADNPRHGSSEDYLHMVHRLSSDDGDSSTMRNAASFPLRSPQPVCSPAGSEGTPKGSRPPLILQSQSLPCSSPRDVPPDILLDSPERKQKKQKKMKLGKDEKEQSEKAAMYDIISSPSKDSTKLTLRLSRVRSSDMDQQEDMISGVENSNVSENDIPFNVQYPGQTSKTPITPQDINRPLNAAQCLSQQEQTAFLPANQVPVLQQNTSVAAKQPQTSVVQNQQQISQQGPIYDEVELDALAEIERIERESAIERERFSKEVQDKDKPLKKRKQDSYPQEAGGATGGNRPASQETGSTGNGSRPALMVSIDLHQAGRVDSQASITQDSDSIKKPEEIKQCNDAPVSVLQEDIVGSLKSTPENHPETPKKKSDPELSKSEMKQSESRLAESKPNENRLVETKSSENKLETKVETQTEELKQNESRTTECKQNESTIVEPKQNENRLSDTKPNDNKQNNGRSETTKSRPETPKQKGESRPETPKQKSDGHPETPKQKGDGRPETPKQKGESRPETPKQKNEGRPETPKHRHDNRRDSGKPSTEKKPEVSKHKQDTKSDSPRLKSERAEALKQRPDGRSVSESLRRDHDNKQKSDDRGESERHRGDQSRVRRPETLRSSSRNEHGIKSDSSKTDKLERKHRHESGDSRERPSSGEQKSRPDSPRVKQGDSNKSRSDKLGFKSPTSKDDKRTEGNKSKVDTNKAHPDNKAEFPSYLLGGRSGALKNFVIPKIKRDKDGNVTQETKKMEMKGEPKDKVEKIGLVEDLNKGAKPVVVLQKLSLDDVQKLIKDREDKSRSSLKPIKNKPSKSNKGSIDQSVLKELPPELLAEIESTMPLCERVKMNKRKRSTVNEKPKYAEISSDEDNDSDEAFESSRKRHKKDDDKAWEYEERDRRSSGDHRRSGHSHEGRRSSGGGRYRNRSPSDSDMEDYSPPPSLSEVARKMKKKEKQKKRKAYEPKLTPEEMMDSSTFKRFTASIENILDNLEDMDFTAFGDDDEIPQELLLGKHQLNELGSESAKIKAMGIMDKLSTDKTVKVLNILEKNIQDGSKLSTLLNHNNDTEEEERLWRDLIMERVTKSADACLTTINIMTSPNMPKAVYIEDVIERVIQYTKFHLQNTLYPQYDPVYRLDPHGGGLLSSKAKRAKCSTHKQRVIVMLYNKVCDIVSSLSELLEIQLLTDTTILQVSSMGITPFFVENVSELQLCAIKLVTAVFSRYEKHRQLILEEIFTSLARLPTSKRSLRNFRLNSSDMDGEPMYIQMVTALVLQLIQCVVHLPSSEKDSNAEEDSNKKIDQDVVITNSYETAMRTAQNFLSIFLKKCGSKQGEEDYRPLFENFVQDLLSTVNKPEWPAAELLLSLLGRLLVHQFSNKSTEMALRVASLDYLGTVAARLRKDAVTSKMDQGSIERILKQVSGGEDEIQQLQKALLDYLDENTETDPSLVFSRKFYIAQWFRDTTLETEKAMKSQKDEESSEGTHHAKEIETTGQIMHRAENRKKFLRSIIKTTPSQFSTLKMNSDTVDYDDACLIVRYLASMRPFAQSFDIYLTQILRVLGENAIAVRTKAMKCLSEVVAVDPSILARLDMQRGVHGRLMDNSTSVREAAVELLGRFVLCRPQLAEQYYDMLIERILDTGISVRKRVIKILRDICIEQPTFPKITEMCVKMIRRVNDEEGIKKLVNETFQKLWFTPTPHNDKEAMTRKILNITDVVAACRDTGYDWFEQLLQNLLKSEEDSSYKPVKKACTQLVDNLVEHILKYEESLADSDNKGVNSGRLVACITTLFLFSKIRPQLMVKHAMTMQPYLTTKCSVFTYFLWITTTNNF

SEQ ID NO: 912203 - protein, 898 aa, Homo sapiens
ASVSSPIVAGGLRNIHDNKVSGPLSGNSANHHADNPRHGSSEDYLHMVHRLSSDDGDSSTMRNAASFPLRSPQPVCSPAGSEGTPKGSRPPLILQSQSLPCSSPRDVPPDILLDSPERKQKKQKKMKLGKDEKEQSEKAAMYDIISSPSKDSTKLTLRLSRVRSSDMDQQEDMISGVENSNVSENDIPFNVQYPGQTSKTPITPQDINRPLNAAQCLSQQEQTAFLPANQVPVLQQNTSVAAKQPQTSVVQNQQQISQQGPIYDEVELDALAEIERIERESAIERERFSKEVQDKDKPLKKRKQDSYPQEAGGATGGNRPASQETGSTGNGSRPALMVSIDLHQAGRVDSQASITQDSDSIKKPEEIKQCNDAPVSVLQEDIVGSLKSTPENHPETPKKKSDPELSKSEMKQSESRLAESKPNENRLVETKSSENKLETKVETQTEELKQNESRTTECKQNESTIVEPKQNENRLSDTKPNDNKQNNGRSETTKSRPETPKQKGESRPETPKQKSDGHPETPKQKGDGRPETPKQKGESRPETPKQKNEGRPETPKHRHDNRRDSGKPSTEKKPEVSKHKQDTKSDSPRLKSERAEALKQRPDGRSVSESLRRDHDNKQKSDDRGESERHRGDQSRVRRPETLRSSSRNEHGIKSDSSKTDKLERKHRHESGDSRERPSSGEQKSRPDSPRVKQGDSNKSRSDKLGFKSPTSKDDKRTEGNKSKVDTNKAHPDNKAEFPSYLLGGRSGALKNFVIPKIKRDKDGNVTQETKKMEMKGEPKDKVEKIGLVEDLNKGAKPVVVLQKLSLDDVQKLIKDREDKSRSSLKPIKNKPSKSNKGSIDQSVLKELPPELLAEIESTMPLCERVKMNKRKRSTVNEKPKYAEISSDEDNDSDEAFE

SEQ ID NO: 912204 - protein, 69 aa, Homo sapiens
SVLKELPPELLAEIESTMPLCERVKMNKRKRSTVNEKPKYAEISSDEDNDSDEAFECKYHRTLCYYFRV

SEQ ID NO: 912205 - protein, 2158 aa, Homo sapiens; identical to SEQ ID NO: 912195

SEQ ID NO: 912206 - protein, 2158 aa, Homo sapiens; identical to SEQ ID NO: 912195

SEQ ID NO: 912207 - protein, 1720 aa, Homo sapiens
MKGEPKDKVEKIGLVEDLNKGAKPVVVLQKLSLDDVQKLIKDREDKSRSSLKPIKNKPSKSNKGSIDQSVLKELPPELLAEIESTMPLCERVKMNKRKRSTVNEKPKYAEISSDEDNDSDEAFESSRKRHKKDDDKAWEYEERDRRSSGDHRRSGHSHEGRRSSGGGRYRNRSPSDSDMEDYSPPPSLSEVARKMKKKEKQKKRKAYEPKLTPEEMMDSSTFKRFTASIENILDNLEDMDFTAFGDDDEIPQELLLGKHQLNELGSESAKIKAMGIMDKLSTDKTVKVLNILEKNIQDGSKLSTLLNHNNDTEEEERLWRDLIMERVTKSADACLTTINIMTSPNMPKAVYIEDVIERVIQYTKFHLQNTLYPQYDPVYRLDPHGGGLLSSKAKRAKCSTHKQRVIVMLYNKVCDIVSSLSELLEIQLLTDTTILQVSSMGITPFFVENVSELQLCAIKLVTAVFSRYEKHRQLILEEIFTSLARLPTSKRSLRNFRLNSSDMDGEPMYIQMVTALVLQLIQCVVHLPSSEKDSNAEEDSNKKIDQDVVITNSYETAMRTAQNFLSIFLKKCGSKQGEEDYRPLFENFVQDLLSTVNKPEWPAAELLLSLLGRLLVHQFSNKSTEMALRVASLDYLGTVAARLRKDAVTSKMDQGSIERILKQVSGGEDEIQQLQKALLDYLDENTETDPSLVFSRKFYIAQWFRDTTLETEKAMKSQKDEESSEGTHHAKEIETTGQIMHRAENRKKFLRSIIKTTPSQFSTLKMNSDTVDYDDACLIVRYLASMRPFAQSFDIYLTQILRVLGENAIAVRTKAMKCLSEVVAVDPSILARLDMQRGVHGRLMDNSTSVREAAVELLGRFVLCRPQLAEQYYDMLIERILDTGISVRKRVIKILRDICIEQPTFPKITEMCVKMIRRVNDEEGIKKLVNETFQKLWFTPTPHNDKEAMTRKILNITDVVAACRDTGYDWFEQLLQNLLKSEEDSSYKPVKKACTQLVDNLVEHILKYEESLADSDNKGVNSGRLVACITTLFLFSKIRPQLMVKHAMTMQPYLTTKCSTQNDFMVICNVAKILELVVPLMEHPSETFLATIEEDLMKLIIKYGMTVVQHCVSCLGAVVNKVTQNFKFVWACFNRYYGAISKLKSQHQEDPNNTSLLTNKPALLRSLFTVGALCRHFDFDLEDFKGNSKVNIKDKVLELLMYFTKHSDEEVQTKAIIGLGFAFIQHPSLMFEQEVKNLYNNILSDKNSSVNLKIQVLKNLQTYLQEEDTRMQQADRDWKKVAKQEDLKEMGDVSSGMSSSIMQLYLKQVLEAFFHTQSSVRHFALNVIALTLNQGLIHPVQCVPYLIAMGTDPEPAMRNKADQQLVEIDKKYAGFIHMKAVAGMKMSYQVQQAINTCLKDPVRGFRQDESSSALCSHLYSMIRGNRQHRRAFLISLLNLFDDTAKTDVTMLLYIADNLACFPYQTQEEPLFIMHHIDITLSVSGSNLLQSFKESMVKDKRKERKSSPSKENESSDSEEEVSRPRKSRKRVDSDSDSDSEDDINSVMKCLPENSAPLIEFANVSQGILLLLMLKQHLKNLCGFSDSKIQKYSPSESAKVYDKAINRKTGVHFHPKQTLDFLRSDMANSKITEEVKRSIVKQYLDFKLLMEHLDPDEEEEEGEVSASTNARNKAITSLLGGGSPKNNTAAETEDDESDGEDRGGGTSGVRRRRSQRISQRIT

SEQ ID NO: 912208 - protein, 2601 aa, Homo sapiens; identical to SEQ ID NO: 912199

SEQ ID NO: 912209 - protein, 2495 aa, Homo sapiens
ASVSSPIVAGGLRNIHDNKVSGPLSGNSANHHADNPRHGSSEDYLHMVHRLSSDDGDSSTMRNAASFPLRSPQPVCSPAGSEGTPKGSRPPLILQSQSLPCSSPRDVPPDILLDSPERKQKKQKKMKLGKDEKEQSEKAAMYDIISSPSKDSTKLTLRLSRVRSSDMDQQEDMISGVENSNVSENDIPFNVQYPGQTSKTPITPQDINRPLNAAQCLSQQEQTAFLPANQVPVLQQNTSVAAKQPQTSVVQNQQQISQQGPIYDEVELDALAEIERIERESAIERERFSKEVQDKDKPLKKRKQDSYPQEAGGATGGNRPASQETGSTGNGSRPALMVSIDLHQAGRVDSQASITQDSDSIKKPEEIKQCNDAPVSVLQEDIVGSLKSTPENHPETPKKKSDPELSKSEMKQSESRLAESKPNENRLVETKSSENKLETKVETQTEELKQNESRTTECKQNESTIVEPKQNENRLSDTKPNDNKQNNGRSETTKSRPETPKQKGESRPETPKQKSDGHPETPKQKGDGRPETPKQKGESRPETPKQKNEGRPETPKHRHDNRRDSGKPSTEKKPEVSKHKQDTKSDSPRLKSERAEALKQRPDGRSVSESLRRDHDNKQKSDDRGESERHRGDQSRVRRPETLRSSSRNEHGIKSDSSKTDKLERKHRHESGDSRERPSSGEQKSRPDSPRVKQGDSNKSRSDKLGFKSPTSKDDKRTEGNKSKVDTNKAHPDNKAEFPSYLLGGRSGALKNFVIPKIKRDKDGNVTQETKKMEMKGEPKDKVEKIGLVEDLNKGAKPVVVLQKLSLDDVQKLIKDREDKSRSSLKPIKNKPSKSNKGSIDQSVLKELPPELLAEIESTMPLCERVKMNKRKRSTVNEKPKYAEISSDEDNDSDEAFESSRKRHKKDDDKAWEYEERDRRSSGDHRRSGHSHEGRRSSGGGRYRNRSPSDSDMEDYSPPPSLSEVARKMKKKEKQKKRKAYEPKLTPEEMMDSSTFKRFTASIENILDNLEDMDFTAFGDDDEIPQELLLGKHQLNELGSESAKIKAMGIMDKLSTDKTVKVLNILEKNIQDGSKLSTLLNHNNDTEEEERLWRDLIMERVTKSADACLTTINIMTSPNMPKAVYIEDVIERVIQYTKFHLQNTLYPQYDPVYRLDPHGGGLLSSKAKRAKCSTHKQRVIVMLYNKVCDIVSSLSELLEIQLLTDTTILQVSSMGITPFFVENVSELQLCAIKLVTAVFSRYEKHRQLILEEIFTSLARLPTSKRSLRNFRLNSSDMDGEPMYIQMVTALVLQLIQCVVHLPSSEKDSNAEEDSNKKIDQDVVITNSYETAMRTAQNFLSIFLKKCGSKQGEEDYRPLFENFVQDLLSTVNKPEWPAAELLLSLLGRLLVHQFSNKSTEMALRVASLDYLGTVAARLRKDAVTSKMDQGSIERILKQVSGGEDEIQQLQKALLDYLDENTETDPSLVFSRKFYIAQWFRDTTLETEKAMKSQKDEESSEGTHHAKEIETTGQIMHRAENRKKFLRSIIKTTPSQFSTLKMNSDTVDYDDACLIVRYLASMRPFAQSFDIYLTQILRVLGENAIAVRTKAMKCLSEVVAVDPSILARLDMQRGVHGRLMDNSTSVREAAVELLGRFVLCRPQLAEQYYDMLIERILDTGISVRKRVIKILRDICIEQPTFPKITEMCVKMIRRVNDEEGIKKLVNETFQKLWFTPTPHNDKEAMTRKILNITDVVAACRDTGYDWFEQLLQNLLKSEEDSSYKPVKKACTQLVDNLVEHILKYEESLADSDNKGVNSGRLVACITTLFLFSKIRPQLMVKHAMTMQPYLTTKCSTQNDFMVICNVAKILELVVPLMEHPSETFLATIEEDLMKLIIKYGMTVVQHCVSCLGAVVNKVTQNFKFVWACFNRYYGAISKLKSQHQEDPNNTSLLTNKPALLRSLFTVGALCRHFDFDLEDFKGNSKVNIKDKVLELLMYFTKHSDEEVQTKAIIGLGFAFIQHPSLMFEQEVKNLYNNILSDKNSSVNLKIQVLKNLQTYLQEEDTRMQQADRDWKKVAKQEDLKEMGDVSSGMSSSIMQLYLKQVLEAFFHTQSSVRHFALNVIALTLNQGLIHPVQCVPYLIAMGTDPEPAMRNKADQQLVEIDKKYAGFIHMKAVAGMKMSYQVQQAINTCLKDPVRGFRQDESSSALCSHLYSMIRGNRQHRRAFLISLLNLFDDTAKTDVTMLLYIADNLACFPYQTQEEPLFIMHHIDITLSVSGSNLLQSFKESMVKDKRKERKSSPSKENESSDSEEEVSRPRKSRKRVDSDSDSDSEDDINSVMKCLPENSAPLIEFANVSQGILLLLMLKQHLKNLCGFSDSKIQKYSPSESAKVYDKAINRKTGVHFHPKQTLDFLRSDMANSKITEEVKRSIVKQYLDFKLLMEHLDPDEEEEEGEVSASTNARNKAITSLLGGGSPKNNTAAETEDDESDGEDRGGGTSGVRRRRSQRISQRITH

SEQ ID NO: 912210 - protein, 2238 aa, Homo sapiens
ASVSSPIVAGGLRNIHDNKVSGPLSGNSANHHADNPRHGSSEDYLHMVHRLSSDDGDSSTMRNAASFPLRSPQPVCSPAGSEGTPKGSRPPLILQSQSLPCSSPRDVPPDILLDSPERKQKKQKKMKLGKDEKEQSEKAAMYDIISSPSKDSTKLTLRLSRVRSSDMDQQEDMISGVENSNVSENDIPFNVQYPGQTSKTPITPQDINRPLNAAQCLSQQEQTAFLPANQVPVLQQNTSVAAKQPQTSVVQNQQQISQQGPIYDEVELDALAEIERIERESAIERERFSKEVQDKDKPLKKRKQDSYPQEAGGATGGNRPASQETGSTGNGSRPALMVSIDLHQAGRVDSQASITQDSDSIKKPEEIKQCNDAPVSVLQEDIVGSLKSTPENHPETPKKKSDPELSKSEMKQSESRLAESKPNENRLVETKSSENKLETKVETQTEELKQNESRTTECKQNESTIVEPKQNENRLSDTKPNDNKQNNGRSETTKSRPETPKQKGESRPETPKQKSDGHPETPKQKGDGRPETPKQKGESRPETPKQKNEGRPETPKHRHDNRRDSGKPSTEKKPEVSKHKQDTKSDSPRLKSERAEALKQRPDGRSVSESLRRDHDNKQKSDDRGESERHRGDQSRVRRPETLRSSSRNEHGIKSDSSKTDKLERKHRHESGDSRERPSSGEQKSRPDSPRVKQGDSNKSRSDKLGFKSPTSKDDKRTEGNKSKVDTNKAHPDNKAEFPSYLLGGRSGALKNFVIPKIKRDKDGNVTQETKKMEMKGEPKDKVEKIGLVEDLNKGAKPVVVLQKLSLDDVQKLIKDREDKSRSSLKPIKNKPSKSNKGSIDQSVLKELPPELLAEIESTMPLCERVKMNKRKRSTVNEKPKYAEISSDEDNDSDEAFESSRKRHKKDDDKAWEYEERDRRSSGDHRRSGHSHEGRRSSGGGRYRNRSPSDSDMEDYSPPPSLSEVARKMKKKEKQKKRKAYEPKLTPEEMMDSSTFKRFTASIENILDNLEDMDFTAFGDDDEIPQELLLGKHQLNELGSESAKIKAMGIMDKLSTDKTVKVLNILEKNIQDGSKLSTLLNHNNDTEEEERLWRDLIMERVTKSADACLTTINIMTSPNMPKAVYIEDVIERVIQYTKFHLQNTLYPQYDPVYRLDPHGGGLLSSKAKRAKCSTHKQRVIVMLYNKVCDIVSSLSELLEIQLLTDTTILQVSSMGITPFFVENVSELQLCAIKLVTAVFSRYEKHRQLILEEIFTSLARLPTSKRSLRNFRLNSSDMDGEPMYIQMVTALVLQLIQCVVHLPSSEKDSNAEEDSNKKIDQDVVITNSYETAMRTAQNFLSIFLKKCGSKQGEEDYRPLFENFVQDLLSTVNKPEWPAAELLLSLLGRLLVHQFSNKSTEMALRVASLDYLGTVAARLRKDAVTSKMDQGSIERILKQVSGGEDEIQQLQKALLDYLDENTETDPSLVFSRKFYIAQWFRDTTLETEKAMKSQKDEESSEGTHHAKEIETTGQIMHRAENRKKFLRSIIKTTPSQFSTLKMNSDTVDYDDACLIVRYLASMRPFAQSFDIYLTQILRVLGENAIAVRTKAMKCLSEVVAVDPSILARLDMQRGVHGRLMDNSTSVREAAVELLGRFVLCRPQLAEQYYDMLIERILDTGISVRKRVIKILRDICIEQPTFPKITEMCVKMIRRVNDEEGIKKLVNETFQKLWFTPTPHNDKEAMTRKILNITDVVAACRDTGYDWFEQLLQNLLKSEEDSSYKPVKKACTQLVDNLVEHILKYEESLADSDNKGVNSGRLVACITTLFLFSKIRPQLMVKHAMTMQPYLTTKCSTQNDFMVICNVAKILELVVPLMEHPSETFLATIEEDLMKLIIKYGMTVVQHCVSCLGAVVNKVTQNFKFVWACFNRYYGAISKLKSQHQEDPNNTSLLTNKPALLRSLFTVGALCRHFDFDLEDFKGNSKVNIKDKVLELLMYFTKHSDEEVQTKAIIGLGFAFIQHPSLMFEQEVKNLYNNILSDKNSSVNLKIQVLKNLQTYLQEEDTRMQQADRDWKKVAKQEDLKEMGDVSSGMSSSIMQLYLKQVLEAFFHTQSSVRHFALNVIALTLNQGLIHPVQCVPYLIAMGTDPEPAMRNKADQQLVEIDKKYAGFIHMKAVAGMKMSYQVQQAINTCLKDPVRGFRQDESSSALCSHLYSMIRGNRQHRRAFLISLLNLFDDTAVSTKTYYFKKISALEILWIK

SEQ ID NO: 912211 - protein, 1244 aa, Homo sapiens
ASVSSPIVAGGLRNIHDNKVSGPLSGNSANHHADNPRHGSSEDYLHMVHRLSSDDGDSSTMRNAASFPLRSPQPVCSPAGSEGTPKGSRPPLILQSQSLPCSSPRDVPPDILLDSPERKQKKQKKMKLGKDEKEQSEKAAMYDIISSPSKDSTKLTLRLSRVRSSDMDQQEDMISGVENSNVSENDIPFNVQYPGQTSKTPITPQDINRPLNAAQCLSQQEQTAFLPANQVPVLQQNTSVAAKQPQTSVVQNQQQISQQGPIYDEVELDALAEIERIERESAIERERFSKEVQDKDKPLKKRKQDSYPQEAGGATGGNRPASQETGSTGNGSRPALMVSIDLHQAGRVDSQASITQDSDSIKKPEEIKQCNDAPVSVLQEDIVGSLKSTPENHPETPKKKSDPELSKSEMKQSESRLAESKPNENRLVETKSSENKLETKVETQTEELKQNESRTTECKQNESTIVEPKQNENRLSDTKPNDNKQNNGRSETTKSRPETPKQKGESRPETPKQKSDGHPETPKQKGDGRPETPKQKGESRPETPKQKNEGRPETPKHRHDNRRDSGKPSTEKKPEVSKHKQDTKSDSPRLKSERAEALKQRPDGRSVSESLRRDHDNKQKSDDRGESERHRGDQSRVRRPETLRSSSRNEHGIKSDSSKTDKLERKHRHESGDSRERPSSGEQKSRPDSPRVKQGDSNKSRSDKLGFKSPTSKDDKRTEGNKSKVDTNKAHPDNKAEFPSYLLGGRSGALKNFVIPKIKRDKDGNVTQETKKMEMKGEPKDKVEKIGLVEDLNKGAKPVVVLQKLSLDDVQKLIKDREDKSRSSLKPIKNKPSKSNKGSIDQSVLKELPPELLAEIESTMPLCERVKMNKRKRSTVNEKPKYAEISSDEDNDSDEAFESSRKRHKKDDDKAWEYEERDRRSSGDHRRSGHSHEGRRSSGGGRYRNRSPSDSDMEDYSPPPSLSEVARKMKKKEKQKKRKAYEPKLTPEEMMDSSTFKRFTASIENILDNLEDMDFTAFGDDDEIPQELLLGKHQLNELGSESAKIKAMGIMDKLSTDKTVKVLNILEKNIQDGSKLSTLLNHNNDTEEEERLWRDLIMERVTKSADACLTTINIMTSPNMPKAVYIEDVIERVIQYTKFHLQNTLYPQYDPVYRLDPHGGGLLSSKAKRAKCSTHKQRVIVMLYNKVCDIVSSLSELLEIQLLTDTTILQVSSMGITPFFVENVSELQLCAIKLVTAVFSRYET

SEQ ID NO: 912212 - protein, 106 aa, Homo sapiens
SSELVSEGIRCRWMDRLGCGVHGPETRSLLTRPPQPSSHQAAVPGAGRRVAGRHQAAGGWRSNTPLPPRQRTGARGPRLRMLAASRVARRHRERKRRKSSWGARAS

SEQ ID NO: 912213 - protein, 466 aa, Homo sapiens
MPTRRWAPGTQCITKCEHTRPKPGELAFRKGDVVTILEACENKSWYRVKHHTSGQEGLLAAGALREREALSADPKLSLMPWFHGKISGQEAVQQLQPPEDGLFLVRESARHPGDYVLCVSFGRDVIHYRVLHRDGHLTIDEAVFFCNLMDMVEHYSKDKGAICTKLVRPKRKHGTKSAEEELARAGWLLNLQHLTLGAQIGEGEFGAVLQGEYLGQKVAVKNIKCDVTAQAFLDETAVMTKMQHENLVRLLGVILHQGLYIVMEHVSKGNLVNFLRTRGRALVNTAQLLQFSLHVAEGMEYLESKKLVHRDLAARNILVSEDLVAKVSDFGLAKAERKGLDSSRLPVKWTAPEALKHGKFTSKSDVWSFGVLLWEVFSYGRAPYPKMSLKEVSEAVEKGYRMEPPEGCPGPVHVLMSSCWEAEPARRPPFRKLAEKLARELRSAGAPASVSGQDADGSTSPRSQEP

SEQ ID NO: 912214 - protein, 640 aa, Homo sapiens
GRRRRRRAEETAVRPALGPAGASQAAAPRAFPHSPTLLRPQNEETEQLAPSCAAGTASGCAAGSRRPSWGRARGAARGRPLSRKQEEPGSVQWHPAPYLLCQPPGLWQAIPSVPDCDHLLSVPLTCLSFPLGAMAGRGSLVSWRAFHGCDSAEELPRVSPRFLRAWHPPPVSARMPTRRWAPGTQCITKCEHTRPKPGELAFRKGDVVTILEACENKSWYRVKHHTSGQEGLLAAGALREREALSADPKLSLMPWFHGKISGQEAVQQLQPPEDGLFLVRESARHPGDYVLCVSFGRDVIHYRVLHRDGHLTIDEAVFFCNLMDMVEHYSKDKGAICTKLVRPKRKHGTKSAEEELARAGWLLNLQHLTLGAQIGEGEFGAVLQGEYLGQKVAVKNIKCDVTAQAFLDETAVMTKMQHENLVRLLGVILHQGLYIVMEHVSKGNLVNFLRTRGRALVNTAQLLQFSLHVAEGMEYLESKKLVHRDLAARNILVSEDLVAKVSDFGLAKAERKGLDSSRLPVKWTAPEALKHGKFTSKSDVWSFGVLLWEVFSYGRAPYPKMSLKEVSEAVEKGYRMEPPEGCPGPVHVLMSSCWEAEPARRPPFRKLAEKLARELRSAGAPASVSGQDADGSTSPRSQEP

SEQ ID NO: 912215 - protein, 706 aa, Homo sapiens
GRRRRRRAEETAVRPALGPAGASQAAAPRAFPHSPTLLRPQNEETEQLAPSCAAGTASGCAAGSRRPSWGRARGAARGRPLSRKQEEPGSVQWHPAPYLLCQPPGLWQAIPSVPDCDHLLSVPLTCLSFPLGAMAGRGSLVSWRAFHGCDSAEELPRVSPRFLRAWHPPPVSARMPTRRWAPGTQCITKCEHTRPKPGELAFRKGDVVTILEACENKSWYRVKHHTSGQEGLLAAGALREREALSADPKLSLMPWFHGKISGQEAVQQLQPPEDGLFLVRESARHPGDYVLCVSFGRDVIHYRVLHRDGHLTIDEAVFFCNLMDMVERPPGNGTGCWGSPPWGWAHGCPTILQHYSKDKGAICTKLVRPKRKHGTKSAEEELARGPQLRHSSVTIIHHLSQKPGPEPPPTPSSSIPSLARFPRPAGWLLNLQHLTLGAQIGEGEFGAVLQGEYLGQKVAVKNIKCDVTAQAFLDETAVMTKMQHENLVRLLGVILHQGLYIVMEHVSKGNLVNFLRTRGRALVNTAQLLQFSLHVAEGMEYLESKKLVHRDLAARNILVSEDLVAKVSDFGLAKAERKGLDSSRLPVKWTAPEALKHGKFTSKSDVWSFGVLLWEVFSYGRAPYPKMSLKEVSEAVEKGYRMEPPEGCPGPVHVLMSSCWEAEPARRPPFRKLAEKLARELRSAGAPASVSGQDADGSTSPRSQEP

SEQ ID NO: 912216 - protein, 508 aa, Homo sapiens
MQGHFPAERREGRPRRGTRGQQQLLVSPRFLRAWHPPPVSARMPTRRWAPGTQCITKCEHTRPKPGELAFRKGDVVTILEACENKSWYRVKHHTSGQEGLLAAGALREREALSADPKLSLMPWFHGKISGQEAVQQLQPPEDGLFLVRESARHPGDYVLCVSFGRDVIHYRVLHRDGHLTIDEAVFFCNLMDMVEHYSKDKGAICTKLVRPKRKHGTKSAEEELARAGWLLNLQHLTLGAQIGEGEFGAVLQGEYLGQKVAVKNIKCDVTAQAFLDETAVMTKMQHENLVRLLGVILHQGLYIVMEHVSKGNLVNFLRTRGRALVNTAQLLQFSLHVAEGMEYLESKKLVHRDLAARNILVSEDLVAKVSDFGLAKAERKGLDSSRLPVKWTAPEALKHGKFTSKSDVWSFGVLLWEVFSYGRAPYPKMSLKEVSEAVEKGYRMEPPEGCPGPVHVLMSSCWEAEPARRPPFRKLAEKLARELRSAGAPASVSGQDADGSTSPRSQEP

SEQ ID NO: 912217 - protein, 431 aa, Homo sapiens
GRRRRRRAEETAVRPALGPAGASQAAAPRAFPHSPTLLRPQNEETEQLAPSCAAGTASGCAAGSRRPSWGRARGAARGRPLSRKQEEPGSVQWHPAPYLLCQPPGLWQAIPSVPDCDHLLSVPLTCLSFPLGAMAGRGSLVSWRAFHGCDSAEELPRVSPRFLRAWHPPPVSARMPTRRWAPGTQCITKCEHTRPKPGELAFRKGDVVTILEACENKSWYRVKHHTSGQEGLLAAGALREREALSADPKLSLMPWFHGKISGQEAVQQLQPPEDGLFLVRESARHPGDYVLCVSFGRDVIHYRVLHRDGHLTIDEAVFFCNLMDMVEHYSKDKGAICTKLVRPKRKHGTKSAEEELARGPQLRHSSVTIIHHLSQKPGPEPPPTPSSSIPSLARFPRPGESSPLPSPQPSLRPSHQTASFPEGESPFQPRP

SEQ ID NO: 912218 - protein, 640 aa, Homo sapiens; identical to SEQ ID NO: 912214

SEQ ID NO: 912219 - protein, 666 aa, Homo sapiens
GRRRRRRAEETAVRPALGPAGASQAAAPRAFPHSPTLLRPQNEETEQLAPSCAAGTASGCAAGSRRPSWGRARGAARGRPLSRKQEEPGSVQWHPAPYLLCQPPGLWQAIPSVPDCDHLLSVPLTCLSFPLGAMAGRGSLVSWRAFHGCDSAEELPRVSPRFLRAWHPPPVSARMPTRRWAPGTQCITKCEHTRPKPGELAFRKGDVVTILEACENKSWYRVKHHTSGQEGLLAAGALREREALSADPKLSLMPWFHGKISGQEAVQQLQPPEDGLFLVRESARHPGDYVLCVSFGRDVIHYRVLHRDGHLTIDEAVFFCNLMDMVERPPGNGTGCWGSPPWGWAHGCPTILQHYSKDKGAICTKLVRPKRKHGTKSAEEELARAGWLLNLQHLTLGAQIGEGEFGAVLQGEYLGQKVAVKNIKCDVTAQAFLDETAVMTKMQHENLVRLLGVILHQGLYIVMEHVSKGNLVNFLRTRGRALVNTAQLLQFSLHVAEGMEYLESKKLVHRDLAARNILVSEDLVAKVSDFGLAKAERKGLDSSRLPVKWTAPEALKHGKFTSKSDVWSFGVLLWEVFSYGRAPYPKMSLKEVSEAVEKGYRMEPPEGCPGPVHVLMSSCWEAEPARRPPFRKLAEKLARELRSAGAPASVSGQDADGSTSPRSQEP

SEQ ID NO: 912220 - protein, 573 aa, Homo sapiens
EGPVCARVCASRARSGKQEEPGSVQWHPAPYLLCQPPGLWQAIPSVPDCDHLLSVPLTCLSFPLGAMAGRGSLVSWRAFHGCDSAEELPRVSPRFLRAWHPPPVSARMPTRRWAPGTQCITKCEHTRPKPGELAFRKGDVVTILEACENKSWYRVKHHTSGQEGLLAAGALREREALSADPKLSLMPWFHGKISGQEAVQQLQPPEDGLFLVRESARHPGDYVLCVSFGRDVIHYRVLHRDGHLTIDEAVFFCNLMDMVEHYSKDKGAICTKLVRPKRKHGTKSAEEELARAGWLLNLQHLTLGAQIGEGEFGAVLQGEYLGQKVAVKNIKCDVTAQAFLDETAVMTKMQHENLVRLLGVILHQGLYIVMEHVSKGNLVNFLRTRGRALVNTAQLLQFSLHVAEGMEYLESKKLVHRDLAARNILVSEDLVAKVSDFGLAKAERKGLDSSRLPVKWTAPEALKHGKFTSKSDVWSFGVLLWEVFSYGRAPYPKMSLKEVSEAVEKGYRMEPPEGCPGPVHVLMSSCWEAEPARRPPFRKLAEKLARELRSAGAPASVSGQDADGSTSPRSQEP

SEQ ID NO: 912221 - protein, 573 aa, Homo sapiens
GRRRRRRAEETAVRPALGPAGASQAAAPRAFPHSPTLLRPQNEETEQLAPSCAAGTASGCAAGSRRPSWGRARGAARGRPLSRKQEEPGSVQWHPAPYLLCQPPGLWQAIPSVPDCDHLLSVPLTCLSFPLGAMAGRGSLVSWRAFHGCDSAEELPRVSPRFLRAWHPPPVSARMPTRRWAPGTQCITKCEHTRPKPGELAFRKGDVVTILEACENKSWYRVKHHTSGQEGLLAAGALREREALSADPKLSLMPWFHGKISGQEAVQQLQPPEDGLFLVRESARHPGDYVLCVSFGRDVIHYRVLHRDGHLTIDEAVFFCNLMDMVEHYSKDKGAICTKLVRPKRKHGTKSAEEELARAGWLLNLQHLTLGAQIGEGEFGAVLQGEYLGQKVAVKNIKCDVTAQAFLDETAVMTKMQHENLVRLLGVILHQGLYIVMEHVSKGNLVNFLRTRGRALVNTAQLLQFSLHVAEGMEYLESKKLVHRDLAARNILVSEDLVAKVSDFGLAKAERKGLDSSRLPVKWTAPEALKHGKFTSKSDVWSFGVLLWEVFSYGRAPYPKMPPRAVQAPCTSS

SEQ ID NO: 912222 - protein, 163 aa, Homo sapiens
MRFLAATFLLLALSTAAQAEPVQFKDCGSVDGVIKEVNVSPCPTQPCQLSKGQSYSVNVTFTSNIQSKSSKAVVHGILMGVPVPFPIPEPDGCKSGINCPIQKDKTYSYLNKLPVKSEYPSIKLVVEWQLQDDKNQSLFCWEIPSTDRFSSLKCLIEFGASGQ

SEQ ID NO: 912223 - protein, 163 aa, Homo sapiens; identical to SEQ ID NO: 912222

SEQ ID NO: 912224 - protein, 116 aa, Homo sapiens
VGPNSFQRSVNVTFTSNIQSKSSKAVVHGILMGVPVPFPIPEPDGCKSGINCPIQKDKTYSYLNKLPVKSEYPSIKLVVEWQLQDDKNQSLFCWEIPSTDRFSSLKCLIEFGASGQ

SEQ ID NO: 912225 - protein, 84 aa, Homo sapiens
TIPRSMVLRIVVHGQKLVHVNDMSRTCGVDVPESEAEIVEPDVRLGSRVRGPTVPWKEMTYPGCCSTFTQRLCRGSKKYQLRDR

SEQ ID NO: 912226 - protein, 338 aa, Homo sapiens
MRFLAATFLLLALSTAAQAEPVQFKDCGSSRMEIKKKEKKPQTTPNRTNRAKNKRTTTKTPTPTKNKRKTTKPKTNNRERDGPGEPEDPYAESREEEERGERETNPKTERRRRTGRSEPKKERRTQGEEAKETLQKETEKEESKEELSSREEQERAQRGDSKQLGRRGPRYQRNSRTTEQQSRATEEVRPVARQKPKGGDEIGGDDERNESDLTESNRIGSETKRDQGETESCRTKERGEDPVKEAVGDGGEEEEATRRGVREGKEAALGKAEEEATAGGVEELRRGAHEVGQGAEGGRGEAQKRERVPREGGAAEKREGVVVVESRSRAGEGSRRED

SEQ ID NO: 912227 - protein, 163 aa, Homo sapiens; identical to SEQ ID NO: 912222

SEQ ID NO: 912228 - protein, 163 aa, Homo sapiens; identical to SEQ ID NO: 912222

SEQ ID NO: 912229 - protein, 150 aa, Homo sapiens
MRFLAATFLLLALSTAAQAEPVQFKDCGSVDGVIKEVNVSPCPTQPCQLSKGQSYSVNVTFTSNIQSKSSKAVVHGILMGVPVPFPIPEPDGCKSGINCPIQKDKTYSYLNKLPVKSEYPSIKLVVEWQLQDDKSFSSLKCLIEFGASGQ

SEQ ID NO: 912230 - protein, 163 aa, Homo sapiens; identical to SEQ ID NO: 912222

SEQ ID NO: 912231 - protein, 163 aa, Homo sapiens; identical to SEQ ID NO: 912222

SEQ ID NO: 912232 - protein, 116 aa, Homo sapiens; identical to SEQ ID NO: 912224

SEQ ID NO: 912233 - protein, 163 aa, Homo sapiens
MRFLAATFLLLALSTAAQAEPVQFKDCGSVDGVIKEVNVSPCPTQPCQLSKGQSYSVNVTFTSNIQSKSSKAVVHGILMGVPVPFPIPEPDGCKSGINCPIQKDKTYSYLNKLPVKSEYPSIKLVVEWQLQDDKNQSLFCWEIPSTDLLISKCLIEYVSLWSG

SEQ ID NO: 912234 - protein, 163 aa, Homo sapiens; identical to SEQ ID NO: 912222

SEQ ID NO: 912235 - protein, 153 aa, Homo sapiens
MRFLAATFLLLALSTAAQAEPVQFKDCGSVDGVIKEVNVSPCPTQPCQLSKGQSYSVNVTFTSNIQSKSSKAVVHGILMGVPVPFPIPEPDGCKSGINCPIQKDKTYSYLNKLPVKSEYPSIKLVVEWQLQDDKNQSLFCWEIPSTDHKSIWG

SEQ ID NO: 912236 - protein, 76 aa, Homo sapiens
IRGGLGKDGDSGDLLSATGDKAHLGTSLLGALEVIYRPNPRCMHAPGGWFSVVVSCLFFCLILGGFIKCSTWLADV

SEQ ID NO: 912237 - protein, 230 aa, Homo sapiens
SGRVPGAASWERCAGSREPSAPGWGRGRSGAERERARPSPESRRLPSRRSAGPPAAAPAMEQDNSPRKIQFTVPLLEPHLDPEAAEQIRRRRPTPATLVLTSDQSSPEIDEDRIPNPHLKSTLAMSPRQRKKMTRITPTMKELQMMVEHHLGQQQQGEEPEGAAESTGTQESRPPGIPDTEVESRLGTSGTAKKTAECIPKTHERGSKEPSTKEPSTHIPPLDSKGANSV

SEQ ID NO: 912238 - protein, 230 aa, Homo sapiens; identical to SEQ ID NO: 912237

SEQ ID NO: 912239 - protein, 1563 aa, Homo sapiens
GPGGARGAEGGGGSGARSARRWVRPRSPSLQPRLGPMDALCGSGELGSKFWDSNLSVHTENPDLTPCFQNSLLAWVPCIYLWVALPCYLLYLRHHCRGYIILSHLSKLKMVLGVLLWCVSWADLFYSFHGLVHGRAPAPVFFVTPLVVGVTMLLATLLIQYERLQGVQSSGVLIIFWFLCVVCAIVPFRSKILLAKAEGEISDPFRFTTFYIHFALVLSALILACFREKPPFFSAKNVDPNPYPETSAGFLSRLFFWWFTKMAIYGYRHPLEEKDLWSLKEEDRSQMVVQQLLEAWRKQEKQTARHKASAAPGKNASGEDEVLLGARPRPRKPSFLKALLATFGSSFLISACFKLIQDLLSFINPQLLSILIRFISNPMAPSWWGFLVAGLMFLCSMMQSLILQHYYHYIFVTGVKFRTGIMGVIYRKALVITNSVKRASTVGEIVNLMSVDAQRFMDLAPFLNLLWSAPLQIILAIYFLWQNLGPSVLAGVAFMVLLIPLNGAVAVKMRAFQVKQMKLKDSRIKLMSEILNGIKVLKLYAWEPSFLKQVEGIRQGELQLLRTAAYLHTTTTFTWMCSPFLVTLITLWVYVYVDPNNVLDAEKAFVSVSLFNILRLPLNMLPQLISNLTQASVSLKRIQQFLSQEELDPQSVERKTISPGYAITIHSGTFTWAQDLPPTLHSLDIQVPKGALVAVVGPVGCGKSSLVSALLGEMEKLEGKVHMKGSVAYVPQQAWIQNCTLQENVLFGKALNPKRYQQTLEACALLADLEMLPGGDQTEIGEKGINLSGGQRQRVSLARAVYSDADIFLLDDPLSAVDSHVAKHIFDHVIGPEGVLAGKTRVLVTHGISFLPQTDFIIVLADGQVSEMGPYPALLQRNGSFANFLCNYAPDEDQGHLEDSWTALEGAEDKEALLIEDTLSNHTDLTDNDPVTYVVQKQFMRQLSALSSDGEGQGRPVPRRHLGPSEKVQVTEAKADGALTQEEKAAIGTVELSVFWDYAKAVGLCTTLAICLLYVGQSAAAIGANVWLSAWTNDAMADSRQNNTSLRLGVYAALGILQGFLVMLAAMAMAAGGIQAARVLHQALLHNKIRSPQSFFDTTPSGRILNCFSKDIYVVDEVLAPVILMLLNSFFNAISTLVVIMASTPLFTVVILPLAVLYTLVQRFYAATSRQLKRLESVSRSPIYSHFSETVTGASVIRAYNRSRDFEIISDTKVDANQRSCYPYIISNRWLSIGVEFVGNCVVLFAALFAVIGRSSLNPGLVGLSVSYSLQVTFALNWMIRMMSDLESNIVAVERVKEYSKTETEAPWVVEGSRPPEGWPPRGEVEFRNYSVRYRPGLDLVLRDLSLHVHGGEKVGIVGRTGAGKSSMTLCLFRILEAAKGEIRIDGLNVADIGLHDLRSQLTIIPQDPILFSGTLRMNLDPFGSYSEEDIWWALELSHLHTFVSSQPAGLDFQCSEGGENLSVGQRQLVCLARALLRKSRILVLDEATAAIDLETDNLIQATIRTQFDTCTVLTIAHRLNTIMDYTRVLVLDKGVVAEFDSPANLIAARGIFYGMARDAGLA

SEQ ID NO: 912240 - protein, 1352 aa, Homo sapiens
MAIYGYRHPLEEKDLWSLKEEDRSQMVVQQLLEAWRKQEKQTARHKASAAPGKNASGEDEVLLGARPRPRKPSFLKALLATFGSSFLISACFKLIQDLLSFINPQLLSILIRFISNPMAPSWWGFLVAGLMFLCSMMQSLILQHYYHYIFVTGVKFRTGIMGVIYRKALVITNSVKRASTVGEIVNLMSVDAQRFMDLAPFLNLLWSAPLQIILAIYFLWQNLGPSVLAGVAFMVLLIPLNGAVAVKMRAFQVKQMKLKDSRIKLMSEILNGIKVLKLYAWEPSFLKQVEGIRQGELQLLRTAAYLHTTTTFTWMCSPFLVTLITLWVYVYVDPNNVLDAEKAFVSVSLFNILRLPLNMLPQLISNLTQASVSLKRIQQFLSQEELDPQSVERKTISPGYAITIHSGTFTWAQDLPPTLHSLDIQVPKGALVAVVGPVGCGKSSLVSALLGEMEKLEGKVHMKGSVAYVPQQAWIQNCTLQENVLFGKALNPKRYQQTLEACALLADLEMLPGGDQTEIGEKGINLSGGQRQRVSLARAVYSDADIFLLDDPLSAVDSHVAKHIFDHVIGPEGVLAGKTRVLVTHGISFLPQTDFIIVLADGQVSEMGPYPALLQRNGSFANFLCNYAPDEDQGHLEDSWTALEGAEDKEALLIEDTLSNHTDLTDNDPVTYVVQKQFMRQLSALSSDGEGQGRPVPRRHLGPSEKVQVTEAKADGALTQEEKAAIGTVELSVFWDYAKAVGLCTTLAICLLYVGQSAAAIGANVWLSAWTNDAMADSRQNNTSLRLGVYAALGILQGFLVMLAAMAMAAGGIQAARVLHQALLHNKIRSPQSFFDTTPSGRILNCFSKDIYVVDEVLAPVILMLLNSFFNAISTLVVIMASTPLFTVVILPLAVLYTLVQRFYAATSRQLKRLESVSRSPIYSHFSETVTGASVIRAYNRSRDFEIISDTKVDANQRSCYPYIISNRSEAASLAPCSSRNSQQALWCSGSLSLLSPKQKTGPCPAPAPFPPHLIPHRWLSIGVEFVGNCVVLFAALFAVIGRSSLNPGLVGLSVSYSLQVTFALNWMIRMMSDLESNIVAVERVKEYSKTETEAPWVVEGSRPPEGWPPRGEVEFRNYSVRYRPGLDLVLRDLSLHVHGGEKVGIVGRTGAGKSSMTLCLFRILEAAKGEIRIDGLNVADIGLHDLRSQLTIIPQDPILFSGTLRMNLDPFGSYSEEDIWWALELSHLHTFVSSQPAGLDFQCSEGGENLSVGQRQLVCLARALLRKSRILVLDEATAAIDLETDNLIQATIRTQFDTCTVLTIAHRLNTIMDYTRVLVLDKGVVAEFDSPANLIAARGIFYGMARDAGLA

SEQ ID NO: 912241 - protein, 1563 aa, Homo sapiens; identical to SEQ ID NO: 912239

SEQ ID NO: 912242 - protein, 153 aa, Homo sapiens
SRCDPICPSCQAPWVVEGSRPPEGWPPRGEVEFRNYSVRYRPGLDLVLRDLSLHVHGGEKVGIVGRTGAGKSSMTLCLFRILEAAKGEIRIDGLNVADIGLHDLRSQLTIIPQVGAWHGLATLTPHCLGASSSPASCLAAQFLHGYPCSCLCI

SEQ ID NO: 912243 - protein, 1563 aa, Homo sapiens; identical to SEQ ID NO: 912239

SEQ ID NO: 912244 - protein, 1256 aa, Homo sapiens
MGAALPTSLLSPPHSILIRFISNPMAPSWWGFLVAGLMFLCSMMQSLILQHYYHYIFVTGVKFRTGIMGVIYRKVSWSRAQGKGWPWAACKRLQPSPPTTVYLQALVITNSVKRASTVGEIVNLMSVDAQRFMDLAPFLNLLWSAPLQIILAIYFLWQNLGPSVLAGVAFMVLLIPLNGAVAVKMRAFQVKQMKLKDSRIKLMSEILNGIKVLKLYAWEPSFLKQVEGIRQGELQLLRTAAYLHTTTTFTWMCSPFLVRLGTGLGPCLQGSGCPGMARAHWTLPWHHLHAAQVTLITLWVYVYVDPNNVLDAEKAFVSVSLFNILRLPLNMLPQLISNLTQASVSLKRIQQFLSQEELDPQSVERKTISPGYAITIHSGTFTWAQDLPPTLHSLDIQVPKGALVAVVGPVGCGKSSLVSALLGEMEKLEGKVHMKGSVAYVPQQAWIQNCTLQEACALLADLEMLPGGDQTEIGEKGINLSGGQRQRVSLARAVYSDADIFLLDDPLSAVDSHVAKHIFDHVIGPEGVLAGKTRVLVTHGISFLPQTDFIIVLADGQVSEMGPYPALLQRNGSFANFLCNYAPDEDQGHLEDSWTALEGAEDKEALLIEDTLSNHTDLTDNDPVTYVVQKQFMRQLSALSSDGEGQGRPVPRRHLGPSEKVQVTEAKADGALTQEEKAAIGTVELSVFWDYAKAVGLCTTLAICLLYVGQSAAAIGANVWLSAWTNDAMADSRQNNTSLRLGVYAALGILQGFLVMLAAMAMAAGGIQAARVLHQALLHNKIRSPQSFFDTTPSGRILNCFSKDIYVVDEVLAPVILMLLNSFFNAISTLVVIMASTPLFTVVILPLAVLYTLVQRFYAATSRQLKRLESVSRSPIYSHFSETVTGASVIRAYNRSRDFEIISDTKVDANQRSCYPYIISNRWLSIGVEFVGNCVVLFAALFAVIGRSSLNPGLVGLSVSYSLQVTFALNWMIRMMSDLESNIVAVERVKEYSKTETEAPWVVEGSRPPEGWPPRGEVEFRNYSVRYRPGLDLVLRDLSLHVHGGEKVGIVGRTGAGKSSMTLCLFRILEAAKGEIRIDGLNVADIGLHDLRSQLTIIPQDPILFSGTLRMNLDPFGSYSEEDIWWALELSHLHTFVSSQPAGLDFQCSEGGENLSVGQRQLVCLARALLRKSRILVLDEATAAIDLETDNLIQATIRTQFDTCTVLTIAHRLNTIMDYTRVLVLDKGVVAEFDSPANLIAARGIFYGMARDAGLA

SEQ ID NO: 912245 - protein, 1284 aa, Homo sapiens
MGAALPTSLLSPPHSILIRFISNPMAPSWWGFLVAGLMFLCSMMQSLILQHYYHYIFVTGVKFRTGIMGVIYRKVSWSRAQGKGWPWAACKRLQPSPPTTVYLQALVITNSVKRASTVGEIVNLMSVDAQRFMDLAPFLNLLWSAPLQIILAIYFLWQNLGPSVLAGVAFMVLLIPLNGAVAVKMRAFQVKQMKLKDSRIKLMSEILNGIKVLKLYAWEPSFLKQVEGIRQGELQLLRTAAYLHTTTTFTWMCSPFLVRLGTGLGPCLQGSGCPGMARAHWTLPWHHLHAAQVTLITLWVYVYVDPNNVLDAEKAFVSVSLFNILRLPLNMLPQLISNLTQASVSLKRIQQFLSQEELDPQSVERKTISPGYAITIHSGTFTWAQDLPPTLHSLDIQVPKGALVAVVGPVGCGKSSLVSALLGEMEKLEGKVHMKGSVAYVPQQAWIQNCTLQENVLFGKALNPKRYQQTLEACALLADLEMLPGGDQTEIGEKGINLSGGQRQRVSLARAVYSDADIFLLDDPLSAVDSHVAKHIFDHVIGPEGVLAGKVGLPEAKGAKTRVLVTHGISFLPQTDFIIVLADGQVSEMGPYPALLQRNGSFANFLCNYAPDEDQGHLEDSWTALEGAEDKEALLIEDTLSNHTDLTDNDPVTYVVQKQFMRQLSALSSDGEGQGRPVPRRHLGPSEKVQVTEAKADGALTQEEKAAIGTVELSVFWDYAKAVGLCTTLAICLLYVGQSAAAIGANVWLSAWTNDAMADSRQNNTSLRLGVYAALGILQGFLVMLAAMAMAAGGIQAARVLHQALLHNKIRSPQSFFDTTPSGRILNCFSKDIYVVDEVLAPVILMLLNSFFNAISTLVVIMASTPLFTVVILPLAVLYTLVQRFYAATSRQLKRLESVSRSPIYSHFSETVTGASVIRAYNRSRDFEIISDTKVDANQRSCYPYIISNRWLSIGVEFVGNCVVLFAALFAVIGRSSLNPGLVGLSVSYSLQVTFALNWMIRMMSDLESNIVAVERVKEYSKTETEAPWVVEGSRPPEGWPPRGEVEFRNYSVRYRPGLDLVLRDLSLHVHGGEKVGIVGRTGAGKSSMTLCLFRILEAAKGEIRIDGLNVADIGLHDLRSQLTIIPQDPILFSGTLRMNLDPFGSYSEEDIWWALELSHLHTFVSSQPAGLDFQCSEGGENLSVGQRQLVCLARALLRKSRILVLDEATAAIDLETDNLIQATIRTQFDTCTVLTIAHRLNTIMDYTRVLVLDKGVVAEFDSPANLIAARGIFYGMARDAGLA

SEQ ID NO: 912246 - protein, 1609 aa, Homo sapiens
MASLENSHLGRQLLICVLSPPHLSSTPPLSLMEHLSSYSHLPQGSPILCGAATALNCSLCPQDSNLSVHTENPDLTPCFQNSLLAWVPCIYLWVALPCYLLYLRHHCRGYIILSHLSKLKMVLGVLLWCVSWADLFYSFHGLVHGRAPAPVFFVTPLVVGVTMLLATLLIQYERLQGVQSSGVLIIFWFLCVVCAIVPFRSKILLAKAEGEISDPFRFTTFYIHFALVLSALILACFREKPPFFSAKNVDPNPYPETSAGFLSRLFFWWFTKMAIYGYRHPLEEKDLWSLKEEDRSQMVVQQLLEAWRKQEKQTARHKASAAPGKNASGEDEVLLGARPRPRKPSFLKALLATFGSSFLISACFKLIQDLLSFINPQLLSILIRFISNPMAPSWWGFLVAGLMFLCSMMQSLILQHYYHYIFVTGVKFRTGIMGVIYRKALVITNSVKRASTVGEIVNLMSVDAQRFMDLAPFLNLLWSAPLQIILAIYFLWQNLGPSVLAGVAFMVLLIPLNGAVAVKMRAFQVKQMKLKDSRIKLMSEILNGIKVLKLYAWEPSFLKQVEGIRQGELQLLRTAAYLHTTTTFTWMCSPFLVRLGTGLGPCLQGSGCPGMARAHWTLPWHHLHAAQVTLITLWVYVYVDPNNVLDAEKAFVSVSLFNILRLPLNMLPQLISNLTQASVSLKRIQQFLSQEELDPQSVERKTISPGYAITIHSGTFTWAQDLPPTLHSLDIQVPKGALVAVVGPVGCGKSSLVSALLGEMEKLEGKVHMKGSVAYVPQQAWIQNCTLQENVLFGKALNPKRYQQTLEACALLADLEMLPGGDQTEIGEKGINLSGGQRQRVSLARAVYSDADIFLLDDPLSAVDSHVAKHIFDHVIGPEGVLAGKTRVLVTHGISFLPQTDFIIVLADGQVSEMGPYPALLQRNGSFANFLCNYAPDEDQGHLEDSWTALEGAEDKEALLIEDTLSNHTDLTDNDPVTYVVQKQFMRQLSALSSDGEGQGRPVPRRHLGPSEKVQVTEAKADGALTQEEKAAIGTVELSVFWDYAKAVGLCTTLAICLLYVGQSAAAIGANVWLSAWTNDAMADSRQNNTSLRLGVYAALGILQGFLVMLAAMAMAAGGIQAARVLHQALLHNKIRSPQSFFDTTPSGRILNCFSKDIYVVDEVLAPVILMLLNSFFNAISTLVVIMASTPLFTVVILPLAVLYTLVQRFYAATSRQLKRLESVSRSPIYSHFSETVTGASVIRAYNRSRDFEIISDTKVDANQRSCYPYIISNRWLSIGVEFVGNCVVLFAALFAVIGRSSLNPGLVGLSVSYSLQVTFALNWMIRMMSDLESNIVAVERVKEYSKTETEAPWVVEGSRPPEGWPPRGEVEFRNYSVRYRPGLDLVLRDLSLHVHGGEKVGIVGRTGAGKSSMTLCLFRILEAAKGEIRIDGLNVADIGLHDLRSQLTIIPQDPILFSGTLRMNLDPFGSYSEEDIWWALELSHLHTFVSSQPAGLDFQCSEGGENLSVGQRQLVCLARALLRKSRILVLDEATAAIDLETDNLIQATIRTQFDTCTVLTIAHRLNTIMDYTRVLVLDKGVVAEFDSPANLIAARGIFYGMARDAGLA

SEQ ID NO: 912247 - protein, 1474 aa, Homo sapiens
MAPHLAQVPHLSSLNQSSLVILPHLSESSEWGPGGPQVLPPAPEETDAPRDSAGQGLQAQAFPVLLTPLHSPTQGEISDPFRFTTFYIHFALVLSALILACFREKPPFFSAKNVDPNPYPETSAGFLSRLFFWWFTKMAIYGYRHPLEEKDLWSLKEEDRSQMVVQQLLEAWRKQEKQTARHKASAAPGKNASGEDEVLLGARPRPRKPSFLKALLATFGSSFLISACFKLIQDLLSFINPQLLSILIRFISNPMAPSWWGFLVAGLMFLCSMMQSLILQHYYHYIFVTGVKFRTGIMGVIYRKALVITNSVKRASTVGEIVNLMSVDAQRFMDLAPFLNLLWSAPLQIILAIYFLWQNLGPSVLAGVAFMVLLIPLNGAVAVKMRAFQVKQMKLKDSRIKLMSEILNGIKVLKLYAWEPSFLKQVEGIRQGELQLLRTAAYLHTTTTFTWMCSPFLVRLGTGLGPCLQGSGCPGMARLIGLYPDTTSTLLQVTLITLWVYVYVDPNNVLDAEKAFVSVSLFNILRLPLNMLPQLISNLTQASVSLKRIQQFLSQEELDPQSVERKTISPGYAITIHSGTFTWAQDLPPTLHSLDIQVPKGALVAVVGPVGCGKSSLVSALLGEMEKLEGKVHMKGSVAYVPQQAWIQNCTLQENVLFGKALNPKRYQQTLEACALLADLEMLPGGDQTEIGEKGINLSGGQRQRVSLARAVYSDADIFLLDDPLSAVDSHVAKHIFDHVIGPEGVLAGKTRVLVTHGISFLPQTDFIIVLADGQVSEMGPYPALLQRNGSFANFLCNYAPDEDQGHLEDSWTALEGAEDKEALLIEDTLSNHTDLTDNDPVTYVVQKQFMRQLSALSSDGEGQGRPVPRRHLGPSEKVQVTEAKADGALTQEEKAAIGTVELSVFWDYAKAVGLCTTLAICLLYVGQSAAAIGANVWLSAWTNDAMADSRQNNTSLRLGVYAALGILQGFLVMLAAMAMAAGGIQAARVLHQALLHNKIRSPQSFFDTTPSGRILNCFSKDIYVVDEVLAPVILMLLNSFFNAISTLVVIMASTPLFTVVILPLAVLYTLVQRFYAATSRQLKRLESVSRSPIYSHFSETVTGASVIRAYNRSRDFEIISDTKVDANQRSCYPYIISNRWLSIGVEFVGNCVVLFAALFAVIGRSSLNPGLVGLSVSYSLQVTFALNWMIRMMSDLESNIVAVERVKEYSKTETEAPWVVEGSRPPEGWPPRGEVEFRNYSVRYRPGLDLVLRDLSLHVHGGEKVGIVGRTGAGKSSMTLCLFRILEAAKGEIRIDGLNVADIGLHDLRSQLTIIPQDPILFSGTLRMNLDPFGSYSEEDIWWALELSHLHTFVSSQPAGLDFQCSEGGENLSVGQRQLVCLARALLRKSRILVLDEATAAIDLETDNLIQATIRTQFDTCTVLTIAHRLNTIMDYTRVLVLDKGVVAEFDSPANLIAARGIFYGMARDAGLA

SEQ ID NO: 912248 - protein, 446 aa, Homo sapiens
MYIFDSVDLGWGSGLCTLIKTPWYAKCGPWASCITILWELVRNEESQVPSPTSDYRIRRCILTRFSGKSYTYKVGETETKARWSLVKSALSLPKGVIRDYSPSWHACGLDPGPPGSSMGKDPMDGHMIQESELLPKPLRWGGEIAIRITQPFGQVTFALNWMIRMMSDLESNIVAVERVKEYSKTETEAPWVVEGSRPPEGWPPRGEVEFRNYSVRYRPGLDLVLRDLSLHVHGGEKVGIVGRTGAGKSSMTLCLFRILEAAKGEIRIDGLNVADIGLHDLRSQLTIIPQDPILFSGTLRMNLDPFGSYSEEDIWWALELSHLHTFVSSQPAGLDFQCSEGGENLSVGQRQLVCLARALLRKSRILVLDEATAAIDLETDNLIQATIRTQFDTCTVLTIAHRLNTIMDYTRVLVLDKGVVAEFDSPANLIAARGIFYGMARDAGLA

SEQ ID NO: 912249 - protein, 1275 aa, Homo sapiens
MGAALPTSLLSPPHSILIRFISNPMAPSWWGFLVAGLMFLCSMMQSLILQHYYHYIFVTGVKFRTGIMGVIYRKVSWSRAQGKGWPWAACKRLQPSPPTTVYLQALVITNSVKRASTVGEIVNLMSVDAQRFMDLAPFLNLLWSAPLQIILAIYFLWQNLGPSVLAGVAFMVLLIPLNGAVAVKMRAFQVKQMKLKDSRIKLMSEILNGIKVLKLYAWEPSFLKQVEGIRQGELQLLRTAAYLHTTTTFTWMCSPFLVRLGTGLGPCLQGSGCPGMARAHWTLPWHHLHAAQVTLITLWVYVYVDPNNVLDAEKAFVSVSLFNILRLPLNMLPQLISNLTQASVSLKRIQQFLSQEELDPQSVERKTISPGYAITIHSGTFTWAQDLPPTLHSLDIQVPKGALVAVVGPVGCGKSSLVSALLGEMEKLEGKVHMKGSVAYVPQQAWIQNCTLQENVLFGKALNPKRYQQTLEACALLADLEMLPGGDQTEIGEKGINLSGGQRQRVSLARAVYSDADIFLLDDPLSAVDSHVAKHIFDHVIGPEGVLAGKTRVLVTHGISFLPQTDFIIVLADGQVSEMGPYPALLQRNGSFANFLCNYAPDEDQGHLEDSWTALEGAEDKEALLIEDTLSNHTDLTDNDPVTYVVQKQFMRQLSALSSDGEGQGRPVPRRHLGPSEKVQVTEAKADGALTQEEKAAIGTVELSVFWDYAKAVGLCTTLAICLLYVGQSAAAIGANVWLSAWTNDAMADSRQNNTSLRLGVYAALGILQGFLVMLAAMAMAAGGIQAARVLHQALLHNKIRSPQSFFDTTPSGRILNCFSKDIYVVDEVLAPVILMLLNSFFNAISTLVVIMASTPLFTVVILPLAVLYTLVQRFYAATSRQLKRLESVSRSPIYSHFSETVTGASVIRAYNRSRDFEIISDTKVDANQRSCYPYIISNRWLSIGVEFVGNCVVLFAALFAVIGRSSLNPGLVGLSVSYSLQVTFALNWMIRMMSDLESNIVAVERVKEYSKTETEAPWVVEGSRPPEGWPPRGEVEFRNYSVRYRPGLDLVLRDLSLHVHGGEKVGIVGRTGAGKSSMTLCLFRILEAAKGEIRIDGLNVADIGLHDLRSQLTIIPQDPILFSGTLRMNLDPFGSYSEEDIWWALELSHLHTFVSSQPAGLDFQCSEGGENLSVGQRQLVCLARALLRKSRILVLDEATAAIDLETDNLIQATIRTQFDTCTVLTIAHRLNTIMDYTRVLVLDKGVVAEFDSPANLIAARGIFYGMARDAGLAK

SEQ ID NO: 912250 - protein, 985 aa, Homo sapiens
MGAALPTSLLSPPHSILIRFISNPMAPSWWGFLVAGLMFLCSMMQSLILQHYYHYIFVTGVKFRTGIMGVIYRKVSWSRAQGKGWPWAACKRLQPSPPTTVYLQALVITNSVKRASTVGEIVNLMSVDAQRFMDLAPFLNLLWSAPLQIILAIYFLWQNLGPSVLAGVAFMVLLIPLNGAVAVKMRAFQVKQMKLKDSRIKLMSEILNGIKVLKLYAWEPSFLKQVEGIRQGELQLLRTAAYLHTTTTFTWMCSPFLVRLGTGLGPCLQGSGCPGMARAHWTLPWHHLHAAQVTLITLWVYVYVDPNNVLDAEKAFVSVSLFNILRLPLNMLPQLISNLTQASVSLKRIQQFLSQEELDPQSVERKTISPGYAITIHSGTFTWAQDLPPTLHSLDIQVPKGALVAVVGPVGCGKSSLVSALLGEMEKLEGKVHMKGSVAYVPQQAWIQNCTLQENVLFGKALNPKRYQQTLEACALLADLEMLPGGDQTEIGEKGINLSGGQRQRVSLARAVYSDADIFLLDDPLSAVDSHVAKHIFDHVIGPEGVLAGKTRVLVTHGISFLPQTDFIIVLADGQVSEMGPYPALLQRNGSFANFLCNYAPDEDQGHLEDSWTALEGAEDKEALLIEDTLSNHTDLTDNDPVTYVVQKQFMRQLSALSSDGEGQGRPVPRRHLGPSEKVQVTEAKADGALTQEEKAAIGTVELSVFWDYAKAVGLCTTLAICLLYVGQSAAAIGANVWLSAWTNDAMADSRQNNTSLRLGVYAALGILQGFLVMLAAMAMAAGGIQAARVLHQALLHNKIRSPQSFFDTTPSGRILNCFSKDIYVVDEVLAPVILMLLNSFFNAISTLVVIMASTPLFTVVILPLAVLYTLVQRFYAATSRQLKRLESVSRSPIYSHFSETVTGASVIRAYNRSRDFEIISDTKVDANQRSCYPYIISNRSEAASLAPCSSRNSQQALWCSGSLSLLSPKQKTGPALPLPHFLLI

SEQ ID NO: 912251 - protein, 811 aa, Homo sapiens
MGAALPTSLLSPPHSILIRFISNPMAPSWWGFLVAGLMFLCSMMQSLILQHYYHYIFVTGVKFRTGIMGVIYRKVSWSRAQGKGWPWAACKRLQPSPPTTVYLQALVITNSVKRASTVGEIVNLMSVDAQRFMDLAPFLNLLWSAPLQIILAIYFLWQNLGPSVLAGVAFMVLLIPLNGAVAVKMRAFQVKQMKLKDSRIKLMSEILNGIKVLKLYAWEPSFLKQVEGIRQGELQLLRTAAYLHTTTTFTWMCSPFLVRLGTGLGPCLQGSGCPGMARAHWTLPWHHLHAAQVTLITLWVYVYVDPNNVLDAEKAFVSVSLFNILRLPLNMLPQLISNLTQASVSLKRIQQFLSQEELDPQSVERKTISPGYAITIHSGTFTWAQDLPPTLHSLDIQVPKGALVAVVGPVGCGKSSLVSALLGEMEKLEGKVHMKGSVAYVPQQAWIQNCTLQENVLFGKALNPKRYQQTLEACALLADLEMLPGGDQTEIGEKGINLSGGQRQRVSLARAVYSDADIFLLDDPLSAVDSHVAKHIFDHVIGPEGVLAGKVGLPEAKGAKTRVLVTHGISFLPQTDFIIVLADGQVSEMGPYPALLQRNGSFANFLCNYAPDEDQGHLEDSWTALEGAEDKEALLIEDTLSNHTDLTDNDPVTYVVQKQFMRQLSALSSDGEGQGRPVPRRHLGPSEKVQVTEAKADGALTQEEKAAIGTVELSVFWDYAKAVGLCTTLAICLLYVGQSAAAIGANVWLSAWTNDAMADSRQNNTSLRGDSGKICRVWDVQQQEGIQRRVPAVQESHFEHTGQGPNMKGAG

SEQ ID NO: 912252 - protein, 73 aa, Homo sapiens
DRRHVDRRHVDRRHVDNARIQNPEYKGGWKPRQIDNPDYKGTRSTQKLTSPVSRFPTECYLHTALFSNNDFMK

SEQ ID NO: 912253 - protein, 1613 aa, Homo sapiens
GPGGARGAEGGGGSGARSARRWVRPRSPSLQPRLGPMDALCGSGELGSKFWDSNLSVHTENPDLTPCFQNSLLAWVPCIYLWVALPCYLLYLRHHCRGYIILSHLSKLKMVLGVLLWCVSWADLFYSFHGLVHGRAPAPVFFVTPLVVGVTMLLATLLIQYERLQGVQSSGVLIIFWFLCVVCAIVPFRSKILLAKAEGEISDPFRFTTFYIHFALVLSALILACFREKPPFFSAKNVDPNPYPETSAGFLSRLFFWWFTKMAIYGYRHPLEEKDLWSLKEEDRSQMVVQQLLEAWRKQEKQTARHKASAAPGKNASGEDEVLLGARPRPRKPSFLKALLATFGSSFLISACFKLIQDLLSFINPQLLSILIRFISNPMAPSWWGFLVAGLMFLCSMMQSLILQHYYHYIFVTGVKFRTGIMGVIYRKALVITNSVKRASTVGEIVNLMSVDAQRFMDLAPFLNLLWSAPLQIILAIYFLWQNLGPSVLAGVAFMVLLIPLNGAVAVKMRAFQVKQMKLKDSRIKLMSEILNGIKVLKLYAWEPSFLKQVEGIRQGELQLLRTAAYLHTTTTFTWMCSPFLVTLITLWVYVYVDPNNVLDAEKAFVSVSLFNILRLPLNMLPQLISNLTQASVSLKRIQQFLSQEELDPQSVERKTISPGYAITIHSGTFTWAQDLPPTLHSLDIQVPKGALVAVVGPVGCGKSSLVSALLGEMEKLEGKVHMKGSVAYVPQQAWIQNCTLQENVLFGKALNPKRYQQTLEACALLADLEMLPGGDQTEIGEKGINLSGGQRQRVSLARAVYSDADIFLLDDPLSAVDSHVAKHIFDHVIGPEGVLAGKTRVLVTHGISFLPQTDFIIVLADGQVSEMGPYPALLQRNGSFANFLCNYAPDEDQGHLEDSWTALEGAEDKEALLIEDTLSNHTDLTDNDPVTYVVQKQFMRQLSALSSDGEGQGRPVPRRHLGPSEKVQVTEAKADGALTQEEKAAIGTVELSVFWDYAKAVGLCTTLAICLLYVGQSAAAIGANVWLSAWTNDAMADSRQNNTSLRLGVYAALGILQGFLVMLAAMAMAAGGIQAARVLHQALLHNKIRSPQSFFDTTPSGRILNCFSKDIYVVDEVLAPVILMLLNSFFNAISTLVVIMASTPLFTVVILPLAVLYTLVQRFYAATSRQLKRLESVSRSPIYSHFSETVTGASVIRAYNRSRDFEIISDTKVDANQRSCYPYIISNRSEAASLAPCSSRNSQQALWCSGSLSLLSPKQNNWPCPAPAPFPPHLIPHRWLSIGVEFVGNCVVLFAALFAVIGRSSLNPGLVGLSVSYSLQVTFALNWMIRMMSDLESNIVAVERVKEYSKTETEAPWVVEGSRPPEGWPPRGEVEFRNYSVRYRPGLDLVLRDLSLHVHGGEKVGIVGRTGAGKSSMTLCLFRILEAAKGEIRIDGLNVADIGLHDLRSQLTIIPQDPILFSGTLRMNLDPFGSYSEEDIWWALELSHLHTFVSSQPAGLDFQCSEGGENLSVGQRQLVCLARALLRKSRILVLDEATAAIDLETDNLIQATIRTQFDTCTVLTIAHRLNTIMDYTRVLVLDKGVVAEFDSPANLIAARGIFYGMARDAGLA

SEQ ID NO: 912254 - protein, 76 aa, Homo sapiens
GLWLLIGPKLPPSEATLYPQDPILFSGTLRMNLDPFGSYSEEDIWWALELSHLHTFVSSQPAGLDFQCSEGGENLR

SEQ ID NO: 912255 - protein, 102 aa, Homo sapiens
LSVWPTTIFCFLPIYTFQVNRPLFACWVLSVDFGNLSLCVIYPPVPPQNLGPSVLAGVAFMVLLIPLNGAVAVKMRAFQVGAVRGASSCLQHPAGCLGEGVH

SEQ ID NO: 912256 - protein, 1274 aa, Homo sapiens
MGAALPTSLLSPPHSILIRFISNPMAPSWWGFLVAGLMFLCSMMQSLILQHYYHYIFVTGVKFRTGIMGVIYRKVSWSRAQGKGWPWAACKRLQPSPPTTVYLQALVITNSVKRASTVGEIVNLMSVDAQRFMDLAPFLNLLWSAPLQIILAIYFLWQNLGPSVLAGVAFMVLLIPLNGAVAVKMRAFQVKQMKLKDSRIKLMSEILNGIKVLKLYAWEPSFLKQVEGIRQGELQLLRTAAYLHTTTTFTWMCSPFLVRLGTGLGPCLQGSGCPGMARAHWTLPWHHLHAAQVTLITLWVYVYVDPNNVLDAEKAFVSVSLFNILRLPLNMLPQLISNLTQASVSLKRIQQFLSQEELDPQSVERKTISPGYAITIHSGTFTWAQDLPPTLHSLDIQVPKGALVAVVGPVGCGKSSLVSALLGEMEKLEGKVHMKGSVAYVPQQAWIQNCTLQENVLFGKALNPKRYQQTLEACALLADLEMLPGGDQTEIGEKGINLSGGQRQRVSLARAVYSDADIFLLDDPLSAVDSHVAKHIFDHVIGPEGVLAGKTRVLVTHGISFLPQTDFIIVLADGQVSEMGPYPALLQRNGSFANFLCNYAPDEDQGHLEDSWTALEGAEDKEALLIEDTLSNHTDLTDNDPVTYVVQKQFMRQLSALSSDGEGQGRPVPRRHLGPSEKVQVTEAKADGALTQEEKAAIGTVELSVFWDYAKAVGLCTTLAICLLYVGQSAAAIGANVWLSAWTNDAMADSRQNNTSLRLGVYAALGILQGFLVMLAAMAMAAGGIQAARVLHQALLHNKIRSPQSFFDTTPSGRILNCFSKDIYVVDEVLAPVILMLLNSFFNAISTLVVIMASTPLFTVVILPLAVLYTLVQRFYAATSRQLKRLESVSRSPIYSHFSETVTGASVIRAYNRSRDFEIISDTKVDANQRSCYPYIISNRWLSIGVEFVGNCVVLFAALFAVIGRSSLNPGLVGLSVSYSLQVTFALNWMIRMMSDLESNIVAVERVKEYSKTETEAPWVVEGSRPPEGWPPRGEVEFRNYSVRYRPGLDLVLRDLSLHVHGGEKVGIVGRTGAGKSSMTLCLFRILEAAKGEIRIDGLNVADIGLHDLRSQLTIIPQDPILFSGTLRMNLDPFGSYSEEDIWWALELSHLHTFVSSQPAGLDFQCSEGGENLSVGQRQLVCLARALLRKSRILVLDEATAAIDLETDNLIQATIRTQFDTCTVLTIAHRLNTIMDYTRVLVLDKGVVAEFDSPANLIAARGIFYGMARDAGLA

SEQ ID NO: 912257 - protein, 1550 aa, Homo sapiens
MKKDSNLSVHTENPDLTPCFQNSLLAWVPCIYLWVALPCYLLYLRHHCRGYIILSHLSKLKMVLGVLLWCVSWADLFYSFHGLVHGRAPAPVFFVTPLVVGVTMLLATLLIQYERLQGVQSSGVLIIFWFLCVVCAIVPFRSKILLAKAEGEISDPFRFTTFYIHFALVLSALILACFREKPPFFSAKNVDPNPYPETSAGFLSRLFFWWFTKMAIYGYRHPLEEKDLWSLKEEDRSQMVVQQLLEAWRKQEKQTARHKASAAPGKNASGEDEVLLGARPRPRKPSFLKALLATFGSSFLISACFKLIQDLLSFINPQLLSILIRFISNPMAPSWWGFLVAGLMFLCSMMQSLILQHYYHYIFVTGVKFRTGIMGVIYRKALVITNSVKRASTVGEIVNLMSVDAQRFMDLAPFLNLLWSAPLQIILAIYFLWQNLGPSVLAGVAFMVLLIPLNGAVAVKMRAFQVKQMKLKDSRIKLMSEILNGIKVLKLYAWEPSFLKQVEGIRQGELQLLRTAAYLHTTTTFTWMCSPFLVRLGTGLGPCLQGSGCPGMARAHWTLPWHHLHAAQVTLITLWVYVYVDPNNVLDAEKAFVSVSLFNILRLPLNMLPQLISNLTQASVSLKRIQQFLSQEELDPQSVERKTISPGYAITIHSGTFTWAQDLPPTLHSLDIQVPKGALVAVVGPVGCGKSSLVSALLGEMEKLEGKVHMKGSVAYVPQQAWIQNCTLQENVLFGKALNPKRYQQTLEACALLADLEMLPGGDQTEIGEKGINLSGGQRQRVSLARAVYSDADIFLLDDPLSAVDSHVAKHIFDHVIGPEGVLAGKTRVLVTHGISFLPQTDFIIVLADGQVSEMGPYPALLQRNGSFANFLCNYAPDEDQGHLEDSWTALEGAEDKEALLIEDTLSNHTDLTDNDPVTYVVQKQFMRQLSALSSDGEGQGRPVPRRHLGPSEKVQVTEAKADGALTQEEKAAIGTVELSVFWDYAKAVGLCTTLAICLLYVGQSAAAIGANVWLSAWTNDAMADSRQNNTSLRLGVYAALGILQGFLVMLAAMAMAAGGIQAARVLHQALLHNKIRSPQSFFDTTPSGRILNCFSKDIYVVDEVLAPVILMLLNSFFNAISTLVVIMASTPLFTVVILPLAVLYTLVQRFYAATSRQLKRLESVSRSPIYSHFSETVTGASVIRAYNRSRDFEIISDTKVDANQRSCYPYIISNRWLSIGVEFVGNCVVLFAALFAVIGRSSLNPGLVGLSVSYSLQVTFALNWMIRMMSDLESNIVAVERVKEYSKTETEAPWVVEGSRPPEGWPPRGEVEFRNYSVRYRPGLDLVLRDLSLHVHGGEKVGIVGRTGAGKSSMTLCLFRILEAAKGEIRIDGLNVADIGLHDLRSQLTIIPQDPILFSGTLRMNLDPFGSYSEEDIWWALELSHLHTFVSSQPAGLDFQCSEGGENLSVGQRQLVCLARALLRKSRILVLDEATAAIDLETDNLIQATIRTQFDTCTVLTIAHRLNTIMDYTRVLVLDKGVVAEFDSPANLIAARGIFYGMARDAGLA

SEQ ID NO: 912258 - protein, 1636 aa, Homo sapiens
GSGRSAGCGGRRRLRRPLCPPLGPTALAFLAAAPRPHGRPVRFRGARLQVLEPSPLPDSPRPSPNIVKAKSDAPGKGISLGGRVLKMKKDSNLSVHTENPDLTPCFQNSLLAWVPCIYLWVALPCYLLYLRHHCRGYIILSHLSKLKMVLGVLLWCVSWADLFYSFHGLVHGRAPAPVFFVTPLVVGVTMLLATLLIQYERLQGVQSSGVLIIFWFLCVVCAIVPFRSKILLAKAEGEISDPFRFTTFYIHFALVLSALILACFREKPPFFSAKNVDPNPYPETSAGFLSRLFFWWFTKMAIYGYRHPLEEKDLWSLKEEDRSQMVVQQLLEAWRKQEKQTARHKASAAPGKNASGEDEVLLGARPRPRKPSFLKALLATFGSSFLISACFKLIQDLLSFINPQLLSILIRFISNPMAPSWWGFLVAGLMFLCSMMQSLILQHYYHYIFVTGVKFRTGIMGVIYRKALVITNSVKRASTVGEIVNLMSVDAQRFMDLAPFLNLLWSAPLQIILAIYFLWQNLGPSVLAGVAFMVLLIPLNGAVAVKMRAFQVKQMKLKDSRIKLMSEILNGIKVLKLYAWEPSFLKQVEGIRQGELQLLRTAAYLHTTTTFTWMCSPFLVRLGTGLGPCLQGSGCPGMARAHWTLPCHHLHAAQVTLITLWVYVYVDPNNVLDAEKAFVSVSLFNILRLPLNMLPQLISNLTQASVSLKRIQQFLSQEELDPQSVERKTISPGYAITIHSGTFTWAQDLPPTLHSLDIQVPKGALVAVVGPVGCGKSSLVSALLGEMEKLEGKVHMKGSVAYVPQQAWIQNCTLQENVLFGKALNPKRYQQTLEACALLADLEMLPGGDQTEIGEKGINLSGGQRQRVSLARAVYSDADIFLLDDPLSAVDSHVAKHIFDHVIGPEGVLAGKTRVLVTHGISFLPQTDFIIVLADGQVSEMGPYPALLQRNGSFANFLCNYAPDEDQGHLEDSWTALEGAEDKEALLIEDTLSNHTDLTDNDPVTYVVQKQFMRQLSALSSDGEGQGRPVPRRHLGPSEKVQVTEAKADGALTQEEKAAIGTVELSVFWDYAKAVGLCTTLAICLLYVGQSAAAIGANVWLSAWTNDAMADSRQNNTSLRLGVYAALGILQGFLVMLAAMAMAAGGIQAARVLHQALLHNKIRSPQSFFDTTPSGRILNCFSKDIYVVDEVLAPVILMLLNSFFNAISTLVVIMASTPLFTVVILPLAVLYTLVQRFYAATSRQLKRLESVSRSPIYSHFSETVTGASVIRAYNRSRDFEIISDTKVDANQRSCYPYIISNRWLSIGVEFVGNCVVLFAALFAVIGRSSLNPGLVGLSVSYSLQVTFALNWMIRMMSDLESNIVAVERVKEYSKTETEAPWVVEGSRPPEGWPPRGEVEFRNYSVRYRPGLDLVLRDLSLHVHGGEKVGIVGRTGAGKSSMTLCLFRILEAAKGEIRIDGLNVADIGLHDLRSQLTIIPQDPILFSGTLRMNLDPFGSYSEEDIWWALELSHLHTFVSSQPAGLDFQCSEGGENLSVGQRQLVCLARALLRKSRILVLDEATAAIDLETDNLIQATIRTQFDTCTVLTIAHRLNTIMDYTRVLVLDKGVVAEFDSPANLIAARGIFYGMARDAGLA

SEQ ID NO: 912259 - protein, 624 aa, Homo sapiens
MRQLSALSSDGEGQGRPVPRRHLGPSEKVQVTEAKADGALTQEEKAAIGTVELSVFWDYAKAVGLCTTLAICLLYVGQSAAAIGANVWLSAWTNDAMADSRQNNTSLRLGVYAALGILQGFLVMLAAMAMAAGGIQAARVLHQALLHNKIRSPQSFFDTTPSGRILNCFSKDIYVVDEVLAPVILMLLNSFFNAISTLVVIMASTPLFTVVILPLAVLYTLVQRFYAATSRQLKRLESVSRSPIYSHFSETVTGASVIRAYNRSRDFEIISDTKVDANQRSCYPYIISNRWLSIGVEFVGNCVVLFAALFAVIGRSSLNPGLVGLSVSYSLQVTFALNWMIRMMSDLESNIVAVERVKEYSKTETEAPWVVEGSRPPEGWPPRGEVEFRNYSVRYRPGLDLVLRDLSLHVHGGEKVGIVGRTGAGKSSMTLCLFRILEAAKGEIRIDGLNVADIGLHDLRSQLTIIPQDPILFSGTLRMNLDPFGSYSEEDIWWALELSHLHTFVSSQPAGLDFQCSEGGENLSVGQRQLVCLARALLRKSRILVLDEATAAIDLETDNLIQATIRTQFDTCTVLTIAHRLNTIMDYTRVLVLDKGVVAEFDSPANLIAARGIFYGMARDAGLA

SEQ ID NO: 912260 - protein, 487 aa, Homo sapiens
GPGGARGAEGGGGSGARSARRWVRPRSPSLQPRLGPMDALCGSGELGSKFWDSNLSVHTENPDLTPCFQNSLLAWVPCIYLWVALPCYLLYLRHHCRGYIILSHLSKLKMVLGVLLWCVSWADLFYSFHGLVHGRAPAPVFFVTPLVVGVTMLLATLLIQYERLQGVQSSGVLIIFWFLCVVCAIVPFRSKILLAKAEGEISDPFRFTTFYIHFALVLSALILACFREKPPFFSAKNVDPNPYPETSAGFLSRLFFWWFTKMAIYGYRHPLEEKDLWSLKEEDRSQMVVQQLLEAWRKQEKQTARHKASAAPGKNASGEDEVLLGARPRPRKPSFLKALLATFGSSFLISACFKLIQDLLSFINPQLLSILIRFISNPMAPSWWGFLVAGLMFLCSMMQSLILQHYYHYIFVTGVKFRTGIMGVIYRKALVITNSVKRASTVGEIVNLMSVDAQRFMDLAPFLNLLWSAPLQIILAIYFLWQVTLQP

SEQ ID NO: 912261 - protein, 1221 aa, Homo sapiens
MGAALPTSLLSPPHSILIRFISNPMAPSWWGFLVAGLMFLCSMMQSLILQHYYHYIFVTGVKFRTGIMGVIYRKVSWSRAQGKGWPWAACKRLQPSPPTTVYLQALVITNSVKRASTVGEIVNLMSVDAQRFMDLAPFLNLLWSAPLQIILAIYFLWQNLGPSVLAGVAFMVLLIPLNGAVAVKMRAFQVKQMKLKDSRIKLMSEILNGIKVLKLYAWEPSFLKQVEGIRQGELQLLRTAAYLHTTTTFTWMCSPFLVRLGTGLGPCLQGSGCPGMARAHWTLPWHHLHAAQVTLITLWVYVYVDPNNVLDAEKAFVSVSLFNILRLPLNMLPQLISNLTQASVSLKRIQQFLSQEELDPQSVERKTISPGYAITIHSGTFTWAQDLPPTLHSLDIQVPKGALVAVVGPVGCGKSSLVSALLGEMEKLEGKVHMKGSVAYVPQQAWIQNCTLQENVLFGKALNPKRYQQTLEACALLADLEMLPGGDQTEIGEKGINLSGGQRQRVSLARAVYSDADIFLLDDPLSAVDSHVAKHIFDHVIGPEGVLAGKTRVLVTHGISFLPQTDFIIVLADGQVSEMGPYPALLQRNGSFANFLCNYAPDEDQGHLEDSWTALEGAEDKEALLIEDTLSNHTDLTDNDPVTYVVQKQFMRQLSALSSDGEGQGRPVPRRHLGPSEKVQVTEAKADGALTQEEKAAIGTVELSVFWDYAKAVGLCTTLAICLLYVGQSAAAIGANVWLSAWTNDAMADSRQNNTSLRLGVYAALGILQGFLVMLAAMAMAAGGIQAARVLHQALLHNKIRSPQSFFDTTPSGRILNCFSKDIYVVDEVLAPVILMLLNSFFNAISTLVVIMASTPLFTVVILPLAVLYTLVQRFYAATSRQLKRLESVSRSPIYSHFSETVTGASVIRAYNRSRDFEIISDTKVDANQRSCYPYIISNRWLSIGVEFVGNCVVLFAALFAVIGRSSLNPGLVGLSVSYSLQVTFALNWMIRMMSDLESNIVAVERVKEYSKTETEAPWVVEGSRPPEGWPPRGEVEFRNYSVRYRPGLDLVLRDLSLHVHGGEKVGIVGRTGAGKSSMTLCLFRILEAAKGEIRIDGLNVADIGLHDLRSQLTIIPQDPILFSGTLRMNLDPFGSYSEEDIWWALELSHLHTFVSSQPAGLDFQCSEGGENLSVGQRQLVCLARALLRKSRILVLDEATAAIDLETDNLIQATIRMLERF

SEQ ID NO: 912262 - protein, 124 aa, Homo sapiens
MSSVPDKGCGRLDFQCSEGGENLSVGQRQLVCLARALLRKSRILVLDEATAAIDLETDNLIQATIRTQFDTCTVLTIAHRLNTIMDYTRVLVLDKGVVAEFDSPANLIAARGIFYGMARDAGLA

SEQ ID NO: 912263 - protein, 50 aa, Homo sapiens
MKLKDSRIKLMSEILNGIKVLKLYAWEPSFLKQVEGIRQGELQLLRTAAY

SEQ ID NO: 912264 - protein, 319 aa, Homo sapiens
MATKGGTVKAASGFNAMEDAQTLRKAMKGLGTDEDAIISVLAYRNTAQRQEIRTAYKSTIGRDLIDDLKSELSGNFEQVIVGMMTPTVLYDVQELRRAMKGAGTDEGCLIEILASRTPEEIRRISQTYQQQYGRSLEDDIRSDTSFMFQRVLVSLSAGGRDEGNYLDDALVRQDAQDLYEAGEKKWGTDEVKFLTVLCSRNRNHLLHVFDEYKRISQKDIEQSIKSETSGSFEDALLAIVKCMRNKSAYFAEKLYKSMKGLGTDDNTLIRVMVSRAEIDMLDIRAHFKRLYGKSLYSFIKGDTSGDYRKVLLVLCGGDD

SEQ ID NO: 912265 - protein, 184 aa, Homo sapiens
MATKGGTVKAASGFNAMEDAQTLRKAMKGLGTDEDAIISVLAYRNTAQRQEIRTAYKSTIGRDLIDDLKSELSGNFEQVIVGMMTPTVLYDVQELRRAMKGAGTDEGCLIEILASRTPEEIRRISQTYQQQYGRSLEDDIRSDTSFMFQRVLVSLSAVGGKKEVSRHCFSEHDPMILISIAQRI

SEQ ID NO: 912266 - protein, 319 aa, Homo sapiens; identical to SEQ ID NO: 912264

SEQ ID NO: 912267 - protein, 321 aa, Homo sapiens
MAMATKGGTVKAASGFNAMEDAQTLRKAMKGLGTDEDAIISVLAYRNTAQRQEIRTAYKSTIGRDLIDDLKSELSGNFEQVIVGMMTPTVLYDVQELRRAMKGAGTDEGCLIEILASRTPEEIRRISQTYQQQYGRSLEDDIRSDTSFMFQRVLVSLSAGGRDEGNYLDDALVRQDAQDLYEAGEKKWGTDEVKFLTVLCSRNRNHLLHVFDEYKRISQKDIEQSIKSETSGSFEDALLAIVKCMRNKSAYFAEKLYKSMKGLGTDDNTLIRVMVSRAEIDMLDIRAHFKRLYGKSLYSFIKGDTSGDYRKVLLVLCGGDD

SEQ ID NO: 912268 - protein, 237 aa, Homo sapiens
MMTPTVLYDVQELRRAMKGAGTDEGCLIEILASRTPEEIRRISQTYQQQYGRSLEDDIRSDTSFMFQRVLVSLSAGGRDEGNYLDDALVRQDAQDLYEAGEKKWGTDEVKFLTVLCSRNRNHLLHVFDEYKRISQKDIEQSIKSETSGSFEDALLAIVKCMRNKSAYFAEKLYKSMKGLGTDDNTLIRVMVSRAEIDMLDIRAHFKRLYGKSLYSFIKGDTSGDYRKVLLVLCGGDD

SEQ ID NO: 912269 - protein, 336 aa, Homo sapiens
MATKGGTVKAASGFNAMEDAQTLRKAMKGLGTDEDAIISVLAYRNTAQRQEIRTAYKSTIGRDLIDDLKSELSGNFEQVIVGMMTPTVLYDVQELRRAMKGAGTDEGCLIEILASRTPEEIRRISQTYQQQYGRSLEDDIRSDTSFMFQRVLVSLSAGGRDEGNYLDDALVRQDAQDLYEAGEKKWGTDEVKFLTVLCSRNRNHLLHVFDEYKRISQKDIEQSIKSETSGSFEDALLAIVKCMRNKSAYFAEKLYKSMKGLGTDDNTLIRVMVSRAEIDMLDIRAHFKRLYGKSLYSFIKGDTSGDYRKVLLVLCGGDDFIFLHCYYHYLRMLISN

SEQ ID NO: 912270 - protein, 246 aa, Homo sapiens
SCRFGTIVGMMTPTVLYDVQELRRAMKGAGTDEGCLIEILASRTPEEIRRISQTYQQQYGRSLEDDIRSDTSFMFQRVLVSLSAGGRDEGNYLDDALVRQDAQDLYEAGEKKWGTDEVKFLTVLCSRNRNHLLHVFDEYKRISQKDIEQSIKSETSGSFEDALLAIVKCMRNKSAYFAEKLYKSMKGLGTDDNTLIRVMVSRAEIDMLDIRAHFKRLYGKSLYSFIKGDTSGDYRKVLLVLCGGDD

SEQ ID NO: 912271 - protein, 319 aa, Homo sapiens; identical to SEQ ID NO: 912264

SEQ ID NO: 912272 - protein, 255 aa, Homo sapiens
LRGSQSLEREEEEPARRILLGGDSVLDQSHGMATKGGTVKAASGFNAMEDAQTLRKAMKGLGTDEDAIISVLAYRNTAQRQEIRTAYKSTIGRGGRDEGNYLDDALVRQDAQDLYEAGEKKWGTDEVKFLTVLCSRNRNHLLHVFDEYKRISQKDIEQSIKSETSGSFEDALLAIVKCMRNKSAYFAEKLYKSMKGLGTDDNTLIRVMVSRAEIDMLDIRAHFKRLYGKSLYSFIKGDTSGDYRKVLLVLCGGDD

SEQ ID NO: 912273 - protein, 164 aa, Homo sapiens
MLSGNSIATYWWRYLEWSTRDDLYEAGEKKWGTDEVKFLTVLCSRNRNHLLHVFDEYKRISQKDIEQSIKSETSGSFEDALLAIVKCMRNKSAYFAEKLYKSMKGLGTDDNTLIRVMVSRAEIDMLDIRAHFKRLYGKSLYSFIKGDTSGDYRKVLLVLCGGDD

SEQ ID NO: 912274 - protein, 133 aa, Homo sapiens
DHRTKYFFFFFFEIESRSVAQAGVQWRDLVSLQPPPPGFKQFSCSFEDALLAIVKCMRNKSAYFAEKLYKSMKGLGTDDNTLIRVMVSRAEIDMLDIRAHFKRLYGKSLYSFIKGDTSGDYRKVLLVLCGGDD

SEQ ID NO: 912275 - protein, 214 aa, Homo sapiens
MATKGGTVKAASGFNAMEDAQTLRKAMKGLGTDEDAIISVLAYRNTAQRQEIRTAYKSTIGRDLIDDLKSELSGNFEQVIVGMMTPTVLYDVQELRRAMKGAGTDEGCLIEILASRTPEEIRRISQTYQQQYGRSLEDDIRSDTSFMFQRVLVSLSAGGRDEGNYLDDALVRQDAQDLYEAGEKKWGTDEVKFLTVLCSRNRNHLLHVLPGDPL

SEQ ID NO: 912276 - protein, 190 aa, Homo sapiens
MATKGGTVKAASGFNAMEDAQTLRKAMKGLGTDEDAIISVLAYRNTAQRQEIRTAYKSTIGRDLIDDLKSELSGNFEQVIVGMMTPTVLYDVQELRRAMKGAGTDEGCLIEILASRTPEEIRRISQTYQQQYGRSLEDDIRSDTSFMFQRVLVSLSAGGRDEGNYLDDALVRQDAQTCMSCERFGSSRYP

SEQ ID NO: 912277 - protein, 132 aa, Homo sapiens
MATKGGTVKAASGFNAMEDAQTLRKAMKGLGTDEDAIISVLAYRNTAQRQEIRTAYKSTIGRDLIDDLKSELSGNFEQVIVGMMTPTVLYDVQELRRAMKGAGTDEGCLIEILASRTPEEIRRISQTYQQRT

SEQ ID NO: 912278 - protein, 132 aa, Homo sapiens; identical to SEQ ID NO: 912277

SEQ ID NO: 912279 - protein, 319 aa, Homo sapiens; identical to SEQ ID NO: 912264

SEQ ID NO: 912280 - protein, 241 aa, Homo sapiens
MATKGGTVKAASGFNAMEDAQTLRKAMKGLGTDEDAIISVLAYRNTAQRQEIRTAYKSTIGRDLIDDLKSELSGNFEQVIVGMMTPTVLYDVQELRRAMKGAGTDEGCLIEILASRTPEEIRRISQTYQQQYGRSLEDDIRSDTSFMFQRVLVSLSAGGRDEGNYLDDALVRQDAQDLYEAGEKKWGTDEVKFLTVLCSRNRNHLLHVFDEYKKDNTFARDNTFARDTPSRGIHVAEGLHV

SEQ ID NO: 912281 - protein, 319 aa, Homo sapiens; identical to SEQ ID NO: 912264

SEQ ID NO: 912282 - protein, 319 aa, Homo sapiens; identical to SEQ ID NO: 912264

SEQ ID NO: 912283 - protein, 319 aa, Homo sapiens; identical to SEQ ID NO: 912264

SEQ ID NO: 912284 - protein, 173 aa, Homo sapiens [sequence omitted]

SEQ ID NO: 912285 - protein, 224 aa, Homo sapiens
MATKGGTVKAASGFNAMEDAQTLRKAMKGLGTDEDAIISVLAYRNTAQRQEIRTAYKSTIGRGGRDEGNYLDDALVRQDAQDLYEAGEKKWGTDEVKFLTVLCSRNRNHLLHVFDEYKRISQKDIEQSIKSETSGSFEDALLAIVKCMRNKSAYFAEKLYKSMKGLGTDDNTLIRVMVSRAEIDMLDIRAHFKRLYGKSLYSFIKGDTSGDYRKVLLVLCGGDD

SEQ ID NO: 912286 - protein, 177 aa, Homo sapiens [sequence omitted]

SEQ ID NO: 912287 - protein, 278 aa, Homo sapiens
MATKGGTVKAASGFNAMEDAQTLRKAMKGLGTDEDAIISVLAYRNTAQRQEIRTAYKSTIGRDLIDDLKSELSGNFEQVIVGMMTPTVLYDVQELRRAMKGAGTDEGCLIEILASRTPEEIRRISQTYQQQYGRSLEDDIRSDTSFMFQRVLVSLSAGGRDEGNYLDDALVRQDAQDLYEAGEKKWGTDEVKFLTVLCSRNRNHLLHVFDEYKRISQKDIEQSIKSETSGSFEDALLAIVKCMRNKSAYFAEKLYKSMKGDTSGDYRKVLLVLCGGDD

SEQ ID NO: 912288 - protein, 241 aa, Homo sapiens; identical to SEQ ID NO: 912280

SEQ ID NO: 912289 - protein, 183 aa, Homo sapiens
MATKGGTVKAASGFNAMEDAQTLRKAMKGLGTDEDAIISVLAYRNTAQRQEIRTAYKSTIGRDLIDDLKSELSGNFEQVIVGMMTPTVLYDVQELRRAMKGAGTDEGCLIEILASRTPEEIRRISQTYQQQYGRSLEDDIRSDTSFMFQRVLVSLSASDGRDRMEIICPMLSLYHHDVTRPPS

SEQ ID NO: 912290 - protein, 121 aa, Homo sapiens
SALRGCGAPGKRDPKNPTAPTLRGQERGWRYWGHCPIRAGGEAGGPGGPGEQARVEGGPAGGRGLPLRELLARPSRPGAPGALPLERDFPVSWAEEQPGTWAQSPPHSGADPSRIRPAVWP

SEQ ID NO: 912291 - protein, 816 aa, Homo sapiens
MSGEAWQLQLGAHRRLPRLSEAGAAAMLRGGRRGQLGWHSWAAGPGSLLAWLILASAGAAPCPDACCPHGSSGLRCTRDGALDSLHHLPGAENLTELYIENQQHLQHLELRDLRGLGELRNLTIVKSGLRFVAPDAFHFTPRLSRLNLSFNALESLSWKTVQGLSLQELVLSGNPLHCSCALRWLQRWEEEGLGGVPEQKLQCHGQGPLAHMPNASCGVPTLKVQVPNASVDVGDDVLLRCQVEGRGLEQAGWILTELEQSATVMKSGGLPSLGLTLANVTSDLNRKNVTCWAENDVGRAEVSVQVNVSFPASVQLHTAVEMHHWCIPFSVDGQPAPSLRWLFNGSVLNETSFIFTEFLEPAANETVRHGCLRLNQPTHVNNGNYTLLAANPFGQASASIMAAFMDNPFEFNPEDPIPDTNSTSGDPVEKKDETPFGVSVAVGLAVFACLFLSTLLLVLNKCGRRNKFGINRPAVLAPEDGLAMSLHFMTLGGSSLSPTEGKGSGLQGHIIENPQYFSDACVHHIKRRDIVLKWELGEGAFGKVFLAECHNLLPEQDKMLVAVKALKEASESARQDFQREAELLTMLQHQHIVRFFGVCTEGRPLLMVFEYMRHGDLNRFLRSHGPDAKLLAGGEDVAPGPLGLGQLLAVASQVAAGMVYLAGLHFVHRDLATRNCLVGQGLVVKIGDFGMSRDIYSTDYYRVGGRTMLPIRWMPPESILYRKFTTESDVWSFGVVLWEIFTYGKQPWYQLSNTEAIDCITQGRELERPRACPPEVYAIMRGCWQREPQQRHSIKDVHARLQALAQAPPVYLDVLG

SEQ ID NO: 912292 - protein, 506 aa, Homo sapiens
GPTDMAAVLQQVLERTELNKLPKSVQNKLEKFLADRQSEIDGLKGRHEKFKVESEQQYFEIEKRLSHSQERLVNETRECQSLRLELEKLNNQLKALTEKNKELEIAQDRNIAIQSQFTRTKEELEAEKRDLIRTNERLSQELEYLTEDVKRLNEKLKESNTTKGELQLKLDELQASDVSVKYREKRLEKKRNCSGLQGHIIENPQYFSDACVHHIKRRDIVLKWELGEGAFGKVFLAECHNLLPEQDKMLVAVKALKEASESARQDFQREAELLTMLQHQHIVRFFGVCTEGRPLLMVFEYMRHGDLNRFLRSHGPDAKLLAGGEDVAPGPLGLGQLLAVASQVAAGMVYLAGLHFVHRDLATRNCLVGQGLVVKIGDFGMSRDIYSTDYYRVGGRTMLPIRWMPPESILYRKFTTESDVWSFGVVLWEIFTYGKQPWYQLSNTEAIDCITQGRELERPRACPPEVYAIMRGCWQREPQQRHSIKDVHARLQALAQAPPVYLDVLG

SEQ ID NO: 912293 - protein, 439 aa, Homo sapiens
MPKGKKAKGKKVAPAPAVVKKQEAKKVVNPLFEKRPKNFGIDTNSTSGDPVEKKDETPFGVSVAVGLAVFACLFLSTLLLVLNKCGRRNKFGINRPAVLAPEDGLAMSLHFMTLGGSSLSPTEGKGSGLQGHIIENPQYFSDACVHHIKRRDIVLKWELGEGAFGKVFLAECHNLLPEQDKMLVAVKALKEASESARQDFQREAELLTMLQHQHIVRFFGVCTEGRPLLMVFEYMRHGDLNRFLRSHGPDAKLLAGGEDVAPGPLGLGQLLAVASQVAAGMVYLAGLHFVHRDLATRNCLVGQGLVVKIGDFGMSRDIYSTDYYRVGGRTMLPIRWMPPESILYRKFTTESDVWSFGVVLWEIFTYGKQPWYQLSNTEAIDCITQGRELERPRACPPEVYAIMRGCWQREPQQRHSIKDVHARLQALAQAPPVYLDVLG

SEQ ID NO: 912294 - protein, 597 aa, Homo sapiens
NILESTMNGQLDLSGKLIVKAQLGEDIRRIPIHNEDITYDELVLMMQRVFRGKLLSNDEVTIKYKDEDGDLITIFDSSDLSFAIQCSRILKLTLFVNGQPRPLESSQVKYLRRELIELRNKVNRLLDSLEPPGEPGPSTNIPENDTVDGREEKSASDSSGKQSTQVMAASMSAFDPLKNQDEINKNVMSAFGLTDDQVFDTNSTSGDPVEKKDETPFGVSVAVGLAVFACLFLSTLLLVLNKCGRRNKFGINRPAVLAPEDGLAMSLHFMTLGGSSLSPTEGKGSGLQGHIIENPQYFSDACVHHIKRRDIVLKWELGEGAFGKVFLAECHNLLPEQDKMLVAVKALKEASESARQDFQREAELLTMLQHQHIVRFFGVCTEGRPLLMVFEYMRHGDLNRFLRSHGPDAKLLAGGEDVAPGPLGLGQLLAVASQVAAGMVYLAGLHFVHRDLATRNCLVGQGLVVKIGDFGMSRDIYSTDYYRVGGRTMLPIRWMPPESILYRKFTTESDVWSFGVVLWEIFTYGKQPWYQLSNTEAIDCITQGRELERPRACPPEVYAIMRGCWQREPQQRHSIKDVHARLQALAQAPPVYLDVLG

SEQ ID NO: 912295 - protein, 120 aa, Homo sapiens
MGTGKGWGKLPGVTSPGLQVIEEGGGRSSPAVEFWGHSQLYHPLALGRPGWPGVPTLKVQVPNASVDVGDDVLLRCQVEGRGLEQAGWILTELEQSATVMVRRPSLAAPKRSRQSTGDKD

SEQ ID NO: 912296 - protein, 207 aa, Homo sapiens
MPITRMRMRPWLEMQINSNQIPGLIWINKEEMIFQIPWKHAAKHGWDINKDACLFRSWAIHTGRYKAGEKEPDPKTWKANFRCAMNSLPDIEEVKDQSRNKGSSAVRVYRMLPPLTKNQRKERKSKSSRDAKSKAKRKSCGDSSPDTFSDGLSSSTLPDDHSSYTVPGYMQDLEVEQALTPALSPCAVSSTLPRLAHPSGSCAGQHQ

SEQ ID NO: 912297 - protein, 207 aa, Homo sapiens; identical to SEQ ID NO: 912296

SEQ ID NO: 912298 - protein, 207 aa, Homo sapiens; identical to SEQ ID NO: 912296

SEQ ID NO: 912299 - protein, 207 aa, Homo sapiens; identical to SEQ ID NO: 912296

SEQ ID NO: 912300 - protein, 180 aa, Homo sapiens
MPITRMRMRPWLEMQINSNQIPGLIWINKEEMIFQIPWKHAAKHGWDINKDACLFRSWAIHTDIEEVKDQSRNKGSSAVRVYRMLPPLTKNQRKERKSKSSRDAKSKAKRKSCGDSSPDTFSDGLSSSTLPDDHSSYTVPGYMQDLEVEQALTPALSPCAVSSTLPRLAHPSGSCAGQHQ

SEQ ID NO: 912301 - protein, 207 aa, Homo sapiens; identical to SEQ ID NO: 912296

SEQ ID NO: 912302 - protein, 207 aa, Homo sapiens; identical to SEQ ID NO: 912296

SEQ ID NO: 912303 - protein, 207 aa, Homo sapiens; identical to SEQ ID NO: 912296

SEQ ID NO: 912304 - protein, 116 aa, Homo sapiens
SSSTLPDDHSSYTVPGYMQDLEVEQALTPGELVQVWQETPQVSGMTLSLGGMVLAHGGPLVQAAGLVGGRSMSCKLRKHTTLTCGFCCSPALSPCAVSSTLPRLAHPSGSCAGQHQ

SEQ ID NO: 912305 - protein, 207 aa, Homo sapiens; identical to SEQ ID NO: 912296

SEQ ID NO: 912306 - protein, 207 aa, Homo sapiens; identical to SEQ ID NO: 912296

SEQ ID NO: 912307 - protein, 123 aa, Homo sapiens
MNSLPDIEEVKDQSRNKGSSAVRVYRMLPPLTKNQRKERKSKSSRDAKSKAKRKSCGDSSPDTFSDGLSSSTLPDDHSSYTVPGYMQDLEVEQALTPALSPCAVSSTLPRLAHPSGSCAGQHQ

SEQ ID NO: 912308 - protein, 284 aa, Homo sapiens
MPITRMRMRPWLEMQINSNQIPGLIWINKEEMIFQIPWKHAAKHGWDINKDACLFRSWAIHTGRYKAGEKEPDPKTWKANFRCAMNSLPDIEEVKDQSRNKGSSAVRVYRMLPPLTKNQRKERKSKSSRDAKSKAKRKSCGDSSPDTFSDGLSSSTLPDDHSSYTVPGYMQDLEVEQALTPATTDEDEEGKLPEDIMKLLEQSEWQPTNVDGKGYLLNEPGVQPTSVYGDFSCKEEPEIDSPGGDIGLSLQRVFTDLKNMDATWLDSLLTPVRLPSIQAIPCAP

SEQ ID NO: 912309 - protein, 207 aa, Homo sapiens; identical to SEQ ID NO: 912296

SEQ ID NO: 912310 - protein, 207 aa, Homo sapiens; identical to SEQ ID NO: 912296

SEQ ID NO: 912311 - protein, 253 aa, Homo sapiens
SPTLAPSYIPGYPHYHGLLLAELGTGRLQTTSGPRSPVLILRNHGLVSVGESVEEAFYYIHNLVVACEIQVRTLASAGGPDNLVLLNPEKYKAKSRSPGSPVGEGTGSPPKWQIGEQEFEALMRMLDNLGYRTGYPYRYPALREKSKKYSDVEVPASVTGYSFASDGDSGTCSPLRHSFQKQQREKTRWLNSGRGDEASEEGQNGSSPKSKTKVWTNITHDHVKPLLQSLSSGVCVPSCITNCLVCAYLTVHS

SEQ ID NO: 912312 - protein, 483 aa, Homo sapiens
MHHIAFHDPVISCFQLALVLDDFQSSEPMVSEGPPLLVPGLWGSALSSAYLMTQIQLGFPDGGFPSVMTLTSSINWSLCGCILLPWRLCWVTQIRCGHWFSPLCDVQCMTRCEDKLNRLDAMSLIVVIILTFQLFLILQWTKEDGHRTSTSAVPNLFVPLNTNPKEVQEMRNKIREQNLQDIKTAGPQSQVLCGVVMDRSLVQVRAQSVSDFSGWWLCDRLLQSYSEIERVTLLGKYSRQPVTFVKTFMMRNGSGTFLLSSRRSEHAEGCVHPSGHAPCNACICEGGTYTTSFGAQIRPGFSSVLCKALGEGGFRDSVFWYILLSATKCCLGCRGVGACKCGAHLHTFLQNDSTLWHIEDNCVSSYLLKTNMPPNALTPDSAGVDDCWICPAVVLVSCSVSARPAIITATLTVDSCPCCMLLASSILCSQLIFHRLGLVCSGDSVYCFRMHLSLTVRKLSKGSSLQSRPLVPLNLSLLERESW

SEQ ID NO: 912313 - protein, 1014 aa, Homo sapiens
MHHIAFHDPVISCFQLALVLDDFQSSEPMVSEGPPLLVPGLWGSALSSAYLMTQIQLGFPDGGFPSVMTLTSSINWSLCGCILLPWRLCWVTQIRCGHWFSPLCDVQCMTRCEDKLNRLDAMSLIVVIILTFQLFLILQWTKEDGHRTSTSAVPNLFVPLNTNPKEVQEMRNKIREQNLQDIKTAGPQSQVLCGVVMDRSLVQGELVTASKAIIEKEYQPHVIVSTTGPNPFTTLTDRELEEYRREVERKQKGSEENLDEAREQKEKSPPDQPAVPHPPPSTPIKLEEGELWVAAAAYCGRVHGSCALWRNVAGVVLTATRKCVLASAPGRDTFSPPILLLSWVTPGKTDLYVSCDQVGRPASGVGTHHGCWCPRCPLLAHSSCCVVMQMPPSEVPSAVWATRRLPLSHRVSVVCDPGCLSLGLVHPCLSVKPVALPFFFCNLMAVTECIDSLLVLFFSLWLRHKQETDALESTCYPSKYRAASALHRCPALCLILLLLCCLLSFVFCLFENKNRSPPFLYPVPWRPSWKWFSHLSAVLPSAAAGTSTHLGAMEHSGPQEFLPPAFEGLFGLLGGRVLPHWIRCKCSLGSDRVGFCHLPCGVRLPWTFAEAGPKEVGRGADIGPSYSSVMFTQMMAALQSECPGAASVLASATPCPAERAPSPQGERRLCAHSPFPVLMKRGLESAWGSWQGGGASSFPKVKHWEFGAWASCAAPNHSADSPGPDVWLRFLNTKQLVVPNLSVAGNFVGRLRMDRAGARVSARKAPPGCVLRAAVLLHRWPLLMLGGVFAPTPCLTGHLFPFNYTSSLNGFVLLDVDVTNVLWELCTIFYWLFWGRPGVVDPNLDLISVLLVHALRVTGQTSRHIMKAGRRSFSRPQLVLQSVFPAGGPRPGTELVLSAHCPPEGAKNYPETESVFYDISSIQPYSESRPYFKFLVLVKICESKIKWQFRVWGSPISSCPLRSGQEPLIPSLTSPTRTLCRSRLLEMTVMLPPLSQLSPICPLMNLQKHSASQC

SEQ ID NO: 912314 - protein, 253 aa, Homo sapiens; identical to SEQ ID NO: 912311

SEQ ID NO: 912315 - protein, 338 aa, Homo sapiens
SPTLAPSYIPGYPHYHGLLLAELGTGRLQTTSGPRSPVLILRNHGLVSVGESVEEAFYYIHNLVVACEIQVRTLASAGGPDNLVLLNPEKYKAKSRSPGSPVGEGTGSPPKWQIGEQEFEALMRMLDNLGYRTGYPYRYPALREKSKKYSDVEVPASVTGYSFASDGDSGTCSPLRHSFQKQQREKTRWLNSGRGDEASEEGQNGSSPKSKTKVWTNITHDHVKPLLQSLSSGVCVPSCITNCLWTKEDGHRTSTSAVPNLFVPLNTNPKEVQEMRNKIREQNLQDIKTAGPQSQVLCGVVMDRSLVQVRAQSVSDFSGWWLCDRLLQSYSEIERVTL

SEQ ID NO: 912316 - protein, 483 aa, Homo sapiens; identical to SEQ ID NO: 912312

SEQ ID NO: 912317 - protein, 253 aa, Homo sapiens; identical to SEQ ID NO: 912311

SEQ ID NO: 912318 - protein, 253 aa, Homo sapiens; identical to SEQ ID NO: 912311

SEQ ID NO: 912319 - protein, 253 aa, Homo sapiens; identical to SEQ ID NO: 912311

SEQ ID NO: 912320 - protein, 253 aa, Homo sapiens; identical to SEQ ID NO: 912311

SEQ ID NO: 912321 - protein, 253 aa, Homo sapiens; identical to SEQ ID NO: 912311

SEQ ID NO: 912322 - protein, 253 aa, Homo sapiens; identical to SEQ ID NO: 912311

SEQ ID NO: 912323 - protein, 253 aa, Homo sapiens; identical to SEQ ID NO: 912311

SEQ ID NO: 912324 - protein, 114 aa, Homo sapiens [sequence omitted]

SEQ ID NO: 912325 - protein, 253 aa, Homo sapiens; identical to SEQ ID NO: 912311

SEQ ID NO: 912326 - protein, 355 aa, Homo sapiens
MLDNLGYRTGYPYRYPALREKSKKYSDVEVPASVTGYSFASDGDSGTCSPLRHSFQKQQREKTRWLNSGRGDEASEEGQNGSSPKSKTKWTKEDGHRTSTSAVPNLFVPLNTNPKEVQEMRNKIREQNLQDIKTAGPQSQVLCGVVMDRSLVQGELVTASKAIIEKEYQPHVIVSTTGPNPFTTLTDRELEEYRREVERKQKGSEENLDEAREQKEKSPPDQPAVPHPPPSTPIKLEEDLVPEPTTGDDSDAATFKPTLPDLSPDEPSEALGFPMLEKEEEAHRPPSPTEAPTEASPEPAPDPAPVAEEAAPSAVEEGAAADPGSDGSPGKSPSKKKKKFRTPSFLKKSKKKSDS

SEQ ID NO: 912327 - protein, 594 aa, Homo sapiens
MHHIAFHDPVISCFQLALVLDDFQSSEPMVSEGPPLLVPGLWGSALSSAYLMTQIQLGFPDGGFPSVMTLTSSINWSLCGCILLPWRLCWVTQIRCGHWFSPLCDVQCMTRCEDKLNRLDAMSLIVVIILTFQLFLILQWTKEDGHRTSTSAVPNLFVPLNTNPKEVQEMRNKIREQNLQDIKTAGPQSQVLCGVVMDRSLVQGELVTASKAIIEKEYQPHVIVSTTGPNPFTTLTDRELEEYRREVERKQKGSEENLDEAREQKEKSPPDQPAVPHPPPSTPIKLEEGELWVAAAAYCGRVHGSCALWRNVAGVVLTATRKCVLASAPGRDTFSPPILLLSWVTPGKTDLYVSCDQVGRPASGVGTHHGCWCPRCPLLAHSSCCVVMQMPPSEVPSAVWATRRLPLSHRVSVVCDPGCLSLGLVHPCLSVKPVALPFFFCNLMAVTECIDSLLVLFFSLWLRHKQETDALESTCYPNLVPEPTTGDDSDAATFKPTLPDLSPDEPSEALGFPMLEKEEEAHRPPSPTEAPTEASPEPAPDPAPVAEEAAPSAVEEGAAADPGSDGSPGKSPSKKKKKFRTPSFLKKSKKKSDS

SEQ ID NO: 912328 - protein, 253 aa, Homo sapiens; identical to SEQ ID NO: 912311

SEQ ID NO: 912329 - protein, 253 aa, Homo sapiens; identical to SEQ ID NO: 912311

SEQ ID NO: 912330 - protein, 253 aa, Homo sapiens; identical to SEQ ID NO: 912311

SEQ ID NO: 912331 - protein, 253 aa, Homo sapiens; identical to SEQ ID NO: 912311

SEQ ID NO: 912332 - protein, 253 aa, Homo sapiens; identical to SEQ ID NO: 912311

SEQ ID NO: 912333 - protein, 253 aa, Homo sapiens; identical to SEQ ID NO: 912311

SEQ ID NO: 912334 - protein, 135 aa, Homo sapiens
SPTLAPSYIPGYPHYHGLLLAELGTGRLQTTSGPRSPVLILRNHGLVSVGESVEEAFYYIHNLVVACEIQVRTLASAGGPDNLVLLNPEKYKAKSRSPGSPVGEGTGSPPKWQIGEQEFEALMRMLDNLKNGATT

SEQ ID NO: 912335 - protein, 143 aa, Homo sapiens [sequence omitted]

SEQ ID NO: 912336 - protein, 212 aa, Homo sapiens
GHRRKRSQSHGGPGPPHWLRPGQSRHSPAAVGPRAAAPARARSPCYALSNSPRYRVMCCCSRRRCLPLPPPVVPRLLRRASRWQPRAGPREQGPGCSAPSPPRRVPVQPPPAAGDAATSGLSISRGLAAELHPKVGAHLSRQGPGAAREGDAQVEPRRAGARNPGAGAAARAAVAAGNSFGDVRGSGGGGGERSGLPFAAARAWEIVPLSAV

SEQ ID NO: 912337 - protein, 858 aa, Homo sapiens
MFTLAEVASLNDIQPTYRILKPWWDVFMDYLAVVMLMVAIFAGTMQLTKDQVVCLPVLPSPVNSKAHTPPGNAEVTTNIPKMEAATNQDQDGRTTNDISFGTSAVTPDIPLRATYPRTDFALPNQEAKKEKKDPTGRKTNLDFQQYVFINQMCYHLALPWYSKYFPYLALIHTIILMVSSNFWFKYPKTCSKVEHFVSILGKCFESPWTTKALSETACEDSEENKQRITGAQTLPKHVSTSSDEGSPSASTPMINKTGFKFSAEKPVIEVPSMTILDKKDGEQAKALFEKVRKFRAHVEDSDLIYKLYVVQTVIKTAKFIFILCYTANFVNAISFEHVCKPKVEHLIGYEVFECTHNMAYMLKKLLISYISIICVYGFICLYTLFWLFRIPLKEYSFEKVREESSFSDIPDVKNDFAFLLHMVDQYDQLYSKRFGVFLSEVSENKLREISLNHEWTFEKLRQHISRNAQDKQELHLFMLSGVPDAVFDLTDLDVLKLELIPEAKIPAKISQMTNLQELHLCHCPAKVEQTAFSFLRDHLRCLHVKFTDVAEIPAWVYLLKNLRELYLIGNLNSENNKMIGLESLRELRHLKILHVKSNLTKVPSNITDVAPHLTKLVIHNDGTKLLVLNSLKKMMNVAELELQNCELERIPHAIFSLSNLQELDLKSNNIRTIEEIISFQHLKRLTCLKLWHNKIVTIPPSITHVKNLESLYFSNNKLESLPVAVFSLQKLRCLDVSYNNISMIPIEIGLLQNLQHLHITGNKVDILPKQLFKCIKLRTLNLGQNCITSLPEKVGQLSQLTQLELKGNCLDRLPAQLGQCRMLKKSGLVVEDHLFDTLPLEVKEALNQDINIPFANGI

SEQ ID NO: 912338 - protein, 858 aa, Homo sapiens; identical to SEQ ID NO: 912337

SEQ ID NO: 912339 - protein, 858 aa, Homo sapiens; identical to SEQ ID NO: 912337

SEQ ID NO: 912340 - protein, 858 aa, Homo sapiens; identical to SEQ ID NO: 912337

SEQ ID NO: 912341 - protein, 747 aa, Homo sapiens
MFTLAEVASLNDIQPTYRILKPWWDVFMDYLAVVMLMVAIFAGTMQLTKDQVVCLPVLPSPVNSKAHTPPGNAEVTTNIPKMEAATNQDQDGRTTNDISFGTSAVTPDIPLRATYPRTDFALPNQEAKKEKKDPTGRKTNLDFQQYVFINQMCYHLALPWYSKYFPYLALIHTIILMVSSNFWFKYPKTCSKVEHFVSILGKCFESPWTTKALSETACEDSEENKQRITGAQTLPKHVSTSSDEGSPSASTPMINKTGFKFSAEKPVIEVPSMTILDKKDGEQAKALFEKVRKFRAHVEDSDLIYKLYVVQTVIKTAKFIFILCYTANFVNAISFEHVCKPKVEHLIGYEVFECTHNMAYMLKKLLISYISIICVYGFICLYTLFWLFRIPLKEYSFEKVREESSFSDIPDVKNDFAFLLHMVDQYDQLYSKRFGVFLSEVSENKLREISLNHEWTFEKLRQHISRNAQDKQELHLFMLSGVPDAVFDLTDLDVLKLELIPEAKIPAKISQMTNLQELHLCHCPAKVEQTAFSFLRDHLRCLHVKFTDVAEIPAWVYLLKNLRELYLIGNLNSENNKMIGLESLRELRHLKILHVKSNLTKVPSNITDVAPHLTKLVIHNDGTKLLVLNSLKKMMNVAELELQNCELERIPHAIFSLSNLQELDLKSNNIRTIEEIISFQHLKRLTCLKLWHNKIVTIPPSITHVKNLESLYFSNNKLESLPVAVFSLQKLRCLDVSYNNISMFVGF

SEQ ID NO: 912342 - protein, 140 aa, Homo sapiens
GHRRKRSQSHGGPGPPHWLRPGQSRHSPAAVGPRAAAPARARSPCYALSNSPRYRVMCCCSRRRCLPLPPPVVPRLLRRASRWQPRAGPREQGPGCSAPSPPRRVPVQPPPAAGDAATSGLSISRGLAAELHPKEVHGCL

SEQ ID NO: 912343 - protein, 65 aa, Homo sapiens
VGSWERDFCSNPVQGLEKEENWGWLPGGPAPPVTGGLIGAFSFPSPFTRGYPLQINEKAPERGTE

SEQ ID NO: 912344 - protein, 858 aa, Homo sapiens; identical to SEQ ID NO: 912337

SEQ ID NO: 912345 - protein, 858 aa, Homo sapiens; identical to SEQ ID NO: 912337

SEQ ID NO: 912346 - protein, 867 aa, Homo sapiens
MFTLAEVASLNDIQPTYRILKPWWDVFMDYLAVVMLMVAIFAGTMQLTKDQVVCLPVLPSPVNSKAHTPPGNAEVTTNIPKMEAATNQDQDGRTTNDISFGTSAVTPDIPLRATYPRTDFALPNQEAKKEKKDPTGRKTNLDFQQYVFINQMCYHLALPWYSKYFPYLALIHTIILMVSSNFWFKYPKTCSKVEHFVSILGKCFESPWTTKALSETACEDSEENKQRITGAQTLPKHVSTSSDEGSPSASTPMINKTGFKFSAEKPVIEVPSMTILDKKDGEQAKALFEKVRKFRAHVEDSDLIYKLYVVQTVIKTAKFIFILCYTANFVNAISFEHVCKPKVEHLIGYEVFECTHNMAYMLKKLLISYISIICVYGFICLYTLFWLFRIPLKEYSFEKVREESSFSDIPDVKNDFAFLLHMVDQYDQLYSKRFGVFLSEVSENKLREISLNHEWTFEKLRQHISRNAQDKQELHLFMLSGVPDAVFDLTDLDVLKLELIPEAKIPAKISQMTNLQELHLCHCPAKVEQTAFSFLRDHLRCLHVKFTDVAEIPAWVYLLKNLRELYLIGNLNSENNKMIGLESLRELRHLKILHVKSNLTKVPSNITDVAPHLTKLVIHNDGTKLLVLNSLKKMMNVAELELQNCELERIPHAIFSLSNLQELDLKSNNIRTIEEIISFQHLKRLTCLKLWHNKIVTIPPSITHVKNLESLYFSNNKLESLPVAVFSLQKLRCLDVSYNNISMIPIEIGLLQNLQHLHITGNKVDILPKQLFKCIKLRTLNLGQNCITSLPEKVGQLSQLTQLELKGNCLDRLPAQLGQCRMLKKSGLVVEDHLFDTLPLEVKEALNQDINIPFASFKIKQRGCIEG

SEQ ID NO: 912347 - protein, 681 aa, Homo sapiens
MFTLAEVASLNDIQPTYRILKPWWDVFMDYLAVVMLMVAIFAGTMQLTKDQVVCLPVLPSPVNSKAHTPPGNAEVTTNIPKMEAATNQDQDGRTTNDISFGTSAVTPDIPLRATYPRTDFALPNQEAKKEKKDPTGRKTNLDFQQYVFINQMCYHLALPWYSKYFPYLALIHTIILMVSSNFWFKYPKTCSKVEHFVSILGKCFESPWTTKALSETACEDSEENKQRITGAQTLPKHVSTSSDEGSPSASTPMINKTGFKFSAEKPVIEVPSMTILDKKDGEQAKALFEKVRKFRAHVEDSDLIYKLYVVQTVIKTAKFIFILCYTANFVNAISFEHVCKPKVEHLIGYEVFECTHNMAYMLKKLLISYISIICVYGFICLYTLFWLFRIPLKEYSFEKVREESSFSDIPDVKNDFAFLLHMVDQYDQLYSKRFGVFLSEVSENKLREISLNHEWTFEKLRQHISRNAQDKQELHLFMLSGVPDAVFDLTDLDVLKLELIPEAKIPAKISQMTNLQELHLCHCPAKVEQTAFSFLRDHLRCLHVKFTDVAEIPAWVYLLKNLRELYLIGNLNSENNKMIGLESLRELRHLKILHVKSNLTKVPSNITDVLVPIRHELNPHHNGGSRNRIAPFIGFYNIERNSKNNTQMEILEQCGCFLAAGIRIGIIYSEKSSDISFKHGI

SEQ ID NO: 912348 - protein, 292 aa, Homo sapiens; identical to SEQ ID NO: 818048

SEQ ID NO: 912349 - protein, 295 aa, Homo sapiens
MLGAWAVEGTAVALLRLLLLLLPPAIRGPGLGVAGVAGAAGAGLPESVIWAVNAGGEAHVDVHGIHFRKDPLEGRVGRASDYGMKLPILRSNPEDQILYQTERYNEETFGYEVPIKEEGDYVLVLKFAEVYFAQSQQKVFDVRLNGHVVVKDLDIFDRVGHSTAHDEIIPMSIRKGKLSVQGEVSTFTGKLYIEFVKRGTNDNSQGTVHSDIMVWDTWIDVPKLQPHPGLEKKEEEEEEEEYDEGSNLKKQTNKNRVQSGPRTPNPYASDNSSLMFPILVAFGVFIPTLFCLCRL

SEQ ID NO: 912350 - protein, 233 aa, Homo sapiens
MLGAWAVEGTAVALLRLLLLLLPPAIRGPGLGVAGVAGAAGAGLPESVIWAVNAGGEAHVDVHGIHFRKDPLEGRVGRASDYGMKLPILRSNPEDQILYQTERYNEETFGYEVPIKEEGDYVLVLKFAEVYFAQSQQKVFDVRLNGHVVVKDLDIFDRVGHSTAHDEIIPMSIRKGKLSVQGEVSTFTGKLYIEFVKGYYDNPKVCALYIMAGTVDAESSFQPSSASAGCENK

SEQ ID NO: 912351 - protein, 292 aa, Homo sapiens; identical to SEQ ID NO: 818048

SEQ ID NO: 912352 - protein, 217 aa, Homo sapiens
MLGAWAVEGTAVALLRLLLLLLPPAIRGPGLGVAGVAGAAGAGLPESVIWAVNAGGEAHVDVHGIHFRKDPLEGRVGRASDYGMKLPILRSNPEDQILYQTERYNEETFGYEVPIKEEGDYVLVLKFAEVYFAQSQQKMYQSFSLIRDWRRKKRKKKKKNMMKGLISKNRPIRTGCSQAPAHPTPMPRTTAASCFPSWWPSESSFQPSSASAGCENK

SEQ ID NO: 912353 - protein, 292 aa, Homo sapiens; identical to SEQ ID NO: 818048

SEQ ID NO: 912354 - protein, 72 aa, Homo sapiens
SYEVRWMFFLGKYWKSVRMVAVPRGCALAGAQLQEETETVSALASLTVDVEQPFAQEDSRTAGEPMEEEPAL

SEQ ID NO: 912355 - protein, 92 aa, Homo sapiens
VGNYYGYRMQTSEREGSGPELSPSVMPEAPLESPPFPTKSPAFDLFNLVLSYKRLEIYLEPLKDAGDGVRYLLRYRLCGVALVCSAFCRPAL

SEQ ID NO: 912356 - protein, 325 aa, Homo sapiens
MQVMVFDTCSGAWYSVGALMISVPALLGYLQEVCRARLPDSELMRRKYHSVRQEDLQRGRLSRPEAVAEVKSFLIQLEAFLSRLCCTCEAAYRVLHWENPVVSSQFYGALLGTVCMLYLLPLCWVLTLLNSTLFLGNVEFFRVVSEYRASLQQRMNPKQEEHAFESPPPPDVGGKDGLMDSTPALTPTEDLTPGSVEEAEEAEPDEEFKDAIEEDDEGAPCPAEDELALQDNGFLSKNEVLRSKVSRLTERLRKRYPTNNFGNCTGCSATFSVLKKRRSCSNCGNSFCSRCCSFKVPKSSMGATAPEAQRETVFVCASCNQTLSK

SEQ ID NO: 912357 - protein, 201 aa, Homo sapiens
LDLEDPELSLLGNVEFFRVVSEYRASLQQRMNPKQEEHAFESPPPPDVGGKDGLMDSTPALTPTEDLTPGSVEEAEEAEPDEEFKDAIEEDDEGAPCPAEDELALQDNGFLSKNEVLRSKVSRLTERLRKRYPTNNFGNCTGCSATFSVLKKRRSCSNCGNSFCSRCCSFKVPKSSMGATAPEAQRETVFVCASCNQTLSK

SEQ ID NO: 912358 - protein, 470 aa, Homo sapiens
SDSRPGSGGGGRGVGGGDFRTCDFRTTLAGGAAFSRGRPEETLRGPVALPLLLPDPAASLTEPAAGMQTSEREGSGPELSPSVMPEAPLESPPFPTKSPAFDLFNLVLSYKRLEIYLEPLKDAGDGVRYLLRWQMPLCSLLTCLGLNVLFLTLNEGAWYSVGALMISVPALLGYLQEVCRARLPDSELMRRKYHSVRQEDLQRGRLSRPEAVAEVKSFLIQLEAFLSRLCCTCEAAYRVLHWENPVVSSQFYGALLGTVCMLYLLPLCWVLTLLNSTLFLGNVEFFRVVSEYRASLQQRMNPKQEEHAFESPPPPDVGGKDGLMDSTPALTPTEDLTPGSVEEAEEAEPDEEFKDAIEEDDEGAPCPAEDELALQDNGFLSKNEVLRSKVSRLTERLRKRYPTNNFGNCTGCSATFSVLKKRRSCSNCGNSFCSRCCSFKVPKSSMGATAPEAQRETVFVCASCNQTLSK

SEQ ID NO: 912359 - protein, 470 aa, Homo sapiens; identical to SEQ ID NO: 912358

SEQ ID NO: 912360 - protein, 452 aa, Homo sapiens
SDSRPGSGGGGRGVGGGDFRTCDFRTTLAGGAAFSRGRPEETLRGPVALPLLLPDPAASLTEPAAGMQTSEREGSGPELSPSVMPEAPLESPPFPTKSPAFDLFNLVLSYKRLEIYLEPLKDAGDGVRYLLRWQMPLCSLLTCLGLNVLFLTLNEGAWYSVGALMISVPALLGYLQEVCRARLPDSELMRRKYHSVRQEDLQRGRLSRPEAVAEVKSFLIQLEAFLSRLCCTCEAAYRVLHWENPVVSSQFYGALLGTVCMLYLLPLCWVLTLLNSTLFLGNVEFFRVVSEYRASLQQRMNPKQEEHAFESPPPPDVGGKDGLMDSTPALTPTEDLTPGSVEEAEEAEPDEEFKDAIEEDDEGAPCPAEDELALQDNGFLSKNEVLRSKVSRLTERLRKRYPTNNFGNCTGCSATFSVLKKRRSCSNCGNSFCSRCCSFKVPKSSMGATAKS

SEQ ID NO: 912361 - protein, 150 aa, Homo sapiens
SDSRPGSGGGGRGVGGGDFRTCDFRTTLAGGAAFSRGRPEETLRGPVALPLLLPDPAASLTEPAAGMQTSEREGSGPELSPSVMPEAPLESPPFPTKSPAFDLFNLVLSYKRLEIYLEPLKDAGDGVRYLLRYRLCGVALVCSAFCRPAL

SEQ ID NO: 912362 - protein, 470 aa, Homo sapiens; identical to SEQ ID NO: 912358

SEQ ID NO: 912363 - protein, 408 aa, Homo sapiens
SDSRPGSGGGGRGVGGGDFRTCDFRTTLAGGAAFSRGRPEETLRGPVALPLLLPDPAASLTEPAAGWQMPLCSLLTCLGLNVLFLTLNEGAWYSVGALMISVPALLGYLQEVCRARLPDSELMRRKYHSVRQEDLQRGRLSRPEAVAEVKSFSLVLRLWSSSRAAVLWLHVVTPTTRVLAGRPPGVSQFYGALLGTVCMLYLLPLCWVLTLLNSTLFLGNVEFFRVVSEYRASLQQRMNPKQEEHAFESPPPPDVGGKDGLMDSTPALTPTEDLTPGSVEEAEEAEPDEEFKDAIEEDDEGAPCPAEDELALQDNGFLSKNEVLRSKVSRLTERLRKRYPTNNFGNCTGCSATFSVLKKRRSCSNCGNSFCSRCCSFKVPKSSMGATAPEAQRETVFVCASCNQTLSK

SEQ ID NO: 912364 - protein, 84 aa, Homo sapiens
EQVSVRVLGWAGVELLPLFLRNCTGCSATFSVLKKRRSCSNCGNSFCSRCCSFKVPKSSMGATAPEAQRETVFVCASCNQTLSK

SEQ ID NO: 912365 - protein, 470 aa, Homo sapiens; identical to SEQ ID NO: 912358

SEQ ID NO: 912366 - protein, 414 aa, Homo sapiens
SDSRPGSGGGGRGVGGGDFRTCDFRTTLAGGAAFSRGRPEETLRGPVALPLLLPDPAASLTEPAAGMQTSEREGSGPELSPSVMPEAPLESPPFPTKSPAFDLFNLVLSYKRLEIYLEPLKDAGDGVRYLLRWQMPLCSLLTCLGLNVLFLTLNEGAWYSVGALMISVPALLGYLQEVCRARLPDSELMRRKYHSVRQEDLQRGRLSRPEAVAEVKSFLIQLEAFLSRLCCTCEAAYRVLHWENPVVSSQFYGALLGTVCMLYLLPLCWVLTLLNSTLFLGNVEFFRVVSEYRASLQQRMNPKQEEHAFESPPPPDVGGKDGLMDSTPALTPTEDLTPGSVEEAEEAEPDEEFKDAIEEDDEGAPCPAEDELALQDNGFLSKNEVLRSKVSRLTERLRKRYPTNNFGVTGAGSS

SEQ ID NO: 912367 - protein, 60 aa, Homo sapiens
MAFPVQPHGLHQAPLAAEVLAKASAGVDIPRPFLGSYLAPLCALSPWLGLRGFRGPVGPF

SEQ ID NO: 912368 - protein, 362 aa, Homo sapiens
MAEVPPGPSSLLPPPAPPAPAAVEPRCPFPAGAALACCSEDEEDDEEHEGGGSRSPAGGESATVAAKGHPCLRCPQPPQEQQQLNGLISPELRHLRAAASLKSKVLSVAEVAATTATPDGGPRATATKGAGVHSGERPPHSLSSNARTAVPSPVEAAAASDPAAARNGLAEGTEQEEEEEDEQVRLLSSSLTADCSLRSPSGREVEPGEDRTIRYVRYESELQMPDIMRLITKDLSEPYSIYTYRYFIHNWPQLCFLAMVGEECVGAIVCKLDMHKKMFRRGYIAMLAVDSKYRRNGIGTNLVKKAIYAMVEGDCDEVVLETEITNKSALKLYENLGFVRDKRLFRYYLNGVDALRLKLWLR

SEQ ID NO: 912369 - protein, 296 aa, Homo sapiens
AGSATVAESQPPQEQQQLNGLISPELRHLRAAASLKSKVLSVAEVAATTATPDGGPRATATKGAGVHSGERPPHSLSSNARTAVPSPVEAAAASDPAAARNGLAEGTEQEEEEEDEQVRLLSSSLTADCSLRSPSGREVEPGEDRTIRYVRYESELQMPDIMRLITKDLSEPYSIYTYRYFIHNWPQLCFLAMVGEECVGAIVCKLDMHKKMFRRGYIAMLAVDSKYRRNGIGTNLVKKAIYAMVEGDCDEVVLETEITNKSALKLYENLGFVRDKRLFRYYLNGVDALRLKLWLR

SEQ ID NO: 912370 - protein, 362 aa, Homo sapiens; identical to SEQ ID NO: 912368

SEQ ID NO: 912371 - protein, 153 aa, Homo sapiens
VAEVAATTATPDGGPRATATKGAGVHSGERPPHSLSSNARTAVPSPVEAAAASDPAAARNGLAEGTEQEEEEEDEQVRLLSSSLTADCSLRSPSGREVEPGEDRTIRYVRYESELQMPDIMRLITKDLSEPYSIYTYRYFIHNWPQLCFLVSG

SEQ ID NO: 912372 - protein, 362 aa, Homo sapiens; identical to SEQ ID NO: 912368

SEQ ID NO: 912373 - protein, 278 aa, Homo sapiens
MAEVPPGPSSLLPPPAPPAPAAVEPRCPFPAGAALACCSEDEEDDEEHEGGGSRSPAGGESATVAAKGHPCLRCPQPPQEQQQLNGLISPELRHLRAAASLKSKVLSVAEVAATTATPDGGPRATATKGAGVHSGERPPHSLSSNARTAVPSPVEAAAASDPAAARNGLAEGTEQEEEEEDEQVRLLSSSLTADCSLRSPSGREVEPGEDRTIRYVRYESELQMPDIMRLITKDLSEPYSIYTYRYFIHNWPQLCFLVMVGEECFLFLFSFFTAFIFT

SEQ ID NO: 912374 - protein, 1841 aa, Homo sapiens
RGAMALQLWALTLLGLLGAGASLRPRKLDFFRSEKELNHLAVDEASGVVYLGAVNALYQLDAKLQLEQQVATGPALDNKKCTPPIEASQCHEAEMTDNVNQLLLLDPPRKRLVECGSLFKGICALRALSNISLRLFYEDGSGEKSFVASNDEGVATVGLVSSTGPGGDRVLFVGKGNGPHDNGIIVSTRLLDRTDSREAFEAYTDHATYKAGYLSTNTQQFVAAFEDGPYVFFVFNQQDKHPARNRTLLARMCREDPNYYSYLEMDLQCRDPDIHAAAFGTCLAASVAAPGSGRVLYAVFSRDSRSSGGPGAGLCLFPLDKVHAKMEANRNACYTGTREARDIFYKPFHGDIQCGGHAPGSSKSFPCGSEHLPYPLGSRDGLRGTAVLQRGGLNLTAVTVAAENNHTVAFLGTSDGRILKVYLTPDGTSSEYDSILVEINKRVKRDLVLSGDLGSLYAMTQDKVFRLPVQECLSYPTCTQCRDSQDPYCGWCVVEGRCTRKAECPRAEEASHWLWSRSKSCVAVTSAQPQNMSRRAQGEVQLTVSPLPALSEEDELLCLFGESPPHPARVEGEAVICNSPSSIPVTPPGQDHVAVTIQLLLRRGNIFLTSYQYPFYDCRQAMSLEENLPCISCVSNRWTCQWDLRYHECREASPNPEDGIVRAHMEDSCPQFLGPSPLVIPMNHETDVNFQGKNLDTVKGSSLHVGSDLLKFMEPVTMQESGTFAFRTPKLSHDANETLPLHLYVKSYGKNIDSKLHVTLYNCSFGRSDCSLCRAANPDYRCAWCGGQSRCVYEALCNTTSECPPPVITRIQPETGPLGGGIRITILGSNLGVQAGDIQRISVAGRNCSFQPERYSVSTRIVCVIEAAETPFTGGVEVDVFGKLGRSPPNVQFTFQQPKPLSVEPQQGPQAGGTTLTIHGTHLDTGSQEDVRVTLNGVPCKVTKFGAQLQCVTGPQATRGQMLLEVSYGGSPVPNPGIFFTYRENPVLRAFEPLRSFASGGRSINVTGQGFSLIQRFAMVVIAEPLQSWQPPREAESLQPMTVVGTDYVFHNDTKVVFLSPAVPEEPEAYNLTVLIEMDGHRALLRTEAGAFEYVPDPTFENFTGGVKKQVNKLIHARGTNLNKAMTLQEAEAFVGAERCTMKTLTETDLYCEPPEVQPPPKRRQKRDTTHNLPEFIVKFGSREWVLGRVEYDTRVSDVPLSLILPLVIVPMVVVIAVSVYCYWRKSQQAEREYEKIKSQLEGLEESVRDRCKKEFTDLMIEMEDQTNDVHEAGIPVLDYKTYTDRVFFLPSKDGDKDVMITGKLDIPEPRRPVVEQALYQFSNLLNSKSFLINFIHTLENQREFSARAKVYFASLLTVALHGKLEYYTDIMHTLFLELLEQYVVAKNPKLMLRRSETVVERMLSNWMSICLYQYLKDSAGEPLYKLFKAIKHQVEKGPVDAVQKKAKYTLNDTGLLGDDVEYAPLTVSVIVQDEGVDAIPVKVLNCDTISQVKEKIIDQVYRGQPCSCWPRPDSVVLEWRPGSTAQILSDLDLTSQREGRWKRVNTLMHYNVRDGATLILSKVGVSQQPEDSQQDLPGERHALLEEENRVWHLVRPTDEVDEGKSKRGSVKEKERTKAITEIYLTRLLSVKGTLQQFVDNFFQSVLAPGHAVPPAVKYFFDFLDEQAEKHNIQDEDTIHIWKTNSLPLRFWVNILKNPHFIFDVHVHEVVDASLSVIAQTFMDACTRTEHKLSRDSPSNKLLYAKEISTYKKMVEDYYKGIRQMVQVSDQDMNTHLAEISRAHTDSLNTLVALHQLYQYTQKYYDEIINALEEDPAAQKMQLAFRLQQIAAALENKVTDL

SEQ ID NO: 912375 - protein, 1272 aa, Homo sapiens
MALQLWALTLLGLLGAGASLRPRKLDFFRSEKELNHLAVDEASGVVYLGAVNALYQLDAKLQLEQQVATGPALDNKKCTPPIEASQCHEAEMTDNVNQLLLLDPPRKRLVECGSLFKGICALRALSNISLRLFYEDGSGEKSFVASNDEGVATVGLVSSTGPGGDRVLFVGKGNGPHDNGIIVSTRLLDRTDSREAFEAYTDHATYKAGYLSTNTQQFVAAFEDGPYVFFVFNQQDKHPARNRTLLARMCREDPNYYSYLEMDLQCRDPDIHAAAFGTCLAASVAAPGSGRVLYAVFSRDSRSSGGPGAGLCLFPLDKVHAKMEANRNACYTGTREARDIFYKPFHGDIQCGGHAPGSSKSFPCGSEHLPYPLGSRDGLRGTAVLQRGGLNLTAVTVAAENNHTVAFLGTSDGRILKVYLTPDGTSSEYDSILVEINKRVKRDLVLSGDLGSLYAMTQDKVFRLPVQECLSYPTCTQCRDSQDPYCGWCVVEGRCTRKAECPRAEEASHWLWSRSKSCVAVTSAQPQNMSRRAQGEVQLTVSPLPALSEEDELLCLFGESPPHPARVEGEAVICNSPSSIPVTPPGQDHVAVTIQLLLRRGNIFLTSYQYPFYDCRQAMSLEENLPCISCVSNRWTCQWDLRYHECREASPNPEDGIVRAHMEDSCPQFLGPSPLVIPMNHETDVNFQGKNLDTVKGSSLHVGSDLLKFMEPVTMQESGTFAFRTPKLSHDANETLPLHLYVKSYGKNIDSKLHVTLYNCSFGRSDCSLCRAANPDYRCAWCGGQSRCVYEALCNTTSECPPPVITRIQPETGPLGGGIRITILGSNLGVQAGDIQRISVAGRNCSFQPERYSVSTRIVCVIEAAETPFTGGVEVDVFGKLGRSPPNVQFTFQQPKPLSVEPQQGPQAGGTTLTIHGTHLDTGSQEDVRVTLNGVPCKVTKFGAQLQCVTGPQATRGQMLLEVSYGGSPVPNPGIFFTYRENPVLRAFEPLRSFASGGRSINVTGQGFSLIQRFAMVVIAEPLQSWQPPREAESLQPMTVVGTDYVFHNDTKVVFLSPAVPEEPEAYNLTVLIEMDGHRALLRTEAGAFEYVPDPTFENFTGGVKKQVNKLIHARGTNLNKAMTLQEAEAFVGAERCTMKTLTETDLYCEPPEVQPPPKRRQKRDTTHNLPEFIVKFGSREWVLGRVEYDTRVSDVPLSLILPLVIVPMVVVIAVSVYCYWRKSQQAEREYEKIKSQLEGLEESVRDRCKKEFTDLMIWVDSRLLGPTSKVK

SEQ ID NO: 912376 - protein, 1882 aa, Homo sapiens
MALQLWALTLLGLLGAGASLRPRKLDFFRSEKELNHLAVDEASGVVYLGAVNALYQLDAKLQLEQQVATGPALDNKKCTPPIEASQCHEAEMTDNVNQLLLLDPPRKRLVECGSLFKGICALRALSNISLRLFYEDGSGEKSFVASNDEGVATVGLVSSTGPGGDRVLFVGKGNGPHDNGIIVSTRLLDRTDSREAFEAYTDHATYKAGYLSTNTQQFVAAFEDGPYVFFVFNQQDKHPARNRTLLARMCREDPNYYSYLEMDLQCRDPDIHAAAFGTCLAASVAAPGSGRVLYAVFSRDSRSSGGPGAGLCLFPLDKVHAKMEANRNACYTGTREARDIFYKPFHGDIQCGGHAPGSSKSFPCGSEHLPYPLGSRDGLRGTAVLQRGGLNLTAVTVAAENNHTVAFLGTSDGRILKVYLTPDGTSSEYDSILVEINKRVKRDLVLSGDLGSLYAMTQDKVFRLPVQECLSYPTCTQCRDSQDPYCGWCVVEGRCTRKAECPRAEEASHWLWSRSKSCVAVTSAQPQNMSRRAQGEVQLTVSPLPALSEEDELLCLFGESPPHPARVEGEAVICNSPSSIPVTPPGQDHVAVTIQLLLRRGNIFLTSYQYPFYDCRQAMSLEENLPCISCVSNRWTCQWDLRYHECREASPNPEDGIVRAHMEDSCPQFLGPSPLVIPMNHETDVNFQGKNLDTVKGSSLHVGSDLLKFMEPVTMQESGTFAFRTPKLSHDANETLPLHLYVKSYGKNIDSKLHVTLYNCSFGRSDCSLCRAANPDYRCAWCGGQSRCVYEALCNTTSECPPPVITRIQPETGPLGGGIRITILGSNLGVQAGDIQRISVAGRNCSFQPERYSVSTRIVCVIEAAETPFTGGVEVDVFGKLGRSPPNVQFTFQQPKPLSVEPQQGPQAGGTTLTIHGTHLDTGSQEDVRVTLNGVPCKVTKFGAQLQCVTGPQATRGQMLLEVSYGGSPVPNPGIFFTYRENPVLRAFEPLRSFASGGRSINVTGQGFSLIQRFAMVVIAEPLQSWQPPREAESLQPMTVVGTDYVFHNDTKVVFLSPAVPEEPEAYNLTVLIEMDGHRALLRTEAGAFEYVPDPTFENFTGGVKKQVNKLIHARGTNLNKAMTLQEAEAFVGAERCTMKTLTETDLYCEPPEVQPPPKRRQKRDTTHNLPEFIVKFGSREWVLGRVEYDTRVSDVPLSLILPLVIVPMVVVIAVSVYCYWRKSQQAEREYEKIKSQLEGLEESVRDRCKKEFTDLMIEMEDQTNDVHEAGIPVLDYKTYTDRVFFLPSKDGDKDVMITGKLDIPEPRRPVVEQALYQFSNLLNSKSFLINFIHTLENQREFSARAKVYFASLLTVALHGKLEYYTDIMHTLFLELLEQYVVAKNPKLMLRRSETVVERMLSNWMSICLYQYLKDSAGEPLYKLFKAIKHQVEKGPVDAVQKKAKYTLNDTGLLGDDVEYAPLTVSVIVQDEGVDAIPVKVLNCDTISQVKEKIIDQVYRGQPCSCWPRPDSVVLEWRPGSTAQILSDLDLTSQREGRWKRVNTLMHYNVRDGATLILSKVGVSQQPEDSQQDLPGERHALLEEENRVWHLVRPTDEVDEGKSKRGSVKEKERTKAITEILLRTAACCWENRGSAYAPCALQASMKVCAMTDSEASTTSWTCTSKMKWGFLRMFTQNRSGKLFVFQMWMVSSSWMLCFSACSSRKSKKYLTAGGTACPGSQHALEEVVHKLLQCALDWEHPRQVDLGDGLRPLHLYHTASHGHALVHLVGRPHQVPHPVLLLQEGMALPRQVLLAVLRLLGDPHLGQDEGGSIPDIVVHKGVDALPPPTARDVTSSPLYQYTQKYYDEIINALEEDPAAQKMQLAFRLQQIAAALENKVTDL

SEQ ID NO: 912377 - protein, 1597 aa, Homo sapiens
MALQLWALTLLGLLGAGASLRPRKLDFFRSEKELNHLAVDEASGVVYLGAVNALYQLDAKLQLEQQVATGPALDNKKCTPPIEASQCHEAEMTDNVNQLLLLDPPRKRLVECGSLFKGICALRALSNISLRLFYEDGSGEKSFVASNDEGVATVGLVSSTGPGGDRVLFVGKGNGPHDNGIIVSTRLLDRTDSREAFEAYTDHATYKAGYLSTNTQQFVAAFEDGPYVFFVFNQQDKHPARNRTLLARMCREDPNYYSYLEMDLQCRDPDIHAAAFGTCLAASVAAPGSGRVLYAVFSRDSRSSGGPGAGLCLFPLDKVHAKMEANRNACYTGTREARDIFYKPFHGDIQCGGHAPGSSKSFPCGSEHLPYPLGSRDGLRGTAVLQRGGLNLTAVTVAAENNHTVAFLGTSDGRILKVYLTPDGTSSEYDSILVEINKRVKRDLVLSGDLGSLYAMTQDKVFRLPVQECLSYPTCTQCRDSQDPYCGWCVVEGRCTRKAECPRAEEASHWLWSRSKSCVAVTSAQPQNMSRRAQGEVQLTVSPLPALSEEDELLCLFGESPPHPARVEGEAVICNSPSSIPVTPPGQDHVAVTIQLLLRRGNIFLTSYQYPFYDCRQAMSLEENLPCISCVSNRWTCQWDLRYHECREASPNPEDGIVRAHMEDSCPQFLGPSPLVIPMNHETDVNFQGKNLDTVKGSSLHVGSDLLKFMEPVTMQESGTFAFRTPKLSHDANETLPLHLYVKSYGKNIDSKLHVTLYNCSFGRSDCSLCRAANPDYRCAWCGGQSRCVYEALCNTTSECPPPVITRIQPETGPLGGGIRITILGSNLGVQAGDIQRISVAGRNCSFQPERYSVSTRIVCVIEAAETPFTGGVEVDVFGKLGRSPPNVQFTFQQPKPLSVEPQQGPQAGGTTLTIHGTHLDTGSQEDVRVTLNGVPCKVTKFGAQLQCVTGPQATRGQMLLEVSYGGSPVPNPGIFFTYRENPVLRAFEPLRSFASGGRSINVTGQGFSLIQRFAMVVIAEPLQSWQPPREAESLQPMTVVGTDYVFHNDTKVVFLSPAVPEEPEAYNLTVLIEMDGHRALLRTEAGAFEYVPDPTFENFTGGVKKQVNKLIHARGTNLNKAMTLQEAEAFVGAERCTMKTLTETDLYCEPPEVQPPPKRRQKRDTTHNLPEFIVKFGSREWVLGRVEYDTRVSDVPLSLILPLVIVPMVVVIAVSVYCYWRKSQQAEREYEKIKSQLEGLEESVRDRCKKEFTDLMIEMEDQTNDVHEAGIPVLDYKTYTDRVFFLPSKDGDKDVMITGKLDIPEPRRPVVEQALYQFSNLLNSKSFLINFIHTLENQREFSARAKVYFASLLTVALHGKLEYYTDIMHTLFLELLEQYVVAKNPKLMLRRSETVVERMLSNWMSICLYQYLKDSAGEPLYKLFKAIKHQVEKGPVDAVQKKAKYTLNDTGLLGDDVEYAPLTVSVIVQDEGVDAIPVKVLNCDTISQVKEKIIDQVYRGQPCSCWPRPDSVVLEWRPGSTAQILSDLDLTSQREGRWKRVNTLMHYNVRDGATLILSKVGVSQQPEDSQQGKFPDPMSVCPPRDGRRRKSGTMPS

SEQ ID NO: 912378 - protein, 1841 aa, Homo sapiens; identical to SEQ ID NO: 912374

SEQ ID NO: 912379 - protein, 1841 aa, Homo sapiens; identical to SEQ ID NO: 912374

SEQ ID NO: 912380 - protein, 1615 aa, Homo sapiens
MALQLWALTLLGLLGAGASLRPRKLDFFRSEKELNHLAVDEASGVVYLGAVNALYQLDAKLQLEQQVATGPALDNKKCTPPIEASQCHEAEMTDNVNQLLLLDPPRKRLVECGSLFKGICALRALSNISLRLFYEDGSGEKSFVASNDEGVATVGLVSSTGPGGDRVLFVGKGNGPHDNGIIVSTRLLDRTDSREAFEAYTDHATYKAGYLSTNTQQFVAAFEDGPYVFFVFNQQDKHPARNRTLLARMCREDPNYYSYLEMDLQCRDPDIHAAAFGTCLAASVAAPGSGRVLYAVFSRDSRSSGGPGAGLCLFPLDKVHAKMEANRNACYTGTREARDIFYKPFHGDIQCGGHAPGSSKSFPCGSEHLPYPLGSRDGLRGTAVLQRGGLNLTAVTVAAENNHTVAFLGTSDGRILKVYLTPDGTSSEYDSILVEINKRVKRDLVLSGDLGSLYAMTQDKVFRLPVQECLSYPTCTQCRDSQDPYCGWCVVEGRCTRKAECPRAEEASHWLWSRSKSCVAVTSAQPQNMSRRAQGEVQLTVSPLPALSEEDELLCLFGESPPHPARVEGEAVICNSPSSIPVTPPGQDHVAVTIQLLLRRGNIFLTSYQYPFYDCRQAMSLEENLPCISCVSNRWTCQWDLRYHECREASPNPEDGIVRAHMEDSCPQFLGPSPLVIPMNHETDVNFQGKNLDTVKGSSLHVGSDLLKFMEPVTMQESGTFAFRTPKLSHDANETLPLHLYVKSYGKNIDSKLHVTLYNCSFGRSDCSLCRAANPDYRCAWCGGQSRCVYEALCNTTSECPPPVITRIQPETGPLGGGIRITILGSNLGVQAGDIQRISVAGRNCSFQPERYSVSTRIVCVIEAAETPFTGGVEVDVFGKLGRSPPNVQFTFQQPKPLSVEPQQGPQAGGTTLTIHGTHLDTGSQEDVRVTLNGVPCKVTKFGAQLQCVTGPQATRGQMLLEVSYGGSPVPNPGIFFTYRENPVLRAFEPLRSFASGGRSINVTGQGFSLIQRFAMVVIAEPLQSWQPPREAESLQPMTVVGTDYVFHNDTKVVFLSPAVPEEPEAYNLTVLIEMDGHRALLRTEAGAFEYVPDPTFENFTGGVKKQVNKLIHARGTNLNKAMTLQEAEAFVGAERCTMKTLTETDLYCEPPEVQPPPKRRQKRDTTHNLPEFIVKFGSREWVLGRVEYDTRVSDVPLSLILPLVIVPMVVVIAVSVYCYWRKSQQAEREYEKIKSQLEGLEESVRDRCKKEFTDLMIEMEDQTNDVHEAGIPVLDYKTYTDRVFFLPSKDGDKDVMITGKLDIPEPRRPVVEQALYQFSNLLNSKSFLINFIHTLENQREFSARAKVYFASLLTVALHGKLEYYTDIMHTLFLELLEQYVVAKNPKLMLRRSETVVERMLSNWMSICLYQYLKDSAGEPLYKLFKAIKHQVEKGPVDAVQKKAKYTLNDTGLLGDDVEYAPLTVSVIVQDEGVDAIPVKVLNCDTISQVKEKIIDQVYRGQPCSCWPRPDSVVLEWRPGSTAQILSDLDLTSQREGRWKRVNTLMHYNVRDGAIPVKVLNCDTISHVKGQVRRRSSPTSGPRHPGVLVCQTGCPRAPPSPGGLGAVPRPPHPFL

SEQ ID NO: 912381 - protein, 140 aa, Homo sapiens
MTDRYTIHSQLEHLQSKYIGTGHADTTKWEWLVNQHRDSYCSYMGHFDLLNYFAIAENESKARVRFNLMEKMLQPCGPPSRQARGELRLCLYPPQCGAPLPAFLRFANPLKYSCLQRTGSPWLLRLVLSAYRSACPGSPA

SEQ ID NO: 912382 - protein, 140 aa, Homo sapiens; identical to SEQ ID NO: 912381

SEQ ID NO: 912383 - protein, 140 aa, Homo sapiens; identical to SEQ ID NO: 912381

SEQ ID NO: 912384 - protein, 154 aa, Homo sapiens
MTDRYTIHSQLEHLQSKYIGTGHADTTKWEWLVNQHRDSYCSYMGHFDLLNYFAIAENESKARVRFNLMDSAFTHRSAGHLSQRFSGLPILLSIPVSKGPALHGSCASCFPRTEVLARGVPPDLPSCGPLEQHWETSRTPENCAGGEVLEPASV

SEQ ID NO: 912385 - protein, 212 aa, Homo sapiens
EKHLNVSKKFHQVSILLGIELLYQVNFSREALQERRARCETQNIDPVVWTNQRVLKWVRDIDLKEYADNLTNSGVHGAVLVLEPTFNAEAMATALGIPSGKHILRRHLAEEMSAVFHPANSTGIREAERFGTPPGRASSVTRAGKEENSSGLKYKAGRLPLGKIGRGFSSKDPDFHDDYGSLQNEDCGDDDPQSRLEQCRLEGYNSLEVTNV

SEQ ID NO: 912386 - protein, 86 aa, Homo sapiens
HRAIRIGDISQTFILNSCFSSSCPLIIFFSSQLPLGKIGRGFSSKDPDFHDDYGSLQNEDCGDDDPQSRLEQCRLEGYNSLEVTNV

SEQ ID NO: 912387 - protein, 1388 aa, Homo sapiens
MAPRRNNGQCWCLLMLLSVSTPLPAVTQTRGATETASQGHLDLTQLIGVPLPSSVSFVTGYGGFPAYSFGPGANVGRPARTLIPSTFFRDFAIRLVVKPSSTRGGVLFAITDAFQKVIYLGLRLSGVEDGHQRIILYYTEPGSHVSQEAAAFSVPVMTHRWNRFAMIVQGEEVTLLVNCEEHSRIPFQRSSQALAFESSAGIFMGNAGATGLERFTGSLQQLTVHPDPRTPEELCDPEESSASGETSGLQEADGVAEILEAVTYTQASPKEAKVEPINTPPTPSSPFEDMELSGEPVPEGTLETTNMSIIQHSSPKQGSGEILNDTLEGVHSVDGDPITDSGSGAGAFLDIAEEKNLAATAAGLAEVPISTAGEAEASSVPTGGPTLSMSTENPEEGVTPGPDNEERLAATAAGEAEALASMPGEVEASGVAPGELDLSMSAQSLGEEATVGPSSEDSLTTAAAATEVSLSTFEDEEASGVPTDGLAPLTATMAPERAVTSGPGDEEDLAAATTEEPLITAGGEESGSPPPDGPPLPLPTVAPERWITPAQREHVGMKGQAGPKGEKGDAGEELPGPPEPSGPVGPTAGAEAEGSGLGWGSDVGSGSGDLVGSEQLLRGPPGPPGPPGLPGIPGKPGTDVFMGPPGSPGEDGPAGEPGPPGPEGQPGVDGATGLPGMKGEKGARGPNGSVGEKGDPGNRGLPGPPGKKGQAGPPGVMGPPGPPGPPGPPGPGCTMGLGFEDTEGSGSTQLLNEPKLSRPTAAIGLKGEKGDRGPKGERGMDGASIVGPPGPRGPPGHIKVLSNSLINITHGFMNFSDIPELVGPPGPDGLPGLPGFPGPRGPKGDTGLPGFPGLKGEQGEKGEPGAILTEDIPLERLMGKKGEPGMHGAPGPMGPKGPPGHKGEFGLPGRPGRPGLNGLKGTKGDPGVIMQGPPGLPGPPGPPGPPGAVINIKGAIFPIPVRPHCKMPVDTAHPGSPELITFHGVKGEKGSWGLPGSKGEKGDQGAQGPPGPPLDLAYLRHFLNNLKGENGDKGFKGEKGEKGDINGSFLMSGPPGLPGNPGPAGQKGETVVGPQGPPGAPGLPGPPGFGRPGDPGPPGPPGPPGPPAILGAAVALPGPPGPPGQPGLPGSRNLVTAFSNMDDMLQKAHLVIEGTFIYLRDSTEFFIRVRDGWKKLQLGELIPIPADSPPPPALSSNPHQLLPPPNPISSANYEKPALHLAALNMPFSGDIRADFQCFKQARAAGLLSTYRAFLSSHLQDLSTIVRKAERYSLPIVNLKGQVLFNNWDSIFSGHGGQFNMHIPIYSFDGRDIMTDPSWPQKVIWHGSSPHGVRLVDNYCEAWRTADTAVTGLASPLSTGKILDQKAYSCANRLIVLCIENSFMTDARK

SEQ ID NO: 912388 - protein, 1388 aa, Homo sapiens; identical to SEQ ID NO: 912387

SEQ ID NO: 912389 - protein, 1388 aa, Homo sapiens; identical to SEQ ID NO: 912387

SEQ ID NO: 912390 - protein, 1312 aa, Homo sapiens
MAPRRNNGQCWCLLMLLSVSTPLPAVTQTRGATETASQGHLDLTQLIGVPLPSSVSFVTGYGGFPAYSFGPGANVGRPARTLIPSTFFRDFAIRLVVKPSSTRGGVLFAITDAFQKVIYLGLRLSGVEDGHQRIILYYTEPGSHVSQEAAAFSVPVMTHRWNRFAMIVQGEEVTLLVNCEEHSRIPFQRSSQALAFESSAGIFMGNAGATGLERFTGSLQQLTVHPDPRTPEELCDPEESSASGETSGLQEADGVAEILEAVTYTQASPKEAKVEPINTPPTPSSPFEDMELSGEPVPEGTLETTNMSIIQHSSPKQGSGEILNDTLEGVHSVDGDPITDSGSGAGAFLDIAEEKNLAATAAGLAEVPISTAGEAEASSVPTGGPTLSMSTENPEEGVTPGPDNEERLAATAAGEAEALASMPGEVEASGVAPGELDLSMSAQSLGEEATVGPSSEDSLTTAAAATEVSLSTFEDEEASGVPTDGLAPLTATMAPERAVTSGPGDEEDLAAATTEEPLITAGGEESGSPPPDGPPLPLPTVAPERWITPAQREHVGMKGQAGPKGEKGDAGEELPGPPEPSGPVGPTAGAEAEGSGLGWGSDVGSGSGDLVGSEQLLRGPPGPPGPPGLPGIPGKPGTDVFMGPPGSPGEDGPAGEPGPPGPEGQPGVDGATGLPGMKGEKGARGPNGSVGEKGDPGNRGLPGPPGKKGQAGPPGVMGPPGPPGPPGPPGPGCTMGLGFEDTEGSGSTQLLNEPKLSRPTAAIGLKGEKGDRGPKGERGMDGASIVGPPGPRGPPGHIKVLSNSLINITHGFMNFSDIPELVGPPGPDGLPGLPGFPGPRGPKGDTGLPGFPGLKGEQGEKGEPGAILTEDIPLERLMGKKGEPGMHGAPGPMGPKGPPGHKGEFGLPGRPGRPGLNGLKGTKGDPGVIMQGPPGLPGPPGPPGPPGAVINIKGAIFPIPVRPHCKMPVDTAHPGSPELITFHGVKGEKGSWGLPGSKGEKGDQGAQGPPGPPLDLAYLRHFLNNLKGENGDKGFKGEKGEKGDINGSFLMSGPPGLPGNPGPAGQKGETVVGPQGPPGAPGLPGPPGFGRPGDPGPPGPPGPPGPPAILGAAVALPGPPGPPGQPGLPGSRNLVTAFSNMDDMLQKAHLVIEGTFIYLRDSTEFFIRVRDGWKKLQLGELIPIPADSPPPPALSSNPHQLLPPPNPISSANYEKPALHLAALNMPFSGDIRADFQCFKQARAAGLLSTYRAFLSSHLQDLSTIVRKAERYSLPIVNLKVKINMVPIAFCMHWSLQGLEAVFIPDINRRLLT

SEQ ID NO: 912391 - protein, 76 aa, Homo sapiens
VCLGHLALEDLVILGHRGPRGHQDLQLSWEQVSAVNSALVHAVPTIVFKVTASGWLVTAALPNRGLSWIPPSFFFF

SEQ ID NO: 912392 - protein, 1388 aa, Homo sapiens; identical to SEQ ID NO: 912387

SEQ ID NO: 912393 - protein, 232 aa, Homo sapiens
SSSVPNFYFFLRVRDGWKKLQLGELIPIPADSPPPPALSSNPHQLLPPPNPISSANYEKPALHLAALNMPFSGDIRADFQCFKQARAAGLLSTYRAFLSSHLQDLSTIVRKAERYSLPIVNLKGQVLFNNWDSIFSGHGGQFNMHIPIYSFDGRDIMTDPSWPQKVIWHGSSPHGVRLVDNYCEAWRTADTAVTGLASPLSTGKILDQKAYSCANRLIVLCIENSFMTDARK

SEQ ID NO: 912394 - protein, 164 aa, Homo sapiens
MPFSGDIRADFQCFKQARAAGLLSTYRAFLSSHLQDLSTIVRKAERYSLPIVNLKGQVLFNNWDSIFSGHGGQFNMHIPIYSFDGRDIMTDPSWPQKVIWHGSSPHGVRLVDNYCEAWRTADTAVTGLASPLSTGKILDQKAYSCANRLIVLCIENSFMTDARK

SEQ ID NO: 912395 - protein, 399 aa, Homo sapiens
MAQRAFPNPYADYNKSLAEGYFDAAGRLTPEFSQRLTNKIRELLQQMERGLKSADPRDGTGYTGWAGIAVLYLHLYDVFGDPAYLQLAHGYVKQSLNCLTKRSITFLCGDAGPLAVAAVLYHKMNNEKQAEDCITRLIHLNKIDPHAPNEMLYGRIGYIYALLFVNKNFGVEKIPQSHIQQICETILTSGENLARKRNFTAKSPLMYEWYQEYYVGAAHGLAGIYYYLMQPSLQVSQGKLHSLVKPSVDYVCQLKFPSGNYPPCIGDNRDLLVHWCHGAPGVIYMLIQAYKVFREEKYLCDAYQCADVIWQYGLLKKGYGLCHGSAGNAYAFLTLYNLTQDMKYLYRACKFAEWCLEYGEHGCRTPDTPFSLFEGMAGTIYFLADLLVPTKARFPAFEL

SEQ ID NO: 912396 - protein, 399 aa, Homo sapiens; identical to SEQ ID NO: 912395

SEQ ID NO: 912397 - protein, 411 aa, Homo sapiens
MGLICTRLASGVMAQRAFPNPYADYNKSLAEGYFDAAGRLTPEFSQRLTNKIRELLQQMERGLKSADPRDGTGYTGWAGIAVLYLHLYDVFGDPAYLQLAHGYVKQSLNCLTKRSITFLCGDAGPLAVAAVLYHKMNNEKQAEDCITRLIHLNKIDPHAPNEMLYGRIGYIYALLFVNKNFGVEKIPQSHIQQICETILTSGENLARKRNFTAKSPLMYEWYQEYYVGAAHGLAGIYYYLMQPSLQVSQGKLHSLVKPSVDYVCQLKFPSGNYPPCIGDNRDLLVHWCHGAPGVIYMLIQAYKVFREEKYLCDAYQCADVIWQYGLLKKGYGLCHGSAGNAYAFLTLYNLTQDMKYLYRACKFAEWCLEYGEHGCRTPDTPFSLFEGMAGTIYFLADLLVPTKARFPAFEL

SEQ ID NO: 912398 - protein, 399 aa, Homo sapiens; identical to SEQ ID NO: 912395

SEQ ID NO: 912399 - protein, 399 aa, Homo sapiens; identical to SEQ ID NO: 912395

SEQ ID NO: 912400 - protein, 399 aa, Homo sapiens; identical to SEQ ID NO: 912395

SEQ ID NO: 912401 - protein, 399 aa, Homo sapiens; identical to SEQ ID NO: 912395

SEQ ID NO: 912402 - protein, 399 aa, Homo sapiens; identical to SEQ ID NO: 912395

SEQ ID NO: 912403 - protein, 399 aa, Homo sapiens; identical to SEQ ID NO: 912395

SEQ ID NO: 912404 - protein, 350 aa, Homo sapiens
MGLICTRLASGVMAQRAFPNPYADYNKSLAEGYFDAAGRLTPEFSQRLTNKIRELLQQMERGLKSADPRDGTGYTGWAGIAVLYLHLYDVFGDPAYLQLAHGYVKQSLNCLTKRSITFLCGDAGPLAVAAVLYHKMNNEKQAEDCITRLIHLNKIDPHAPNEMLYGRIGYIYALLFVNKNFGVEKIPQSHIQQICETILTSGENLARKRNFTAKSPLMYEWYQEYYVGAAHGLAGIYYYLMQVFREEKYLCDAYQCADVIWQYGLLKKGYGLCHGSAGNAYAFLTLYNLTQDMKYLYRACKFAEWCLEYGEHGCRTPDTPFSLFEGMAGTIYFLADLLVPTKARFPAFEL

SEQ ID NO: 912405 - protein, 399 aa, Homo sapiens; identical to SEQ ID NO: 912395

SEQ ID NO: 912406 - protein, 67 aa, Homo sapiens
VMAQRAFPNPYADYNKSLAEGYFDAAGRVSLGYVCLHPCLSPRCSERCSFLPERVEHPPLKKYMIRR

SEQ ID NO: 912407 - protein, 752 aa, Homo sapiens
MAKRSRSEDEDDDLQYADHDYEVPQQKGLKKLWNRVKWTRDEDDKLKKLVEQHGTDDWTLIASHLQNRSDFQCQHRWQKVLNPELIKGPWTKEEDQRVIELVQKYGPKRWSLIAKHLKGRIGKQCRERWHNHLNPEVKKSSWTEEEDRIIYEAHKRLGNRWAEIAKLLPGRTDNSIKNHWNSTMRRKVEQEGYLQDGIKSERSSSKLQHKPCAAMDHMQTQNQFYIPVQIPGYQYVSPEGNCIEHVQPTSAFIQQPFIDEDPDKEKKIKELEMLLMSAENEVRRKRIPSQPGSFSSWSGSFLMDDNMSNTLNSLDEHTSEFYSMDENQPVSAQQNSPTKFLAVEANAVLSSLQTIPEFAETLELIESDPVAWSDVTSFDISDAAASPIKSTPVKLMRIQHNEGAMECQFNVSLVLEGKKNTCNGGNSEAVPLTSPNIAKFSTPPAILRKKRKMRVGHSPGSELRDGSLNDGGNMALKHTPLKTLPFSPSQFFNTCPGNEQLNIENPSFTSTPICGQKALITTPLHKETTPKDQKENVGFRTPTIRRSILGTTPRTPTPFKNALAAQEKKYGPLKIVSQPLAFLEEDIREVLKEETGTDLFLKEEDEPAYKSCKQENTASGKKVRKSLVLDNWEKEESGTQLLTEDISDMQSENRFTTSLLMIPLLEIHDNRCNLIPEKQDINSTNKTYTLTKKKPNPNTSKVVKLEKNLQSNCEWETVVYGKTEDQLIMTEQARRYLSTYTATSSTSRALIL

SEQ ID NO: 912408 - protein, 720 aa, Homo sapiens
MRVQISDLMLPLLRGRFLASEDEDDDLQYADHDYEVPQQKGLKKLWNRVKWTRDEDDKLKKLVEQHGTDDWTLIASHLQNRSDFQCQHRWQKVLNPELIKGPWTKEEDQRVIELVQKYGPKRWSLIAKHLKGRIGKQCRERWHNHLNPEVKKSSWTEEEDRIIYEAHKRLGNRWAEIAKLLPGRTDNSIKNHWNSTMRRKVEQEGYLQDGIKSERSSSKLQHKPCAAMDHMQTQNQFYIPVQIPGYQYVSPEGNCIEHVQPTSAFIQQPFIDEDPDKEKKIKELEMLLMSAENEVRRKRIPSNSPTKFLAVEANAVLSSLQTIPEFAETLELIESDPVAWSDVTSFDISDAAASPIKSTPVKLMRIQHNEGAMECQFNVSLVLEGKKNTCNGGNSEAVPLTSPNIAKFSTPPAILRKKRKMRVGHSPGSELRDGSLNDGGNMALKHTPLKTLPFSPSQFFNTCPGNEQLNIENPSFTSTPICGQKALITTPLHKETTPKDQKENVGFRTPTIRRSILGTTPRTPTPFKNALAAQEKKYGPLKIVSQPLAFLEEDIREVLKEETGTDLFLKEEDEPAYKSCKQENTASGKKVRKSLVLDNWEKEESGTQLLTEDISDMQSENRFTTSLLMIPLLEIHDNRCNLIPEKQDINSTNKTYTLTKKKPNPNTSKVVKLEKNLQSNCEWETVVYGKTEDQLIMTEQARRYLSTYTATSSTSRALIL

SEQ ID NO: 912409 - protein, 446 aa, Homo sapiens
MSNTLNSLDEHTSEFYSMDENQPVSAQQNSPTKFLAVEANAVLSSLQTIPEFAETLELIESDPVAWSDVTSFDISDAAASPIKSTPVKLMRIQHNEGAMECQFNVSLVLEGKKNTCNGGNSEAVPLTSPNIAKFSTPPAILRKKRKMRVGHSPGSELRDGSLNDGGNMALKHTPLKTLPFSPSQFFNTCPGNEQLNIENPSFTSTPICGQKALITTPLHKETTPKDQKENVGFRTPTIRRSILGTTPRTPTPFKNALAAQEKKYGPLKIVSQPLAFLEEDIREVLKEETGTDLFLKEEDEPAYKSCKQENTASGKKVRKSLVLDNWEKEESGTQLLTEDISDMQSENRFTTSLLMIPLLEIHDNRCNLIPEKQDINSTNKTYTLTKKKPNPNTSKVVKLEKNLQSNCEWETVVYGKTEDQLIMTEQARRYLSTYTATSSTSRALIL

SEQ ID NO: 912410 - protein, 663 aa, Homo sapiens
MRVQISDLMLPLLRGRFLASEDEDDDLQYADHDYEVPQQKGLKKLWNRVKWTRDEDDKLKKLVEQHGTDDWTLIASHLQNRSDFQCQHRWQKVLNPELIKGPWTKEEDQRVIELVQKYGPKRWSLIAKHLKGRIGKQCRERWHNHLNPEVKKSSWTEEEDRIIYEAHKRLGNRWAEIAKLLPGRTDNSIKNHWNSTMRRKVEQEGYLQDGIKSERSSSKLQHKPCAAMDHMQTQNQFYIPVQIPGYQYVSPEGNCIEHVQPTSAFIQQPFIDEDPDKEKKIKELEMLLMSAENEVRRKRIPSQPGSFSSWSGSFLMDDNMSNTLNSLDEHTSEFYSMDENQPVSAQQNSPTKFLAVEANAVLSSLQTIPEFAETLELIESDPVAWSDVTSFDISDAAASPIKSTPVKLMRIQHNEGAMECQFNVSLVLEGKKNTCNGGNSEAVPLTSPNIAKFSTPPAILRKKRKMRVGHSPGSELRDGSLNDGGNMALKHTPLKTLPFSPSQFFNTCPGNEQLNIENPSFTSTPICGQKALITTPLHKETTPKDQKENVGFRTPTIRRSILGTTPRTPTPFKNALAAQEKKYGPLKIVSQPLAFLEEDIREVLKEETGTDLFLKEEDEPAYKSCKQENTASGKKVRKSLVLDNWEKEESGTQLLTEDISDMQ

SEQ ID NO: 912411 - protein, 765 aa, Homo sapiens
MRVQISDLMLPLLRGRFLASEDEDDDLQYADHDYEVPQQKGLKKLWNRVKWTRDEDDKLKKLVEQHGTDDWTLIASHLQNRSDFQCQHRWQKVLNPELIKGPWTKEEDQRVIELVQKYGPKRWSLIAKHLKGRIGKQCRERWHNHLNPEVKKSSWTEEEDRIIYEAHKRLGNRWAEIAKLLPGRTDNSIKNHWNSTMRRKVEQEGYLQDGIKSERSSSKLQHKPCAAMDHMQTQNQFYIPVQIPGYQYVSPEGNCIEHVQPTSAFIQQPFIDEDPDKEKKIKELEMLLMSAENEVRRKRIPSQPGSFSSWSGSFLMDDNMSNTLNSLDEHTSEFYSMDENQPVSAQQNSPTKFLAVEANAVLSSLQTIPEFAETLELIESDPVAWSDVTSFDISDAAASPIKSTPVKLMRIQHNEGAMECQFNVSLVLEGKKNTCNGGNSEAVPLTSPNIAKFSTPPAILRKKRKMRVGHSPGSELRDGSLNDGGNMALKHTPLKTLPFSPSQFFNTCPGNEQLNIENPSFTSTPICGQKALITTPLHKETTPKDQKENVGFRTPTIRRSILGTTPRTPTPFKNALAAQEKKYGPLKIVSQPLAFLEEDIREVLKEETGTDLFLKEEDEPAYKSCKQENTASGKKVRKSLVLDNWEKEESGTQLLTEDISDMQSENRFTTSLLMIPLLEIHDNRCNLIPEKQDINSTNKTYTLTKKKPNPNTSKVVKLEKNLQSNCEWETVVYGKTEDQLIMTEQARRYLSTYTATSSTSRALIL

SEQ ID NO: 912412 - protein, 167 aa, Homo sapiens
QETASPAELLAAGERAGVGRLWRSRAGARAGRLTSGGRSRRRAGSRLLTCWGYPWPGRAGAKSGAAGRGRGRVAVRPRCPSVLPCRGRAFRTRPPPEGAREAARGSGRRSIRRRLEEADPRPRPACSYAVLEGWRRGRAGGWHPFRPGLSAPSRLRFSFLSRCPLPP

SEQ ID NO: 912413 - protein, 466 aa, Homo sapiens
EAELGWAWRGCSAATGGSAAATVPRDSKPQTRDLGALSRAGKQSLVVRNSRPLLSAPLRTASPSTPLRKWWGRRGPRREAFERPLGERKDSPVLGARTRARRERRQALAFGTMGCTLSAEDKAAVERSKMIDRNLREDGEKAAREVKLLLLGAGESGKSTIVKQMKIIHEAGYSEEECKQYKAVVYSNTIQSIIAIIRAMGRLKIDFGDSARADDARQLFVLAGAAEEGFMTAELAGVIKRLWKDSGVQACFNRSREYQLNDSAAYYLNDLDRIAQPNYIPTQQDVLRTRVKTTGIVETHFTFKDLHFKMFDVGGQRSERKKWIHCFEGVTAIIFCVALSDYDLVLAEDEEMNRMHESMKLFDSICNNKWFTDTSIILFLNKKDLFEEKIKKSPLTICYPEYAGSNTYEEAAAYIQCQFEDLNKRKDTKEIYTHFTCATDTKNVQFVFDAVTDVIIKNNLKDCGLF

SEQ ID NO: 912414 - protein, 157 aa, Homo sapiens
EAELGWAWRGCSAATGGSAAATVPRDSKPQTRDLGALSRAGKQSLVVRNSRPLLSAPLRTASPSTPLRKWWGRRGPRREAFERPLGERKDSPVLGARTRARRERRQALAFGTMGCTLSAEDKAAVERSKMIDRNLREDGEKAAREVKLLLLGKGGRV

SEQ ID NO: 912415 - protein, 466 aa, Homo sapiens; identical to SEQ ID NO: 912413

SEQ ID NO: 912416 - protein, 466 aa, Homo sapiens; identical to SEQ ID NO: 912413

SEQ ID NO: 912417 - protein, 197 aa, Homo sapiens
AGLGPEVACARPFCVPGPRPSGVSCADRSEGSWPTAPSRSLPPPSTLSVVEKMVGRNSAIAAGVCGALFIGYCIYFDRKRRSDPNFKNRLRERRKKQKLAKERAGLSKLPDLKDAEAVQKFFLEEIQLGEELLAQGEYEKGVDHLTNAIAVCGQPQQLLQVLQQTLPPPVFQMLLTKLPTISQRIVSAQSLAEDDVE

SEQ ID NO: 912418 - protein, 197 aa, Homo sapiens; identical to SEQ ID NO: 912417

SEQ ID NO: 912419 - protein, 188 aa, Homo sapiens
  misc_feature (93)..(93): Xaa can be any naturally occurring amino acid
  misc_feature (114)..(115): Xaa can be any naturally occurring amino acid
MNEAGLSDLQLAVPAQVDGLAVDPAPGMVCLLYFRTLSVYPKCTVYGKRMPLSNPPVMYTGRILPFLDLAGLSYSDGSHVSLTSLHLTASRWXTPEDSSDLRCGHMHRMLLLQXXLASSHALDACLDASQNAHGNIECGQDEPYGSLSGNVRAFDTHEECDVDDNVFSYLLITLGSGVDAVVVQWKEK

SEQ ID NO: 912420 - protein, 197 aa, Homo sapiens; identical to SEQ ID NO: 912417

SEQ ID NO: 912421 - protein, 201 aa, Homo sapiens
AGLGPEVACARPFCVPGPRPSGVSCADRSEGSWPTAPSRSLPPPSTLSVVEKMVGRNSAIAAGVCGALFIGYCIYFDRKRRSDPNFKNRLRERRKKQKLAKERAGLSKLPDLKDAEAVQKFFLEEIQLGEELLAQGEYEKGVDHLTNAIAVCGQPQQLLQVLQQTLPPPVFQMLLTKLPTISQRIVSAQSLADFSEWGPQR

SEQ ID NO: 912422 - protein, 197 aa, Homo sapiens; identical to SEQ ID NO: 912417

SEQ ID NO: 912423 - protein, 197 aa, Homo sapiens; identical to SEQ ID NO: 912417

SEQ ID NO: 912424 - protein, 203 aa, Homo sapiens
AGLGPEVACARPFCVPGPRPSGVSCADRSEGSWPTAPSRSLPPPSTLSVVEKMVGRNSAIAAGVCGALFIGYCIYFDRKRRSDPNFKNRLRERRKKQKLAKERAGLSKLPDLKDAEAVQKFFLEEIQLGEELLAQGEYEKGVDHLTNAIAVCGQPQQLLQVLQQTLPPPVFQMLLTKLPTISQRIVSAQSLAVDIEECTFGVL

SEQ ID NO: 912425 - protein, 521 aa, Homo sapiens
MVLRSGICGLSPHRIFPSLLVVVALVGLLPVLRSHGLQLSPTASTIRSSEPPRERSIGDVTTAPPEVTPESRPVNHSVTDHGMKPRKAFPVLGIDYTHVRTPFEISLWILLACLMKIGFHVIPTISSIVPESCLLIVVGLLVGGLIKGVGETPPFLQSDVFFLFLLPPIILDAGYFLPLRQFTENLGTILIFAVVGTLWNAFFLGGLMYAVCLVGGEQINNIGLLDNLLFGSIISAVDPVAVLAVFEEIHINELLHILVFGESLLNDAVTVVLYHLFEEFANYEHVGIVDIFLGFLSFFVVALGGVLVGVVYGVIAAFTSRFTSHIRVIEPLFVFLYSYMAYLSAELFHLSGIMALIASGVVMRPYVEANISHKSHTTIKYFLKMWSSVSETLIFIFLGVSTVAGSHHWNWTFVISTLLFCLIARVLGVLGLTWFINKFRIVKLTPKDQFIIAYGGLRGAIAFSLGYLLDKKHFPMCDLFLTAIITVIFFTVFVQVLGPGQGRPLPWGPSQAVPVEREESV

SEQ ID NO: 912426 - protein, 815 aa, Homo sapiens
MVLRSGICGLSPHRIFPSLLVVVALVGLLPVLRSHGLQLSPTASTIRSSEPPRERSIGDVTTAPPEVTPESRPVNHSVTDHGMKPRKAFPVLGIDYTHVRTPFEISLWILLACLMKIGFHVIPTISSIVPESCLLIVVGLLVGGLIKGVGETPPFLQSDVFFLFLLPPIILDAGYFLPLRQFTENLGTILIFAVVGTLWNAFFLGGLMYAVCLVGGEQINNIGLLDNLLFGSIISAVDPVAVLAVFEEIHINELLHILVFGESLLNDAVTVVLYHLFEEFANYEHVGIVDIFLGFLSFFVVALGGVLVGVVYGVIAAFTSRFTSHIRVIEPLFVFLYSYMAYLSAELFHLSGIMALIASGVVMRPYVEANISHKSHTTIKYFLKMWSSVSETLIFIFLGVSTVAGSHHWNWTFVISTLLFCLIARVLGVLGLTWFINKFRIVKLTPKDQFIIAYGGLRGAIAFSLGYLLDKKHFPMCDLFLTAIITVIFFTVFVQGMTIRPLVDLLAVKKKQETKRSINEEIHTQFLDHLLTGIEDICGHYGHHHWKDKLNRFNKKYVKKCLIAGERSKEPQLIAFYHKMEMKQAIELVESGGMGKIPSAVSTVSMQNIHPKSLPSERILPALSKDKEEEIRKILRNNLQKTRQRLRSYNRHTLVADPYEEAWNQMLLRRQKARQLEQKINNYLTVPAHKLDSPTMSRARIGSDPLAYEPKEDLPVITIDPASPQSPESVDLVNEELKGKVLGLSRDPAKVAEEDEDDDGGIMMRSKETSSPGTDDVFTPAPSDSPSSQRIQRCLSDPGPHPEPGEGEPFFPKGQ

SEQ ID NO: 912427 - protein, 815 aa, Homo sapiens; identical to SEQ ID NO: 912426

SEQ ID NO: 912428 - protein, 806 aa, Homo sapiens
MVLRSGICGLSPHRIFPSLLVVVALVGLLPVLRSHGLQLSPTASTIRSSEPPRERSIGDVTTAPPEVTPESRPVNHSVTDHGMKPRKAFPVLGIDYTHVRTPFEISLWILLACLMKIGFHVIPTISSIVPESCLLIVVGLLVGGLIKGVGETPPFLQSDVFFLFLLPPIILDAGYFLPLRQFTENLGTILIFAVVGTLWNAFFLGGLMYAVCLVGGEQINNIGLLDNLLFGSIISAVDPVAVLAVFEEIHINELLHILVFGESLLNDAVTVVLYHLFEEFANYEHVGIVDIFLGFLSFFVVALGGVLVGVVYGVIAAFTSRFTSHIRVIEPLFVFLYSYMAYLSAELFHLSGIMALIASGVVMRPYVEANISHKSHTTIKYFLKMWSSVSETLIFIFLGVSTVAGSHHWNWTFVISTLLFCLIARVLGVLGLTWFINKFRIVKLTPKDQFIIAYGGLRGAIAFSLGYLLDKKHFPMCDLFLTAIITVIFFTVFVQGMTIRPLVDLLAVKKKQETKRSINEEIHTQFLDHLLTGIEDICGHYGHHHWKDKLNRFNKKYVKKCLIAGERSKEPQLIAFYHKMEMKQAIELVESGGMGKIPSAVSTVSMQNIHPKSLPSERILPALSKDKEEEIRKILRNNLQKTRQRLRSYNRHTLVADPYEEAWNQMLLRRQKARQLEQKINNYLTVPAHKLDSPTMSRARIGSDPLAYEPKEDLPVITIDPASPQSPESVDLVNEELKGKVLGLSRDPAKVAEEDEDDDGGIMMRSKETSSPGTDDVFTPAPSDSPSSQRIQRCLILLLIQTNLSF

SEQ ID NO: 912429 - protein, 105 aa, Homo sapiens
MRLLHMRLLHMRLLHMSLSACWALNCCSKTVTSEVTPTPNQESLQPHRCWPLGTCLALGPDLQSCWPALTSPTLGLAPGTFPLCVPHPACCGSPLWRRWGGEGLP

SEQ ID NO: 912430 - protein, 521 aa, Homo sapiens; identical to SEQ ID NO: 912425

SEQ ID NO: 912431 - protein, 558 aa, Homo sapiens
MVLRSGICGLSPHRIFPSLLVVVALVGLLPVLRSHGLQLSPTASTIRSSEPPRERSIGDVTTAPPEVTPESRPVNHSVTDHGMKPRKAFPVLGIDYTHVRTPFEISLWILLACLMKIGFHVIPTISSIVPESCLLIVVGLLVGGLIKGVGETPPFLQSDVFFLFLLPPIILDAGYFLPLRQFTENLGTILIFAVVGTLWNAFFLGGLMYAVCLVGGEQINNIGLLDNLLFGSIISAVDPVAVLAVFEEIHINELLHILVFGESLLNDAVTVVLYHLFEEFANYEHVGIVDIFLGFLSFFVVALGGVLVGVVYGVIAAFTSRFTSHIRVIEPLFVFLYSYMAYLSAELFHLSGIMALIASGVVMRPYVEANISHKSHTTIKYFLKMWSSVSETLIFIFLGVSTVAGSHHWNWTFVISTLLFCLIARVLGVLGLTWFINKFRIVKLTPKDQFIIAYGGLRGAIAFSLGYLLDKKHFPMCDLFLTAIITVIFFTVFVQGMTIRPLVDLLAVKKKQETKRSINEEIHTQFLDHLLTGIEDICGHYGHHHWKDKQVAGLVGRQ

SEQ ID NO: 912432 - protein, 132 aa, Homo sapiens
MVLRSGICGLSPHRIFPSLLVVVALVGLLPVLRSHGLQLSPTASTIRSSEPPRERSIGDVTTAPPEVTPESRPVNHSVTDHGMKPRKAFPVLGIDYTHVRTPFEISLWILLACLMKIDNSGVTTVLTWIIIS

SEQ ID NO: 912433 - protein, 815 aa, Homo sapiens; identical to SEQ ID NO: 912426

SEQ ID NO: 912434 - protein, 110 aa, Homo sapiens
LGLVLELDQEELQLGRGGAPRRARAARRGVLLLAHREPPPARAEAPSRQAACLPPLSISPESQPGAPGPLPLSGWRSSRPLPGFTPSQPGLPAPSLLFLDWLSPPSVPFL

SEQ ID NO: 912435 - protein, 848 aa, Homo sapiens
MTQVFGQRLFESPYETADVDVKSFVEAGSGSSTMVLRSGICGLSPHRIFPSLLVVVALVGLLPVLRSHGLQLSPTASTIRSSEPPRERSIGDVTTAPPEVTPESRPVNHSVTDHGMKPRKAFPVLGIDYTHVRTPFEISLWILLACLMKIGFHVIPTISSIVPESCLLIVVGLLVGGLIKGVGETPPFLQSDVFFLFLLPPIILDAGYFLPLRQFTENLGTILIFAVVGTLWNAFFLGGLMYAVCLVGGEQINNIGLLDNLLFGSIISAVDPVAVLAVFEEIHINELLHILVFGESLLNDAVTVVLYHLFEEFANYEHVGIVDIFLGFLSFFVVALGGVLVGVVYGVIAAFTSRFTSHIRVIEPLFVFLYSYMAYLSAELFHLSGIMALIASGVVMRPYVEANISHKSHTTIKYFLKMWSSVSETLIFIFLGVSTVAGSHHWNWTFVISTLLFCLIARVLGVLGLTWFINKFRIVKLTPKDQFIIAYGGLRGAIAFSLGYLLDKKHFPMCDLFLTAIITVIFFTVFVQGMTIRPLVDLLAVKKKQETKRSINEEIHTQFLDHLLTGIEDICGHYGHHHWKDKLNRFNKKYVKKCLIAGERSKEPQLIAFYHKMEMKQAIELVESGGMGKIPSAVSTVSMQNIHPKSLPSERILPALSKDKEEEIRKILRNNLQKTRQRLRSYNRHTLVADPYEEAWNQMLLRRQKARQLEQKINNYLTVPAHKLDSPTMSRARIGSDPLAYEPKEDLPVITIDPASPQSPESVDLVNEELKGKVLGLSRDPAKVAEEDEDDDGGIMMRSKETSSPGTDDVFTPAPSDSPSSQRIQRCLSDPGPHPEPGEGEPFFPKGQ

SEQ ID NO: 912436 - protein, 298 aa, Homo sapiens
VGKAPHSEADLALGPFQFLDHLLTGIEDICGHYGHHHWKDKLNRFNKKYVKKCLIAGERSKEPQLIAFYHKMEMKQAIELVESGGMGKIPSAVSTVSMQNIHPKSLPSERILPALSKDKEEEIRKILRNNLQKTRQRLRSYNRHTLVADPYEEAWNQMLLRRQKARQLEQKINNYLTVPAHKLDSPTMSRARIGSDPLAYEPKEDLPVITIDPASPQSPESVDLVNEELKGKVLGLSRDPAKVAEEDEDDDGGIMMRSKETSSPGTDDVFTPAPSDSPSSQRIQRCLILLLIQTNLSF

SEQ ID NO: 912437 - protein, 816 aa, Homo sapiens
MVLRSGICGLSPHRIFPSLLVVVALVGLLPVLRSHGLQLSPTASTIRSSEPPRERSIGDVTTAPPEVTPESRPVNHSVTDHGMKPRKAFPVLGIDYTHVRTPFEISLWILLACLMKIGFHVIPTISSIVPESCLLIVVGLLVGGLIKGVGETPPFLQSDVFFLFLLPPIILDAGYFLPLRQFTENLGTILIFAVVGTLWNAFFLGGLMYAVCLVGGEQINNIGLLDNLLFGSIISAVDPVAVLAVFEEIHINELLHILVFGESLLNDAVTVVLYHLFEEFANYEHVGIVDIFLGFLSFFVVALGGVLVGVVYGVIAAFTSRFTSHIRVIEPLFVFLYSYMAYLSAELFHLSGIMALIASGVVMRPYVEANISHKSHTTIKYFLKMWSSVSETLIFIFLGVSTVAGSHHWNWTFVISTLLFCLIARVLGVLGLTWFINKFRIVKLTPKDQFIIAYGGLRGAIAFSLGYLLDKKHFPMCDLFLTAIITVIFFTVFVQGMTIRPLVDLLAVKKKQETKRSINEEIHTQFLDHLLTGIEDICGHYGHHHWKDKLNRFNKKYVKKCLIAGERSKEPQLIAFYHKMEMKQAIELVESGGMGKIPSAVSTVSMQNIHPKSLPSERILPALSKDKEEEIRKILRNNLQKTRQRLRSYNRHTLVADPYEEAWNQMLLRRQKARQLEQKINNYLTVPAHKLDSPTMSRARIGSDPLAYEPKEDLPVITIDPASPQSPESVDLVNEELKGKVLGLSRDPAKVAEEDEDDDGGIMMRSKETSSPGTDDVFTPAPSDSPSSQRIQRCLSDPGPHPEPGEGEPFFPRIVQ

SEQ ID NO: 912438 - protein, 324 aa, Homo sapiens
MVLRSGICGLSPHRIFPSLLVVVALVGLLPVLRSHGLQLSPTASTIRSSEPPRERSIGDVTTAPPEVTPESRPVNHSVTDHGMKPRKAFPVLGIDYTHVRTPFEISLWILLACLMKIGFHVIPTISSIVPESCLLIVVGLLVGGLIKGVGETPPFLQSDVFFLFLLPPIILDAGYFLPLRQFTENLGTILIFAVVGTLWNAFFLGGLMYAVCLVGGEQINNIGLLDNLLFGSIISAVDPVAVLAVFEEIHINELLHILVFGESLLNDAVTVVLYHLFEEFANYEHVGIVDIFLGFLSFFVVAGLVACFLLMFSIFSSPKTPRLN

SEQ ID NO: 912439 - protein, 54 aa, Homo sapiens
TAPTPPGAEPSGARTALTLSLPQLRSYNRHTLVADPYEEAWNQMLLRRQKARQL

SEQ ID NO: 912440 - protein, 401 aa, Homo sapiens
ESASGSEGIGREMGKMAAAVGSVATLATEPGEDAFRKLFRFYRQSRPGTADLEGVIDFSAAHAARGKGPGAQKVIKSQLNVSSVSEQNAYRAGLQPVSKWQAYGLKGYPGFIFIPNPFLPGYQWHWVKQCLKLYSQKPNVCNLDKHMSKEETQDLWEQSKEFLRYKEATKRRPRSLLEKLRWVTVGYHYNWDSKKYSADHYTPFPSDLGFLSEQVAAACGFEDFRAEAGILNYYRLDSTLGIHVDRSELDHSKPLLSFSFGQSAIFLLGGLQRDEAPTAMFMHSGDIMIMSGFSRLLNHAVPRVLPNPEGEGLPHCLEAPLPAVLPRDSMVEPCSMEDWQVCASYLKTARVNMTVRQVLATDQNFPLEPIEDEKRDISTEGFCHLDDQNSEVKRARINPDS

SEQ ID NO: 912441 - protein, 310 aa, Homo sapiens
NLLPDQRVWAARWGRWQRPWALWRLWRLSPGRTPFGNFSASTVRAGPGPQTWKGSSTSRRPTQPVARVLVPKRYKEATKRRPRSLLEKLRWVTVGYHYNWDSKKYSADHYTPFPSDLGFLSEQVAAACGFEDFRAEAGILNYYRLDSTLGIHVDRSELDHSKPLLSFSFGQSAIFLLGGLQRDEAPTAMFMHSGDIMIMSGFSRLLNHAVPRVLPNPEGEGLPHCLEAPLPAVLPRDSMVEPCSMEDWQVCASYLKTARVNMTVRQVLATDQNFPLEPIEDEKRDISTEGFCHLDDQNSEVKRARINPDS

SEQ ID NO: 912442 - protein, 234 aa, Homo sapiens
ESASGSEGIGREMGKMAAAVGSVATLATEPGEDAFRKLFRFYRQSRPGTADLEGVIDFSAAHAARGKGPGAQKVIKSQLNVSSVSEQNAYRAGLQPVSKWQAYGLKGYPGFIFIPNPFLPGYQWHWVKQCLKLYSQKPNVCNLDKHMSKEETQDLWEQSKEFLRESPKPHPNLMIRQEDSGLSRWLHLQIYHSESIQSKISKGKRHLEQSPGKTRCMPPKVLSQGSHTGYGNGL

SEQ ID NO: 912443 - protein, 401 aa, Homo sapiens; identical to SEQ ID NO: 912440

SEQ ID NO: 912444 - protein, 128 aa, Homo sapiens
ESASGSEGIGREMGKMAAAVGSVATLATEPGEDAFRKLFRFYRQSRPGTADLEGVIDFSAAHAARGKGPGAQKVIKSQLNVSSVSEQNAYRAGLQPVSKWQAYGLKGYPGIKKRLNGDPEVYWRNCVG

SEQ ID NO: 912445 - protein, 529 aa, Homo sapiens
PRPLPDFARSDPRGCPPLRTPLAARARSAARPHRFTMLKALFLTMLTLALVKSQDTEETITYTQCTDGYEWDPVRQQCKDIDECDIVPDACKGGMKCVNHYGGYLCLPKTAQIIVNNEQPQQETQPAEGTSGATTGVVAASSMATSGVLPGGGFVASAAAVAGPEMQTGRNNFVIRRNPADPQRIPSNPSHRIQCAAGYEQSEHNVCQDIDECTAGTHNCRADQVCINLRGSFACQCPPGYQKRGEQCVDIDECTIPPYCHQRCVNTPGSFYCQCSPGFQLAANNYTCVDINECDASNQCAQQCYNILGSFICQCNQGYELSSDRLNCEDIDECRTSSYLCQYQCVNEPGKFSCMCPQGYQVVRSRTCQDINECETTNECREDEMCWNYHGGFRCYPRNPCQDPYILTPENRCVCPVSNAMCRELPQSIVYKYMSIRSDRSVPSDIFQIQATTIYANTINTFRIKSGNENGEFYLRQTSPVSAMLVLVKSLSGPREHIVDLEMLTVSSIGTFRTSSVLRLTIIVGPFSF

SEQ ID NO: 912446 - protein, 542 aa, Homo sapiens
AAAAGLRQIRPTGLPSPAHSPRCPGPERSAAAQVFLLCCARNSASSRFTMLKALFLTMLTLALVKSQDTEETITYTQCTDGYEWDPVRQQCKDIDECDIVPDACKGGMKCVNHYGGYLCLPKTAQIIVNNEQPQQETQPAEGTSGATTGVVAASSMATSGVLPGGGFVASAAAVAGPEMQTGRNNFVIRRNPADPQRIPSNPSHRIQCAAGYEQSEHNVCQDIDECTAGTHNCRADQVCINLRGSFACQCPPGYQKRGEQCVDIDECTIPPYCHQRCVNTPGSFYCQCSPGFQLAANNYTCVDINECDASNQCAQQCYNILGSFICQCNQGYELSSDRLNCEDIDECRTSSYLCQYQCVNEPGKFSCMCPQGYQVVRSRTCQDINECETTNECREDEMCWNYHGGFRCYPRNPCQDPYILTPENRCVCPVSNAMCRELPQSIVYKYMSIRSDRSVPSDIFQIQATTIYANTINTFRIKSGNENGEFYLRQTSPVSAMLVLVKSLSGPREHIVDLEMLTVSSIGTFRTSSVLRLTIIVGPFSF

SEQ ID NO: 912447 - protein, 493 aa, Homo sapiens
MLKALFLTMLTLALVKSQDTEETITYTQCTDGYEWDPVRQQCKDIDECDIVPDACKGGMKCVNHYGGYLCLPKTAQIIVNNEQPQQETQPAEGTSGATTGVVAASSMATSGVLPGGGFVASAAAVAGPEMQTGRNNFVIRRNPADPQRIPSNPSHRIQCAAGYEQSEHNVCQDIDECTAGTHNCRADQVCINLRGSFACQCPPGYQKRGEQCVDIDECTIPPYCHQRCVNTPGSFYCQCSPGFQLAANNYTCVDINECDASNQCAQQCYNILGSFICQCNQGYELSSDRLNCEDIDECRTSSYLCQYQCVNEPGKFSCMCPQGYQVVRSRTCQDINECETTNECREDEMCWNYHGGFRCYPRNPCQDPYILTPENRCVCPVSNAMCRELPQSIVYKYMSIRSDRSVPSDIFQIQATTIYANTINTFRIKSGNENGEFYLRQTSPVSAMLVLVKSLSGPREHIVDLEMLTVSSIGTFRTSSVLRLTIIVGPFSF

SEQ ID NO: 912448 - protein, 484 aa, Homo sapiens [sequence omitted]

SEQ ID NO: 912449 - protein, 511 aa, Homo sapiens
PRPLPDFARSDPRGCPPLRTPLAARARSAARPHRFTMLKALFLTMLTLALVKSQDTEETITYTQCTDGYEWDPVRQQCKDIDECDIVPDACKGGMKCVNHYGGYLCLPTEGTSGATTGVVAASSMATSGVLPGGGFVASAAAVAGPEMQTGRNNFVIRRNPADPQRIPSNPSHRIQCAAGYEQSEHNVCQDIDECTAGTHNCRADQVCINLRGSFACQCPPGYQKRGEQCVDIDECTIPPYCHQRCVNTPGSFYCQCSPGFQLAANNYTCVDINECDASNQCAQQCYNILGSFICQCNQGYELSSDRLNCEDIDECRTSSYLCQYQCVNEPGKFSCMCPQGYQVVRSRTCQDINECETTNECREDEMCWNYHGGFRCYPRNPCQDPYILTPENRCVCPVSNAMCRELPQSIVYKYMSIRSDRSVPSDIFQIQATTIYANTINTFRIKSGNENGEFYLRQTSPVSAMLVLVKSLSGPREHIVDLEMLTVSSIGTFRTSSVLRLTIIVGPFSF

SEQ ID NO: 912450 - protein, 548 aa, Homo sapiens
PRPLPDFARSDPRGCPPLRTPLAARARSAARPHRFTMLKALFLTMLTLALVKSQDTEETITYTQCTDGYEWDPVRQQCKDIDECDIVPDACKGGMKCVNHYGGYLCLPKTAQIIVNNEQPQQETQPAEGTSGATTGVVAASSMATSGVLPGGGFVASAAAVAGPEMQTGRNNFVIRRNPADPQRIPSNPSHRIQCAAGYEQSEHNVCQDIDECTAGTHNCRADQVCINLRGSFACQCPPGYQKRGEQCVDIDECTIPPYCHQRCVNTPGSFYCQCSPGFQLAANNYTCVDINECDASNQCAQQCYNILGSFICQCNQGYELSSDRLNCEDIDECRTSSYLCQYQCVNEPGKFSCMCPQGYQVVRSRTCQVYFSCMCPQGYQVVEVEHVNINECETTNECREDEMCWNYHGGFRCYPRNPCQDPYILTPENRCVCPVSNAMCRELPQSIVYKYMSIRSDRSVPSDIFQIQATTIYANTINTFRIKSGNENGEFYLRQTSPVSAMLVLVKSLSGPREHIVDLEMLTVSSIGTFRTSSVLRLTIIVGPFSF

SEQ ID NO: 912451 - protein, 283 aa, Homo sapiens
RTRGCQLKPRTALAANNYIYAGIVVCCQLKPRTALAINNYTCVDINECDASNQCAQQCYNILGSFICQCNQGYELSSDRLNCEDIDECRTSSYLCQYQCVNEPGKFSCMCPQGYQVVRSRTCQDINECETTNECREDEMCWNYHGGFRCYPRNPCQDPYILTPENRCVCPVSNAMCRELPQSIVYKYMSIRSDRSVPSDIFQIQATTIYANTINTFRIKSGNENGEFYLRQTSPVSAMLVLVKSLSGPREHIVDLEMLTVSSIGTFRTSSVLRLTIIVGPFSF

SEQ ID NO: 912452 - protein, 514 aa, Homo sapiens
PRPLPDFARSDPRGCPPLRTPLAARARSAARPHRFTMLKALFLTMLTLALVKSQDTEETITYTQCTDGYEWDPVRQQCKDIDECDIVPDACKGGMKCVNHYGGYLCLPKTAQIIVNNEQPQQETQPAEGTSGATTGVVAASSMATSGVLPGGGFVASAAAVAGPEMQTGRNNFVIRRNPADPQRIPSNPSHRIQCAAGYEQSEHNVCQDIDECTAGTHNCRADQVCINLRGSFACQCPPGYQKRGEQCVDIDECTIPPYCHQRCVNTPGSFYCQCSPGFQLAANNYTCVDINECDASNQCAQQCYNILGSFICQCNQGYELSSDRLNCEDIDECRTSSYLCQYQCVNEPGKFSCMCPQGYQVVRSRTCQDINECETTNECREDEMCWNYHGGFRCYPRNPCQDPYILTPENRCVCPVSNAMCRELPQSIVYKYMSIRSDRSVPSDIFQIQATTIYANTINTFRIKSGNENGEFYLRQTSPVSAMLVLVKSLSGPREHIVDLEMLTVSSIHFSLF

SEQ ID NO: 912453 - protein, 529 aa, Homo sapiens; identical to SEQ ID NO: 912445

SEQ ID NO: 912454 - protein, 411 aa, Homo sapiens
PRPLPDFARSDPRGCPPLRTPLAARARSAARPHRFTMLKALFLTMLTLALVKSQDTEETITYTQCTDGYEWDPVRQQCKDIDECDIVPDACKGGMKCVNHYGGYLCLPKTAQIIVNNEQPQQETQPAEGTSGATTGVVAASSMATSGVLPGGGFVASAAAVAGPEMQTGRNNFVIRRNPADPQRIPSNPSHRIQCAAGYEQSEHNVCQDIDECTAGTHNCRADQVCINLRGSFACQCPPGYQKRGEQCVDIDECTIPPYCHQRCVNTPGSFYCQCSPGFQLAANNYTCVDINECDASNQCAQQCYNILGSFICQCNQGYELSSDRLNCEDIDECRTSSYLCQYQCVNEPGKFSCMCPQGYQVVRSRTCQDINECETTNECREDEMCWNYHGGFRCYPRNPCQDPYILTPEN

SEQ ID NO: 912455 - protein, 291 aa, Homo sapiens
PRPLPDFARSDPRGCPPLRTPLAARARSAARPHRFTMLKALFLTMLTLALVKSQDTEETITYTQCTDGYEWDPVRQQCKDIDECDIVPDACKGGMKCVNHYGGYLCLPKTAQIIVNNEQPQQETQPAEGTSGATTGVVAASSMATSGVLPGGGFVASAAAVAGPEMQTGRNNFVIRRNPADPQRIPSNPSHRIQCAAGYEQSEHNVCQDIDECTAGTHNCRADQVCINLRGSFACQCPPGYQKRGEQCVDIDECTIPPYCHQRCVNTPGSFYCQCSPGFQLAANNYTCVEF

SEQ ID NO: 912456 - protein, 493 aa, Homo sapiens; identical to SEQ ID NO: 912447

SEQ ID NO: 912457 - protein, 470 aa, Homo sapiens
MHSQQCTDGYEWDPVRQQCKDIDECDIVPDACKGGMKCVNHYGGYLCLPKTAQIIVNNEQPQQETQPAEGTSGATTGVVAASSMATSGVLPGGGFVASAAAVAGPEMQTGRNNFVIRRNPADPQRIPSNPSHRIQCAAGYEQSEHNVCQDIDECTAGTHNCRADQVCINLRGSFACQCPPGYQKRGEQCVDIDECTIPPYCHQRCVNTPGSFYCQCSPGFQLAANNYTCVDINECDASNQCAQQCYNILGSFICQCNQGYELSSDRLNCEDIDECRTSSYLCQYQCVNEPGKFSCMCPQGYQVVRSRTCQDINECETTNECREDEMCWNYHGGFRCYPRNPCQDPYILTPENRCVCPVSNAMCRELPQSIVYKYMSIRSDRSVPSDIFQIQATTIYANTINTFRIKSGNENGEFYLRQTSPVSAMLVLVKSLSGPREHIVDLEMLTVSSIGTFRTSSVLRLTIIVGPFSF

SEQ ID NO: 912458 - protein, 435 aa, Homo sapiens
ELGPVSSGGYLCLPKTAQIIVNNEQPQQETQPAEGTSGATTGVVAASSMATSGVLPGGGFVASAAAVAGPEMQTGRNNFVIRRNPADPQRIPSNPSHRIQCAAGYEQSEHNVCQDIDECTAGTHNCRADQVCINLRGSFACQCPPGYQKRGEQCVDIDECTIPPYCHQRCVNTPGSFYCQCSPGFQLAANNYTCVDINECDASNQCAQQCYNILGSFICQCNQGYELSSDRLNCEDIDECRTSSYLCQYQCVNEPGKFSCMCPQGYQVVRSRTCQDINECETTNECREDEMCWNYHGGFRCYPRNPCQDPYILTPENRCVCPVSNAMCRELPQSIVYKYMSIRSDRSVPSDIFQIQATTIYANTINTFRIKSGNENGEFYLRQTSPVSAMLVLVKSLSGPREHIVDLEMLTVSSIGTFRTSSVLRLTIIVGPFSF

SEQ ID NO: 912459 - protein, 449 aa, Homo sapiens
PRPLPDFARSDPRGCPPLRTPLAARARSAARPHRFTMLKALFLTMLTLALVKSQDTEETITYTQCTDGYEWDPVRQQCKDIDECDIVPDACKGGMKCVNHYGGYLCLPKTAQIIVNNEQPQQETQPAEGTSGATTGVVAASSMATSGVLPGGGFVASAAAVAGPEMQTGRNNFVIRRNPADPQRIPSNPSHRIQCAAGYEQSEHNVCQDIDECTAGTHNCRADQVCINLRGSFACQCPPGYQKRGEQCVDIDECRTSSYLCQYQCVNEPGKFSCMCPQGYQVVRSRTCQDINECETTNECREDEMCWNYHGGFRCYPRNPCQDPYILTPENRCVCPVSNAMCRELPQSIVYKYMSIRSDRSVPSDIFQIQATTIYANTINTFRIKSGNENGEFYLRQTSPVSAMLVLVKSLSGPREHIVDLEMLTVSSIGTFRTSSVLRLTIIVGPFSF

SEQ ID NO: 912460 - protein, 529 aa, Homo sapiens; identical to SEQ ID NO: 912445

SEQ ID NO: 912461 - protein, 529 aa, Homo sapiens; identical to SEQ ID NO: 912445

SEQ ID NO: 912462 - protein, 91 aa, Homo sapiens
FDGDSPFIFQIQATTIYANTINTFRIKSGNENGEFYLRQTSPVSAMLVLVKSLSGPREHIVDLEMLTVSSIGTFRTSSVLRLTIIVGPFSF

SEQ ID NO: 912463 - protein, 114 aa, Homo sapiens
AAAAGLRQIRPTGLPSPAHSPRCPGPERSAAAQVFLLCCARNSASSRFTMLKALFLTMLTLALVKSQDTEETITYTQCTDGYEWDPVRQQCKDIDECDIVPDACKGGMKCVNHY

SEQ ID NO: 912464 - protein, 218 aa, Homo sapiens
IVKRSPELFCWFCLQRTSSPQVRKLIVLDPKKRLTTFQALQHPWVTGKAANFVHMDTAQKKLQEFNARRKLKAAVKAVVASSRLGSASSSHGSIQESHKASRDPSPIQDGNEDMKAIPEGEKIQGDGAQAAVKGAQAELMKVQALEKVKGADINAEEAPKMVPKAVEDGIKVADLELEEGLAEEKLKTVEEAAAPREGQGSSAVGFEVPQQDVILPEY

SEQ ID NO: 912465 - protein, 508 aa, Homo sapiens
SGSLAPAFAGGGWRPASRSGSGGGGGGGFRSPAAKMLKVTVPSCSASSCSSVTASAAPGTASLVPDYWIDGSNRDALSDFFEVESELGRGATSIVYRCKQKGTQKPYALKVLKKTVDKKIVRTEIGVLLRLSHPNIIKLKEIFETPTEISLVLELVTGGELFDRIVEKGYYSERDAADAVKQILEAVAYLHENGIVHRDLKPENLLYATPAPDAPLKIADFGLSKIVEHQVLMKTVCGTPGYCAPEILRGCAYGPEVDMWSVGIITYILLCGFEPFYDERGDQFMFRRILNCEYYFISPWWDEVSLNAKDLVRKLIVLDPKKRLTTFQALQHPWVTGKAANFVHMDTAQKKLQEFNARRKLKAAVKAVVASSRLGSASSSHGSIQESHKASRDPSPIQDGNEDMKAIPEGEKIQGDGAQAAVKGAQAELMKVQALEKVKGADINAEEAPKMVPKAVEDGIKVADLELEEGLAEEKLKTVEEAAAPREGQGSSAVGFEVPQQDVILPEY

SEQ ID NO: 912466 - protein, 508 aa, Homo sapiens; identical to SEQ ID NO: 912465

SEQ ID NO: 912467 - protein, 670 aa, Homo sapiens
MAKRIKAKPTSDKPGSPYRSVTHFDSLAVIDIPGADTLDKLFDHAVSKFGKKDSLGTREILSEENEMQPNGKVFKKLILGNYKWMNYLEVNRRVNNFGSGLTALGLKPKNTIAIFCETRAEWMIAAQTCFKYNFPLVTLYATLGKEAVVHGLNESEASYLITSVELLESKLKTALLDISCVKHIIYVDNKAINKAEYPEGFEIHSMQSVEELGSNPENLGIPPSRPTPSDMAIVMYTSGSTGRPKGVMMHHSNLIAGMTGQCERIPGLGPKDTYIGYLPLAHVLELTAEISCFTYGCRIGYSSPLTLSDQSSKIKKGSKGDCTVLKPTLMAAVPEIMDRIYKNVMSKVQEMNYIQKTLFKIGYDYKLEQIKKGYDAPLCNLLLFKKVKALLGGNVRMMLSGGAPLSPQTHRFMNVCFCCPIGQGYGLTESCGAGTVTEVTDYTTGRVGAPLICCEIKLKDWQEGGYTINDKPNPRGEIVIGGQNISMGYFKNEEKTAEDYSVDENGQRWFCTGDIGEFHPDGCLQIIDRKKDLVKLQAGEYVSLGKVEAALKNCPLIDNICAFAKSDQSYVISFVVPNQKRLTLLAQQKGVEGTWVDICNNPAMEAEILKEIREAANAMKLERFEIPIKVRLSPEPWTPETGLVTDAFKLKRKELRNHYLKDIERMYGGK

SEQ ID NO: 912468 - protein, 670 aa, Homo sapiens; identical to SEQ ID NO: 912467

SEQ ID NO: 912469 - protein, 670 aa, Homo sapiens; identical to SEQ ID NO: 912467

SEQ ID NO: 912470 - protein, 711 aa, Homo sapiens
MKLKLNVLTIILLPVHLLITIYSALIFIPWYFLTNAKKKNAMAKRIKAKPTSDKPGSPYRSVTHFDSLAVIDIPGADTLDKLFDHAVSKFGKKDSLGTREILSEENEMQPNGKVFKKLILGNYKWMNYLEVNRRVNNFGSGLTALGLKPKNTIAIFCETRAEWMIAAQTCFKYNFPLVTLYATLGKEAVVHGLNESEASYLITSVELLESKLKTALLDISCVKHIIYVDNKAINKAEYPEGFEIHSMQSVEELGSNPENLGIPPSRPTPSDMAIVMYTSGSTGRPKGVMMHHSNLIAGMTGQCERIPGLGPKDTYIGYLPLAHVLELTAEISCFTYGCRIGYSSPLTLSDQSSKIKKGSKGDCTVLKPTLMAAVPEIMDRIYKNVMSKVQEMNYIQKTLFKIGYDYKLEQIKKGYDAPLCNLLLFKKVKALLGGNVRMMLSGGAPLSPQTHRFMNVCFCCPIGQGYGLTESCGAGTVTEVTDYTTGRVGAPLICCEIKLKDWQEGGYTINDKPNPRGEIVIGGQNISMGYFKNEEKTAEDYSVDENGQRWFCTGDIGEFHPDGCLQIIDRKKDLVKLQAGEYVSLGKVEAALKNCPLIDNICAFAKSDQSYVISFVVPNQKRLTLLAQQKGVEGTWVDICNNPAMEAEILKEIREAANAMKLERFEIPIKVRLSPEPWTPETGLVTDAFKLKRKELRNHYLKDIERMYGGK

SEQ ID NO: 912471 - protein, 711 aa, Homo sapiens; identical to SEQ ID NO: 912470

SEQ ID NO: 912472 - protein, 628 aa, Homo sapiens
EFPPGPAPRPAQPRAPRVLPGLRPSPCAARPTRDRPPDRASRPPGRPACMLRSGPASGPSVPTGRAMPSRRVARPPAAPELGALGSPDLSSLSLAVSRSTDELEIIDEYIKENGFGLDGGQPGPGEGLPRLVSRGAASLSTVTLGPVAPPATPPPWGCPLGRLVSPAPGPGPQPHLVITEQPKQRGMRFRYECEGRSAGSILGESSTEASKTLPAIELRDCGGLREVEVTACLVWKDWPHRVHPHSLVGKDCTDGICRVRLRPHVSPRHSFNNLGIQCVRKKEIEAAIERKIQLGIDPYNAGSLKNHQEVDMNVVRICFQASYRDQQGQMRRMDPVLSEPVYDKKSTNTSELRICRINKESGPCTGGEELYLLCDKVQKEDISVVFSRASWEGRADFSQADVHRQIAIVFKTPPYEDLEIVEPVTVNVFLQRLTDGVCSEPLPFTYLPRDHDSYGVDKKRKRGMPDVLGELNSSDPHGIESKRRKKKPAILDHFLPNHGSGPFLPPSALLPDPDFFSGTVSLPGLEPPGGPDLLDDGFAYDPTAPTLFTMLDLLPPAPPHASAVVCSGGAGAVVGETPGPEPLTLDSYQAPGPGDGGTASLVGSNMFPNHYREAAFGGGLLSPGPEAT

SEQ ID NO: 912473 - protein, 628 aa, Homo sapiens; identical to SEQ ID NO: 912472

SEQ ID NO: 912474 - protein, 332 aa, Homo sapiens
EFPPGPAPRPAQPRAPRVLPGLRPSPCAARPTRDRPPDRASRPPGRPACMLRSGPASGPSVPTGRAMPSRRVARPPAAPELGALGSPDLSSLSLAVSRSTDELEIIDEYIKENGFGLDGGQPGPGEGLPRLVSRGAASLSTVTLGPVAPPATPPPWGCPLGRLVSPAPGPGPQPHLVITEQPKQRGMRFRYECEGRSAGSILGESSTEASKTLPAIELRDCGGLREVEVTACLVWKDWPHRVHPHSLVGKDCTDGICRVRLRPHVSPRHSEQLGISVEEQGDRGALREIKGHDPQVGRRHQSRHTGQIARQTDEGNPRTGRARKPGHGEEKK

SEQ ID NO: 912475 - protein, 332 aa, Homo sapiens
KILKRGNISLDFEGRLGKLGAQWSRCPGLADVPRFLPEDISVVFSRASWEGRADFSQADVHRQIAIVFKTPPYEDLEIVEPVTVNVFLQRLTDGVCSEPLPFTYLPRDHDSYGVDKKRKRGMPDVLGELNSSGVCPLPLSTPIPRFWGGDSCPHCPVPPQAGEEGLSGNRGPHLCLPSDPHGIESKRRKKKPAILDHFLPNHGSGPFLPPSALLPDPDFFSGTVSLPGLEPPGGPDLLDDGFAYDPTAPTLFTMLDLLPPAPPHASAVVCSGGAGAVVGETPGPEPLTLDSYQAPGPGDGGTASLVGSNMFPNHYREAAFGGGLLSPGPEAT

SEQ ID NO: 912476 - protein, 318 aa, Homo sapiens
MPKRGKKGAVAEDGDELRTEPEAKKSKTAAKKNDKEAAGEGPALYEDPPDQKTSPSGKPATLKICSWNVDGLRAWIKKKGLDWVKEEAPDILCLQETKCSENKLPAELQELPGLSHQYWSAPSDKEGYSGVGLLSRQCPLKVSYGIGDEEHDQEGRVIVAEFDSFVLVTAYVPNAGRGLVRLEYRQRWDEAFRKFLKGLASRKPLVLCGDLNVAHEEIDLRNPKGNKKNAGFTPQERQGFGELLQAVPLADSFRHLYPNTPYAYTFWTYMMNARSKNVGWRLDYFLLSHSLLPALCDSKIRSKALGSDHCPITLYLAL

SEQ ID NO: 912477 - protein, 318 aa, Homo sapiens; identical to SEQ ID NO: 912476

SEQ ID NO: 912478 - protein, 318 aa, Homo sapiens; identical to SEQ ID NO: 912476

SEQ ID NO: 912479 - protein, 318 aa, Homo sapiens; identical to SEQ ID NO: 912476

SEQ ID NO: 912480 - protein, 249 aa, Homo sapiens
MPKRGKKGAVAEDGDELRTEPEAKKSKTAAKKNDKEAAGEGPALYEDPPDQKTSPSGKPATLKICSWNVDGLRAWIKKKGLDWVKEEAPDILCLQETKCSENKLPAELQELPGLSHQYWSAPSDKEGYSGVGLLSRQCPLKVSYGIGDEEHDQEGRVIVAEFDSFVLVTAYVPNAGRGLVRLEYRQRWDEAFRKFLKGLASRKPLVLCGDLNVAHEEIDLRNPKGNKKNAGFTPQERQGFGELLQAVLI

SEQ ID NO: 912481 - protein, 345 aa, Homo sapiens
MPKRGKKGAVAEDGDELRTEPEAKKSKTAAKKNDKEAAGEGPALYEDPPDQKTSPSGKPATLKICSWNVDGLRAWIKKKGLDWVKEEAPDILCLQETKCSENKLPAELQELPGLSHQYWSAPSDKEGYSGVGLLSRQCPLKVSYGIGDEEHDQEGRVIVAEFDSFVLVTAYVPNAGRGLVRLEYRQRWDEAFRKFLKGLASRKPLVLCGDLNVAHEEIDLRNPKGNKKNAGFTPQERQGFGELLQAVPLADSFRHLYPNTPYAYTFWTYMMNARSKNVGWRLDYFLLSHSLLPALCDSKIRSKAELWLNYTYGTPKIDGKAKNFNLKKVFVKGPQGVEYRMGVKD

SEQ ID NO: 912482 - protein, 318 aa, Homo sapiens; identical to SEQ ID NO: 912476

SEQ ID NO: 912483 - protein, 353 aa, Homo sapiens
THVGAQRAPFFVRNAVKILLRWVTRYSCPRAFVTGMPKRGKKGAVAEDGDELRTEPEAKKSKTAAKKNDKEAAGEGPALYEDPPDQKTSPSGKPATLKICSWNVDGLRAWIKKKGLDWVKEEAPDILCLQETKCSENKLPAELQELPGLSHQYWSAPSDKEGYSGVGLLSRQCPLKVSYGIGDEEHDQEGRVIVAEFDSFVLVTAYVPNAGRGLVRLEYRQRWDEAFRKFLKGLASRKPLVLCGDLNVAHEEIDLRNPKGNKKNAGFTPQERQGFGELLQAVPLADSFRHLYPNTPYAYTFWTYMMNARSKNVGWRLDYFLLSHSLLPALCDSKIRSKALGSDHCPITLYLAL

SEQ ID NO: 912484 - protein, 318 aa, Homo sapiens; identical to SEQ ID NO: 912476

SEQ ID NO: 912485 - protein, 308 aa, Homo sapiens
MSVYITHFIEPEAKKSKTAAKKNDKEAAGEGPALYEDPPDQKTSPSGKPATLKICSWNVDGLRAWIKKKGLDWVKEEAPDILCLQETKCSENKLPAELQELPGLSHQYWSAPSDKEGYSGVGLLSRQCPLKVSYGIGDEEHDQEGRVIVAEFDSFVLVTAYVPNAGRGLVRLEYRQRWDEAFRKFLKGLASRKPLVLCGDLNVAHEEIDLRNPKGNKKNAGFTPQERQGFGELLQAVPLADSFRHLYPNTPYAYTFWTYMMNARSKNVGWRLDYFLLSHSLLPALCDSKIRSKALGSDHCPITLYLAL

SEQ ID NO: 912486 - protein, 300 aa, Homo sapiens
MPKRGKKGAVAEDGDELRTEPEAKKSKTAAKKNDKEAAGEGPALYEDPPDQDGLRAWIKKKGLDWVKEEAPDILCLQETKCSENKLPAELQELPGLSHQYWSAPSDKEGYSGVGLLSRQCPLKVSYGIGDEEHDQEGRVIVAEFDSFVLVTAYVPNAGRGLVRLEYRQRWDEAFRKFLKGLASRKPLVLCGDLNVAHEEIDLRNPKGNKKNAGFTPQERQGFGELLQAVPLADSFRHLYPNTPYAYTFWTYMMNARSKNVGWRLDYFLLSHSLLPALCDSKIRSKALGSDHCPITLYLAL

SEQ ID NO: 912487 - protein, 308 aa, Homo sapiens; identical to SEQ ID NO: 912485

SEQ ID NO: 912488 - protein, 301 aa, Homo sapiens [sequence omitted]

SEQ ID NO: 912489 - protein, 300 aa, Homo sapiens; identical to SEQ ID NO: 912486

SEQ ID NO: 912490 - protein, 300 aa, Homo sapiens; identical to SEQ ID NO: 912486

SEQ ID NO: 912491 - protein, 250 aa, Homo sapiens
  misc_feature (250)..(250): Xaa can be any naturally occurring amino acid
MPKRGKKGAVAEDGDELRTEPEAKKSKTAAKKNDKEAAGEGPALYEDPPDQKTSPSGKPATLKICSWNVDGLRAWIKKKGLDWVKEEAPDILCLQETKCSENKLPAELQELPGLSHQYWSAPSDKEGYSGVGLLSRQCPLKVSYGIGDEEHDQEGRVIVAEFDSFVLVTAYVPNAGRGLVRLEYRQRWLVKLWKSEGWFQSLAGGLWAGMSPRDRVVRQRVGFGAGLAPPCWVVRGLPRGPVLPFRSLSX

SEQ ID NO: 912492 - protein, 318 aa, Homo sapiens; identical to SEQ ID NO: 912476

SEQ ID NO: 912493 - protein, 318 aa, Homo sapiens; identical to SEQ ID NO: 912476

SEQ ID NO: 912494 - protein, 249 aa, Homo sapiens
MPKRGKKGAVAEDGDELRTEPEAKKSKTAAKKNDKEAAGEGPALYEDPPDQKTSPSGKPATLKICSWNVDGLRAWIKKKGLDWVKEEAPDILCLQETKCSENKLPAELQELPGLSHQYWSAPSDKEGYSGVGLLSRQCPLKVSYGIGDEEHDQEGRVIVAEFDSFVLVTAYVPNAGRGLVRLEYRQRWDEAFRKFLKGLASRKPLVLCGDLNVAHEEIDLRNPKGNSHWLTALGTSTPTHPMPTPFGLI

SEQ ID NO: 912495 - protein, 318 aa, Homo sapiens; identical to SEQ ID NO: 912476

SEQ ID NO: 912496 - protein, 294 aa, Homo sapiens
MPKRGKKGAVAEDGDELRTEPEAKKSKTAAKKNDKEAAGEGPALYEDPPDQKTSPSGKPATLKICSWNVDGLRAWIKKKGLDWVKEEAPDILCLQETKCSENKLPAELQELPGLSHQYWSAPSDKEGYSGVGLLSRQCPLKVSYGIDVPNAGRGLVRLEYRQRWDEAFRKFLKGLASRKPLVLCGDLNVAHEEIDLRNPKGNKKNAGFTPQERQGFGELLQAVPLADSFRHLYPNTPYAYTFWTYMMNARSKNVGWRLDYFLLSHSLLPALCDSKIRSKALGSDHCPITLYLAL

SEQ ID NO: 912497 - protein, 318 aa, Homo sapiens; identical to SEQ ID NO: 912476

SEQ ID NO: 912498 - protein, 262 aa, Homo sapiens
MPKRGKKGAVAEDGDELRTEPEAKKSKTAAKKNDKEAAGEGPALYEDPPDQKTSPSGKPATLKICSWNVDGLRAWIKKKGLDWVKEEAPDILCLQETKCSENKLPAELQELPGLSHQYWSAPSDKEGYSGVGLLSRQCPLKVSYGIGDEEHDQEGRVIVAEFDSFVLVTAYVPNAGRGLVRLEYRQRWDEAFRKFLKGLASRKPLVLCGDLNVAHEEIDLRNPKGNKKNAGFTPRGQVGILRLCRVQLALPNLLLGFFAPQC

SEQ ID NO: 912499 - protein, 308 aa, Homo sapiens; identical to SEQ ID NO: 912485

SEQ ID NO: 912500 - protein, 308 aa, Homo sapiens; identical to SEQ ID NO: 912485

SEQ ID NO: 912501 - protein, 327 aa, Homo sapiens
  misc_feature (14)..(14): Xaa can be any naturally occurring amino acid
  misc_feature (23)..(24): Xaa can be any naturally occurring amino acid
ATHPDPPLKNLQKXESAPPMTPXXGRRAEPEAKKSKTAAKKNDKEAAGEGPALYEDPPDQKTSPSGKPATLKICSWNVDGLRAWIKKKGLDWVKEEAPDILCLQETKCSENKLPAELQELPGLSHQYWSAPSDKEGYSGVGLLSRQCPLKVSYGIGDEEHDQEGRVIVAEFDSFVLVTAYVPNAGRGLVRLEYRQRWDEAFRKFLKGLASRKPLVLCGDLNVAHEEIDLRNPKGNKKNAGFTPQERQGFGELLQAVPLADSFRHLYPNTPYAYTFWTYMMNARSKNVGWRLDYFLLSHSLLPALCDSKIRSKALGSDHCPITLYLAL

SEQ ID NO: 912502 - protein, 299 aa, Homo sapiens
MHKHKNHPVLDLKIEGNPFNLFWLRYEDPPDQKTSPSGKPATLKICSWNVDGLRAWIKKKGLDWVKEEAPDILCLQETKCSENKLPAELQELPGLSHQYWSAPSDKEGYSGVGLLSRQCPLKVSYGIGDEEHDQEGRVIVAEFDSFVLVTAYVPNAGRGLVRLEYRQRWDEAFRKFLKGLASRKPLVLCGDLNVAHEEIDLRNPKGNKKNAGFTPQERQGFGELLQAVPLADSFRHLYPNTPYAYTFWTYMMNARSKNVGWRLDYFLLSHSLLPALCDSKIRSKALGSDHCPITLYLAL

SEQ ID NO: 912503 - protein, 229 aa, Homo sapiens
MPKRGKKGAVAEDGDELRTEPEAKKSKTAAKKNDKEAAGEGPALYEDPPDQKTSPSGKPATLKICSWNVDGLRAWIKKKGLDWVKEEAPDILCLQETKCSENKLPAELQELPGLSHQYWSAPSDKEGYSGVGLLSRQCPLKVSYGIGDEEHDQEGRVIVAEFDSFVLVTAYVPNAGRGLVRLEYRQRWDEAFRKFLKGLASCVVETQVAELLRPGTMFPRPSEAARSAP

SEQ ID NO: 912504 - protein, 85 aa, Homo sapiens
MLILFISIGDEEHDQEGRVIVAEFDSFVLVTAYVPNAGRGLVRLEYRQRWDEAFRKFLKGLASRKPLVLCGDLNVAHEEIDLRNP

SEQ ID NO: 912505 - protein, 139 aa, Homo sapiens
MGGGERYNIPAPQSRNVSKNQQQLNRQKTKEQNSQMKIVHKKKERGHGYNSSAAAWQAMQNGGKNKNFPNNQSWNSSLSGPRLLFKSQANQNYAGAKFSEPPSPSVLPKPPSHWVPVSFNPSDKEIMTFQLKTLLKVQV

SEQ ID NO: 912506 - protein, 139 aa, Homo sapiens; identical to SEQ ID NO: 912505

SEQ ID NO: 912507 - protein, 121 aa, Homo sapiens
MGGGERYNIPAPQSRNVSKNQQQLNRQKTKEQNSQMKIVHKKKERGHGYNSSAAAWQAMQNGGKNIFKSQANQNYAGAKFSEPPSPSVLPKPPSHWVPVSFNPSDKEIMTFQLKTLLKVQV

SEQ ID NO: 912508 - protein, 134 aa, Homo sapiens
MYNIPAPQSRNVSKNQQQLNRQKTKEQNSQMKIVHKKKERGHGYNSSAAAWQAMQNGGKNKNFPNNQSWNSSLSGPRLLFKSQANQNYAGAKFSEPPSPSVLPKPPSHWVPVSFNPSDKEIMTFQLKTLLKVQV

SEQ ID NO: 912509 - protein, 139 aa, Homo sapiens; identical to SEQ ID NO: 912505

SEQ ID NO: 912510 - protein, 139 aa, Homo sapiens; identical to SEQ ID NO: 912505

SEQ ID NO: 912511 - protein, 139 aa, Homo sapiens; identical to SEQ ID NO: 912505

SEQ ID NO: 912512 - protein, 139 aa, Homo sapiens; identical to SEQ ID NO: 912505

SEQ ID NO: 912513 - protein, 139 aa, Homo sapiens; identical to SEQ ID NO: 912505

SEQ ID NO: 912514 - protein, 139 aa, Homo sapiens; identical to SEQ ID NO: 912505

SEQ ID NO: 912515 - protein, 139 aa, Homo sapiens; identical to SEQ ID NO: 912505

SEQ ID NO: 912516 - protein, 81 aa, Homo sapiens
GVTSGQGSHLAVRQQVSDPQAQPCDCCPLQPCIRLLAETWGWNRTEPRALCSCDFRPTFSTEVLYWQLLEKILQLLLLILD

SEQ ID NO: 912517 - protein, 269 aa, Homo sapiens
MLSSTAMYSAPGRDLGMEPHRAAGPLQLRFSPYVFNGGTILAIAGEDFAIVASDTRLSEGFSIHTRDSPKCYKLTDKTVIGCSGFHGDCLTLTKIIEARLKMYKHSNNKAMTTGAIAAMLSTILYSRRFFPYYVYNIIGGLDEEGKGAVYSFDPVGSYQRDSFKAGGSASAMLQPLLDNQVGFKNMQNVEHVPLSLDRAMRLVKDVFISAAERDVYTGGRTPDLHSDQRGHQGGNCFLKEGLICVLLSPISSDLVDFVLWNCTLDGFVY

SEQ ID NO: 912518 - protein, 106 aa, Homo sapiens
KIFHCVVITKLEKGFHFTRDTPNVSIYHQPALDTQVFIELSLAVQSFFSASLKLYNLSIIRPFSRGPFLPFRSPSWIPSASFQTMFPTSSVDFIKKERGLYTALIQ

SEQ ID NO: 912519 - protein, 269 aa, Homo sapiens; identical to SEQ ID NO: 912517

SEQ ID NO: 912520 - protein, 71 aa, Homo sapiens
WRNVRSRQPSRRETASVGSAGAAVRMLSSTAMYSAPGRDLGMEPHRAAGPLQLRFSPYVFNGGLALLKFTW

SEQ ID NO: 912521 - protein, 81 aa, Homo sapiens; identical to SEQ ID NO: 912516

SEQ ID NO: 912522 - protein, 114 aa, Homo sapiens
WRNVRSRQPSRRETASVGSAGAAVRMLSSTAMYSAPGRDLGMEPHRAAGPLQLRFSPYVFNGGTILAIAGEDFAIVASDTRLSEGFSIHTRDSPKCYKFFINNCRCISIPIIRP

SEQ ID NO: 912523 - protein, 228 aa, Homo sapiens
WRNVRSRQPSRRETASVGSAGAAVRMLSSTAMYSAPGRDLGMEPHRAAGPLQLRFSPYVFNGGTILAIAGEDFAIVASDTRLSEGFSIHTRDSPKCYKLTDKTVIGCSGFHGDCLTLTKIIEARLKMYKHSNNKAMTTGAIAAMLSTILYSRRFFPYYVYNIIGGLDEEGKGAVYSFDPVGSYQRDSFKAGGSASAMLQPLLDNQDTATRPSPNAVAWILDSLASVMI

SEQ ID NO: 912524 - protein, 269 aa, Homo sapiens; identical to SEQ ID NO: 912517

SEQ ID NO: 912525 - protein, 183 aa, Homo sapiens
ESGKQGQIWAGDRAQEGLCALAGLRGCAWPSTRSDSGHSQEGLLCTLTCWVVFPPRRSLALSPRLECSGAISAHCNIRLPGSNDYLFPASYVAGTTGSTTTLSKFFVFLVAMRFHHVGQAGLELLASGDPPASASQSVGITGVSHCVWPGLLFLFMKLTVAHPCDRNQVIYTDSVGNRFFCAQ

SEQ ID NO: 912526 - protein, 77 aa, Homo sapiens
  misc_feature (17)..(17): Xaa can be any naturally occurring amino acid
  misc_feature (22)..(23): Xaa can be any naturally occurring amino acid
  misc_feature (30)..(31): Xaa can be any naturally occurring amino acid
  misc_feature (43)..(43): Xaa can be any naturally occurring amino acid
  misc_feature (46)..(46): Xaa can be any naturally occurring amino acid
  misc_feature (48)..(49): Xaa can be any naturally occurring amino acid
  misc_feature (51)..(53): Xaa can be any naturally occurring amino acid
  misc_feature (56)..(56): Xaa can be any naturally occurring amino acid
  misc_feature (58)..(58): Xaa can be any naturally occurring amino acid
PSRAPPPISAPLLVSGXVPGVXXFVFLGAXXFMVGVSYSFLFXVRXGXXLXXXYFXPXFQLIYYTGNCWRRFCNCCF

SEQ ID NO: 912527 - protein, 80 aa, Homo sapiens
GVTSGQGSHLAVRQQVSDPQAQPCDCCPLQPCIRLLAETWGWNRTEPRALCSCDFRPTFSTEEQTKQSLDAAVFMETVLR

SEQ ID NO: 912528 - protein, 231 aa, Homo sapiens
WRNVRSRQPSRRETASVGSAGAAVRMLSSTAMYSAPGRDLGMEPHRAAGPLQLRFSPYVFNGGTILAIAGEDFAIVASDTRLSEGFSIHTRDSPKCYKLTDKTVIGCSGFHGDCLTLTKIIEARLKMYKHSNNKAMTTGAIAAMLSTILYSRRFFPYYVYNIIGGLDEEGKGAVYSFDPVGSYQRDSFKAGGSASAMLQPLLDNQVGFKNMQNVEHVPLSLDRAMRLSGSA

SEQ ID NO: 912529 - protein, 129 aa, Homo sapiens
APVGALEGTFPVPEADRVLHPWSELRARGERGSQSSGVPSRAPSLRPTAFQPPWKWGEHGRGAWRGSPLEAPEWRPQCCSDLVPLGCALRPRQAPSGSWAAGKGFGPVRSWVRPVPDRPCPHPITGPWT

SEQ ID NO: 912530 - protein, 771 aa, Homo sapiens
MERAESSSTEPAKAIKPIDRKSVHQICSGQVVLSLSTAVKELVENSLDAGATNIDLKLKDYGVDLIEVSDNGCGVEEENFEGLTLKHHTSKIQEFADLTQVETFGFRGEALSSLCALSDVTISTCHASAKVGTRLMFDHNGKIIQKTPYPRPRGTTVSVQQLFSTLPVRHKEFQRNIKKEYAKMVQVLHAYCIISAGIRVSCTNQLGQGKRQPVVCTGGSPSIKENIGSVFGQKQLQSLIPFVQLPPSDSVCEEYGLSCSDALHNLFYISGFISQCTHGVGRSSTDRQFFFINRRPCDPAKVCRLVNEVYHMYNRHQYPFVVLNISVDSECVDINVTPDKRQILLQEEKLLLAVLKTSLIGMFDSDVNKLNVSQQPLLDVEGNLIKMHAADLEKPMVEKQDQSPSLRTGEEKKDVSISRLREAFSLRHTTENKPHSPKTPEPRRSPLGQKRGMLSSSTSGAISDKGVLRPQKEAVSSSHGPSDPTDRAEVEKDSGHGSTSVDSEGFSIPDTGSHCSSEYAASSPGDRGSQEHVDSQEKAPETDDSFSDVDCHSNQEDTGCKFRVLPQPTNLATPNTKRFKKEEILSSSDICQKLVNTQDMSASQVDVAVKINKKVVPLDFSMSSLAKRIKQLHHEAQQSEGEQNYRKFRAKICPGENQAAEDELRKEISKTMFAEMEIIGQFNLGFIITKLNEDIFIVDQHATDEKYNFEMLQQHTVLQGQRLIAPQTLNLTAVNEAVLIENLEIFRKNGFDFVIDENVKTGPSDPRTSMN

SEQ ID NO: 912531 - protein, 749 aa, Homo sapiens
SACGSPGGNFPSPRGGSGVASMERAESSSTEPAKAIKPIDRKSVHQICSGQVVLSLSTAVKELVENSLDAGATNIDLKLKDYGVDLIEVSDNGCGVEEENFEGLTLKHHTSKIQEFADLTQVETFGFRGEALSSLCALSDVTISTCHASAKVGTRLMFDHNGKIIQKTPYPRPRGTTVSVQQLFSTLPVRHKEFQRNIKKEYAKMVQVLHAYCIISAGIRVSCTNQLGQGKRQPVVCTGGSPSIKENIGSVFGQKQLQSLIPFVQLPPSDSVCEEYGLSCSDALHNLFYISGFISQCTHGVGRSSTDRQFFFINRRPCDPAKVCRLVNEVYHMYNRHQYPFVVLNISVDSECVDINVTPDKRQILLQEEKLLLAVLKTSLIGMFDSDVNKLNVSQQPLLDVEGNLIKMHAADLEKPMVEKQDQSPSLRTGEEKKDVSISRLREAFSLRHTTENKPHSPKTPEPRRSPLGQKRGMLSSSTSGAISDKGVLRPQKEAVSSSHGPSDPTDRAEVEKDSGHGSTSVDSEGFSIPDTGSHCSSEYAASSPGDRGSQEHVDSQEKAPETDDSFSDVDCHSNQEDTGCKFRVLPQPTNLATPNTKRFKKEEILSSSDICQKLVNTQDMSASQVDVAVKINKKVVPLDFSMSSLAKRIKQLHHEAQQSEGEQNYRKFRAKICPGENQAAEDELRKEISKTMFAEMEIIGQFNLGFIITKLNEDIFIVDQHATDEKYNFEMLQQHTVLQGQRLIASSH

SEQ ID NO: 912532 - protein, 707 aa, Homo sapiens
SACGSPGGNFPSPRGGSGVASMERAESSSTEPAKAIKPIDRKSVHQICSGQVVLSLSTAVKELVENSLDAGATNIDLKLKDYGVDLIEVSDNGCGVEEENFEGLTLKHHTSKIQEFADLTQVETFGFRGEALSSLCALSDVTISTCHASAKVGTRLMFDHNGKIIQKTPYPRPRGTTVSVQQLFSTLPVRHKEFQRNIKKEYAKMVQVLHAYCIISAGIRVSCTNQLGQGKRQPVVCTGGSPSIKENIGSVFGQKQLQSLIPFVQLPPSDSVCEEYGLSCSDALHNLFYISGFISQCTHGVGRSSTDRQFFFINRRPCDPAKVCRLVNEVYHMYNRHQYPFVVLNISVDSECVDINVTPDKRQILLQEEKLLLAVLKTSLIGMFDSDVNKLNVSQQPLLDVEGNLIKMHAADLEKPMVEKQDQSPSLRTGEEKKDVSISRLREAFSLRHTTENKPHSPKTPEPRRSPLGQKRGMLSSSTSGAISDKGVLRPQKEAVSSSHGPSDPTDRAEVEKDSGHGSTSVDSEGFSIPDTGSHCSSEYAASSPGDRGSQEHVDSQEKAPETDDSFSDVDCHSNQEDTGCKFRVLPQPTNLATPNTKRFKKEEILSSSDICQKLVNTQDMSASQVDVAVKINKKVVPLDFSMSSLAKRIKQLHHEAQQSEGEQNYRKFRAKICPGENQAAEDELRKEISKTMFAKWKSLPYRGYRA

SEQ ID NO: 912533 - protein, 476 aa, Homo sapiens
MHAADLEKPMVEKQDQSPSLRTGEEKKDVSISRLREAFSLRHTTENKPHSPKTPEPRRSPLGQKRGMLSSSTSGAISDKGVLRPQKEAVSSSHGPSDPTDRAEVEKDSGHGSTSVDSEGFSIPDTGSHCSSEYAASSPGDRGSQEHVDSQEKAPETDDSFSDVDCHSNQEDTGCKFRVLPQPTNLATPNTKRFKKEEILSSSDICQKLVNTQDMSASQVDVAVKINKKVVPLDFSMSSLAKRIKQLHHEAQQSEGEQNYRKFRAKICPGENQAAEDELRKEISKTMFAEMEIIGQFNLGFIITKLNEDIFIVDQHATDEKYNFEMLQQHTVLQGQRLIAPQTLNLTAVNEAVLIENLEIFRKNGFDFVIDENAPVTERAKLISLPTSKNWTFGPQDVDELIFMLSDSPGVMCRPSRVKQMFASRACRKSVMIGTALNTSEMKKLITHMGEMDHPWNCPHGRPTMRHIANLGVISQN

SEQ ID NO: 912534 - protein, 883 aa, Homo sapiens
SACGSPGGNFPSPRGGSGVASMERAESSSTEPAKAIKPIDRKSVHQICSGQVVLSLSTAVKELVENSLDAGATNIDLKLKDYGVDLIEVSDNGCGVEEENFEGLTLKHHTSKIQEFADLTQVETFGFRGEALSSLCALSDVTISTCHASAKVGTRLMFDHNGKIIQKTPYPRPRGTTVSVQQLFSTLPVRHKEFQRNIKKEYAKMVQVLHAYCIISAGIRVSCTNQLGQGKRQPVVCTGGSPSIKENIGSVFGQKQLQSLIPFVQLPPSDSVCEEYGLSCSDALHNLFYISGFISQCTHGVGRSSTDRQFFFINRRPCDPAKVCRLVNEVYHMYNRHQYPFVVLNISVDSECVDINVTPDKRQILLQEEKLLLAVLKTSLIGMFDSDVNKLNVSQQPLLDVEGNLIKMHAADLEKPMVEKQDQSPSLRTGEEKKDVSISRLREAFSLRHTTENKPHSPKTPEPRRSPLGQKRGMLSSSTSGAISDKGVLRPQKEAVSSSHGPSDPTDRAEVEKDSGHGSTSVDSEGFSIPDTGSHCSSEYAASSPGDRGSQEHVDSQEKAPETDDSFSDVDCHSNQEDTGCKFRVLPQPTNLATPNTKRFKKEEILSSSDICQKLVNTQDMSASQVDVAVKINKKVVPLDFSMSSLAKRIKQLHHEAQQSEGEQNYRKFRAKICPGENQAAEDELRKEISKTMFAEMEIIGQFNLGFIITKLNEDIFIVDQHATDEKYNFEMLQQHTVLQGQRLIAPQTLNLTAVNEAVLIENLEIFRKNGFDFVIDENAPVTERAKLISLPTSKNWTFGPQDVDELIFMLSDSPGVMCRPSRVKQMFASRACRKSVMIGTALNTSEMKKLITHMGEMDHPWNCPHGRPTMRHIANLGVISQN

SEQ ID NO: 912535 - protein, 873 aa, Homo sapiens
MERAESSSTEPAKAIKPIDRKSVHQICSGQVVLSLSTAVKELVENSLDAGATNIDLKLKDYGVDLIEVSDNGCGVEEENFEGLTLKHHTSKIQEFADLTQVETFGFRGEALSSLCALSDVTISTCHASAKVGTRLMFDHNGKIIQKTPYPRPRGTTVSVQQLFSTLPVRHKEFQRNIKKEYAKMVQVLHAYCIISAGIRVSCTNQLGQGKRQPVVCTGGSPSIKENIGSVFGQKQLQSLIPFVQLPPSDSVCEEYGLSCSDALHNLFYISGFISQCTHGVGRSSTDRQFFFINRRPCDPAKVCRLVNEVYHMYNRHQYPFVVLNISVDSECVDINVTPDKRQILLQEEKLLLAVLKTSLIGMFDSDVNKLNVSQQPLLDVEGNLIKMHAADLEKPMVEKQDQSPSLRTGEEKKDVSISRLREAFSLRHTTENKPHSPKTPEPRRSPLGQKRGMLSSSTSGAISDKGVLRPQKEAVSSSHGPSDPTDRAEVEKDSGHGSTSVDSEGFSIPDTGSHCSSEYAASSPGDRGSQEHVDSQEKAPETDDSFSDVDCHSNQEDTGCKFRVLPQPTNLATPNTKRFKKEEILSSSDICQKLVNTQDMSASQVDVAVKINKKVVPLDFSMSSLAKRIKQLHHEAQQSEGEQNYRKFRAKICPGENQAAEDELRKEISKTMFAEMEIIGQFNLGFIITKLNEDIFIVDQHATDEKYNFEMLQQHTVLQGQRLIAPQTLNLTAVNEAVLIENLEIFRKNGFDFVIDENVMDFSQNCILLAPVTERAKLISLPTSKNWTFGPQDVDELIFMLSDSPGVMCRPSRVKQMFASRACRKSVMIGTALNTSEMKKLITHMGEMDHPWNCPHGRPTMRHIANLGVISQN

SEQ ID NO: 912536 - protein, 569 aa, Homo sapiens
FYSLYFVQVCRLVNEVYHMYNRHQYPFVVLNISVDSECVDINVTPDKRQILLQEEKLLLAVLKTSLIGMFDSDVNKLNVSQQPLLDVEGNLIKMHAADLEKPMVEKQDQSPSLRTGEEKKDVSISRLREAFSLRHTTENKPHSPKTPEPRRSPLGQKRGMLSSSTSGAISDKGVLRPQKEAVSSSHGPSDPTDRAEVEKDSGHGSTSVDSEGFSIPDTGSHCSSEYAASSPGDRGSQEHVDSQEKAPETDDSFSDVDCHSNQEDTGCKFRVLPQPTNLATPNTKRFKKEEILSSSDICQKLVNTQDMSASQVDVAVKINKKVVPLDFSMSSLAKRIKQLHHEAQQSEGEQNYRKFRAKICPGENQAAEDELRKEISKTMFAEMEIIGQFNLGFIITKLNEDIFIVDQHATDEKYNFEMLQQHTVLQGQRLIAPQTLNLTAVNEAVLIENLEIFRKNGFDFVIDENAPVTERAKLISLPTSKNWTFGPQDVDELIFMLSDSPGVMCRPSRVKQMFASRACRKSVMIGTALNTSEMKKLITHMGEMDHPWNCPHGRPTMRHIANLGVISQN

SEQ ID NO: 912537 - protein, 83 aa, Homo sapiens
ALLSLLCIRKNCVPSHSGIAGLSRSSRLAMTDFDGVCSLRHSCMHRELYFLIRAITGCRVVKTGDQVGGIQGGAESWGWGQTR

SEQ ID NO: 912538 - protein, 381 aa, Homo sapiens
SDIIMLGQSPDALVGGLTDSAPGGRKTRERKLEANMESVSCSAAAVRTGDMESQRDLSLVPERLQRREQERQLEVERRKQKRQNQEVEKENSHFFVATFARERAAVEELLERAESVERLEEAASRLQGLQKLINDSVFFLAAYDLRQGQEALARLQAALAERRRGLQPKKRFAFKTRGKDAASSTKVDAAPGIPPAVESIQDSPLPKKAEGDLGPSWVCGFSNLESQVLEKRASELHQRDVLLTELSNCTVRLYGNPNTLRLTKAHSCKLLCGPVSTSVFLEDCSDCVLAVACQQLRIHSTKDTRIFLQVTSRAIVEDCSGIQFAPYTWSYPEIDKDFESSGLDRSKNNWNDVDDFNWLARDMASPNWSILPEEERNIQWD

SEQ ID NO: 912539 - protein, 74 aa, Homo sapiens
RAEAQAPDLQCSLPRRPLPCPQCGKSFIHPKRLQTHEAQGDEGPAARATTRTCIFSRDGVSPCCPGCSRTPDLR

SEQ ID NO: 912540 - protein, 381 aa, Homo sapiens; identical to SEQ ID NO: 912538

SEQ ID NO: 912541 - protein, 334 aa, Homo sapiens
SDIIMLGQSPDALVGGLTDSAPGGRKTRERKLEANMESVSCSAAAVRTGDMESQRDLSLVPERLQRREQERQLEVERRKQKRQNQEVEKENSHFFVATFARERAAVEELLERAESVERLEEAASRLQGLQKLINDSVFFLAAYDLRQGQEALARLQAALAERRRGLQPKKRFAFKTRGKDAASSTKVDAAPGIPPAVESIQDSPLPKKAEGDLGPSWVCGFSNLESQVLEKRASELHQRDVLLTELSNCTVRLYGNPNTLRLTKAHSCKLLCGPVSTSVFLEDCSDCVLAVACQQLRIHSTKEPASASQSAGITGVSHHARALFIYFYHNSLKQ

SEQ ID NO: 912542 - protein, 381 aa, Homo sapiens; identical to SEQ ID NO: 912538

SEQ ID NO: 912543 - protein, 146 aa, Homo sapiens [sequence omitted]

SEQ ID NO: 912544 - protein, 456 aa, Homo sapiens
MYMGKYICERKVSSGGILGTAMCKFLNMMDTPSFHLKEVGPIDIPHTFTQAVPLNLVICQCEKWKIVFNCSLDLYFYWVVYLLINNKSSLHIKEINPFQIHSYFSLIFKFYCNILLFSLYIYVYIYICIYIYIHIYIHIYILIFFYGFLDFVSSLKRLIQLKILLLLLNPMFSPNSFYFYFGGLYLDLIFSITSDRVQLACCPYTIFWLIQLLTIDLSIHVPVPNGFTECNLHFKISEGKPYLIILLFQNSPGYSRLHVYLNLPCDVFMPLSSYARIRYVFSIHSRLFNLTLHYTEKLVLVCLPRHLVVLTAPKPTPPHLTDYPITEYFYLRFALPNGYLILSRRQCPVQWSLQLKCSRTHCLVKNASKFIQTQLAPKVTFRERRAGMGCFPSFCHCVASSSHWEVLCTRNVGVESCSSVQHLTLCPTPQQPIPAVHSLLELFTKYVAMLDPGHWT

SEQ ID NO: 912545 - protein, 456 aa, Homo sapiens; identical to SEQ ID NO: 912544

SEQ ID NO: 912546 - protein, 643 aa, Homo sapiens
MTLAKFLKFMKQVSGWNEMGIKIVFKPIRWFVETEMNSIVQVLVSKGSCCFLSLYDGKYLDKFTNPLHCRLHGTEGLVTPAGAGLLLGASVVLKTFICLFVLVDVGSFCVARTGLKLLDSSDPPPLNLPKCWDYRCEPLCPALKTFSGSSRVTGLLNISISYKSVFQSYIILITFFICISVEYILYFDILLMHSFSLFIPSFSFLIRLSRNLFYWPFEKSSFRSSKQFCFHFIIYFYFCFINLFLRHALDFVVLLFFQRLALCVWFTYDHACLLLRMEEGRWRVAAQSRVWGSLALAPPCPQPAVATLVPQLLGRAVSVREATDAIRGRCKVSCGQREPSRHVGCPAKGNSGQLLPHSTEFVIFFFFLMVTPSTSPMARAWAGPQRHRHSADSLAFTLLLFSWGTGLRWQCTNHKLRAVVTVTKECSPPPPAQLKTALTRGGDLWALTRRVGEAGRTAFLSAKAGAKLPGYEGNGWSLKSCKLGLAGTGPTSRPGGHHEDSGRDPQGTMKAFHLYLRKDFIRRVWWLTPESSALWEAEAGGSRGQEFNTSLANMENPISTKTTKISQAWWRTPVVPATREAEAEESLEPGRWRLQSAKIAPLHSSLGDRVRLRLKKTKRLYLISYMFVVSVLMYNLTLVRMVI

SEQ ID NO: 912547 - protein, 456 aa, Homo sapiens; identical to SEQ ID NO: 912544

SEQ ID NO: 912548 - protein, 456 aa, Homo sapiens; identical to SEQ ID NO: 912544

SEQ ID NO: 912549 - protein, 456 aa, Homo sapiens; identical to SEQ ID NO: 912544

SEQ ID NO: 912550 - protein, 456 aa, Homo sapiens; identical to SEQ ID NO: 912544

SEQ ID NO: 912551 - protein, 456 aa, Homo sapiens; identical to SEQ ID NO: 912544

SEQ ID NO: 912552 - protein, 78 aa, Homo sapiens
TEDPVSTLTRGGDLWALTRRVGEAGRTAFLSAKAGAKLPGYEGNGWSLKSCKLGLAGTGPTSRPGGHHEDSGRDPQGT

SEQ ID NO: 912553 - protein, 623 aa, Homo sapiens
MPSDLAKKKAAKKKEAAKARQRPRKGHEENGDVVTEPQVAEKNEANGRETTEVDLLTKELEDFEMKKAAARAVTGVLASHPNSTDVHIINLSLTFHGQELLSDTKLELNSGRRYGLIGLNGIGKSMLLSAIGKREVPIPEHIDIYHLTREMPPSDKTPLHCVMEVDTERAMLEKEAERLAHEDAECEKLMELYERLEELDADKAEMRASRILHGLGFTPAMQRKKLKDFSGGWRMRVALARALFIRPFMLLLDEPTNHLDLDACVWLEEELKTFKRILVLVSHSQDFLNGVCTNIIHMHNKKLKYYTGNYDQYVKTRLELEENQMKRFHWEQDQIAHMKNYIARFGHGSAKLARQAQSKEKTLQKMMASGLTERVVSDKTLSFYFPPCGKIPPPVIMVQNVSFKYTKDGPCIYNNLEFGIDLDTRVALVGPNGAGKSTLLKLLTGELLPTDGMIRKHSHVKIGRYHQHLQEQLDLDLSPLEYMMKCYPEIKEKEEMRKIIGRYGLTGKQQVSPIRNLSDGQKCRVCLAWLAWQNPHMLFLDEPTNHLDIETIDALADAINEFEGGMMLVSHDFRLIQQVAQEIWVCEKQTITKWPGDILAYKEHLKSKLVDEEPQLTKRTHNV

SEQ ID NO: 912554 - protein, 701 aa, Homo sapiens
MPSDLAKKKAAKKKEAAKARQRPRKGHEENGDVVTEPQVAEKNEANGRETTEVDLLTKELEDFEMKKAAARAVTGVLASHPNSTDVHIINLSLTFHGQELLSDTKLELNSGRRYGLIGLNGIGKSMLLSAIGKREVPIPEHIDIYHLTREMPPSDKTPLHCVMEVDTERAMLEKEAERLAHEDAECEKLMELYERLEELDADKAEMRASRILHGLGFTPAMQRKKLKDFSGGWRMRVALARALFIRPFMLLLDEPTNHLDLDACVWLEEELKTFKRILVLVSHSQDFLNGVCTNIIHMHNKKLKYYTGNYDQYVKTRLELEENQMKRFHWEQDQIAHMKNYIARFGHGSAKLARQAQSKEKTLQKMMASGLTERVVSDKTLSFYFPPCGKIPPPVIMVQNVSFKYTKDGPCIYNNLEFGIDLDTRVALVGPNGAGKSTLLKLLTGELLPTDGMIRKHSHVKIGRYHQHLQEQLDLDLSPLEYMMKCYPEIKEKEEMRKIIGRYGLTGKQQVSPIRNLSDGQKCRVCLAWLAWQNPHMLFLDEPTNHLDIETIDALADAINEFEGGMMLVSHDFRLIQQVAQEIWVCEKQTITKWPGDILAYKEHLKSKLVDEEPQLTKRTHNVCTLDIGISAKAMSIMNSFVNDVFEQLACEAARLAQYSGRTTLTSREVQTAVRLLLPGELAKHAVSEGTKAVTKYTSSK

SEQ ID NO: 912555 - protein, 623 aa, Homo sapiens; identical to SEQ ID NO: 912553

SEQ ID NO: 912556 - protein, 623 aa, Homo sapiens; identical to SEQ ID NO: 912553

SEQ ID NO: 912557 - protein, 718 aa, Homo sapiens
MPSDLAKKKAAKKKEAAKARQRPRKGHEENGDVVTEPQVAEKNEANGRETTEVDLLTKELEDFEMKKAAARAVTGVLASHPNSTDVHIINLSLTFHGQELLSDTKLELNSGRRYGLIGLNGIGKSMLLSAIGKREVPIPEHIDIYHLTREMPPSDKTPLHCVMEVDTERAMLEKEAERLAHEDAECEKLMELYERLEELDADKAEMRASRILHGLGFTPAMQRKKLKDFSGGWRMRVALARALFIRPFMLLLDEPTNHLDLDACVWLEEELKTFKRILVLVSHSQDFLNGVCTNIIHMHNKKLKYYTGNYDQYVKTRLELEENQMKRFHWEQDQIAHMKNYIARFGHGSAKLARQAQSKEKTLQKMMASGLTERVVSDKTLSFYFPPCGKIPPPVIMVQNVSFKYTKDGPCIYNNLEFGIDLDTRVALVGPNGAGKSTLLKLLTGELLPTDGMIRKHSHVKIGRYHQHLQEQLDLDLSPLEYMMKCYPEIKEKEEMRKIIGRYGLTGKQQVSPIRNLSDGQKCRVCLAWLAWQNPHMLFLDEPTNHLDIETIDALADAINEFEGGMMLVSHDFRLIQQVAQEIWVCEKQTITKWPGDILAYKEHLKSKLDADKAEMRASRILHWTGFHTCHAAQEAKRLQDRTLGLHSCIAAILLPQPLPCPSTCLSCTLLPTAGQYLSVSCPPSSYICPCLDSAGRSLQPLAGYLTLSVMQSEAPAG

SEQ ID NO: 912558 - protein, 623 aa, Homo sapiens; identical to SEQ ID NO: 912553

SEQ ID NO: 912559 - protein, 326 aa, Homo sapiens
MHNKKLKYYTGNYDQYVKTRLELEENQMKRFHWEQDQIAHMKNYIARFGHGSAKLARQAQSKEKTLQKMMASGLTERVVSDKTLSFYFPPCGKIPPPVIMVQNVSFKYTKDGPCIYNNLEFGIDLDTRVALVGPNGAGKSTLLKLLTGELLPTDGMIRKHSHVKIGRYHQHLQEQLDLDLSPLEYMMKCYPEIKEKEEMRKIIGRYGLTGKQQVSPIRNLSDGQKCRVCLAWLAWQNPHMLFLDEPTNHLDIETIDALADAINEFEGGMMLVSHDFRLIQQVAQEIWVCEKQTITKWPGDILAYKEHLKSKLVDEEPQLTKRTHNV

SEQ ID NO: 912560 - protein, 193 aa, Homo sapiens
MPSDLAKKKAAKKKEAAKARQRPRKGHEENGDVVTEPQVAEKNEANGRETTEVDLLTKELEDFEMKKAAARAVTGVLASHVSPIRNLSDGQKCRVCLAWLAWQNPHMLFLDEPTNHLDIETIDALADAINEFEGGMMLVSHDFRLIQQVAQEIWVCEKQTITKWPGDILAYKEHLKSKLVDEEPQLTKRTHNV

SEQ ID NO: 912561 - protein, 623 aa, Homo sapiens; identical to SEQ ID NO: 912553

SEQ ID NO: 912562 - protein, 623 aa, Homo sapiens; identical to SEQ ID NO: 912553

SEQ ID NO: 912563 - protein, 623 aa, Homo sapiens; identical to SEQ ID NO: 912553

SEQ ID NO: 912564 - protein, 461 aa, Homo sapiens [sequence omitted]

SEQ ID NO: 912565 - protein, 273 aa, Homo sapiens [sequence omitted]

SEQ ID NO: 912566 - protein, 325 aa, Homo sapiens
MVIQKEKKSCGQVVEEWKEFVWNPRTHQFMGRTGTSWAFILLFYLVFYGFLTAMFTLTMWVMLQTVSDHTPKYQDRLATPGLMIRPKTENLDVIVNVSDTESWDQHVQKLNKFLERECGPGYVSVQDFGQGTGDLGSGHLAPESLPPTSLAYNDSIQAQKNDVCRPGRYYEQPDNGVLNYPKRACQFNRTQLGNCSGIGDSTHYGYSTGQPCVFIKMNRVINFYAGANQSMNVTCAGKRDEDAENLGNFVMFPANGNIDLMYFPYYGKKFHVNYTQPLVAVKFLNVTPNVEVNVECRINAANIATDDERDKFAGRVAFKLRINKT

SEQ ID NO: 912567 - protein, 290 aa, Homo sapiens
MVIQKEKKSCGQVVEEWKEFVWNPRTHQFMGRTGTSWAFILLFYLVFYGFLTAMFTLTMWVMLQTVSDHTPKYQDRLATPGLMIRPKTENLDVIVNVSDTESWDQHVQKLNKFLEPYNDSIQAQKNDVCRPGRYYEQPDNGVLNYPKRACQFNRTQLGNCSGIGDSTHYGYSTGQPCVFIKMNRVINFYAGANQSMNVTCAGKRDEDAENLGNFVMFPANGNIDLMYFPYYGKKFHVNYTQPLVAVKFLNVTPNVEVNVECRINAANIATDDERDKFAGRVAFKLRINKT

SEQ ID NO: 912568 - protein, 290 aa, Homo sapiens; identical to SEQ ID NO: 912567

SEQ ID NO: 912569 - protein, 1014 aa, Homo sapiens
RGPRRAGRAGGTAPRPEAAAAAAALVPAAASPVPSVITTPAAGNGRERGGGEKLPPTHRGSMTSATSPIILKWDPKSLEIRTLTVERLLEPLVTQVTTLVNTSNKGPSGKKKGRSKKAHVLAASVEQATQNFLEKGEQIAKESQDLKEELVAAVEDVRKQGETMRIASSEFADDPCSSVKRGTMVRAARALLSAVTRLLILADMADVMRLLSHLKIVEEALEAVKNATNEQDLANRFKEFGKKMVKLNYVAARRQQELKDPHCRDEMAAARGALKKNATMLYTASQAFLRHPDVAATRANRDYVFKQVQEAIAGISNAAQATSPTDEAKGHTGIGELAAALNEFDNKIILDPMTFSEARFRPSLEERLESIISGAALMADSSCTRDDRRERIVAECNAVRQALQDLLSEYMNNTGRKEKGDPLNIAIDKMTKKTRDLRRQLRKAVMDHISDSFLETNVPLLVLIEAAKSGNEKEVKEYAQVFREHANKLVEVANLACSISNNEEGVKLVRMAATQIDSLCPQVINAALTLAARPQSKVAQDNMDVFKDQWEKQVRVLTEAVDDITSVDDFLSVSENHILEDVNKCVIALQEGDVDTLDRTAGAIRGRAARVIHIINAEMENYEAGVYTEKVLEATKLLSETVMPRFAEQVEVAIEALSANVPQPFEENEFIDASRLVYDGVRDIRKAVLMIRTPEELEDDSDFEQEDYDVRSRTSVQTEDDQLIAGQSARAIMAQLPQEEKAKIAEQVEIFHQEKSKLDAEVAKWDDSGNDIIVLAKQMCMIMMEMTDFTRGKGPLKNTSDVINAAKKIAEAGSRMDKLARAVADQCPDSACKQDLLAYLQRIALYCHQLNICSKVKAEVQNLGGELIVSGTGVQSTFTTFYEVDCDVIDGGRASQLSTHLPTCAEGAPIGSGSSDSSMLDSATSLIQAAKNLMNAVVLTVKASYVASTKYQKVYGTAAVNSPVVSWKMKAPEKKPLVKREKPEEFQTRVRRGSQKKHISPVQALSEFKAMDSF

SEQ ID NO: 912570 - protein, 966 aa, Homo sapiens
RGPRRAGRAGGTAPRPEAAAAAAALVPAAASPVPSVITTPAAGNGRERGGGEKLPPTHRGSMTSATSPIILKWDPKSLEIRTLTVERLLEPLVTQVTTLVNTSNKGPSGKKKGRSKKAHVLAASVEQATQNFLEKGEQIAKESQDLKEELVAAVEDVRKQGETMRIASSEFADDPCSSVKRGTMVRAARALLSAVTRLLILADMADVMRLLSHLKIVEEALEAVKNATNEQDLANRFKEFGKKMVKLNYVAARRQQELKDPHCRDEMAAARGALKKNATMLYTASQAFLRHPDVAATRANRDYVFKQVQEAIAGISNAAQATSPTDEAKGHTGIGELAAALNEFDNKIILDPMTFSEARFRPSLEERLESIISGAALMADSSCTRDDRRERIVAECNAVRQALQDLLSEYMNNTGRKEKGDPLNIAIDKMTKKTRDLRRQLRKAVMDHISDSFLETNVPLLVLIEAAKSGNEKEVKEYAQVFREHANKLVEVANLACSISNNEEGVKLVRMAATQIDSLCPQVINAALTLAARPQSKVAQDNMDVFKDQWEKQVRVLTEAVDDITSVDDFLSVSENHILEDVNKCVIALQEGDVDTLDRTAGAIRGRAARVIHIINAEMENYEAGVYTEKVLEATKLLSETVMPRFAEQVEVAIEALSANVPQPFEENEFIDASRLVYDGVRDIRKAVLMIRTPEELEDDSDFEQEDYDVRSRTSVQTEDDQLIAGQSARAIMAQLPQEEKAKIAEQVEIFHQEKSKLDAEVAKWDDSGNDIIVLAKQMCMIMMEMTDFTRGKGPLKNTSDVINAAKKIAEAGSRMDKLARAVADQCPDSACKQDLLAYLQRIALYCHQLNICSKVKAEVQNLGGELIVSGLDSATSLIQAAKNLMNAVVLTVKASYVASTKYQKVYGTAAVNSPVVSWKMKAPEKKPLVKREKPEEFQTRVRRGSQKKHISPVQALSEFKAMDSF

SEQ ID NO: 912571 - protein, 537 aa, Homo sapiens
MTKKTRDLRRQLRKAVMDHISDSFLETNVPLLVLIEAAKSGNEKEVKEYAQVFREHANKLVEVANLACSISNNEEGVKLVRMAATQIDSLCPQVINAALTLAARPQSKVAQDNMDVFKDQWEKQVRVLTEAVDDITSVDDFLSVSENHILEDVNKCVIALQEGDVDTLDRTAGAIRGRAARVIHIINAEMENYEAGVYTEKVLEATKLLSETVMPRFAEQVEVAIEALSANVPQPFEENEFIDASRLVYDGVRDIRKAVLMIRTPEELEDDSDFEQEDYDVRSRTSVQTEDDQLIAGQSARAIMAQLPQEEKAKIAEQVEIFHQEKSKLDAEVAKWDDSGNDIIVLAKQMCMIMMEMTDFTRGKGPLKNTSDVINAAKKIAEAGSRMDKLARAVADQCPDSACKQDLLAYLQRIALYCHQLNICSKVKAEVQNLGGELIVSGLDSATSLIQAAKNLMNAVVLTVKASYVASTKYQKVYGTAAVNSPVVSWKMKAPEKKPLVKREKPEEFQTRVRRGSQKKHISPVQALSEFKAMDSF

SEQ ID NO: 912572 - protein, 905 aa, Homo sapiens
MTSATSPIILKWDPKSLEIRTLTVERLLEPLVTQVTTLVNTSNKGPSGKKKGRSKKAHVLAASVEQATQNFLEKGEQIAKESQDLKEELVAAVEDVRKQGETMRIASSEFADDPCSSVKRGTMVRAARALLSAVTRLLILADMADVMRLLSHLKIVEEALEAVKNATNEQDLANRFKEFGKKMVKLNYVAARRQQELKDPHCRDEMAAARGALKKNATMLYTASQAFLRHPDVAATRANRDYVFKQVQEAIAGISNAAQATSPTDEAKGHTGIGELAAALNEFDNKIILDPMTFSEARFRPSLEERLESIISGAALMADSSCTRDDRRERIVAECNAVRQALQDLLSEYMNNTGRKEKGDPLNIAIDKMTKKTRDLRRQLRKAVMDHISDSFLETNVPLLVLIEAAKSGNEKEVKEYAQVFREHANKLVEVANLACSISNNEEGVKLVRMAATQIDSLCPQVINAALTLAARPQSKVAQDNMDVFKDQWEKQVRVLTEAVDDITSVDDFLSVSENHILEDVNKCVIALQEGDVDTLDRTAGAIRGRAARVIHIINAEMENYEAGVYTEKVLEATKLLSETVMPRFAEQVEVAIEALSANVPQPFEENEFIDASRLVYDGVRDIRKAVLMIRTPEELEDDSDFEQEDYDVRSRTSVQTEDDQLIAGQSARAIMAQLPQEEKAKIAEQVEIFHQEKSKLDAEVAKWDDSGNDIIVLAKQMCMIMMEMTDFTRGKGPLKNTSDVINAAKKIAEAGSRMDKLARAVADQCPDSACKQDLLAYLQRIALYCHQLNICSKVKAEVQNLGGELIVSGLDSATSLIQAAKNLMNAVVLTVKASYVASTKYQKVYGTAAVNSPVVSWKMKAPEKKPLVKREKPEEFQTRVRRGSQKKHISPVQALSEFKAMDSF

SEQ ID NO: 912573 - protein, 216 aa, Homo sapiens
MAQLPQEEKAKIAEQVEIFHQEKSKLDAEVAKWDDSGNDIIVLAKQMCMIMMEMTDFTRGKGPLKNTSDVINAAKKIAEAGSRMDKLARAVADQCPDSACKQDLLAYLQRIALYCHQLNICSKVKAEVQNLGGELIVSGLDSATSLIQAAKNLMNAVVLTVKASYVASTKYQKVYGTAAVNSPVVSWKMKAPEKKPLVKRVSPVQALSEFKAMDSF

SEQ ID NO: 912574 - protein, 234 aa, Homo sapiens
MAQLPQEEKAKIAEQVEIFHQEKSKLDAEVAKWDDSGNDIIVLAKQMCMIMMEMTDFTRGKGPLKNTSDVINAAKKIAEAGSRMDKLARAVADQCPDSACKQDLLAYLQRIALYCHQLNICSKVKAEVQNLGGELIVSGLDSATSLIQAAKNLMNAVVLTVKASYVASTKYQKVYGTAAVNSPVVSWKMKAPEKKPLVKREKPEEFQTRVRRGSQKKHISPVQALSEFKAMDSF

SEQ ID NO: 912575 - protein, 948 aa, Homo sapiens
RGPRRAGRAGGTAPRPEAAAAAAALVPAAASPVPSVITTPAAGNGRERGGGEKLPPTHRGSMTSATSPIILKWDPKSLEIRTLTVERLLEPLVTQVTTLVNTSNKGPSGKKKGRSKKAHVLAASVEQATQNFLEKGEQIAKESQDLKEELVAAVEDVRKQGETMRIASSEFADDPCSSVKRGTMVRAARALLSAVTRLLILADMADVMRLLSHLKIVEEALEAVKNATNEQDLANRFKEFGKKMVKLNYVAARRQQELKDPHCRDEMAAARGALKKNATMLYTASQAFLRHPDVAATRANRDYVFKQVQEAIAGISNAAQATSPTDEAKGHTGIGELAAALNEFDNKIILDPMTFSEARFRPSLEERLESIISGAALMADSSCTRDDRRERIVAECNAVRQALQDLLSEYMNNTGRKEKGDPLNIAIDKMTKKTRDLRRQLRKAVMDHISDSFLETNVPLLVLIEAAKSGNEKEVKEYAQVFREHANKLVEVANLACSISNNEEGVKLVRMAATQIDSLCPQVINAALTLAARPQSKVAQDNMDVFKDQWEKQVRVLTEAVDDITSVDDFLSVSENHILEDVNKCVIALQEGDVDTLDRTAGAIRGRAARVIHIINAEMENYEAGVYTEKVLEATKLLSETVMPRFAEQVEVAIEALSANVPQPFEENEFIDASRLVYDGVRDIRKAVLMIRTPEELEDDSDFEQEDYDVRSRTSVQTEDDQLIAGQSARAIMAQLPQEEKAKIAEQVEIFHQEKSKLDAEVAKWDDSGNDIIVLAKQMCMIMMEMTDFTRGKGPLKNTSDVINAAKKIAEAGSRMDKLARAVADQCPDSACKQDLLAYLQRIALYCHQLNICSKVKAEVQNLGGELIVSGLDSATSLIQAAKNLMNAVVLTVKASYVASTKYQKVYGTAAVNSPVVSWKMKAPEKKPLVKRVSPVQALSEFKAMDSF

SEQ ID NO: 912576 - protein, 731 aa, Homo sapiens
RGPRRAGRAGGTAPRPEAAAAAAALVPAAASPVPSVITTPAAGNGRERGGGEKLPPTHRGSMTSATSPIILKWDPKSLEIRTLTVERLLEPLVTQVTTLVNTSNKGPSGKKKGRSKKAHVLAASVEQATQNFLEKGEQIAKESQDLKEELVAAVEDVRKQGETMRIASSEFADDPCSSVKRGTMVRAARALLSAVTRLLILADMADVMRLLSHLKIVEEALEAVKNATNEQDLANRFKEFGKKMVKLNYVAARRQQELKDPHCRDEMAAARGALKKNATMLYTASQAFLRHPDVAATRANRDYVFKQVQEAIAGISNAAQATSPTDEAKGHTGIGELAAALNEFDNKIILDPMTFSEARFRPSLEERLESIISGAALMADSSCTRDDRRERIVAECNAVRQALQDLLSEYMNNTGRKEKGDPLNIAIDKMTKKTRDLRRQLRKAVMDHISDSFLETNVPLLVLIEAAKSGNEKEVKEYAQVFREHANKLVEVANLACSISNNEEGVKLVRMAATQIDSLCPQVINAALTLAARPQSKVAQDNMDVFKDQWEKQVRVLTEAVDDITSVDDFLSVSENHILEDVNKCVIALQEGDVDTLDRTAGAIRGRAARVIHIINAEMENYEAGVYTEKVLEATKLLSETVMPRFAEQVEVAIEALSANVPQPFEENEFIDASRLVYDGVRDIRKAVLMIRTPEELEDNMDVFKDQWEKQVRVLTEAVDDITSVDDFLSV

SEQ ID NO: 912577 - protein, 78 aa, Homo sapiens
AGGKCMPKNPSRHPGAPGDQGKDPVHSGEALLAIIAIEDLGQRTAVCPLWSPCLARGSDPYATVYPLATVDPLATVNP

SEQ ID NO: 912578 - protein, 130 aa, Homo sapiens
KSTCARLLLAIEDLGQRTAVCPLWSPCLARGSVTPAMRTLAILAAILLVALQAQAEPLQARADEVAAAPEQIAADIPEVVVSLAWDESLAPKHPGSRKNMACYCRIPACIAGERRYGTCIYQGRLWAFCC

SEQ ID NO: 912579 - protein, 131 aa, Homo sapiens
ARYQRGTITFAIEDLGQRTAVCPLWSPCLARGSVTPAMRTLAILAAILLVALQAQAEPLQARADEVAAAPEQIAADIPEVVVSLAWDESLAPKHPGSRKNMACYCRIPACIAGERRYGTCIYQGRLWAFCC

SEQ ID NO: 912580 - protein, 117 aa, Homo sapiens
LHGEYLSLLKIQKISRALWRGARNPSYSWGCYGILTVPDKGRIIPNSPRSRLQRTSQKWLFPLHGTKAWLQSIQAQGKTWPAIAEYQRALQENVAMEPASTREDSGHSAAELAEKEK

SEQ ID NO: 912581 - protein, 162 aa, Homo sapiens
QEVNQFRSSFLIRGVSCSFDFFKVRLGLGLKLWALDLLHQVAIEDLGQRTAVCPLWSPCLARGSVTPAMRTLAILAAILLVALQAQAEPLQARADEVAAAPEQIAADIPEVVVSLAWDESLAPKHPGSRKNMACYCRIPACIAGERRYGTCIYQGRLWAFCC

SEQ ID NO: 912582 - protein, 131 aa, Homo sapiens; identical to SEQ ID NO: 912579

SEQ ID NO: 912583 - protein, 131 aa, Homo sapiens; identical to SEQ ID NO: 912579

SEQ ID NO: 912584 - protein, 102 aa, Homo sapiens
MRTLAILAAILLVALQAQAEPLQARADEVAAAPEQIAADIPEVVVSLAWDESLAPKHPAQGNTVFAVAGIVALPCSSKFVWLLLVSRESPVCEPAELAEKEK

SEQ ID NO: 912585 - protein, 109 aa, Homo sapiens
RGRGLSQSRQLPVFRGLRNFLSVRVSALPPSSPICLVRPPVALTWDPQGALPAKQWPPGRRDPLSGRGKMPAVGQGVQAAQPRQAPGGCGDSTQKIHLGSKLALFQYWL

SEQ ID NO: 912586 - protein, 109 aa, Homo sapiens; identical to SEQ ID NO: 912585

SEQ ID NO: 912587 - protein, 167 aa, Homo sapiens
MPGPTPSGTNVGSSGRSPSKAVAARAAGSTVRQREEKILNTCMETSEGCEEGCDIFWLQQEKCQLWDKECRPHNLGRHRGDVAILHRRFTWAQSWPCSSIGYESSVHRFCIYVAHLGQVHSFVDSVTSICHLKKEEKTQHFLDQKYSDYLFMREIFCKLAVLQGIYQ

SEQ ID NO: 912588 - protein, 167 aa, Homo sapiens; identical to SEQ ID NO: 912587

SEQ ID NO: 912589 - protein, 126 aa, Homo sapiens
RGRGLSQSRQLPVFRGLRNFLSVRVSALPPSSPICLVRPPVALTWDPQGALPAKQWPPGRRDPLSGRGKMPAVGQGVQAAQPRQAPGGCGDSTQKIHLGSKLALFQYCVTWTLLSVLSKSGFFPLG

SEQ ID NO: 912590 - protein, 109 aa, Homo sapiens; identical to SEQ ID NO: 912585

SEQ ID NO: 912591 - protein, 109 aa, Homo sapiens; identical to SEQ ID NO: 912585

SEQ ID NO: 912592 - protein, 131 aa, Homo sapiens
ILSDPGYIFPSVGIGLSEGRCDPKEGGRRSLLPIQQPGPTPSGTNVGSSGRSPSKAVAARAAGSTVRQRKNASCGTRSAGRTTSAGTGGMWRFYTEDSPGLKVGPVPVLVMSLLFIASVFMLHIWGKYTRS

SEQ ID NO: 912593 - protein, 98 aa, Homo sapiens
RGRGLSQSRQLPVFRGLRNFLSVRVSALPPSSPICLVRPPVALTWDPQGALPAKQWPPGRRDPLSGRGKEPCSSFASRLGDRTQNLADSGVETLACED

SEQ ID NO: 912594 - protein, 102 aa, Homo sapiens
ILSDPGYIFPSVGIGLSEGRCDPKEGGRRSLLPIQQPGPTPSGTNVGSSGRSPSKAVAARAAGSTVRQREEKILNTCMETSEGCEEGCDIFWLQQVNLKLMI

SEQ ID NO: 912595 - protein, 598 aa, Homo sapiens
MENSSAASASSEAGSSRSQEIEELERFIDSYVLEYQVQGLLADKTEGDGESERTQSHISQWTADCSEPLDSSCSFSRGRAPPQQNGSKDNSLDMLGTDIWAANTFDSFSGATWDLQPEKLDFTQFHRKVRHTPKQPLPHIDREGCGKGKLEDGDGINLNDIEKVLPAWQGYHPMPHEVEIAHTKKLFRRRRNDRRRQQRPPGGNKPQQHGDHQPGSAKHNRDHQKSYQGGSAPHPSGRPTHHGYSQNRRWHHGNMKHPPGDKGEAGAHRNAKETMTIENPKLEDTAGDTGHSSLEAPRSPDTLAPVASERLPPQQSGGPEVETKRKDSILPERIGERPKITLLQSSKDRLRRRLKEKDEVAVETTTPQQNKMDKLIEILNSMRNNSSDVDTKLTTFMEEAQNSTNSEEMLGEIVRTIYQKAVSDRSFAFTAAKLCDKMALFMVEGTKFRSLLLNMLQKDFTVREELQQQDVERWLGFITFLCEVFGTMRSSTGEPFRVLVCPIYTCLRELLQSQDVKEDAVLCCSMELQSTGRLLEEQLPEMMTELLASARDKMLCPSESMLTRSLLLEVIELHANSWNPLTPPITQYYNRTIQKLTA

SEQ ID NO: 912596 - protein, 598 aa, Homo sapiens; identical to SEQ ID NO: 912595

SEQ ID NO: 912597 - protein, 598 aa, Homo sapiens; identical to SEQ ID NO: 912595

SEQ ID NO: 912598 - protein, 598 aa, Homo sapiens; identical to SEQ ID NO: 912595

SEQ ID NO: 912599 - protein, 598 aa, Homo sapiens; identical to SEQ ID NO: 912595

SEQ ID NO: 912600 - protein, 541 aa, Homo sapiens
MENSSAASASSEAGSSRSQEIEELERFIDSYVLEYQVQGLLADKTEGDGESERTQSHISQWTADCSEPLDSSCSFSRGRAPPQQNGSKDNSLDMLGTDIWAANTFDSFSGATWDLQPEKLDFTQFHRKVRHTPKQPLPHIDREGCGKGKLEDGDGINLNDIEKVLPAWQGYHPMPHEVEIAHTKKLFRRRRNDRRRQQRPPGGNKPQQHGDHQPGSAKHNRDHQKSYQGGSAPHPSGRPTHHGYSQNRRWHHGNMKHPPGDKGEAGAHRNAKETMTIENPKLEDTAGDTGHSSLEAPRSPDTLAPVASERLPPQQSGGPEVETKRKDSILPERIGERPKITLLQSSKDRLRRRLKEKDEVAVETTTPQQNKMDKLIEILNSMRNNSSDVDTKLTTFMEEAQNSTNSEEMLGEIVRTIYQKAVSDRSFAFTAAKLCDKMALFMVEGTKFRSLLLNMLQKDFTVREELQQQDVERWLGFITFLCEVFGTMRSSTGEPFRVSCPSAAGHCVGKPLAGPLRTQIRRKKDNFPLRGTLTRKGWPPP

SEQ ID NO: 912601 - protein, 96 aa, Homo sapiens
MENSSAASASSEAGSSRSQEIEELERFIDSYVLEYQVQGLLADKTEGDGESERTQSHISQWTADCSEPLDSSCSFSRGRAPPQQNTAPRMGSSRRH

SEQ ID NO: 912602 - protein, 598 aa, Homo sapiens; identical to SEQ ID NO: 912595

SEQ ID NO: 912603 - protein, 598 aa, Homo sapiens; identical to SEQ ID NO: 912595

SEQ ID NO: 912604 - protein, 598 aa, Homo sapiens; identical to SEQ ID NO: 912595

SEQ ID NO: 912605 - protein, 598 aa, Homo sapiens; identical to SEQ ID NO: 912595

SEQ ID NO: 912606 - protein, 102 aa, Homo sapiens
MENSSAASASSEAGSSRSQEIEELERFIDSYVLEYQVQGLLADKTEGDGESERTQSHISQVSAGPGLGQLGKFRGGDAGAPEFWAASSCLTLDRQGMNGPTQ

SEQ ID NO: 912607 - protein, 755 aa, Homo sapiens
MLDCSDYVLDSRMNNPSETSKPSMESGDGNTGTQTNGLDFQKQPVPVGGAISTAQAQAFLGHLHQVQLAGTSLQAAAQSLNVQSKSNEESGDSQQPSQPSQQPSVQAAIPQTQLMLAGGQITGLTLTPAQQQLLLQQAQAQAQLLAAAVQQHSASQQHSAAGATISASAATPMTQIPLSQPIQIAQDLQQLQQLQQQNLNLQQFVLVHPTTNLQPAQFIISQTPQGQQGLLQAQNLLTQLPQQSQANLLQSQPSITLTSQPATPTRTIAATPIQTLPQSQSTPKRIDTPSLEEPSDLEELEQFAKTFKQRRIKLGFTQGDVGLAMGKLYGNDFSQTTISRFEALNLSFKNMCKLKPLLEKWLNDAENLSSDSSLSSPSALNSPGIEGLSRRRKKRTSIETNIRVALEKSFLENQKPTSEEITMIADQLNMEKEVIRVWFCNRRQKEKRINPPSSGGTSSSPIKAIFPSPTSLVATTPSLVTSSAATTLTVSPVLPLTSAAVTNLSVTGTSDTTSNNTATVISTAPPASSAVTSPSLSPSPSASASTSEASSASETSTTQTTSTPLSSPLGTSQVMVTASGLQTAAAAALQGAAQLPANASLAAMAAAAGLNPSLMAPSQFAAGGALLSLNPGTLSGALSPALMSNSTLATIQALASGGSLPITSLDATGNLVFANAGGAPNIVTAPLFLNPQNLSLLTSNPVSLVSAAAASAGNSAPVASLHATSTSAESIQNSLFTVASASGAASTTTTASKAQ

SEQ ID NO: 912608 - protein, 293 aa, Homo sapiens
KIFKMADGGAASQDESSAAAAAAADSRMNNPSETSKPSMESGDGNTGTQTNGLDFQKQPVPVGGAISTAQAQAFLGHLHQVQLAGTSLQAAAQSLNVQSKSNEESGDSQQPSQPSQQPSVQAAIPQTQLMLAGGQITGLTLTPAQQQLLLQQAQAQAQLLAAAVQQHSASQQHSAAGATISASAATPMTQIPLSQPIQIAQDLQQLQQLQQQNLNLQQFVLVHPTTNLQPAQFIISQTPQGQQGLLQAQIFYRNYSESKPTSKVGSKDYLNSSKKPKEIGYPIDFPSSTKDGP

SEQ ID NO: 912609 - protein, 653 aa, Homo sapiens
MNNPSETSKPSMESGDGNTGTQTNGLDFQKQPVPVGGAISTAQAQAFLGHLHQVQLAGTSLQAAAQSLNVQSKSNEESGDSQQPSQPSQQPSVQAAIPQTQLMLAGGQITGLTLTPAQQQLLLQQAQAQAQLLAAAVQQHSASQQHSAAGATISASAATPMTQIPLSQPIQIAQDLQQLQQLQQQNLNLQQFVLVHPTTNLQPAQFIISQTPQGQQGLLQAQNLLTQLPQQSQANLLQSQPSITLTSQPATPTRTIAATPIQTLPQSQSTPKRIDTPSLEEPSDLEELEQFAKTFKQRRIKLGFTQGDVGLAMGKLYGNDFSQTTISRFEALNLSFKNMCKLKPLLEKWLNDAENLSSDSSLSSPSALNSPGIEGLSRRRKKRTSIETNIRVALEKSFLENQKPTSEEITMIADQLNMEKEVIRVWFCNRRQKEKRINPPSSGGTSSSPIKAIFPSPTSLVATTPSLVTSSAATTLTVSPVLPLTSAAVTNLSVTGTSDTTSNNTATVISTAPPASSAVTSPSLSPSPSASASTSEASSASETSTTQTTSTPLSSPLGTSQVMVTASGLQTAAAAALQGAAQLPANASLAAMAAAAGLNPSLMAPSQFAAGGALLSLNPGTLSGALSPALMSNSTLATIQGLLHGLENFLTKN

SEQ ID NO: 912610 - protein, 763 aa, Homo sapiens
KIFKMADGGAASQDESSAAAAAAADSRMNNPSETSKPSMESGDGNTGTQTNGLDFQKQPVPVGGAISTAQAQAFLGHLHQVQLAGTSLQAAAQSLNVQSKSNEESGDSQQPSQPSQQPSVQAAIPQTQLMLAGGQITGLTLTPAQQQLLLQQAQAQAQLLAAAVQQHSASQQHSAAGATISASAATPMTQIPLSQPIQIAQDLQQLQQLQQQNLNLQQFVLVHPTTIISQTPQGQQGLLQAQNLLTQLPQQSQANLLQSQPSITLTSQPATPTRTIAATPIQTLPQSQSTPKRIDTPSLEEPSDLEELEQFAKTFKQRRIKLGFTQGDVGLAMGKLYGNDFSQTTISRFEALNLSFKNMCKLKPLLEKWLNDAENLSSDSSLSSPSALNSPGIEGLSRRRKKRTSIETNIRVALEKSFLENQKPTSEEITMIADQLNMEKEVIRVWFCNRRQKEKRINPPSSGGTSSSPIKAIFPSPTSLVATTPSLVTSSAATTLTVSPVLPLTSAAVTNLSVTGTSDTTSNNTATVISTAPPASSAVTSPSLSPSPSASASTSEASSASETSTTQTTSTPLSSPLGTSQVMVTASGLQTAAAAALQGAAQLPANASLAAMAAAAGLNPSLMAPSQFAAGGALLSLNPGTLSGALSPALMSNSTLATIQALASGGSLPITSLDATGNLVFANAGGAPNIVTAPLFLNPQNLSLLTSNPVSLVSAAAASAGNSAPVASLHATSTSAESIQNSLFTVASASGAASTTTTASKAQ

SEQ ID NO: 912611 - protein, 583 aa, Homo sapiens [sequence omitted]

SEQ ID NO: 912612 - protein, 780 aa, Homo sapiens
LTAASTFWVQAVLPLSAQVAGTTGTQTNGLDFQKQPVPVGGAISTAQAQAFLGHLHQVQLAGTSLQAAAQSLNVQSKSNEESGDSQQPSQPSQQPSVQAAIPQTQLMLAGGQITGLTLTPAQQQLLLQQAQAQAQLLAAAVQQHSASQQHSAAGATISASAATPMTQIPLSQPIQIAQDLQQLQQLQQQNLNLQQFVLVHPTTNLQPAQFIISQTPQGQQGGKTAIIETTNLSPASAKSSNATTSAKPSQPPTVAAKHHPHLPDLAQSSLRFWSWGNLSVTTPLKPATPTRTIAATPIQTLPQSQSTPKRIDTPSLEEPSDLEELEQFAKTFKQRRIKLGFTQGDVGLAMGKLYGNDFSQTTISRFEALNLSFKNMCKLKPLLEKWLNDAENLSSDSSLSSPSALNSPGIEGLSRRRKKRTSIETNIRVALEKSFLENQKPTSEEITMIADQLNMEKEVIRVWFCNRRQKEKRINPPSSGGTSSSPIKAIFPSPTSLVATTPSLVTSSAATTLTVSPVLPLTSAAVTNLSVTGTSDTTSNNTATVISTAPPASSAVTSPSLSPSPSASASTSEASSASETSTTQTTSTPLSSPLGTSQVMVTASGLQTAAAAALQGAAQLPANASLAAMAAAAGLNPSLMAPSQFAAGGALLSLNPGTLSGALSPALMSNSTLATIQALASGGSLPITSLDATGNLVFANAGGAPNIVTAPLFLNPQNLSLLTSNPVSLVSAAAASAGNSAPVASLHATSTSAESIQNSLFTVASASGAASTTTTASKAQ

SEQ ID NO: 912613 - protein, 291 aa, Homo sapiens
MYSLNLMKNRGIRSSQASLPSSLQCRQPFLPLTSAAVTNLSVTGTSDTTSNNTATVISTAPPASSAVTSPSLSPSPSASASTSEASSASETSTTQTTSTPLSSPLGTSQVMVTASGLQTAAAAALQGAAQLPANASLAAMAAAAGLNPSLMAPSQFAAGGALLSLNPGTLSGALSPALMSNSTLATIQALASGGSLPITSLDATGNLVFANAGGAPNIVTAPLFLNPQNLSLLTSNPVSLVSAAAASAGNSAPVASLHATSTSAESIQNSLFTVASASGAASTTTTASKAQ

SEQ ID NO: 912614 - protein, 113 aa, Homo sapiens
MSNSTLATIQALASGGSLPITSLDATGNLVFANAGGAPNIVTAPLFLNPQNLSLLTSNPVSLVSAAAASAGNSAPVASLHATSTSAESIQNSLFTVASASGAASTTTTASKAQ

SEQ ID NO: 912615 - protein, 303 aa, Homo sapiens
QHARRTQRPTGTHNVSRYEAWVFTAMLDCSDYVLDSRMNNPSETSKPSMESGDGNTGTQTNGLDFQKQPVPVGGAISTAQAQAFLGHLHQVQLAGTSLQAAAQSLNVQSKSNEESGDSQQPSQPSQQPSVQAAIPQTQLMLAGGQITGLTLTPAQQQLLLQQAQAQAQLLAAAVQQHSASQQHSAAGATISASAATPMTQIPLSQPIQIAQDLQQLQQLQQQNLNLQQFVLVHPTTNLQPAQFIISQTPQGQQGLLQAQIFYRNYSESKPTSKVGSKDYLNSSKKPKEIGYPIDFPSSTKDGP

SEQ ID NO: 912616 - protein, 770 aa, Homo sapiens
KIFKMADGGAASQDESSAAAAAAADSRMNNPSETSKPSMESGDGNTGTQTNGLDFQKQPVPVGGAISTAQAQAFLGHLHQVQLAGTSLQAAAQSLNVQSKSNEESGDSQQPSQPSQQPSVQAAIPQTQLMLAGGQITGLTLTPAQQQLLLQQAQAQAQLLAAAVQQHSASQQHSAAGATISASAATPMTQIPLSQPIQIAQDLQQLQQLQQQNLNLQQFVLVHPTTNLQPAQFIISQTPQGQQGLLQAQNLLTQLPQQSQANLLQSQPSITLTSQPATPTRTIAATPIQTLPQSQSTPKRIDTPSLEEPSDLEELEQFAKTFKQRRIKLGFTQGDVGLAMGKLYGNDFSQTTISRFEALNLSFKNMCKLKPLLEKWLNDAENLSSDSSLSSPSALNSPGIEGLSRRRKKRTSIETNIRVALEKSFLENQKPTSEEITMIADQLNMEKEVIRVWFCNRRQKEKRINPPSSGGTSSSPIKAIFPSPTSLVATTPSLVTSSAATTLTVSPVLPLTSAAVTNLSVTGTSDTTSNNTATVISTAPPASSAVTSPSLSPSPSASASTSEASSASETSTTQTTSTPLSSPLGTSQVMVTASGLQTAAAAALQGAAQLPANASLAAMAAAAGLNPSLMAPSQFAAGGALLSLNPGTLSGALSPALMSNSTLATIQALASGGSLPITSLDATGNLVFANAGGAPNIVTAPLFLNPQNLSLLTSNPVSLVSAAAASAGNSAPVASLHATSTSAESIQNSLFTVASASGAASTTTTASKAQ

SEQ ID NO: 912617 - protein, 665 aa, Homo sapiens
MLDCSDYVLDSRMNNPSETSKPSMESGDGNTGTQTNGLDFQKQPVPVGGAISTAQAQAFLGHLHQVQLAGTSLQAAAQSLNVQSKSNEESGDSQQPSQPSQQPSVQAAIPQTQLMLAGGQITGLTLTPAQQQLLLQQAQAQAQLLAAAVQQHSASQQHSAAGATISASAATPMTQIPLSQPIQIAQDLQQLQQLQQQNLNLQQFVLVHPTTNLQPAQFIISQTPQGQQGLLQAQNLLTQLPQQSQANLLQSQPSITLTSQPATPTRTIAATPIQTLPQSQSTPKRIDTPSLEEPSDLEELEQFAKTFKQRRIKLGFTQGDVGLAMGKLYGNDFSQTTISRFEALNLSFKNMCKLKPLLEKWLNDAENLSSDSSLSSPSALNSPGIEGLSRRRKKRTSIETNIRVALEKSFLENQKPTSEEITMIADQLNMEKEVIRVWFCNRRQKEKRINPPSSGGTSSSPIKAIFPSPTSLVATTPSLVTSSAATTLTVSPVLPLTSAAVTNLSVTGTSDTTSNNTATVISTAPPASSAVTSPSLSPSPSASASTSEASSASETSTTQTTSTPLSSPLGTSQVMVTASGLQTAAAAALQGAAQLPANASLAAMAAAAGLNPSLMAPSQFAAGGALLSLNPGTLSGALSPALMSNSTLATIQGLLHGLENFLTKN

SEQ ID NO: 912618 - protein, 517 aa, Homo sapiens
MLDCSDYVLDSRMNNPSETSKPSMESGDGNTGTQTNGLDFQKQPVPVGGAISTAQAQAFLGHLHQVQLAGTSLQAAAQSLNVQSKSNEESGDSQQPSQPSQQPSVQAAIPQTQLMLAGGQITGLTLTPAQQQLLLQQAQAQAQLLAAAVQQHSASQQHSAAGATISASAATPMTQIPLSQPIQIAQDLQQLQQLQQQNLNLQQFVLVHPTTNLQPAQFIISQTPQGQQGLLQAQNLLTQLPQQSQANLLQSQPSITLTSQPATPTRTIAATPIQTLPQSQSTPKRIDTPSLEEPSDLEELEQFAKTFKQRRIKLGFTQGDVGLAMGKLYGNDFSQTTISRFEALNLSFKNMCKLKPLLEKWLNDAENLSSDSSLSSPSALNSPGIEGLSRRRKKRTSIETNIRVALEKSFLENQKPTSEEITMIADQLNMEKEVIRVWFCNRRQKEKRINPPSSGGTSSSPIKAIFPSPTSLVATTPSLVTSSAATTLTVSPVLPLTSAAVTNLSVTGTSDTTSNNT

SEQ ID NO: 912619 - protein, 600 aa, Homo sapiens
MNKGIVEATISASAATPMTQIPLSQPIQIAQDLQQLQQLQQQNLNLQQFVLVHPTTNLQPAQFIISQTPQGQQGLLQAQNLLTQLPQQSQANLLQSQPSITLTSQPATPTRTIAATPIQTLPQSQSTPKRIDTPSLEEPSDLEELEQFAKTFKQRRIKLGFTQGDVGLAMGKLYGNDFSQTTISRFEALNLSFKNMCKLKPLLEKWLNDAENLSSDSSLSSPSALNSPGIEGLSRRRKKRTSIETNIRVALEKSFLENQKPTSEEITMIADQLNMEKEVIRVWFCNRRQKEKRINPPSSGGTSSSPIKAIFPSPTSLVATTPSLVTSSAATTLTVSPVLPLTSAAVTNLSVTGTSDTTSNNTATVISTAPPASSAVTSPSLSPSPSASASTSEASSASETSTTQTTSTPLSSPLGTSQVMVTASGLQTAAAAALQGAAQLPANASLAAMAAAAGLNPSLMAPSQFAAGGALLSLNPGTLSGALSPALMSNSTLATIQALASGGSLPITSLDATGNLVFANAGGAPNIVTAPLFLNPQNLSLLTSNPVSLVSAAAASAGNSAPVASLHATSTSAESIQNSLFTVASASGAASTTTTASKAQ

SEQ ID NO: 912620 - protein, 353 aa, Homo sapiens
MLDCSDYVLDSRMNNPSETSKPSMESGDGNTGTQTNGLDFQKQPVPVGGAISTAQAQAFLGHLHQVQLAGTSLQAAAQSLNVQSKSNEESGDSQQPSQPSQQPSVQAAIPQTQLMLAGGQITGLTLTPAQQQLLLQQAQAQAQLLAAAVQQHSASQQHSAAGATISASAATPMTQIPLSQPIQIAQDLQQLQQLQQQNLNLQQFVLVHPTTNLQPAQFIISQTPQGQQGLLQAQNLLTQLPQQSQANLLQSQPSITLTSQPATPTRTIAATPIQTLPQSQSTPKRIDTPSLEEPSDLEELEQFAKTFKQRRIKLGFTQLHATSTSAESIQNSLFTVASASGAASTTTTASKAQ

SEQ ID NO: 912621 - protein, 82 aa, Homo sapiens
YWQSRFPLHHVMLLEESHQNLSLLTSNPVSLVSAAAASAGNSAPVASLHATSTSAESIQNSLFTVASASGAASTTTTASKAQ

SEQ ID NO: 912622 - protein, 393 aa, Homo sapiens [sequence omitted]

SEQ ID NO: 912623 - protein, 291 aa, Homo sapiens
VQSIPMAVGASCDRGTAKSVTCTYSPALNKMFCQLAKTCPVQLWVDSTPPPGTRVRAMAIYKQSQHMTEVVRRCPHHERCSDSDGLAPPQHLIRVEGNLRVEYLDDRNTFRHSVVVPYEPPEVGSDCTTIHYNYMCNSSCMGGMNRRPILTIITLEDSSGNLLGRNSFEVRVCACPGRDRRTEEENLRKKGEPHHELPPGSTKRALPNNTSSSPQPKKKPLDGEYFTLQIRGRERFEMFRELNEALELKDAQAGKEPGGSRAHSSHLKSKKGQSTSRHKKLMFKTEGPDSD

SEQ ID NO: 912624 - protein, 380 aa, Homo sapiens
MEEPQSDPSVEPPLSQETFSDLWKLLPENNVLSPLPSQAMDDLMLSPDDIEQWFTEDPGPDEAPRMPEAAPRVAPAPAAPTPAAPAPAPSWPLSSSVPSQKTYQGSYGFRLGFLHSGTAKSVTCTYSPALNKMFCQLAKTCPVQLWVDSTPPPGTRVRAMAIYKQSQHMTEVVRRCPHHERCSDSDGLAPPQHLIRVEGNLRVEYLDDRNTFRHSVVVPYEPPEVGSDCTTIHYNYMCNSSCMGGMNRRPILTIITLEDSSGNLLGRNSFEVRVCACPGRDRRTEEENLRKKGEPHHELPPGSTKRALPNNTSSSPQPKKKPLDGEYFTLQIRGRERFEMFRELNEALELKDAQAGKEPGGSRAHSSHMKSTKGQSRYRA

SEQ ID NO: 912625 - protein, 393 aa, Homo sapiens [sequence omitted]

SEQ ID NO: 912626 - protein, 351 aa, Homo sapiens
MEEPQSDPSVEPPLSQETFSDLWKLLPENNVLSPLPSQAMDDLMLSPDDIEQWFTEDPGPDEAPRMPEAAPRVAPAPAAPTPAAPAPAPSWPLSSSVPSQKTYQGSYGFRLGFLHSGTAKSVTCTYSPALNKMFCQLAKTCPVQLWVDSTPPPGTRVRAMAIYKQSQHMTEVVRRCPHHERCSDSDGLAPPQHLIRVEGNLRVEYLDDRNTFRHSVVVPYEPPEVGSDCTTIHYNYMCNSSCMGGMNRRPILTIITLEDSSGNLLGRNSFEVRVCACPGRDRRTEEENLRKKGEPHHELPPGSTKRALPNNTSSSPQPKKKPLDGEYFTLQIRGRQRGYMSRDVVKPRTVT

SEQ ID NO: 912627 - protein, 632 aa, Homo sapiens
MSRVRDAGCVAAGIVIGAGAWYCVYKYTRGRDQTKKRMAKPKNRAVAGTGARARAGLRAGFTIDLGSGFSPPTPVRAEAEDRAQDEASALDTVGAEAVAPAASSAEAQSGAGSQAQEADGAGVGPKAESVVGAAMASAIAPPPGVTEALGAAEAPAMAGAPKVAEAPREAETSRAAVPPGTVVPTEAAAPTEVTEGPGVAAPTKVAEAPGVASPTEAAEAPVPATPTGAAAPTGAAESPGTSGSPRTAVVPGTSAAKKATPGAHTGAIPKATSATGAVPKGGGKGVTRSRNGGKGKGKKSKVEVDELGMGFRPGDGAAAAAAASANGGQAFLAEVPDSEEGESGWTDTESDSDSEPETQRRGRGRRPVAMQKRPFPYEIDEILGVRDLRKVLALLQKSDDPFIQQVALLTLSNNANYSCNQETIRKLGGLPIIANMINKTDPHIKEKALMAMNNLSENYENQGRLQVYMNKVMDDIMASNLNSAVQVVGLKFLTNMTITNDYQHLLVNSIANFFRLLSQGGGKIKVEILKILSNFAENPDMLKKLLSTQVPASFSSLYNSYVESEILINALTLFEIIYDNLRAEVFNYREFNKGSLFYLCTTSGVCVKKIRALANHHDLLVKVKVIKLVNKF

SEQ ID NO: 912628 - protein, 632 aa, Homo sapiens; identical to SEQ ID NO: 912627

SEQ ID NO: 912629 - protein, 614 aa, Homo sapiens
MSRVRDAGCVAAGIVIGAGAWYCVYKYTRGRDQTKKRMAKPKNRAVAGTGARARAGLRAGFTIDLGSGFSPPTPVRAEAEDRAQDEASALDTVGAEAVAPAASSAEAQSGAGSQAQEADGAGVGPKAESVVGAAMASAIAPPPGVTEALGAAEAPAMAGAPKVAEAPREAETSRAAVPPGTVVPTEAAAPTEVTEGPGVAAPTKVAEAPGVASPTEAAEAPVPATPTGAAAPTGAAESPGTSGSPRTAVVPGTSAAKKATPGAHTGAIPKATSATGAVPKGGGKGVTRSRNGGKGKGKAAAAAAASANGGQAFLAEVPDSEEGESGWTDTESDSDSEPETQRRGRGRRPVAMQKRPFPYEIDEILGVRDLRKVLALLQKSDDPFIQQVALLTLSNNANYSCNQETIRKLGGLPIIANMINKTDPHIKEKALMAMNNLSENYENQGRLQVYMNKVMDDIMASNLNSAVQVVGLKFLTNMTITNDYQHLLVNSIANFFRLLSQGGGKIKVEILKILSNFAENPDMLKKLLSTQVPASFSSLYNSYVESEILINALTLFEIIYDNLRAEVFNYREFNKGSLFYLCTTSGVCVKKIRALANHHDLLVKVKVIKLVNKF

SEQ ID NO: 912630 - protein, 632 aa, Homo sapiens; identical to SEQ ID NO: 912627

SEQ ID NO: 912631 - protein, 605 aa, Homo sapiens
MSRVRDAGCVAAGIVIGAGAWYCVYKYTGLWLGLEPGLELGFSPPTPVRAEAEDRAQDEASALDTVGAEAVAPAASSAEAQSGAGSQAQEADGAGVGPKAESVVGAAMASAIAPPPGVTEALGAAEAPAMAGAPKVAEAPREAETSRAAVPPGTVVPTEAAAPTEVTEGPGVAAPTKVAEAPGVASPTEAAEAPVPATPTGAAAPTGAAESPGTSGSPRTAVVPGTSAAKKATPGAHTGAIPKATSATGAVPKGGGKGVTRSRNGGKGKGKKSKVEVDELGMGFRPGDGAAAAAAASANGGQAFLAEVPDSEEGESGWTDTESDSDSEPETQRRGRGRRPVAMQKRPFPYEIDEILGVRDLRKVLALLQKSDDPFIQQVALLTLSNNANYSCNQETIRKLGGLPIIANMINKTDPHIKEKALMAMNNLSENYENQGRLQVYMNKVMDDIMASNLNSAVQVVGLKFLTNMTITNDYQHLLVNSIANFFRLLSQGGGKIKVEILKILSNFAENPDMLKKLLSTQVPASFSSLYNSYVESEILINALTLFEIIYDNLRAEVFNYREFNKGSLFYLCTTSGVCVKKIRALANHHDLLVKVKVIKLVNKF

SEQ ID NO: 912632 - protein, 632 aa, Homo sapiens; identical to SEQ ID NO: 912627

SEQ ID NO: 912633 - protein, 632 aa, Homo sapiens; identical to SEQ ID NO: 912627

SEQ ID NO: 912634 - protein, 632 aa, Homo sapiens; identical to SEQ ID NO: 912627

SEQ ID NO: 912635 - protein, 632 aa, Homo sapiens; identical to SEQ ID NO: 912627

SEQ ID NO: 912636 - protein, 632 aa, Homo sapiens; identical to SEQ ID NO: 912627

SEQ ID NO: 912637 - protein, 632 aa, Homo sapiens; identical to SEQ ID NO: 912627

SEQ ID NO: 912638 - protein, 1136 aa, Homo sapiens
MEFRRPARQVALMAPPSEETPLIPQRSCSLLSTEAGALHVLLPARGPGPPQRLSFSFGDHLAEDLCVQAAKASGILPVYHSLFALATEDLSCWFPPSHIFSVEDASTQVLLYRIRFYFPNWFGLEKCHRFGLRKDLASAILDLPVLEHLFAQHRSDLVSGRLPVGLSLKEQGECLSLAVLDLARMAREQAQRPGELLKTVSYKACLPPSLRDLIQGLSFVTRRRIRRTVRRALRRVAACQADRHSLMAKYIMDLERLDPAGAAETFHVGLPGALGGHDGLGLLRVAGDGGIAWTQGEQEVLQPFCDFPEIVDISIKQAPRVGPAGEHRLVTVTRTDNQILEAEFPGLPEALSFVALVDGYFRLTTDSQHFFCKEVAPPRLLEEVAEQCHGPITLDFAINKLKTGGSRPGSYVLRRSPQDFDSFLLTVCVQNPLGPDYKGCLIRRSPTGTFLLVGLSRPHSSLRELLATCWDGGLHVDGVAVTLTSCCIPRPKEKSNLIVVQRGHSPPTSSLVQPQSQYQLSQMTFHKIPADSLEWHENLGHGSFTKIYRGCRHEVVDGEARKTEVLLKVMDAKHKNCMESFLEAASLMSQVSYRHLVLLHGVCMAGDSTMVQEFVHLGAIDMYLRKRGHLVPASWKLQVVKQLAYALNYLEDKGLPHGNVSARKVLLAREGADGSPPFIKLSDPGVSPAVLSLEMLTDRIPWVAPECLREAQTLSLEADKWGFGATVWEVFSGVTMPISALDPAKKLQFYEDRQQLPAPKWTELALLIQQCMAYEPVQRPSFRAVIRDLNSLISSDYELLSDPTPGALAPRDGLWNGAQLYACQDPTIFEERHLKYISQLGKGNFGSVELCRYDPLGDNTGALVAVKQLQHSGPDQQRDFQREIQILKALHSDFIVKYRGVSYGPGRQSLRLVMEYLPSGCLRDFLQRHRARLDASRLLLYSSQICKGMEYLGSRRCVHRDLAARNILVESEAHVKIADFGLAKLLPLDKDYYVVREPGQSPIFWYAPESLSDNIFSRQSDVWSFGVVLYELFTYCDKSCSPSAEFLRMMGCERDVPALCRLLELLEEGQRLPAPPACPAEVHELMKLCWAPSPQDRPSFSALGPQLDMLWSGSRGCETHAFTAHPEGKHHSLSFS

SEQ ID NO: 912639 - protein, 1094 aa, Homo sapiens
MAPPSEETPLIPQRSCSLLSTEAGALHVLLPARGPGPPQRLSFSFGDHLAEDLCVQAAKASGILPVYHSLFALATEDLSCWFPPSHIFSVEDASTQVLLYRIRFYFPNWFGLEKCHRFGLRKDLASAILDLPVLEHLFAQHRSDLVSGRLPVGLSLKEQGECLSLAVLDLARMAREQAQRPGELLKTVSYKACLPPSLRDLIQGLSFVTRRRIRRTVRRALRRVAACQADRHSLMAKYIMDLERLDPAGAAETFHVGLPGALGGHDGLGLLRVAGDGGIAWTQGEQEVLQPFCDFPEIVDISIKQAPRVGPAGEHRLVTVTRTDNQILEAEFPGLPEALSFVALVDGYFRLTTDSQHFFCKEVAPPRLLEEVAEQCHGPITLDFAINKLKTGGSRPGSYVLRRSPQDFDSFLLTVCVQNPLGPDYKGCLIRRSPTGTFLLVGLSRPHSSLRELLATCWDGGLHVDGVAVTLTSCCIPRPKEKSNLIVVQRGHSPPTSSLVQPQSQYQLSQMTFHKIPADSLEWHENLGHGSFTKIYRGCRHEVVDGEARKTEVLLKVMDAKHKNCMESFLEAASLMSQVSYRHLVLLHGVCMAGDSTMVQEFVHLGAIDMYLRKRGHLVPASWKLQVVKQLAYALNYLEDKGLPHGNVSARKVLLAREGADGSPPFIKLSDPGVSPAVLSLEMLTDRIPWVAPECLREAQTLSLEADKWGFGATVWEVFSGVTMPISALDPAKKLQFYEDRQQLPAPKWTELALLIQQCMAYEPVQRPSFRAVIRDLNSLISSDYELLSDPTPGALAPRDGLWNGAQLYACQDPTIFEERHLKYISQLGKGNFGSVELCRYDPLGDNTGALVAVKQLQHSGPDQQRDFQREIQILKALHSDFIVKYRGVSYGPGRQSLRLVMEYLPSGCLRDFLQRHRARLDASRLLLYSSQICKGMEYLGSRRCVHRDLAARNILVESEAHVKIADFGLAKLLPLDKDYYVVREPGQSPIFWYAPESLSDNIFSRQSDVWSFGVVLYELFTYCDKSCSPSAEFLRMMGCERDVPALCRLLELLEEGQRLPAPPACPAEVSAAGLASVSQSVDWAGVSGKPAGA

SEQ ID NO: 912640 - protein, 199 aa, Homo sapiens
MCCCPLGAPGPPQRLSFSFGDHLAEDLCVQAAKASGILPVYHSLFALATEDLSCWFPPSHIFSVEDASTQVLLYRIRFYFPNWNRAGRSGTGFGDYDKGNLGQVANPLNHAKYLGSHPPNGPDTGTVNLGGDRSAITPMGPQILQREQGVSGLEHWDRSTEPGPRNGTREAGTQRPGKKLAGKNQVKQTRGLSLTPQRP

SEQ ID NO: 912641 - protein, 500 aa, Homo sapiens
MEFRRPARQVALMAPPSEETPLIPQRSCSLLSTEAGALHVLLPARGPGPPQRLSFSFGDHLAEDLCVQAAKASGILPVYHSLFALATEDLSCWFPPSHIFSVEDASTQVLLYRIRFYFPNWFGLEKCHRFGLRKDLASAILDLPVLEHLFAQHRSDLVSGRLPVGLSLKEQGECLSLAVLDLARMAREQAQRPGELLKTVSYKACLPPSLRDLIQGLSFVTRRRIRRTVRRALRRVAACQADRHSLMAKYIMDLERLDPAGAAETFHVGLPGALGGHDGLGLLRVAGDGGIAWTQGEQEVLQPFCDFPEIVDISIKQAPRVGPAGEHRLVTVTRTDNQILEAEFPGLPEALSFVALVDGYFRLTTDSQHFFCKEVAPPRLLEEVAEQCHGPITLDFAINKLKTGGSRPGSYVLRRSPQDFDSFLLTVCVQNPLGPDYKGCLIRRSPTGTFLLVGLSRPHSSLRELLATCWDGGLHVDGVAVTLTSCCIPRPKGEPLPPLE

SEQ ID NO: 912642 - protein, 171 aa, Homo sapiens
MCPEVFISGSASRGYLKLRHELANPWGLFTSDFWFFSLILSSIEKSNLIVVQRGHSPPTSSLVQPQSQYQLSQMTFHKIPADSLEWHENLGHGSFTKIYRGCRHEVVDGEARKTEVLLKVMDAKHKNCMESFLEAASLMSQVSYRHLVLLHGVCMAGDSEKPHEKTKTHNT

SEQ ID NO: 912643 - protein, 1231 aa, Homo sapiens
MEFRRPARQVALMAPPSEETPLIPQRSCSLLSTEAGALHVLLPARGPGPPQRLSFSFGDHLAEDLCVQAAKASGILPVYHSLFALATEDLSCWFPPSHIFSVEDASTQVLLYRIRFYFPNWFGLEKCHRFGLRKDLASAILDLPVLEHLFAQHRSDLVSGRLPVGLSLKEQGECLSLAVLDLARMAREQAQRPGELLKTVSYKACLPPSLRDLIQGLSFVTRRRIRRTVRRALRRVAACQADRHSLMAKYIMDLERLDPAGAAETFHVGLPGALGGHDGLGLLRVAGDGGIAWTQGEQEVLQPFCDFPEIVDISIKQAPRVGPAGEHRLVTVTRTDNQILEAEFPGLPEALSFVALVDGYFRLTTDSQHFFCKEVAPPRLLEEVAEQCHGPITLDFAINKLKTGGSRPGSYVLRRSPQDFDSFLLTVCVQNPLGPDYKGCLIRRSPTGTFLLVGLSRPHSSLRELLATCWDGGLHVDGVAVTLTSCCIPRPKEKSNLIVVQRGHSPPTSSLVQPQSQYQLSQMTFHKIPADSLEWHENLGHGSFTKIYRGCRHEVVDGEARKTEVLLKVMDAKHKNCMESFLEAASLMSQVSYRHLVLLHGVCMAGDSTMVQEFVHLGAIDMYLRKRGHLVPASWKLQVVKQLAYALNYLEDKGLPHGNVSARKVLLAREGADGSPPFIKLSDPGVSPAVLSLEMLTDRIPWVAPECLREAQTLSLEADKWGFGATVWEVFSGVTMPISALDPAKKLQFYEDRQQLPAPKWTELALLIQQCMAYEPVQRPSFRAVIRDLNSLISSDYELLSDPTPGALAPRDGLWNGAQLYACQDPTIFEERHLKYISQLGKGNFGSVELCRYDPLGDNTGALVAVKQLQHSGPDQQRDFQREIQILKALHSDFIVKYRGVSYGPGRQSLRLVMEYLPSGCLRDFLQRHRARLDASRLLLYSSQICKGMEYLGSRRCVHRDLAARNILVESEAHVKIADFGLAKLLPLDKDYYVVREPGQSPIFWYAPESLSDNIFSRQSDVWSFGVVLYELFTYCDKSCSPSAVSRLPRAPSLLLPPRPSWPVSNLSAPASLFSMGSPGPSIIGPSGEDASSPFLTPSRFRQPLPAPSQMAPTPTTGGPSPSTHGGSSPTTCAPPWLQEFLRMMGCERDVPALCRLLELLEEGQRLPAPPACPAEVHELMKLCWAPSPQDRPSFSALGPQLDMLWSGSRGCETHAFTAHPEGKHHSLSFS

SEQ ID NO: 912644 - protein, 57 aa, Homo sapiens
KKGRRTEKESVCRSVPLRGHSSLQNPLGPDYKGCLIRRSPTGTFLLVGLSRPHSSLR

SEQ ID NO: 912645 - protein, 280 aa, Homo sapiens
MAAVVALSLRRRLPATTLGGACLQASRGAQTAAATAPRIKKFAIYRWDPDKAGDKPHMQTYEVDLNKCGPMVLDALIKIKNEVDSTLTFRRSCREGICGSCAMNINGGNTLACTRRIDTNLNKVSKIYPLPHMYVIKDLVPDLSNFYAQYKSIEPYLKKKDESQEGKQQYLQSIEEREKLDGLYECILCACCSTSCPSYWWNGDKYLGPAVLMQAYRWMIDSRDDFTEERLAKLQDPFSLYRCHTIMNCTRTCPKGLNPGKAIAEIKKMMATYKEKKASV

SEQ ID NO: 912646 - protein, 280 aa, Homo sapiens; identical to SEQ ID NO: 912645

SEQ ID NO: 912647 - protein, 223 aa, Homo sapiens
MQTYEVDLNKCGPMVLDALIKIKNEVDSTLTFRRSCREGICGSCAMNINGGNTLACTRRIDTNLNKVSKIYPLPHMYVIKDLVPDLSNFYAQYKSIEPYLKKKDESQEGKQQYLQSIEEREKLDGLYECILCACCSTSCPSYWWNGDKYLGPAVLMQAYRWMIDSRDDFTEERLAKLQDPFSLYRCHTIMNCTRTCPKGLNPGKAIAEIKKMMATYKEKKASV

SEQ ID NO: 912648 - protein, 255 aa, Homo sapiens
MFSMETVKLKLSSPYKFAIYRWDPDKAGDKPHMQTYEVDLNKCGPMVLDALIKIKNEVDSTLTFRRSCREGICGSCAMNINGGNTLACTRRIDTNLNKVSKIYPLPHMYVIKDLVPDLSNFYAQYKSIEPYLKKKDESQEGKQQYLQSIEEREKLDGLYECILCACCSTSCPSYWWNGDKYLGPAVLMQAYRWMIDSRDDFTEERLAKLQDPFSLYRCHTIMNCTRTCPKGLNPGKAIAEIKKMMATYKEKKASV

SEQ ID NO: 912649 - protein, 132 aa, Homo sapiens
MAAVVALSLRRRLPATTLGGACLQASRGAQTAAATAPRIKKFAIYRWDPDKAGDKPHMQTYEVDLNKCGPMVLDALIKIKNEVDSTLTFRRSCREGEHFIPVGLQILVVFQRGLGWPKLIETSGKQLQLSAG

SEQ ID NO: 912650 - protein, 280 aa, Homo sapiens; identical to SEQ ID NO: 912645

SEQ ID NO: 912651 - protein, 369 aa, Homo sapiens
SRAFPPPTRETGSRLPLGCSYAASGSSVDVGWAPRCSTGHRRRATSGLRGGADVRSQDGGGGRTLLEAPVAGHNPWRSLPAVGTGFHHVGWAGLESLTQVISQPQPPKVLGLQASRGAQTAAATAPRIKKFAIYRWDPDKAGDKPHMQTYEVDLNKCGPMVLDALIKIKNEVDSTLTFRRSCREGICGSCAMNINGGNTLACTRRIDTNLNKVSKIYPLPHMYVIKDLVPDLSNFYAQYKSIEPYLKKKDESQEGKQQYLQSIEEREKLDGLYECILCACCSTSCPSYWWNGDKYLGPAVLMQAYRWMIDSRDDFTEERLAKLQDPFSLYRCHTIMNCTRTCPKGLNPGKAIAEIKKMMATYKEKKASV

SEQ ID NO: 912652 - protein, 127 aa, Homo sapiens
MAAVVALSLRRRLPATTLGGACLQASRGAQTAAATAPRIKKFAIYRWDPDKAGDKPHMQTYEVDLNKCGPMVLDALIKIKNEVDSTLTFRRSCREGICGSCAMNINGGNTLACTRRIDTNLNKVSKI

SEQ ID NO: 912653 - protein, 447 aa, Homo sapiens
MAGAGGGNDIQWCFSQVKGAVDDDVAEADIISTVEFNHSGELLATGDKGGRVVIFQQEQENKIQSHSRGEYNVYSTFQSHEPEFDYLKSLEIEEKINKIRWLPQKNAAQFLLSTNDKTIKLWKISERDKRPEGYNLKEEDGRYRDPTTVTTLRVPVFRPMDLMVEASPRRIFANAHTYHINSISINSDYETYLSADDLRINLWHLEITDRSFNIVDIKPANMEELTEVITAAEFHPNSCNTFVYSSSKGTIRLCDMRASALCDRHSKLFEEPEDPSNRSFFSEIISSISDVKFSHSGRYMMTRDYLSVKIWDLNMENRPVETYQVHEYLRSKLCSLYENDCIFDKFECCWNGSDSVVMTGSYNNFFRMFDRNTKRDITLEASRENNKPRTVLKPRKVCASGKRKKDEISVDSLDFNKKILHTAWHPKENIIAVATTNNLYIFQDKVN

SEQ ID NO: 912654 - protein, 285 aa, Homo sapiens
MVEASPRRIFANAHTYHINSISINSDYETYLSADDLRINLWHLEITDRSFNIVDIKPANMEELTEVITAAEFHPNSCNTFVYSSSKGTIRLCDMRASALCDRHSKLFEEPEDPSNRSFFSEIISSISDVKFSHSGRYMMTRDYLSVKIWDLNMENRPVETYQVHEYLRSKLCSLYENDCIFDKFECCWNGSDSVVMTGSYNNFFRMFDRNTKRDITLEASRENNKPRTVLKPRKVCASGKRKKDEISVDSLDFNKKILHTAWHPKENIIAVATTNNLYIFQDKVN

SEQ ID NO: 912655 - protein, 285 aa, Homo sapiens; identical to SEQ ID NO: 912654

SEQ ID NO: 912656 - protein, 204 aa, Homo sapiens
IRGPHCHARLCDMRASALCDRHSKLFEEPEDPSNRSFFSEIISSISDVKFSHSGRYMMTRDYLSVKIWDLNMENRPVETYQVHEYLRSKLCSLYENDCIFDKFECCWNGSDSVVMTGSYNNFFRMFDRNTKRDITLEASRENNKPRTVLKPRKVCASGKRKKDEISVDSLDFNKKILHTAWHPKENIIAVATTNNLYIFQDKVN

SEQ ID NO: 912657 - protein, 447 aa, Homo sapiens; identical to SEQ ID NO: 912653

SEQ ID NO: 912658 - protein, 285 aa, Homo sapiens
MAGAGGGNDIQWCFSQVKGAVDDDVAEADIISTVEFNHSGELLATGDKGGRVVIFQQEQENKIQSHSRGEYNVYSTFQSHEPEFDYLKSLEIEEKINKIRWLPQKNAAQFLLSTNDKTIKLWKISERDKRPEGYNLKEEDGRYRDPTTVTTLRVPVFRPMDLMVEASPRRIFANAHTYHINSISINSDYETYLSADDLRINLWHLEITDRSFNIVDIKPANMEELTEVITAAEFHPNSCNTFVYSSSKGTIRLCDMRASALCDRHSKCKFIVSFLKMITYSVCLK

SEQ ID NO: 912659 - protein, 461 aa, Homo sapiens
TQAVMFPKFSLRSMFHGAGGGNDIQWCFSQVKGAVDDDVAEADIISTVEFNHSGELLATGDKGGRVVIFQQEQENKIQSHSRGEYNVYSTFQSHEPEFDYLKSLEIEEKINKIRWLPQKNAAQFLLSTNDKTIKLWKISERDKRPEGYNLKEEDGRYRDPTTVTTLRVPVFRPMDLMVEASPRRIFANAHTYHINSISINSDYETYLSADDLRINLWHLEITDRSFNIVDIKPANMEELTEVITAAEFHPNSCNTFVYSSSKGTIRLCDMRASALCDRHSKLFEEPEDPSNRSFFSEIISSISDVKFSHSGRYMMTRDYLSVKIWDLNMENRPVETYQVHEYLRSKLCSLYENDCIFDKFECCWNGSDSVVMTGSYNNFFRMFDRNTKRDITLEASRENNKPRTVLKPRKVCASGKRKKDEISVDSLDFNKKILHTAWHPKENIIAVATTNNLYIFQDKVN

SEQ ID NO: 912660 - protein, 447 aa, Homo sapiens; identical to SEQ ID NO: 912653

SEQ ID NO: 912661 - protein, 447 aa, Homo sapiens; identical to SEQ ID NO: 912653

SEQ ID NO: 912662 - protein, 141 aa, Homo sapiens
MAGAGGGNDIQWCFSQVKGAVDDDVAEADIISTVEFNHSGELLATGDKGGRVVIFQQEQENKIQSHSRGEYNVYSTFQSHEPEFDYLKSLEIEEKINKIRWLPQKNAAQFLLSTNDKTIKLWKISERDKRPEGCQSLGLWI

SEQ ID NO: 912663 - protein, 727 aa, Homo sapiens
MRPLLLLALLGWLLLAEAKGDAKPEDNLLVLTVATKETEGFRRFKRSAQFFNYKIQALGLGEDWNVEKGTSAGGGQKVRLLKKALEKHADKEDLVILFADSYDVLFASGPRELLKKFRQARSQVVFSAEELIYPDRRLETKYPVVSDGKRFLGSGGFIGYAPNLSKLVAEWEGQDSDSDQLFYTKIFLDPEKREQINITLDHRCRIFQNLDGALDEVVLKFEMGHVRARNLAYDTLPVLIHGNGPTKLQLNYLGNYIPRFWTFETGCTVCDEGLRSLKGIGDEALPTVLVGVFIEQPTPFVSLFFQRLLRLHYPQKHMRLFIHNHEQHHKAQVEEFLAQHGSEYQSVKLVGPEVRMANADARNMGADLCRQDRSCTYYFSVDADVALTEPNSLRLLIQQNKNVIAPLMTRHGRLWSNFWGALSADGYYARSEDYVDIVQGRRVGVWNVPYISNIYLIKGSALRGELQSSDLFHHSKLDPDMAFCANIRQQDVFMFLTNRHTLGHLLSLDSYRTTHLHNDLWEVFSNPEDWKEKYIHQNYTKALAGKLVETPCPDVYWFPIFTEVACDELVEEMEHFGQWSLGNNKDNRIQGGYENVPTIDIHMNQIGFEREWHKFLLEYIAPMTEKLYPGYYTRAQFDLAFVVRYKPDEQPSLMPHHDASTFTINIALNRVGVDYEGGGCRFLRYNCSIRAPRKGWTLMHPGRLTHYHEGLPTTRGTRYIAVSFVDP

SEQ ID NO: 912664 - protein, 727 aa, Homo sapiens; identical to SEQ ID NO: 912663

SEQ ID NO: 912665 - protein, 727 aa, Homo sapiens; identical to SEQ ID NO: 912663

SEQ ID NO: 912666 - protein, 586 aa, Homo sapiens
MRPLLLLALLGWLLLAEAKGDAKPEDNLLVLTVATKETEGFRRFKRSAQFFNYKIQALGLGEDWNVEKGTSAGGGQKVRLLKKALEKHADKEDLVILFADSYDVLFASGPRELLKKFRQARSQVVFSAEELIYPDRRLETKYPVVSDGKRFLGSGGFIGYAPNLSKLVAEWEGQDSDSDQLFYTKIFLDPEKREQINITLDHRCRIFQNLDGALDEVVLKFEMGHVRARNLAYDTLPVLIHGNGPTKLQLNYLGNYIPRFWTFETGCTVCDEGLRSLKGIGDEALPTVLVGVFIEQPTPFVSLFFQRLLRLHYPQKHMRLFIHNHEQHHKAQVEEFLAQHGSEYQSVKLVGPEVRMANADARNMGADLCRQDRSCTYYFSVDADVALTEPNSLRLLIQQNKNVIAPLMTRHGRLWSNFWGALSADGYYARSEDYVDIVQGRRVGVWNVPYISNIYLIKGSALRGELQSSDLFHHSKLDPDMAFCANIRQQDVFMFLTNRHTLGHLLSLDSYRTTHLHNDLWEVFSNPEDWKEKYIHQNYTKALAGKLVETVRAMDTLLDQPCLLQGAGHRRETACPGEWGTAGWEL

SEQ ID NO: 912667 - protein, 244 aa, Homo sapiens
MRPLLLLALLGWLLLAEAKGDAKPEDNLLVLTVATKETEGFRRFKRSAQFFNYKIQALGLGEDWNVEKGTSAGGGQKVRLLKKALEKHADKEDLVILFADSYDVLFASGPRELLKKFRQARSQVVFSAEELIYPDRRLETKYPVVSDGKRFLGSGGFIGYAPNLSKLVAEWEGQDSDSDQLFYTKIFLDPEKREQINITLDHRCRIFQNLDGALAQGPASGWLVMEMLQRDHGMLVMNDANSLH

SEQ ID NO: 912668 - protein, 119 aa, Homo sapiens
MFSLLGSPRGRPIVPHTSAMRPLLLLALLGWLLLAEAKGDAKPEDNLLVLTVATKETEGFRRFKRSAQFFNYKIQALGLGEDWNVEKGTSAGGGQKVRLLKKALESGTSASMAGHESKP

SEQ ID NO: 912669 - protein, 727 aa, Homo sapiens; identical to SEQ ID NO: 912663

SEQ ID NO: 912670 - protein, 702 aa, Homo sapiens
MRPLLLLALLGWLLLAEAKGDAKPEDNLLVLTVATKETEGFRRFKRSAQFFNYKIQALGLGEDWNVEKGTSAGGGQKVRLLKKALEKHADKEDLVILFADSYDVLFASGPRELLKKFRQARSQVVFSAEELIYPDRRLETKYPVVSDGKRFLGSGGFIGYAPNLSKLVAEWEGQDSDSDQLFYTKIFLDPEKREQINITLDHRCRIFQNLDGALDEVVLKFEMGHVRARNLAYDTLPVLIHGNGPTKLQLNYLGNYIPRFWTFETGCTVCDEGLRSLKGIGRLLRLHYPQKHMRLFIHNHEQHHKAQVEEFLAQHGSEYQSVKLVGPEVRMANADARNMGADLCRQDRSCTYYFSVDADVALTEPNSLRLLIQQNKNVIAPLMTRHGRLWSNFWGALSADGYYARSEDYVDIVQGRRVGVWNVPYISNIYLIKGSALRGELQSSDLFHHSKLDPDMAFCANIRQQDVFMFLTNRHTLGHLLSLDSYRTTHLHNDLWEVFSNPEDWKEKYIHQNYTKALAGKLVETPCPDVYWFPIFTEVACDELVEEMEHFGQWSLGNNKDNRIQGGYENVPTIDIHMNQIGFEREWHKFLLEYIAPMTEKLYPGYYTRAQFDLAFVVRYKPDEQPSLMPHHDASTFTINIALNRVGVDYEGGGCRFLRYNCSIRAPRKGWTLMHPGRLTHYHEGLPTTRGTRYIAVSFVDP

SEQ ID NO: 912671 - protein, 727 aa, Homo sapiens; identical to SEQ ID NO: 912663

SEQ ID NO: 912672 - protein, 521 aa, Homo sapiens
MRPLLLLALLGWLLLAEAKGDAKPEDNLLVLTVATKETEGFRRFKRSAQFFNYKIQALGLGEDWNVEKGTSAGGGQKVRLLKKALEKHADKEDLVILFADSYDVLFASGPRELLKKFRQARSQVVFSAEELIYPDRRLETKYPVVSDGKRFLGSGGFIGYAPNLSKLVAEWEGQDSDSDQLFYTKIFLDPEKREQINITLDHRCRIFQNLDGALDEVVLKFEMGHVRARNLAYDTLPVLIHGNGPTKLQLNYLGNYIPRFWTFETGCTVCDEGLRSLKGIGDEALPTVLVGVFIEQPTPFVSLFFQRLLRLHYPQKHMRLFIHNHEQHHKAQVEEFLAQHGSEYQSVKLVGPEVRMANADARNMGADLCRQDRSCTYYFSVDADVALTEPNSLRLLIQQNKNVIAPLMTRHGRLWSNFWGALSADGYYARSEDYVDIVQGRRVGVWNVPYISNIYLITFSVDADVALTEPNSLRLLIQQNKNVIAPLMTRHGRLWSNFWGALSADGYYARSEDYVDIVQGR

SEQ ID NO: 912673 - protein, 199 aa, Homo sapiens
MRPLLLLALLGWLLLAEAKGDAKPEDNLLVLTVATKETEGFRRFKRSAQFFNYKIQALGLGEDWNVEKGTSAGGGQKVRLLKKALEKHADKEDLVILFADSYDVLFASGPRELLKKFRQARSQVVFSAEELIYPDRRLETKYPVVSDGKRFLGSGGFIGYAPNLSKLVAEWEGQDSDSDQLFYTKIFLDPEKRVSRLHS

SEQ ID NO: 912674 - protein, 585 aa, Homo sapiens
MGTWLCCLQPLCCSTPTLHCSKESSTSKVLVLWGQGCLGVQSCGCAPSAFFLPVPRCATDHNVDNTTEMLQEWLAAVGDDYAAVVWRPEGEPRFYPDEEGPKHWTKERHQFLMELKQEALTFARNWGADYILFADTDNILTNNQTLRLLMGQGLPVVAPMLDSQTYYSNFWCGITPQGYYRRTAEYFPTKNRQRRGCFRVPMVHSTFLASLRAEGADQLAFYPPHPNYTWPFDDIIVFAYACQAAGVSVHVCNEHRYGYMNVPVKSHQGLEDERVNFIHLILEALVDGPRMQASAHVTRPSKRPSKIGFDEVFVISLARRPDRRERMLASLWEMEISGRVVDAVDGWMLNSSAIRNLGVDLLPGYQDPYSGRTLTKGEVGCFLSHYSIWEEVVARGLARVLVFEDDVRFESNFRGRLERLMEDVEAEKLSWDLIYLGRKQVNPEKETAVEGLPGLVVAGYSYWTLAYALRLAGARKLLASQPLRRMLPVDEFLPIMFDQHPNEQYKAHFWPRDLVAFSAQPLLAAPTHYAGDAEWLSDTETSSPWDDDSGRLISWSGSQKTLRSPRLDLTGSSGHSLQPQPRDEL

SEQ ID NO: 912675 - protein, 585 aa, Homo sapiens; identical to SEQ ID NO: 912674

SEQ ID NO: 912676 - protein, 561 aa, Homo sapiens
PGSQSNLRLGTRLGGGQSCGCAPSAFFLPVPRCATDHNVDNTTEMLQEWLAAVGDDYAAVVWRPEGEPRFYPDEEGPKHWTKERHQFLMELKQEALTFARNWGADYILFADTDNILTNNQTLRLLMGQGLPVVAPMLDSQTYYSNFWCGITPQGYYRRTAEYFPTKNRQRRGCFRVPMVHSTFLASLRAEGADQLAFYPPHPNYTWPFDDIIVFAYACQAAGVSVHVCNEHRYGYMNVPVKSHQGLEDERVNFIHLILEALVDGPRMQASAHVTRPSKRPSKIGFDEVFVISLARRPDRRERMLASLWEMEISGRVVDAVDGWMLNSSAIRNLGVDLLPGYQDPYSGRTLTKGEVGCFLSHYSIWEEVVARGLARVLVFEDDVRFESNFRGRLERLMEDVEAEKLSWDLIYLGRKQVNPEKETAVEGLPGLVVAGYSYWTLAYALRLAGARKLLASQPLRRMLPVDEFLPIMFDQHPNEQYKAHFWPRDLVAFSAQPLLAAPTHYAGDAEWLSDTETSSPWDDDSGRLISWSGSQKTLRSPRLDLTGSSGHSLQPQPRDEL

SEQ ID NO: 912677 - protein, 558 aa, Homo sapiens
MGTWLCCLQPLCCSTPTLHCSKESSTSKVCATDHNVDNTTEMLQEWLAAVGDDYAAVVWRPEGEPRFYPDEEGPKHWTKERHQFLMELKQEALTFARNWGADYILFADTDNILTNNQTLRLLMGQGLPVVAPMLDSQTYYSNFWCGITPQGYYRRTAEYFPTKNRQRRGCFRVPMVHSTFLASLRAEGADQLAFYPPHPNYTWPFDDIIVFAYACQAAGVSVHVCNEHRYGYMNVPVKSHQGLEDERVNFIHLILEALVDGPRMQASAHVTRPSKRPSKIGFDEVFVISLARRPDRRERMLASLWEMEISGRVVDAVDGWMLNSSAIRNLGVDLLPGYQDPYSGRTLTKGEVGCFLSHYSIWEEVVARGLARVLVFEDDVRFESNFRGRLERLMEDVEAEKLSWDLIYLGRKQVNPEKETAVEGLPGLVVAGYSYWTLAYALRLAGARKLLASQPLRRMLPVDEFLPIMFDQHPNEQYKAHFWPRDLVAFSAQPLLAAPTHYAGDAEWLSDTETSSPWDDDSGRLISWSGSQKTLRSPRLDLTGSSGHSLQPQPRDEL

SEQ ID NO: 912678 - protein, 592 aa, Homo sapiens
TCLRLVTDTQFDPICGAARPLPFLLLSREAAEFFPSQQGPKDPGGAPGEPTSPALEDGRVGSQCATDHNVDNTTEMLQEWLAAVGDDYAAVVWRPEGEPRFYPDEEGPKHWTKERHQFLMELKQEALTFARNWGADYILFADTDNILTNNQTLRLLMGQGLPVVAPMLDSQTYYSNFWCGITPQGYYRRTAEYFPTKNRQRRGCFRVPMVHSTFLASLRAEGADQLAFYPPHPNYTWPFDDIIVFAYACQAAGVSVHVCNEHRYGYMNVPVKSHQGLEDERVNFIHLILEALVDGPRMQASAHVTRPSKRPSKIGFDEVFVISLARRPDRRERMLASLWEMEISGRVVDAVDGWMLNSSAIRNLGVDLLPGYQDPYSGRTLTKGEVGCFLSHYSIWEEVVARGLARVLVFEDDVRFESNFRGRLERLMEDVEAEKLSWDLIYLGRKQVNPEKETAVEGLPGLVVAGYSYWTLAYALRLAGARKLLASQPLRRMLPVDEFLPIMFDQHPNEQYKAHFWPRDLVAFSAQPLLAAPTHYAGDAEWLSDTETSSPWDDDSGRLISWSGSQKTLRSPRLDLTGSSGHSLQPQPRDEL

SEQ ID NO: 912679 - protein, 585 aa, Homo sapiens; identical to SEQ ID NO: 912674

SEQ ID NO: 912680 - protein, 627 aa, Homo sapiens
MGTWLCCLQPLCCSTPTLHCSKESSTSKVLVLWGQGCLGVQSCGCAPSAFFLPVPRCATDHNVDNTTEMLQEWLAAVGDDYAAVVWRPEGEPRFYPDEEGPKHWTKERHQFLMELKQEALTFARNWGADYILFADTDNILTNNQTLRLLMGQGLPVVAPMLDSQTYYSNFWCGITPQGYYRRTAEYFPTKNRQRRGCFRVPMVHSTFLASLRAEGADQLAFYPPHPNYTWPFDDIIVFAYACQAAATQEAEAGELLNLGDRGCNEPRSHHCTPASVTEQDSISKKKKGVSVHVCNEHRYGYMNVPVKSHQGLEDERVNFIHLILEALVDGPRMQASAHVTRPSKRPSKIGFDEVFVISLARRPDRRERMLASLWEMEISGRVVDAVDGWMLNSSAIRNLGVDLLPGYQDPYSGRTLTKGEVGCFLSHYSIWEEVVARGLARVLVFEDDVRFESNFRGRLERLMEDVEAEKLSWDLIYLGRKQVNPEKETAVEGLPGLVVAGYSYWTLAYALRLAGARKLLASQPLRRMLPVDEFLPIMFDQHPNEQYKAHFWPRDLVAFSAQPLLAAPTHYAGDAEWLSDTETSSPWDDDSGRLISWSGSQKTLRSPRLDLTGSSGHSLQPQPRDEL

SEQ ID NO: 912681 - protein, 586 aa, Homo sapiens
MGTWLCCLQPLCCSTPTLHCSKESSTSKVLVLWGQGCLGVQSCGCAPSAFFLPVPRCATDHNVDNTTEMLQEWLAAVGDDYAAVVWRPEGEPRFYPDEEGPKHWTKERHQFLMELKQEALTFARNWGADYILFADTDNILTNNQTLRLLMGQGLPVVAPMLDSQTYYSNFWCGITPQGYYRRTAEYFPTKNRQRRGCFRVPMVHSTFLASLRAEGADQLAFYPPHPNYTWPFDDIIVFAYACQAAGVSVHVCNEHRYGYMNVPVKSHQGLEDERVNFIHLILEALVDGPRMQASAHVTRPSKRPSKIGFDEVFVISLARRPDRRERMLASLWEMEISGRVVDAVDGWMLNSSAIRNLGVDLLPGYQDPYSGRTLTKGEVGCFLSHYSIWEEVVARGLARVLVFEDDVRFESNFRGRLERLMEDVEAEKLSWDLIYLGRKQVNPEKETAVEGLPGLVVAGYSYWTLAYALRLAGARKLLASQPLRRMLPVDEFLPIMFDQHPNEQYKAHFWPRDLVAFSAQPLLAAPTHYAGDAEWLSDTETSSPWDDDSGRLISWSVQKTWGPLTDGGGKLTTSRRTSQEDGSGGS

SEQ ID NO: 912682 - protein, 552 aa, Homo sapiens
MRAARAAPLLQLLLLLGPWLEAAGVAESPLPAVVLAILARNAEHSLPHYLGALERLDYPRARMALWCATDHNVDNTTEMLQEWLAAVGDDYAAVVWRPEGEPRFYPDEEGPKHWTKERHQFLMELKQEALTFARNWGADYILFADTDNILTNNQTLRLLMGQGLPVVAPMLDSQTYYSNFWCGITPQGYYRRTAEYFPTKNRQRRGCFRVPMVHSTFLASLRAEGADQLAFYPPHPNYTWPFDDIIVFAYACQAAGVSVHVCNEHRYGYMNVPVKSHQGLEDERVNFIHLILEALVDGPRMQASAHVTRPSKRPSKIGFDEVFVISLARRPDRRERMLASLWEMEISGRVVDAVDGWMLNSSAIRNLGVDLLPGYQDPYSGRTLTKGEVGCFLSHYSIWEEVVARGLARVLVFEDDVRFESNFRGRLERLMEDVEAEKLSWDLIPTGRWPMPCVWRVPASCWPHSLCAACCPWTSSCPSCSTSTPTSSTRHTSGHGTWWPSPPSPCSLPLPTMPGTPSGSVTRRHPLHGMMTAAASSAGAAPKRPCAAPAWT

SEQ ID NO: 912683 - protein, 196 aa, Homo sapiens
MSPYCSRTPGRPRRTRPSTPPLSGPPAPPPSPLRGPAGRGCSRVAAGAGPRALALRCPGPRRENLSIHAQGWGAGSHSEGALPRPLRVCLGPARAPGPAPSPRPARELRGPLQPPKRPPCALPAPRRCSSCCSCWGRGWRLRALRSRRCPPWSLPSWPAMPNTRCPTTWALWSGWTTPGPGWPSGERPGHWHRVGT

SEQ ID NO: 912684 - protein, 437 aa, Homo sapiens
MRAARAAPLLQLLLLLGPWLEAAGVAESPLPAVVLAILARNAEHSLPHYLGALERLDYPRARMALWCATDHNVDNTTEMLQEWLAAVGDDYAAVVWRPEGEPRFYPDEEGPKHWTKERHQFLMELKQEALTFARNWGADYILFADTDNILTNNQTLRLLMGQGLPVVAPMLDSQTYYSNFWCGITPQGYYRRTAEYFPTKNRQRRGCFRVPMVHSTFLASLRAEGADQLAFYPPHPNYTWPFDDIIVFAYACQAAGVSVHVCNEHRYGYMNVPVKSHQGLEDERVNFIHLILEALVDGPRMQASAHVTRPSKRPSKIGFDEVFVISLARRPDRRERMLASLWEMEISGRVVDAVDGWMLNSSAIRNLGVDLLPGYQDPYSGRTLTKGEVGCFLSHYSIWEEVVARGLARVLVFEDDVRFESNFRGRLERLMEDRHAP

SEQ ID NO: 912685 - protein, 276 aa, Homo sapiens
MRAARAAPLLQLLLLLGPWLEAAGVAESPLPAVVLAILARNAEHSLPHYLGALERLDYPRARMALWCATDHNVDNTTEMLQEWLAAVGDDYAAVVWRPEGEPRFYPDEEGPKHWTKERHQFLMELKQEALTFARNWGADYILFADTDNILTNNQTLRLLMGQGLPVVAPMLDSQTYYSNFWCGITPQGYYRRTAEYFPTKNRQRRGCFRVPMVHSTFLASLRAEGADQLAFYPPHPNYTWPSQKNDHSRLRPIALQGLNGEYPVPPVIQPTDPIIG

SEQ ID NO: 912686 - protein, 321 aa, Homo sapiens
PGSQSNLRLGTRLGGGSAEGHFIHLILEALVDGPRMQASAHVTRPSKRPSKIGFDEVFVISLARRPDRRERMLASLWEMEISGRVVDAVDGWMLNSSAIRNLGVDLLPGYQDPYSGRTLTKGEVGCFLSHYSIWEEVVARGLARVLVFEDDVRFESNFRGRLERLMEDVEAEKLSWDLIYLGRKQVNPEKETAVEGLPGLVVAGYSYWTLAYALRLAGARKLLASQPLRRMLPVDEFLPIMFDQHPNEQYKAHFWPRDLVAFSAQPLLAAPTHYAGDAEWLSDTETSSPWDDDSGPQEERFKNLEPAGLWEGKHQRKSGMK

SEQ ID NO: 912687 - protein, 595 aa, Homo sapiens
MRAARAAPLLQLLLLLGPWLEAAGVAESPLPAVVLAILARNAEHSLPHYLGALERLDYPRARMALWCATDHNVDNTTEMLQEWLAAVGDDYAAVVWRPEGEPRFYPDEEGPKHWTKERHQFLMELKQEALTFARNWGADYILFADTDNILTNNQTLRLLMGQGLPVVAPMLDSQTYYSNFWCGITPQGYYRRTAEYFPTKNRQRRGCFRVPMVHSTFLASLRAEGADQLAFYPPHPNYTWPFDDIIVFAYACQAAGVSVHVCNEHRYGYMNVPVKSHQGLEDERVNFIHLILEALVDGPRMQASAHVTRPSKRPSKIGFDEVFVISLARRPDRRERMLASLWEMEISGRVVDAVDGWMLNSSAIRNLGVDLLPGYQDPYSGRTLTKGEVGCFLSHYSIWEEVVARGLARVLVFEDDVRFESNFRGRLERLMEDVEAEKLSWDLIYLGRKQVNPEKETAVEGLPGLVVAGYSYWTLAYALRLAGARKLLASQPLRRMLPVDEFLPIMFDQHPNEQYKAHFWPRDLVAFSAQPLLAAPTHYAGDAEWLSDTETSSPWDDDSGRLISWSGSQKTLRSPRLDLTGSSGHSLQPQPRDEL

SEQ ID NO: 912688 - protein, 555 aa, Homo sapiens
MLWGQGCLGVQSCGCAPSAFFLPVPRCATDHNVDNTTEMLQEWLAAVGDDYAAVVWRPEGEPRFYPDEEGPKHWTKERHQFLMELKQEALTFARNWGADYILFADTDNILTNNQTLRLLMGQGLPVVAPMLDSQTYYSNFWCGITPQGYYRRTAEYFPTKNRQRRGCFRVPMVHSTFLASLRAEGADQLAFYPPHPNYTWPFDDIIVFAYACQAAGVSVHVCNEHRYGYMNVPVKSHQGLEDERVNFIHLILEALVDGPRMQASAHVTRPSKRPSKIGFDEVFVISLARRPDRRERMLASLWEMEISGRVVDAVDGWMLNSSAIRNLGVDLLPGYQDPYSGRTLTKGEVGCFLSHYSIWEEVVARGLARVLVFEDDVRFESNFRGRLERLMEDVEAEKLSWDLIYLGRKQVNPEKETAVEGLPGLVVAGYSYWTLAYALRLAGARKLLASQPLRRMLPVDEFLPIMFDQHPNEQYKAHFWPRDLVAFSAQPLLAAPTHYAGDAEWLSDTETSSPWDDDSGRLISWSGSQKTLRSPRLDLTGSSGHSLQPQPRDEL

SEQ ID NO: 912689 - protein, 517 aa, Homo sapiens
MLQEWLAAVGDDYAAVVWRPEGEPRFYPDEEGPKHWTKERHQFLMELKQEALTFARNWGADYILFADTDNILTNNQTLRLLMGQGLPVVAPMLDSQTYYSNFWCGITPQGYYRRTAEYFPTKNRQRRGCFRVPMVHSTFLASLRAEGADQLAFYPPHPNYTWPFDDIIVFAYACQAAGVSVHVCNEHRYGYMNVPVKSHQGLEDERVNFIHLILEALVDGPRMQASAHVTRPSKRPSKIGFDEVFVISLARRPDRRERMLASLWEMEISGRVVDAVDGWMLNSSAIRNLGVDLLPGYQDPYSGRTLTKGEVGCFLSHYSIWEEVVARGLARVLVFEDDVRFESNFRGRLERLMEDVEAEKLSWDLIYLGRKQVNPEKETAVEGLPGLVVAGYSYWTLAYALRLAGARKLLASQPLRRMLPVDEFLPIMFDQHPNEQYKAHFWPRDLVAFSAQPLLAAPTHYAGDAEWLSDTETSSPWDDDSGRLISWSGSQKTLRSPRLDLTGSSGHSLQPQPRDEL

SEQ ID NO: 912690 - protein, 534 aa, Homo sapiens [sequence omitted]

SEQ ID NO: 912691 - protein, 439 aa, Homo sapiens
MVDLEYHGGEKLVHHLVQTYYSNFWCGITPQGYYRRTAEYFPTKNRQRRGCFRVPMVHSTFLASLRAEGADQLAFYPPHPNYTWPFDDIIVFAYACQAAGVSVHVCNEHRYGYMNVPVKSHQGLEDERVNFIHLILEALVDGPRMQASAHVTRPSKRPSKIGFDEVFVISLARRPDRRERMLASLWEMEISGRVVDAVDGWMLNSSAIRNLGVDLLPGYQDPYSGRTLTKGEVGCFLSHYSIWEEVVARGLARVLVFEDDVRFESNFRGRLERLMEDVEAEKLSWDLIYLGRKQVNPEKETAVEGLPGLVVAGYSYWTLAYALRLAGARKLLASQPLRRMLPVDEFLPIMFDQHPNEQYKAHFWPRDLVAFSAQPLLAAPTHYAGDAEWLSDTETSSPWDDDSGRLISWSGSQKTLRSPRLDLTGSSGHSLQPQPRDEL

SEQ ID NO: 912692 - protein, 586 aa, Homo sapiens
MRAARAAPLLQLLLLLGPWLEAAGVAESPLPAVVLAILARNAEHSLPHYLGALERLDYPRARMALWCATDHNVDNTTEMLQEWLAAVGDDYAAVVWRPEGEPRFYPDEEGPKHWTKERHQFLMELKQEALTFARNWGADYILFADTDNILTNNQTLRLLMGQGLPVVAPMLDSQTYYSNFWCGITPQGYYRRTAEYFPTKNRQRRGCFRVPMVHSTFLASLRAEGADQLAFYPPHPNYTWPFDDIIVFAYACQAAGVSVHVCNEHRYGYMNVPVKSHQGLEDERVNFIHLILEALVDGPRMQASAHVTRPSKRPSKIGFDEVFVISLARRPDRRERMLASLWEMEISGRVVDAVDGWMLNSSAIRNLGVDLLPGYQDPYSGRTLTKGEVGCFLSHYSIWEEVVARGLARVLVFEDDVRFESNFRGRLERLMEDVEAEKLSWDLIYLGRKQVNPEKETAVEGLPGLVVAGYSYWTLAYALRLAGARKLLASQPLRRMLPVDEFLPIMFDQHPNEQYKAHFWPRDLVAFSAQPLLAAPTHYAGDAEWLSDTETSSPWDDDSGPQEERFKNLEPAGLWEGKHQRKSGMK

SEQ ID NO: 912693 - protein, 436 aa, Homo sapiens
MRAARAAPLLQLLLLLGPWLEAAGVAESPLPAVVLAILARNAEHSLPHYLGALERLDYPRARMALWCATDHNVDNTTEMLQEWLAAVGDDYAAVVWRPEGEPRFYPDEEGPKHWTKERHQFLMELKQEALTFARNWGADYILFADTDNILTNNQTLRLLMGQGLPVVAPMLDSQTYYSNFWCGITPQGYYRRTAEYFPTKNRQRRGCFRVPMVHSTFLASLRAEGADQLAFYPPHPNYTWPFDDIIVFAYACQAAGVSVHVCNEHRYGYMNVPVKSHQGLEDERVNFIHLILEALVDGPRMQASAHVTRPSKRPSKIGFDEVFVISLARRPDRRERMLASLWEMEISGRVVDAVDGWMLNSSAIRNLGVDLLPGYQDPYSGRTLTKGEVGCFLSHYSIWEERAVQGTLLATGPGGLLRPAPARCPYPLCRGRRVAQ

SEQ ID NO: 912694 - protein, 508 aa, Homo sapiens
MRAARAAPLLQLLLLLGPWLEAAGVAESPLPAVVLAILARNAEHSLPHYLGALERLDYPRARMALWCATDHNVDNTTEMLQEWLAAVGDDYAAVVWRPEGEPRFYPDEEGPKHWTKERHQFLMELKQEALTFARNWGADYILFADTDNILTNNQTLRLLMGQGLPVVAPMLDSQTYYSNFWCGITPQGYYRRTAEYFPTKNRQRRGCFRVPMVHSTFLASLRAEGADQLAFYPPHPNYTWPFDDIIVFAYACQAAGVSVHVCNEHRYGYMNVPVKSHQGLEDERVNFIHLILEALVDGPRMQASAHVTRPSKRPSKIGFDEVFVISLARRPDRRERMLASLWEMEISGRVVDAVDGWMLNSSAIRNLGVDLLPGYQDPYSGRTLTKGEVGCFLSHYSIWEEVAHGALGPWSCAAVERLTMPLIESNTFRGATESRLALDGCEHGSRKSACRGERCFLDIRDLEKRRVIYAASKEHRTECCRGSTGGPCECEWTSVEYIAYHGNGVSRN

SEQ ID NO: 912695 - protein, 68 aa, Homo sapiens
RKQVNPEKETAVEGLPGLVVAGYSYWTLAYALRLAGARKLLASQPLRRMLPVDEFLPIMFDQHPKLRL

SEQ ID NO: 912696 - protein, 764 aa, Homo sapiens
AGAGFAERRAAAAEPDVCAKMAGRSMQAARCPTDELSLTNCAVVNEKDFQSGQHVIVRTSPNHRYTFTLKTHPSVVPGSIAFSLPQRKWAGLSIGQEIEVSLYTFDKAKQCIGTMTIEIDFLQKKSIDSNPYDTDKMAAEFIQQFNNQAFSVGQQLVFSFNEKLFGLLVKDIESMDPSILKGEPATGKRQKIEVGLVVGNSQVAFEKAENSSLNLIGKAKTKENRQSIINPDWNFEKMGIGGLDKEFSDIFRRAFASRVFPPEIVEQMGCIHVKGILLYGPPGCGKTLLARQIGKMLNAREPKVVNGPEILNKYVGESEANIRKLFADAEEEQRRLGANSGLHIIIFDEIDAICKQRGSMAGSTGVHDTVVNQLLSKIDGVEQLNNILVIGMTNRPDLIDEALLRPGRLEVKMEIGLPDEKGRLQILHIHTARMRGHQLLSADVDIKELAVETKNFSGAELEGLVRAAQSTAMNRHIKASTKVEVDMEKAESLQVTRGDFLASLENDIKPAFGTNQEDYASYIMNGIIKWGDPVTRVLDDGELLVQQTKNSDRTPLVSVLLEGPPHSGKTALAAKIAEESNFPFIKICSPDKMIGFSETAKCQAMKKIFDDAYKSQLSCVVVDDIERLLDYVPIGPRFSNLVLQALLVLLKKAPPQGRKLLIIGTTSRKDVLQEMEMLNAFSTTIHVPNIATGEQLLEALELLGNFKDKERTTIAQQVKGKKVWIGIKKLLMLIEMSLQMDPEYRVRKFLALLREEGASPLDFD

SEQ ID NO: 912697 - protein, 764 aa, Homo sapiens; identical to SEQ ID NO: 912696

SEQ ID NO: 912698 - protein, 764 aa, Homo sapiens; identical to SEQ ID NO: 912696

SEQ ID NO: 912699 - protein, 96 aa, Homo sapiens
AGAGFAERRAAAAEPDVCAKMAGRSMQAARCPTDELSLTNCAVVNEKDFQSGQHVIVRTSPNHRYTFTLKTHPSVVPGSIAFSLPQMTTVLVVTSP

SEQ ID NO: 912700 - protein, 764 aa, Homo sapiens; identical to SEQ ID NO: 912696

SEQ ID NO: 912701 - protein, 764 aa, Homo sapiens; identical to SEQ ID NO: 912696

SEQ ID NO: 912702 - protein, 764 aa, Homo sapiens; identical to SEQ ID NO: 912696

SEQ ID NO: 912703 - protein, 764 aa, Homo sapiens; identical to SEQ ID NO: 912696

SEQ ID NO: 912704 - protein, 139 aa, Homo sapiens
MQAARCPTDELSLTNCAVVNEKDFQSGQHVIVRTSPNHRYTFTLKTHPSVVPGSIAFSLPQRKWAGLSIGQEIEVSLYTFDKAKQCIGTMTIEIDFLQKKSIDSNPYDTDKMAAEFIQQFNNQAFSVGQQVVFNFLSFL

SEQ ID NO: 912705 - protein, 45 aa, Homo sapiens
HSGSLGMGPMATELEPLCTPVVTCTPSCTAYTSSFVFGSFGDPLE

SEQ ID NO: 912706 - protein, 135 aa, Homo sapiens
KQWLRRLVLEPHLQRATEKPRLSRRPRRSERAVTVLLPSSASQRPPVSAPRPLARLCLTATMMFSGFNADYEASSSRCSSASPAGDSLSYYHSPADSFSSMGSPVNAQVRLASRRRGAGGLGSRRRRHRAGRSSR

SEQ ID NO: 912707 - protein, 145 aa, Homo sapiens
MMFSGFNADYEASSSRCSSASPAGDSLSYYHSPADSFSSMGSPVNAQDFCTDLAVSSANFIPTVTVLPAALLTRLPSSSPTPRLTPSPAVQLPTARAAAAMSLPLTRSAHPRCWPCEGAGKGRQPAPTSATARAGALQRGETHLP

SEQ ID NO: 912708 - protein, 207 aa, Homo sapiens
MMFSGFNADYEASSSRCSSASPAGDSLSYYHSPADSFSSMGSPVNAQDFCTDLAVSSANFIPTVTAISTSPDLQWLVQPALVSSVAPSQTRAPHPFGVPAPSAGAYSRAGVVKTMTGGRAQSIGRRGKVEQLSPEEEEKRRIRRERNKMAAAKCRNRRRELTDTLQAETDQLEDEKSALQTGDCQPAEGEGKTRVHPGSSPTCLQDP

SEQ ID NO: 912709 - protein, 170 aa, Homo sapiens
MMFSGFNADYEASSSRCSSASPAGDSLSYYHSPADSFSSMGSPVNAQDFCTDLAVSSANFIPTVTAISTSPDLQWLVQPALVSSVAPSQTRAPHPFGVPAPSAGAYSRAGVVKTMTGGRAQSIGRRGKVEQVRNSSVLFLGMWGLGGKQPRRCRSPVQRMKPLMGLAAHP

SEQ ID NO: 912710 - protein, 170 aa, Homo sapiens; identical to SEQ ID NO: 912709

SEQ ID NO: 912711 - protein, 170 aa, Homo sapiens; identical to SEQ ID NO: 912709

SEQ ID NO: 912712 - protein, 74 aa, Homo sapiens
HSGSLGMGPMATELEPLCTPVVTCTPSCTAYTSSFVFTYPEADSFPSCAAAHRKGSSSNEPSSDSLSSPTLLAL

SEQ ID NO: 912713 - protein, 207 aa, Homo sapiens; identical to SEQ ID NO: 912708

SEQ ID NO: 912714 - protein, 74 aa, Homo sapiens; identical to SEQ ID NO: 912712

SEQ ID NO: 912715 - protein, 117 aa, Homo sapiens
MRHWELAPPVSGTCSLTSAFPFCFVLGLLHGPGRLQCQLHSHGHCHLDQSGPAVAGAARPRLLCGPIADQSPSPFRSPRPLRWGLLQGWRCEDHDRRPSAEHWQEGQGGTGDRPTRR

SEQ ID NO: 912716 - protein, 76 aa, Homo sapiens
KQWLRRLVLEPHLQRATEKPRLSRRPRRSERAVTVLLPSSASQRPPVYLQKKKRKGESEGKGIRWLQPNAATGGGS

SEQ ID NO: 912717 - protein, 79 aa, Homo sapiens
PETEDHLMEMNLRVLQAPEAEVSLCSHMEHPILRLPVARDTSVWGPPVLSQSRITSRMQPPEEPRVSIPASLTLQRAGS

SEQ ID NO: 912718 - protein, 207 aa, Homo sapiens; identical to SEQ ID NO: 912708

SEQ ID NO: 912719 - protein, 207 aa, Homo sapiens; identical to SEQ ID NO: 912708

SEQ ID NO: 912720 - protein, 74 aa, Homo sapiens; identical to SEQ ID NO: 912712

SEQ ID NO: 912721 - protein, 170 aa, Homo sapiens; identical to SEQ ID NO: 912709

SEQ ID NO: 912722 - protein, 74 aa, Homo sapiens; identical to SEQ ID NO: 912712

SEQ ID NO: 912723 - protein, 66 aa, Homo sapiens
KQWLRRLVLEPHLQRATEKPRLSRRPRRSERAVTVSFPSCAAAHRKGSSSNEPSSDSLSSPTLLAL

SEQ ID NO: 912724 - protein, 265 aa, Homo sapiens
MMFSGFNADYEASSSRCSSASPAGDSLSYYHSPADSFSSMGSPVNAQDFCTDLAVSSANFIPTVTAISTSPDLQWLVQPALVSSVAPSQTRAPHPFGVPAPSAGAYSRAGVVKTMTGGRAQSIGRRGKVEQLSPEEEEKRRIRRERNKMAAAKCRNRRRELTDTLQAETDQLEDEKSALQTGDCQPAEGEGPGLPRRDVCGLPLILTGGLPEVATPESEEAFTLPLLNDPEAQALRGTCQEHQEHGAEDRSPLMTSCSHDTSESW

SEQ ID NO: 912725 - protein, 114 aa, Homo sapiens
MRHWELAPPVSGTCSLTSAFPFCFVLGLLHGPGRLQCQLHSHGHCHLDQSGPAVAGAARPRLLCGPIADQSPSPFRSPRPLRWGLLQGWRCEDHDRRPSAEHWQEGQGGTGEEL

SEQ ID NO: 912726 - protein, 74 aa, Homo sapiens; identical to SEQ ID NO: 912712

SEQ ID NO: 912727 - protein, 170 aa, Homo sapiens; identical to SEQ ID NO: 912709

SEQ ID NO: 912728 - protein, 74 aa, Homo sapiens; identical to SEQ ID NO: 912712

SEQ ID NO: 912729 - protein, 100 aa, Homo sapiens
GWLEDPKRPEDYFSSIGRRGKVEQLSPEEEEKRRIRRERNKMAAAKCRNRRRELTDTLQAETDQLEDEKSALQTGDCQPAEGEGKTRVHPGSSPTCLQDP

SEQ ID NO: 912730 - protein, 93 aa, Homo sapiens
SRGSRLSKLAGGAGLEQLSPEEEEKRRIRRERNKMAAAKCRNRRRELTDTLQAETDQLEDEKSALQTGDCQPAEGEGKTRVHPGSSPTCLQDP

SEQ ID NO: 912731 - protein, 135 aa, Homo sapiens; identical to SEQ ID NO: 912706

SEQ ID NO: 912732 - protein, 74 aa, Homo sapiens; identical to SEQ ID NO: 912712

SEQ ID NO: 912733 - protein, 188 aa, Homo sapiens
MMFSGFNADYEASSSRCSSASPAGDSLSYYHSPADSFSSMGSPVNAQDFCTDLAVSSANFIPTVTAISTSPDLQWLVQPALVSSVAPSQTRAPHPFGVPAPSAGAYSRAGVVKTMTGGRAQSIGRRGKVEQLSPEEEEKRRIRRERNKMAAAKCRNRRRELTDTLQARKAWNRCSFQPPEGANAAPSG

SEQ ID NO: 912734 - protein, 170 aa, Homo sapiens; identical to SEQ ID NO: 912709

SEQ ID NO: 912735 - protein, 669 aa, Homo sapiens
GSVDGHYQSRNRSRACIPHHPPAPGPGRRQTELPPPPPQQQQSGSQAQPGPREAGAPGPWMSRSAAASGGPRRPERHLPPAPCGAPGPPETCRTEPDGAGTMNKLRQSLRRRKPAYVPEASRPHQWQADEDAVRKGTCSFPVRYLGHVEVEESRGMHVCEDAVKKLKAMGRKSVKSVLWVSADGLRVVDDKTKDLLVDQTIEKVSFCAPDRNLDKAFSYICRDGTTRRWICHCFLALKDSGERLSHAVGCAFAACLERKQRREKECGVTAAFDASRTSFAREGSFRLSGGGRPAEREAPDKKKAEAAAAPTVAPGPAQPGHVSPTPATTSPGEKGEAGTPVAAGTTAAAIPRRHAPLEQLVRQGSFRGFPALSQKNSPFKRQLSLRLNELPSTLQRRTDFQVKGTVPEMEPPGAGDSDSINALCTQISSSFASAGAPAPGPPPATTGTSAWGEPSVPPAAAFQPGHKRTPSEAERWLEEVSQVAKAQQQQQQQQQQQQQQQQQQQQAASVAPVPTMPPALQPFPAPVGPFDAAPAQVAVFLPPPHMQPPFVPAYPGLGYPPMPRVPVVGITPSQMVANAFCSAAQLQPQPATLLGKAGAFPPPAIPSAPGSQARPRPNGAPWPPEPAPAPAPELDPFEAQWAALEGKATVEKPSNPFSGDLQKTFEIEL

SEQ ID NO: 912736 - protein, 135 aa, Homo sapiens
PPNFHRGQFMDRNYPSAGFGDPLGAGAGWSYERSAKASLVYGSSRTSHPETDILHRQAYAAPHPLQSYATNHHPAGLSGLFDTGLHHAGSAGPDASVMNLISALESRGPQPGPSASSLLSQFRSPSWQTGMHSAR

SEQ ID NO: 912737 - protein, 666 aa, Homo sapiens
RNPPGSRGGSRACIPHHPPAPGPGRRQTELPPPPPQQQQSGSQAQPGPREAGAPGPWMSRSAAASGGPRRPERHLPPAPCGAPGPPETCRTEPDGAGTMNKLRQSLRRRKPAYVPEASRPHQWQADEDAVRKGTCSFPVRYLGHVEVEESRGMHVCEDAVKKLKAMGRKSVKSVLWVSADGLRVVDDKTKDLLVDQTIEKVSFCAPDRNLDKAFSYICRDGTTRRWICHCFLALKDSGERLSHAVGCAFAACLERKQRREKECGVTAAFDASRTSFAREGSFRLSGGGRPAEREAPDKKKAEAAAAPTVAPGPAQPGHVSPTPATTSPGEKGEAGTPVAAGTTAAAIPRRHAPLEQLVRQGSFRGFPALSQKNSPFKRQLSLRLNELPSTLQRRTDFQVKGTVPEMEPPGAGDSDSINALCTQISSSFASAGAPAPGPPPATTGTSAWGEPSVPPAAAFQPGHKRTPSEAERWLEEVSQVAKAQQQQQQQQQQQQQQQQQQQQAASVAPVPTMPPALQPFPAPVGPFDAAPAQVAVFLPPPHMQPPFVPAYPGLGYPPMPRVPVVGITPSQMVANAFCSAAQLQPQPATLLGKAGAFPPPAIPSAPGSQARPRPNGAPWPPEPAPAPAPELDPFEAQWAALEGKATVEKPSNPFSGDLQKTFEIEL

SEQ ID NO: 912738 - protein, 666 aa, Homo sapiens; identical to SEQ ID NO: 912737

SEQ ID NO: 912739 - protein, 666 aa, Homo sapiens; identical to SEQ ID NO: 912737

SEQ ID NO: 912740 - protein, 668 aa, Homo sapiens
  misc_feature (667)..(668): Xaa can be any naturally occurring amino acid
RNPPGSRGGSRACIPHHPPAPGPGRRQTELPPPPPQQQQSGSQAQPGPREAGAPGPWMSRSAAASGGPRRPERHLPPAPCGAPGPPETCRTEPDGAGTMNKLRQSLRRRKPAYVPEASRPHQWQADEDAVRKGTCSFPVRYLGHVEVEESRGMHVCEDAVKKLKAMGRKSVKSVLWVSADGLRVVDDKTKDLLVDQTIEKVSFCAPDRNLDKAFSYICRDGTTRRWICHCFLALKDSGERLSHAVGCAFAACLERKQRREKECGVTAAFDASRTSFAREGSFRLSGGGRPAEREAPDKKKAEAAAAPTVAPGPAQPGHVSPTPATTSPGEKGEAGTPVAAGTTAAAIPRRHAPLEQLVRQGSFRGFPALSQKNSPFKRQLSLRLNELPSTLQRRTDFQVKGTVPEMEPPGAGDSDSINALCTQISSSFASAGAPAPGPPPATTGTSAWGEPSVPPAAAFQPGHKRTPSEAERWLEEVSQVAKAQQQQQQQQQQQQQQQQQQQQAASVAPVPTMPPALQPFPAPVGPFDAAPAQVAVFLPPPHMQPPFVPAYPGLGYPPMPRVPVVGITPSQMVANAFCSAAQLQPQPATLLGKAGAFPPPAIPSAPGSQARPRPNGAPWPPEPAPAPAPELDPFEAQWAALEGKATVEKAAFPLSLPFKHRLRFGLXX

SEQ ID NO: 912741 - protein, 568 aa, Homo sapiens
MNKLRQSLRRRKPAYVPEASRPHQWQADEDAVRKGTCSFPVRYLGHVEVEESRGMHVCEDAVKKLKAMGRKSVKSVLWVSADGLRVVDDKTKDLLVDQTIEKVSFCAPDRNLDKAFSYICRDGTTRRWICHCFLALKDSGERLSHAVGCAFAACLERKQRREKECGVTAAFDASRTSFAREGSFRLSGGGRPAEREAPDKKKAEAAAAPTVAPGPAQPGHVSPTPATTSPGEKGEAGTPVAAGTTAAAIPRRHAPLEQLVRQGSFRGFPALSQKNSPFKRQLSLRLNELPSTLQRRTDFQVKGTVPEMEPPGAGDSDSINALCTQISSSFASAGAPAPGPPPATTGTSAWGEPSVPPAAAFQPGHKRTPSEAERWLEEVSQVAKAQQQQQQQQQQQQQQQQQQQQAASVAPVPTMPPALQPFPAPVGPFDAAPAQVAVFLPPPHMQPPFVPAYPGLGYPPMPRVPVVGITPSQMVANAFCSAAQLQPQPATLLGKAGAFPPPAIPSAPGSQARPRPNGAPWPPEPAPAPAPELDPFEAQWAALEGKATVEKPSNPFSGDLQKTFEIEL

SEQ ID NO: 912742 - protein, 666 aa, Homo sapiens; identical to SEQ ID NO: 912737

SEQ ID NO: 912743 - protein, 666 aa, Homo sapiens; identical to SEQ ID NO: 912737

SEQ ID NO: 912744 - protein, 613 aa, Homo sapiens
ASAVTVTAALCVGGPRRPERHLPPAPCGAPGPPETCRTEPDGAGTMNKLRQSLRRRKPAYVPEASRPHQWQADEDAVRKGTCSFPVRYLGHVEVEESRGMHVCEDAVKKLKAMGRKSVKSVLWVSADGLRVVDDKTKDLLVDQTIEKVSFCAPDRNLDKAFSYICRDGTTRRWICHCFLALKDSGERLSHAVGCAFAACLERKQRREKECGVTAAFDASRTSFAREGSFRLSGGGRPAEREAPDKKKAEAAAAPTVAPGPAQPGHVSPTPATTSPGEKGEAGTPVAAGTTAAAIPRRHAPLEQLVRQGSFRGFPALSQKNSPFKRQLSLRLNELPSTLQRRTDFQVKGTVPEMEPPGAGDSDSINALCTQISSSFASAGAPAPGPPPATTGTSAWGEPSVPPAAAFQPGHKRTPSEAERWLEEVSQVAKAQQQQQQQQQQQQQQQQQQQQAASVAPVPTMPPALQPFPAPVGPFDAAPAQVAVFLPPPHMQPPFVPAYPGLGYPPMPRVPVVGITPSQMVANAFCSAAQLQPQPATLLGKAGAFPPPAIPSAPGSQARPRPNGAPWPPEPAPAPAPELDPFEAQWAALEGKATVEKPSNPFSGDLQKTFEIEL

SEQ ID NO: 912745 - protein, 122 aa, Homo sapiens [sequence omitted]

SEQ ID NO: 912746 - protein, 174 aa, Homo sapiens
MTVLTTPIRQQLALTFYQKLCTWRIEQSRLQLWDTAGQERFRSLIPSYIRDSTVAVVVYDITNVNSFQQTTKWIDDVRTERGSDVIIMLVGNKTDLADKRQVSIEEGERKAKELNVMFIETSAKAGYNVKQLFRRVAAALPGMESTQDRSREDMIDIKLEKPQEQPVSEGGCSC

SEQ ID NO: 912747 - protein, 174 aa, Homo sapiens; identical to SEQ ID NO: 912746

SEQ ID NO: 912748 - protein, 174 aa, Homo sapiens; identical to SEQ ID NO: 912746

SEQ ID NO: 912749 - protein, 174 aa, Homo sapiens; identical to SEQ ID NO: 912746

SEQ ID NO: 912750 - protein, 174 aa, Homo sapiens; identical to SEQ ID NO: 912746

SEQ ID NO: 912751 - protein, 106 aa, Homo sapiens
MHARTHAAAGGAAGSRPGSPRAAPEARALSRLGCGGGGSCGSSGAARERSQIRLRFRLRHPQLLFPRSGSRVRKEGTALALGSQRTPLAPADTALLPFPAAGLARC

SEQ ID NO: 912752 - protein, 208 aa, Homo sapiens
MSTGGDFGNPLRKFKLVFLGEQSVGKTSLITRFMYDSFDNTYQATIGIDFLSKTMYLEDRTIRLQLWDTAGQERFRSLIPSYIRDSAAAVVVYDITNVNSFQQTTKWIDDVRTERGSDVIIMLVGNKTDLADKRQVSIEEGERKAKELNVMFIETSAKAGYNVKQLFRRVAAALPGMESTQDRSREDMIDIKLEKPQEQPVSEGGCSC

SEQ ID NO: 912753 - protein, 106 aa, Homo sapiens; identical to SEQ ID NO: 912751

SEQ ID NO: 912754 - protein, 174 aa, Homo sapiens; identical to SEQ ID NO: 912746

SEQ ID NO: 912755 - protein, 174 aa, Homo sapiens; identical to SEQ ID NO: 912746

SEQ ID NO: 912756 - protein, 174 aa, Homo sapiens; identical to SEQ ID NO: 912746

SEQ ID NO: 912757 - protein, 134 aa, Homo sapiens
MTVLTTPIRQQLALTFYQKLCTWRIEQSRLQLWDTAGQERFRSLIPSYIRDSTVAVVVYDITNVNSFQQTTKWIDDVRTERGSDVIIMLVGNKTDLADKRQVSIEEGFRPESGPRRLATVSPVFSLAGAWAGGN

SEQ ID NO: 912758 - protein, 106 aa, Homo sapiens; identical to SEQ ID NO: 912751

SEQ ID NO: 912759 - protein, 174 aa, Homo sapiens; identical to SEQ ID NO: 912746

SEQ ID NO: 912760 - protein, 174 aa, Homo sapiens; identical to SEQ ID NO: 912746

SEQ ID NO: 912761 - protein, 208 aa, Homo sapiens; identical to SEQ ID NO: 912752

SEQ ID NO: 912762 - protein, 174 aa, Homo sapiens; identical to SEQ ID NO: 912746

SEQ ID NO: 912763 - protein, 106 aa, Homo sapiens; identical to SEQ ID NO: 912751

SEQ ID NO: 912764 - protein, 92 aa, Homo sapiens
AGPCGIVVLLHPFFAGRRQVSIEEGERKAKELNVMFIETSAKAGYNVKQLFRRVAAALPGMESTQDRSREDMIDIKLEKPQEQPVSEGGCSC

SEQ ID NO: 912765 - protein, 104 aa, Homo sapiens
LNALYFPQRFILSQRFILLSTRAVCSQPTLSLLAFLTSHLPPFPITLFLPSLPRLPQNKQEMAKQQFYQAHWNYPLILQIPLAVGYGPRCPKLFLSTDKNYGLL

SEQ ID NO: 912766 - protein, 174 aa, Homo sapiens; identical to SEQ ID NO: 912746

SEQ ID NO: 912767 - protein, 161 aa, Homo sapiens
GRSSSSTMSTGGDFGNPLRKFKLVFLGEQSGECVAPLLLAAGRSVPAPPPVGPSVRGGSLPASRPRSLPPQPFPMCPPVPLALRQWPSFYPVPRVLQSSTPRLRSSQSGHLRSICPPSPDLTPPSLLSIPFFLRSRSLPVPRPPFLSPTLIPCSFPSSSAL

SEQ ID NO: 912768 - protein, 355 aa, Homo sapiens
AGIPDSRPEARGDHVVRPSRGLRVTGATRSIMGPWGEPELLVWRPEAVASEPPVPVGLEVKLGALVLLLVLTLLCSLVPICVLRRPGANHEGSASRQKALSLVSCFAGGVFLATCLLDLLPDYLAAIDEALAALHVTLQFPLQEFILAMGFFLVLVMEQITLAYKEQSGPSPLEETRALLGTVNGGPQHWHDGPGVPQASGAPATPSALRACVLVFSLALHSVFEGLAVGLQRDRARAMELCLALLLHKGILAVSLSLRLLQSHLRAQVVAGCGILFSCMTPLGIGLGAALAESAGPLHQLAQSVLEGMAAGTFLYITFLEILPQELASSEQRILKVILLLAGFALLTGLLFIQI

SEQ ID NO: 912769 - protein, 343 aa, Homo sapiens
RERERERESLRVTGATRSIMGPWGEPELLVWRPEAVASEPPVPVGLEVKLGALVLLLVLTLLCSLVPICVLRRPGANHEGSASRQKALSLVSCFAGGVFLATCLLDLLPDYLAAIDEALAALHVTLQFPLQEFILAMGFFLVLVMEQITLAYKEQSGPSPLEETRALLGTVNGGPQHWHDGPGVPQASGAPATPSALRACVLVFSLALHSVFEGLAVGLQRDRARAMELCLALLLHKGILAVSLSLRLLQSHLRAQVVAGCGILFSCMTPLGIGLGAALAESAGPLHQLAQSVLEGMAAGTFLYITFLEILPQELASSEQRILKVILLLAGFALLTGLLFIQI

SEQ ID NO: 912770 - protein, 324 aa, Homo sapiens
MGPWGEPELLVWRPEAVASEPPVPVGLEVKLGALVLLLVLTLLCSLVPICVLRRPGANHEGSASRQKALSLVSCFAGGVFLATCLLDLLPDYLAAIDEALAALHVTLQFPLQEFILAMGFFLVLVMEQITLAYKEQSGPSPLEETRALLGTVNGGPQHWHDGPGVPQASGAPATPSALRACVLVFSLALHSVFEGLAVGLQRDRARAMELCLALLLHKGILAVSLSLRLLQSHLRAQVVAGCGILFSCMTPLGIGLGAALAESAGPLHQLAQSVLEGMAAGTFLYITFLEILPQELASSEQRILKVILLLAGFALLTGLLFIQI

SEQ ID NO: 912771 - protein, 324 aa, Homo sapiens; identical to SEQ ID NO: 912770

SEQ ID NO: 912772 - protein, 324 aa, Homo sapiens; identical to SEQ ID NO: 912770

SEQ ID NO: 912773 - protein, 367 aa, Homo sapiens
HQKYLAVLGHPRLFIIQVTRLSFMYMLLRSLACLRVTGATRSIMGPWGEPELLVWRPEAVASEPPVPVGLEVKLGALVLLLVLTLLCSLVPICVLRRPGANHEGSASRQKALSLVSCFAGGVFLATCLLDLLPDYLAAIDEALAALHVTLQFPLQEFILAMGFFLVLVMEQITLAYKEQSGPSPLEETRALLGTVNGGPQHWHDGPGVPQASGAPATPSALRACVLVFSLALHSVFEGLAVGLQRDRARAMELCLALLLHKGILAVSLSLRLLQSHLRAQVVAGCGILFSCMTPLGIGLGAALAESAGPLHQLAQSVLEGMAAGTFLYITFLEILPQELASSEQRILKVILLLAGFALLTGLLFIQI

SEQ ID NO: 912774 - protein, 297 aa, Homo sapiens
MGPWGEPELLVWRPEAVASEPPVPVGLEVKLGALVLLLVLTLLCSLVPICVLRRPGANHEGSASRQKALSLVSCFAGGVFLATCLLDLLPDYLAAIDEALAALHVTLQFPLQEFILAMGFFLVLVMEQITLAYKEQSGPSPLEETRALLGTVNGGPQHWHDGPGVPQASGAPATPSALRACVLVFSLALHSVFEGLAVGLQRDRARAMELCLALLLHKGILAVSLSLRLLQSHLRAQVVAGCGILFSCMTPLGIGLGAALAESAGPLHQLAQSVLEGMAAGTFLYITFLEILLFIQI

SEQ ID NO: 912775 - protein, 324 aa, Homo sapiens; identical to SEQ ID NO: 912770

SEQ ID NO: 912776 - protein, 207 aa, Homo sapiens [sequence omitted]

SEQ ID NO: 912777 - protein, 117 aa, Homo sapiens [sequence omitted]

SEQ ID NO: 912778 - protein, 324 aa, Homo sapiens; identical to SEQ ID NO: 912770

SEQ ID NO: 912779 - protein, 127 aa, Homo sapiens
MFRRVRPMGPQFFLFFFFILIFGDRVSLCCPGWSAVVRSRFHAAPDLPGSGDSPASAPRAARTTGASHCVRPAGLICQAGIGFRQPKGRGKRQNMNRREAGRKLRETLSSQVACSARSRSRSLIAPN

SEQ ID NO: 912780 - protein, 809 aa, Homo sapiens
MGPWGEPELLVWRPEAVASEPPVPVGLEVKLGALVLLLVLTLLCSLVPICVLRRPGANHEGSASRQKALSLVSCFAGGVFLATCLLDLLPDYLAAIDEALAALHVTLQFPLQEFILAMGFFLVLVMEQITLAYKEQSGPSPLEETRALLGTVNGGPQHWHDGPGVPQLQAQKLRLAYTRSSHYGGSLPNVNQIGSGLAEFQSPLHSPLDSSRSTRHHGLVERVQRDPRRMVSPLRRYTRHIDSSPYSPAYLSPPPESSWRRTMAWGNFPAEKGQLFRLPSALNRTSSDSALHTSVMNPSPQDTYPGPTPPSILPSRRGGILDGEMDPKVPAIEENLLDDKHLLKPWDAKKLSSSSSRPRSCEVPGINIFPSPDQPANVPVLPPAMNTGGSLPDLTNLHFPPPLPTPLDPEETAYPSLSGGNSTSNLTHTMTHLGISRGMGLGPGYDAPGLHSPLSHPSLQSSLSNPNLQASLSSPQPQLQGSHSHPSLPASSLARHVLPTTSLGHPSLSAPALSSSSSSSSTSSPVLGAPSYPASTPGASPHHRRVPLSPLSLLAGPADARRSQQQLPKQFSPTMSPTLSSITQGVPLDTSKLSTDQRLPPYPYSSPSLVLPTQPHTPKSLQQPGLPSQSCSVQSSGGQPPGRQSHYGTPYPPGPSGHGQQSYHRPMSDFNLGNLEQFSMESPSASLVLDPPGFSEGPGFLGGEGPMGGPQDPHTFNHQNLTHCSRHGSGPNIILTGDSSPGFSKEIAAALAGVPGFEVSAAGLELGLGLEDELRMEPLGLEGLNMLSDPCALLPDPAVEESFRSDRLQ

SEQ ID NO: 912781 - protein, 834 aa, Homo sapiens
MGPWGEPELLVWRPEAVASEPPVPVGLEVKLGALVLLLVLTLLCSLVPICVLRRPGANHEGSASRQKALSLVSCFAGGVFLATCLLDLLPDYLAAIDEALAALHVTLQFPLQEFILAMGFFLVLVMEQITLAYKEQSGPSPLEETRALLGTVNGGPQHWHDGPGVPQLQAQKLRLAYTRSSHYGGSLPNVNQIGSGLAEFQVSRPQPGRSGVSEAASSADFCPFWQSPLHSPLDSSRSTRHHGLVERVQRDPRRMVSPLRRYTRHIDSSPYSPAYLSPPPESSWRRTMAWGNFPAEKGQLFRLPSALNRTSSDSALHTSVMNPSPQDTYPGPTPPSILPSRRGGILDGEMDPKVPAIEENLLDDKHLLKPWDAKKLSSSSSRPRSCEVPGINIFPSPDQPANVPVLPPAMNTGGSLPDLTNLHFPPPLPTPLDPEETAYPSLSGGNSTSNLTHTMTHLGISRGMGLGPGYDAPGLHSPLSHPSLQSSLSNPNLQASLSSPQPQLQGSHSHPSLPASSLARHVLPTTSLGHPSLSAPALSSSSSSSSTSSPVLGAPSYPASTPGASPHHRRVPLSPLSLLAGPADARRSQQQLPKQFSPTMSPTLSSITQGVPLDTSKLSTDQRLPPYPYSSPSLVLPTQPHTPKSLQQPGLPSQSCSVQSSGGQPPGRQSHYGTPYPPGPSGHGQQSYHRPMSDFNLGNLEQFSMESPSASLVLDPPGFSEGPGFLGGEGPMGGPQDPHTFNHQNLTHCSRHGSGPNIILTGDSSPGFSKEIAAALAGVPGFEVSAAGLELGLGLEDELRMEPLGLEGLNMLSDPCALLPDPAVEESFRSDRLQ

SEQ ID NO: 912782 - protein, 580 aa, Homo sapiens
MVSPLRRYTRHIDSSPYSPAYLSPPPESSWRRTMAWGNFPAEKGQLFRLPSALNRTSSDSALHTSVMNPSPQDTYPGPTPPSILPSRRGGILDGEMDPKVPAIEENLLDDKHLLKPWDAKKLSSSSSRPRSCEVPGINIFPSPDQPANVPVLPPAMNTGGSLPDLTNLHFPPPLPTPLDPEETAYPSLSGGNSTSNLTHTMTHLGISRGMGLGPGYDAPGLHSPLSHPSLQSSLSNPNLQASLSSPQPQLQGSHSHPSLPASSLARHVLPTTSLGHPSLSAPALSSSSSSSSTSSPVLGAPSYPASTPGASPHHRRVPLSPLSLLAGPADARRSQQQLPKQFSPTMSPTLSSITQGVPLDTSKLSTDQRLPPYPYSSPSLVLPTQPHTPKSLQQPGLPSQSCSVQSSGGQPPGRQSHYGTPYPPGPSGHGQQSYHRPMSDFNLGNLEQFSMESPSASLVLDPPGFSEGPGFLGGEGPMGGPQDPHTFNHQNLTHCSRHGSGPNIILTGDSSPGFSKEIAAALAGVPGFEVSAAGLELGLGLEDELRMEPLGLEGLNMLSDPCALLPDPAVEESFRSDRLQ

SEQ ID NO: 912783 - protein, 580 aa, Homo sapiens; identical to SEQ ID NO: 912782

SEQ ID NO: 912784 - protein, 580 aa, Homo sapiens; identical to SEQ ID NO: 912782

SEQ ID NO: 912785 - protein, 809 aa, Homo sapiens; identical to SEQ ID NO: 912780

SEQ ID NO: 912786 - protein, 589 aa, Homo sapiens
STCLGLPKCWDYRHEPPYPASMELFKAGRQVSTAANATVSLAGILDGEMDPKGMCSSLLWVLNAKEFLGWCWDCVQVQGAGLLPTCFCFLSCLTGSFSNSPITSLSLQVPAIEENLLDDKHLLKPWDAKKLSSSSSRPRSCEVPGINIFPSPDQPANVPVLPPAMNTGGSLPDLTNLHFPPPLPTPLDPEETAYPSLSGGNSTSNLTHTMTHLGISRGMGLGPGYDAPGLHSPLSHPSLQSSLSNPNLQASLSSPQPQLQGSHSHPSLPASSLARHVLPTTSLGHPSLSAPALSSSSSSSSTSSPVLGAPSYPASTPGASPHHRRVPLSPLSLLAGPADARRSQQQLPKQFSPTMSPTLSSITQGVPLDTSKLSTDQRLPPYPYSSPSLVLPTQPHTPKSLQQPGLPSQSCSVQSSGGQPPGRQSHYGTPYPPGPSGHGQQSYHRPMSDFNLGNLEQFSMESPSASLVLDPPGFSEGPGFLGGEGPMGGPQDPHTFNHQNLTHCSRHGSGPNIILTGDSSPGFSKEIAAALAGVPGFEVSAAGLELGLGLEDELRMEPLGLEGLNMLSDPCALLPDPAVEESFRSDRLQ

SEQ ID NO: 912787 - protein, 478 aa, Homo sapiens
PGFSAEHCPHFPYSPFSPQLSSSSSRPRSCEVPGINIFPSPDQPANVPVLPPAMNTGGSLPDLTNLHFPPPLPTPLDPEETAYPSLSGGNSTSNLTHTMTHLGISRGMGLGPGYDAPGLHSPLSHPSLQSSLSNPNLQASLSSPQPQLQGSHSHPSLPASSLARHVLPTTSLGHPSLSAPALSSSSSSSSTSSPVLGAPSYPASTPGASPHHRRVPLSPLSLLAGPADARRSQQQLPKQFSPTMSPTLSSITQGVPLDTSKLSTDQRLPPYPYSSPSLVLPTQPHTPKSLQQPGLPSQSCSVQSSGGQPPGRQSHYGTPYPPGPSGHGQQSYHRPMSDFNLGNLEQFSMESPSASLVLDPPGFSEGPGFLGGEGPMGGPQDPHTFNHQNLTHCSRHGSGPNIILTGDSSPGFSKEIAAALAGVPGFEVSAAGLELGLGLEDELRMEPLGLEGLNMLSDPCALLPDPAVEESFRSDRLQ

SEQ ID NO: 912788 - protein, 806 aa, Homo sapiens
MGPWGEPELLVWRPEAVASEPPVPVGLEVKLGALVLLLVLTLLCSLVPICVLRRPGANHEGSASRQKALSLVSCFAGGVFLATCLLDLLPDYLAAIDEALAALHVTLQFPLQEFILAMGFFLVLVMEQITLAYKEQSGPSPLEETRALLGTVNGGPQHWHDGPGVPQLQAQKLRLAYTRSSHYGGSLPNVNQIGSGLAEFQSPLHSPLDSSRSTRHHGLVERVQRDPRRMVSPLRRYTRHIDSSPYSPAYLSPPPESSWRRTMAWGNFPAEKGQLFRLPSALNRTSSDSALHTSVMNPSPQDTYPGPTPPSILPSRRGGILDGEMDPKVPAIEENLLDDKHLLKPWDAKKLSSSSSRPRSCEVPGINIFPSPDQPANVPVLPPAMNTGGSLPDLTNLHFPPPLPTPLDPEETAYPSLSGGNSTSNLTHTMTHLGISRGMGLGPGYDAPGLHSPLSHPSLQSSLSNPNLQASLSSPQPQLQGSHSHPSLPASSLARHVLPTTSLGHPSLSAPALSSSSSSSSTSSPVLGAPSYPASTPGASPHHRRVPLSPLSLLAGPADARRSQQQLPKQFSPTMSPTLSSITQGVPLDTSKLSTDQRLPPYPYSSPSLVLPTQPHTPKSLQQPGLPSQSCSVQSSGGQPPGRQSHYGTPYPPGPSGHGQQSYHRPMSDFNLGNLEQFSMESPSASLVLDPPGFSEGPGFLGGEGPMGGPQDPHTFNHQNLTHCSRHGSGPNIILTGDSSPGFSKEIAAALAGVPGFEVSAAGLELGLGLEDELRMEPLAGTVGQVLVVEGVGILGATHWPLTPAV

SEQ ID NO: 912789 - protein, 461 aa, Homo sapiens
MGPWGEPELLVWRPEAVASEPPVPVGLEVKLGALVLLLVLTLLCSLVPICVLRRPGANHEGSASRQKALSLVSCFAGGVFLATCLLDLLPDYLAAIDEALAALHVTLQFPLQEFILAMGFFLVLVMEQITLAYKEQSGPSPLEETRALLGTVNGGPQHWHDGPGVPQLQAQKLRLAYTRSSHYGGSLPNVNQIGSGLAEFQSPLHSPLDSSRSTRHHGLVERVQRDPRRMVSPLRRYTRHIDSSPYSPAYLSPPPESSWRRTMAWGNFPAEKGQLFRLPSALNRTSSDSALHTSVMNPSPQDTYPGPTPPSILPSRRGGILDGEMDPKVPAIEENLLDDKHLLKPWDAKKLSSSSSRPRSCEVPGINIFPSPDQPANVPVLPPAMNTGGSLPDLTNLHFPPPLPTPLDPEETAYPSLSGGNSTSNLTHTMTHLGISRGMGLGPGYDAPDFIHLSERPVCFG

SEQ ID NO: 912790 - protein, 297 aa, Homo sapiens
MGPWGEPELLVWRPEAVASEPPVPVGLEVKLGALVLLLVLTLLCSLVPICVLRRPGANHEGSASRQKALSLVSCFAGGVFLATCLLDLLPDYLAAIDEALAALHVTLQFPLQEFILAMGFFLVLVMEQITLAYKEQSGPSPLEETRALLGTVNGGPQHWHDGPGVPQLQAQKLRLAYTRSSHYGGSLPNVNQIGSGLAEFQSPLHSPLDSSRSTRHHGLVERVQRDPRRMVSPLRRYTRHIDSSPYNPSLICPSPKSTAKTGSAILRGMVDTAFRGRDSHKGQTSIRATITCWSEPH

SEQ ID NO: 912791 - protein, 324 aa, Homo sapiens; identical to SEQ ID NO: 912770

SEQ ID NO: 912792 - protein, 104 aa, Homo sapiens
MAILKISIFKLRALDANNTCSASDSDAELCAGDSSPGFSKEIAAALAGVPGFEVSAAGLELGLGLEDELRMEPLGLEGLNMLSDPCALLPDPAVEESFRSDRLQ

SEQ ID NO: 912793 - protein, 324 aa, Homo sapiens; identical to SEQ ID NO: 912770

SEQ ID NO: 912794 - protein, 324 aa, Homo sapiens; identical to SEQ ID NO: 912770

SEQ ID NO: 912795 - protein, 324 aa, Homo sapiens; identical to SEQ ID NO: 912770

SEQ ID NO: 912796 - protein, 324 aa, Homo sapiens; identical to SEQ ID NO: 912770

SEQ ID NO: 912797 - protein, 324 aa, Homo sapiens; identical to SEQ ID NO: 912770

SEQ ID NO: 912798 - protein, 324 aa, Homo sapiens; identical to SEQ ID NO: 912770

SEQ ID NO: 912799 - protein, 324 aa, Homo sapiens; identical to SEQ ID NO: 912770

SEQ ID NO: 912800 - protein, 748 aa, Homo sapiens
TIPGGPRAQQVRARLGPGSRCSLRRRWLRLEEPGRGRGGGRGWYWEGGREGRGRKMATSGANGPGSATASASNPRKFSEKIALQKQRQAEETAAFEEVMMDIGSTRLQAQKLRLAYTRSSHYGGSLPNVNQIGSGLAEFQSPLHSPLDSSRSTRHHGLVERVQRDPRRMVSPLRRYTRHIDSSPYSPAYLSPPPESSWRRTMAWGNFPAEKGQLFRLPSALNRTSSDSALHTSVMNPSPQDTYPGPTPPSILPSRRGGILDGEMDPKVPAIEENLLDDKHLLKPWDAKKLSSSSSRPRSCEVPGINIFPSPDQPANVPVLPPAMNTGGSLPDLTNLHFPPPLPTPLDPEETAYPSLSGGNSTSNLTHTMTHLGISRGMGLGPGYDAPGLHSPLSHPSLQSSLSNPNLQASLSSPQPQLQGSHSHPSLPASSLARHVLPTTSLGHPSLSAPALSSSSSSSSTSSPVLGAPSYPASTPGASPHHRRVPLSPLSLLAGPADARRSQQQLPKQFSPTMSPTLSSITQGVPLDTSKLSTDQRLPPYPYSSPSLVLPTQPHTPKSLQQPGLPSQSCSVQSSGGQPPGRQSHYGTPYPPGPSGHGQQSYHRPMSDFNLGNLEQFSMESPSASLVLDPPGFSEGPGFLGGEGPMGGPQDPHTFNHQNLTHCSRHGSGPNIILTGDSSPGFSKEIAAALAGVPGFEVSAAGLELGLGLEDELRMEPLGLEGLNMLSDPCALLPDPAVEESFRSDRLQ

SEQ ID NO: 912801 - protein, 674 aa, Homo sapiens
MGPWGEPELLVWRPEAVASEPPVPVGLEVKLGALVLLLVLTLLCSLVPICVLRRPGANHEGSASRQKALSLVSCFAGGVFLATCLLDLLPDYLAAIDEALAALHVTLQFPLQEFILAMGFFLVLVMEQITLAYKEQSGPSPLEETRALLGTVNGGPQHWHDGPGVPQLQAQKLRLAYTRSSHYGGSLPNVNQIGSGLAEFQSPLHSPLDSSRSTRHHGLVERVQRDPRRMVSPLRRYTRHIDSSPYSPAYLSPPPESSWRRTMAWGNFPAEKGQLFRLPSALNRTSSDSALHTSVMNPSPQDTYPGPTPPSILPSRRGGILDGEMDPKVPAIEENLLDDKHLLKPWDAKKLSSSSSRPRSCEVPGINIFPSPDQPANVPVLPPAMNTGGSLPDLTNLHFPPPLPTPLDPEETAYPSLSGGNSTSNLTHTMTHLGISRGMGLGPGYDAPGRPPGYTVNCPLTSGYPHTHTAPQVWFCLPSPTPQSLYSSQGCPLSLVQCSPQVEQPPGRQSHYGTPYPPGPSGHGQQSYHRPMSDFNLGNLEQFSMESPSASLVLDPPGFSEGPGFLGGEGPMGGPQDPHTFNHQNLTHCSRHGSGPNIILTGDSSPGFSKEIAAALAGVPGFEVSAAGLELGLGLEDELRMEPLGLEGLNMLSDPCALLPDPAVEESFRSDRLQ

SEQ ID NO: 912802 - protein, 809 aa, Homo sapiens; identical to SEQ ID NO: 912780

SEQ ID NO: 912803 - protein, 626 aa, Homo sapiens
MGPWGEPELLVWRPEAVASEPPVPVGLEVKLGALVLLLVLTLLCSLVPICVLRRPGANHEGSASRQKALSLVSCFAGGVFLATCLLDLLPDYLAAIDEALAALHVTLQFPLQEFILAMGFFLVLVMEQITLAYKEQSGPSPLEETRALLGTVNGGPQHWHDGPGVPQLQAQKLRLAYTRSSHYGGSLPNVNQIGSGLAEFQSPLHSPLDSSRSTRHHGLVERVQRDPRRMVSPLRRYTRHIDSSPYSPAYLSPPPESSWRRTMAWGNFPAEKGQLFRLPSALNRTSSDSALHTSVMNPSPQDTYPGPTPPSILPSRRGGILDGEMDPKVPAIEENLLDDKHLLKPWDAKKLSSSSSRPRSCEVPGINIFPSPDQPANVPVLPPAMNTGGSLPDLTNLHFPPPLPTPLDPEETAYPSLSGGNSTSNLTHTMTHLGISRGMGLGPGYDAPGLHSPLSHPSLQSSLSNPNLQASLSSPQPQLQGSHSHPSLPASSLARHVLPTTSLGHPSLSAPALSSSSSSSSTSSPVLGAPSYPASTPGASPHHRRVPLSPLSLLAGPADARRSQQQLPKQFSPTMSPTLSSITQGVPLDTSKLSTDQRLPPYPYSSPSLVLPDPAVEESFRSDRLQ

SEQ ID NO: 912804 - protein, 455 aa, Homo sapiens
MGPWGEPELLVWRPEAVASEPPVPVGLEVKLGALVLLLVLTLLCSLVPICVLRRPGANHEGSASRQKALSLVSCFAGGVFLATCLLDLLPDYLAAIDEALAALHVTLQFPLQEFILAMGFFLVLVMEQITLAYKEQSGPSPLEETRALLGTVNGGPQHWHDGPGVPQLQAQKLRLAYTRSSHYGGSLPNVNQIGSGLAEFQSPLHSPLDSSRSTRHHGLVERVQRDPRRMVSPLRRYTRHIDSSPYSPAYLSPPPESSWRRTMAWGNFPAEKGQLFRLPSALNRTSSDSALHTSVMNPSPQDTYPGPTPPSILPSRRGGILDGEMDPKVPAIEENLLDDKHLLKPWDAKKLSSSSSRPRSCEVPGINIFPSPDQPANVPVLPPAMNTGGSLPDLTNLHFPPPLPTPLDPEETAYPSLSGGNSTSNLTHTMTHLGISRGMGLGPGYDAPGRPPGYQ

SEQ ID NO: 912805 - protein, 235 aa, Homo sapiens
MSPTLSSITQGVPLDTSKLSTDQRLPPYPYSSPSLVLPTQPHTPKSLQQPGLPSQSCSVQSSGGQPPGRQSHYGTPYPPGPSGHGQQSYHRPMSDFNLGNLEQFSMESPSASLVLDPPGFSEGPGFLGGEGPMGGPQDPHTFNHQNLTHCSRHGSGPNIILTGDSSPGFSKEIAAALAGVPGFEVSAAGLELGLGLEDELRMEPLGLEGLNMLSDPCALLPDPAVEESFRSDRLQ

SEQ ID NO: 912806 - protein, 465 aa, Homo sapiens
MGPWGEPELLVWRPEAVASEPPVPVGLEVKLGALVLLLVLTLLCSLVPICVLRRPGANHEGSASRQKALSLVSCFAGGVFLATCLLDLLPDYLAAIDEALAALHVTLQFPLQEFILAMGFFLVLVMEQITLAYKEQSGPSPLEETRALLGTVNGGPQHWHDGPGVPQLQAQKLRLAYTRSSHYGGSLPNVNQIGSGLAEFQSPLHSPLDSSRSTRHHGLVERVQRDPRRMVSPLRRYTRHIDSSPYSPAYLSPPPESSWRRTMAWGNFPAEKGQLFRLPSALNRTSSDSALHTSVMNPSPQDTYPGPTPPSILPSRRGGILDGEMDPKVPAIEENLLDDKHLLKPWDAKKLSSSSSRPRSCEVPGINIFPSPDQPANVPVLPPAMNTGGSLPDLTNLHFPPPLPTPLDPEETAYPSLSGGNSTSNLTHTMTHLGISRGMGLGPGYDAPDFIHLSATPTGVSNVGV

SEQ ID NO: 912807 - protein, 371 aa, Homo sapiens
TIPGGPRAQQVRARLGPGSRCSLRRRWLRLEEPGRGRGGGRGWYWEGGREGRGRKMATSGANGPGSATASASNPRKFSEKIALQKQRQAEETAAFEEVMMDIGSTRLQAQKLRLAYTRSSHYGGSLPNVNQIGSGLAEFQSPLHSPLDSSRSTRHHGLVERVQRDPRRMVSPLRRYTRHIDSSPYSPAYLSPPPESSWRRTMAWGNFPAEKGQLFRLPSALNRTSSDSALHTSVMNPSPQDTYPGPTPPSILPSRRGGILDGEMDPKVPAIEENLLDDKHLLKPWDAKKLSSSSSRPRSCEVPGINICPSPDQAAKCGWSPNYPVKQRRGSPTLEHDQTLHNPEPKATTWNLNQTTEPGPQGPKHQKDPNR

SEQ ID NO: 912808 - protein, 106 aa, Homo sapiens
INAEWPLSGGKMVAMAAGPSGCLVPAFGLRLLLATVLQAVSAFGAEFSSEACRELGFSSNLLCSSCDLLGQFNLLQLDPDCRGCCQEEAQFETKKLYAGAILEVCG

SEQ ID NO: 912809 - protein, 115 aa, Homo sapiens
AGAQGSLIKLISPPPRNLRKMVAMAAGPSGCLVPAFGLRLLLATVLQAVSAFGAEFSSEACRELGFSSNLLCSSCDLLGQFNLLQLDPDCRGCCQEEAQFETKKLYAGAILEVCG

SEQ ID NO: 912810 - protein, 115 aa, Homo sapiens; identical to SEQ ID NO: 912809

SEQ ID NO: 912811 - protein, 158 aa, Homo sapiens
AGAQGSLIKLISPPPRNLRKMVAMAAGPSGCLVPAFGLRLLLATVLQAVSAFGAEFSSEACRELGFSSNLLCSSCDLLGQFNLLQLDPDCRGCCQEEAQFETKKYSSIVSKQECHHSNCMQELFLKFVDENWEGSLKSKYVRGSDPVLKLCGRQWEHC

SEQ ID NO: 912812 - protein, 129 aa, Homo sapiens
AGAQGSLIKLISPPPRNLRKMVAMAAGPSGCLVPAFGLRLLLATVLQAVSAFGAEFSSEACRELGFSSNLLCSSCDLLGQFNLLQLDPDCRGCCQEEAQFETKKLYAGAILEVCGCKALWTTMGTLLKN

SEQ ID NO: 912813 - protein, 115 aa, Homo sapiens; identical to SEQ ID NO: 912809

SEQ ID NO: 912814 - protein, 115 aa, Homo sapiens; identical to SEQ ID NO: 912809

SEQ ID NO: 912815 - protein, 164 aa, Homo sapiens
AGAQGSLIKLISPPPRNLRKMVAMAAGPSGCLVPAFGLRLLLATVLQAVSAFGAEFSSEACRELGFSSNLLCSSCDLLGQFNLLQLDPDCRGCCQEEAQFETKKYSSIVSKQECHHSNCMQELFLKFVDENWEGSLKSKLLLGVINPNCSEDCKSSMSVVQTLY

SEQ ID NO: 912816 - protein, 157 aa, Homo sapiens
AGAQGSLIKLISPPPRNLRKMVAMAAGPSGCLVPAFGLRLLLATVLQAVSAFGAEFSSEACRELGFSSNLLCSSCDLLGQFNLLQLDPDCRGCCQEEAQFETKKLLLGVINPNCSEDCKSRVIKRSYCSTSSPALVCPWFRPCIKALWTTMGTLLKN

SEQ ID NO: 912817 - protein, 115 aa, Homo sapiens; identical to SEQ ID NO: 912809

SEQ ID NO: 912818 - protein, 335 aa, Homo sapiens
MPAVLGFEGSANKIGVGVVRDGKVLANPRRTYVTPPGTGFLPGDTARHHRAVILDLLQEALTESGLTSQDIDCIAYTKGPGMGAPLVSVAVVARTVAQLWNKPLVGVNHCIGHIEMGRLITGATSPTVLYVSGGNTQVIAYSEHRYRIFGETIDIAVGNCLDRFARVLKISNDPSPGYNIEQMAKRGKKLVELPYTVKGMDVSFSGILSFIEDVAHRMLATGECTPEDLCFSLQETVFAMLVEITERAMAHCGSQEALIVGGVGCNVRLQEMMATMCQERGARLFATDERFCIDNGAMIAQAGWEMFRAGHRTPLSDSGVTQRYRTDEVEVTWRD

SEQ ID NO: 912819 - protein, 335 aa, Homo sapiens; identical to SEQ ID NO: 912818

SEQ ID NO: 912820 - protein, 268 aa, Homo sapiens
MPAVLGFEGSANKIGVGVVRDGKVLANPRRTYVTPPGTGFLPGDTARHHRAVILDLLQEALTESGLTSQDIDCIAYTKGPGMGAPLVSVAVVARTVAQLWNKPLVGVNHCIGHIEMGRLITGATSPTVLYVSGGNTQVIAYSEHRYRIFGETIDIAVGNCLDRFARVLKISNDPSPGYNIEQMAKRGKKLVELPYTVKGMDVSFSGILSFIEDVAHRMLATGECTPEDLCFSLQETVFAMLVEITERAMAHCGSQEALIVGGVGCMYY

SEQ ID NO: 912821 - protein, 268 aa, Homo sapiens; identical to SEQ ID NO: 912820

SEQ ID NO: 912822 - protein, 335 aa, Homo sapiens; identical to SEQ ID NO: 912818

SEQ ID NO: 912823 - protein, 258 aa, Homo sapiens
  misc_feature (246)..(246): Xaa can be any naturally occurring amino acid
MPAVLGFEGSANKIGVGVVRDGKVLANPRRTYVTPPGTGFLPGDTARHHRAVILDLLQEALTESGLTSQDIDCIAYTKGPGMGAPLVSVAVVARTVAQLWNKPLVGVNHCIGHIEMGRLITGATSPTVLYVSGGNTQVIAYSEHRYRIFGETIDIAVGNCLDRFARVLKISNDPSPGYNIEQMAKRGKKLVELPYTVKGMDVSFSGILSFIEDVAHRMLATGECTPEDLCFSLQKRRFAASLDSHXRPGPWGSPKAHV

SEQ ID NO: 912824 - protein, 227 aa, Homo sapiens
MPAVLGFEGSANKIGVGVVRDGKVLANPRRTYVTPPGTGFLPGDTARHHRAVILDLLQEALTESGLTSQDIDCIAYTKGPGMGAPLVSVAVVARTVAQLWNKPLVGVNHCIGHIEMGRLITGATSPTVLYVSGGNTQVIAYSEHRYRIFGETIDIAVGNCLDRFARVLKISNDPSPGYNIEQMAKRGKKLVELPYTVKGMDVSFSGILSFIEVSVRGDETGTFMLFK

SEQ ID NO: 912825 - protein, 254 aa, Homo sapiens [sequence omitted]

SEQ ID NO: 912826 - protein, 149 aa, Homo sapiens [sequence omitted]

SEQ ID NO: 912827 - protein, 149 aa, Homo sapiens [sequence omitted]

SEQ ID NO: 912828 - protein, 276 aa, Homo sapiens
PLGFIGTRLQDIDCIAYTKGPGMGAPLVSVAVVARTVAQLWNKPLVGVNHCIGHIEMGRLITGATSPTVLYVSGGNTQVIAYSEHRYRIFGETIDIAVGNCLDRFARVLKISNDPSPGYNIEQMAKRGKKLVELPYTVKGMDVSFSGILSFIEDVAHRMLATGECTPEDLCFSLQETVFAMLVEITERAMAHCGSQEALIVGGVGCNVRLQEMMATMCQERGARLFATDERFCIDNGAMIAQAGWEMFRAGHRTPLSDSGVTQRYRTDEVEVTWRD

SEQ ID NO: 912829 - protein, 153 aa, Homo sapiens
MAKRGKKLVELPYTVKGMDVSFSGILSFIEDVAHRMLATGECTPEDLCFSLQETVFAMLVEITERAMAHCGSQEALIVGGVGCNVRLQEMMATMCQERGARLFATDERFCIDNGAMIAQAGWEMFRAGHRTPLSDSGVTQRYRTDEVEVTWRD

SEQ ID NO: 912830 - protein, 227 aa, Homo sapiens; identical to SEQ ID NO: 912824

SEQ ID NO: 912831 - protein, 197 aa, Homo sapiens
AAESAVKGLPVWYYSFKAEIKKTNSATGGDRILSACTGLGLNCFGGLMTDRPGSSEQQPQQRILLAWFRFIHYVHACSPAPPTGECTPEDLCFSLQETVFAMLVEITERAMAHCGSQEALIVGGVGCNVRLQEMMATMCQERGARLFATDERFCIDNGAMIAQAGWEMFRAGHRTPLSDSGVTQRYRTDEVEVTWRD

SEQ ID NO: 912832 - protein, 103 aa, Homo sapiens
MPAVLGFEGSANKIGVGVVRDGKVLANPRRTYVTPPGTGFLPGDTARHHRAVILDLLQEALTESGLTSQDIDCIAYTKDRTPLSDSGVTQRYRTDEVEVTWRD

SEQ ID NO: 912833 - protein, 335 aa, Homo sapiens; identical to SEQ ID NO: 912818

SEQ ID NO: 912834 - protein, 268 aa, Homo sapiens; identical to SEQ ID NO: 912820

SEQ ID NO: 912835 - protein, 331 aa, Homo sapiens
MPAVLGFEGSANKIGVGVVRDGKVLANPRRTYVTPPGTGFLPGDTARHHRAVILDLLQEALTESGLTSQDIDCIAYTKGPGMGAPLVSVAVVARTVAQLWNKPLVGVNHCIGHIEMGRLITGATSPTVLYVSGGNTQVIAYSEHRYRIFGETIDIAVGNCLDRFARVLKISNDPSPGYNIEQMAKRGKKLVELPYTVKGMDVSFSGILSFIEDVAHRMLATGECTPEDLCFSLQETVFAMLVEITERAMAHCGSQEALIVGGVGCNVRLQEMMATMCQERGARLFATDERFCIDNGAMIAQAGWEMFRAGHRTPLSDSGVTQSRSYLNQMK

SEQ ID NO: 912836 - protein, 178 aa, Homo sapiens
MPAVLGFEGSANKIGVGVVRDGKVLANPRRTYVTPPGTGFLPGDTARHHRAVILDLLQEALTESGLTSQDIDCIAYTKGPGMGAPLVSVAVVARTVAQLWNKPLVGVNHCIGHIEMGRLITGATSPTVLYVSGGNTQVIAYSEHRYRIFGETIDIAVGNCLDRFARVLKVSQWGLQRT

SEQ ID NO: 912837 - protein, 400 aa, Homo sapiens
MPAVLGFEGSANKIGVGVVRDGKVLANPRRTYVTPPGTGFLPGDTARHHRAVILDLLQEALTESGLTSQDIDCIAYTKGPGMGAPLVSVAVVARTVAQLWNKPLVGVNHCIGHIEMGRLITGATSPTVLYVSGGNTQVPVILATPEAGQENHLNPGGRSCGEPRSHHCIPAWATRAKLRLKQTNKQKTKKNNKGHYLIYYFGVIAYSEHRYRIFGETIDIAVGNCLDRFARVLKISNDPSPGYNIEQMAKRGKKLVELPYTVKGMDVSFSGILSFIEDVAHRMLATGECTPEDLCFSLQETVFAMLVEITERAMAHCGSQEALIVGGVGCNVRLQEMMATMCQERGARLFATDERFCIDNGAMIAQAGWEMFRAGHRTPLSDSGVTQRYRTDEVEVTWRD

SEQ ID NO: 912838 - protein, 297 aa, Homo sapiens
DLEVPSCYSSTRAVILDLLQEALTESGLTSQDIDCIAYTKGPGMGAPLVSVAVVARTVAQLWNKPLVGVNHCIGHIEMGRLITGATSPTVLYVSGGNTQVIAYSEHRYRIFGETIDIAVGNCLDRFARVLKISNDPSPGYNIEQMAKRGKKLVELPYTVKGMDVSFSGILSFIEDVAHRMLATGECTPEDLCFSLQETVFAMLVEITERAMAHCGSQEALIVGGVGCNVRLQEMMATMCQERGARLFATDERFCIDNGAMIAQAGWEMFRAGHRTPLSDSGVTQRYRTDEVEVTWRD

SEQ ID NO: 912839 - protein, 395 aa, Homo sapiens
MPAVLGFEGSANKIGVGVVRDGKVLANPRRTYVTPPGTGFLPGDTARHHRAVILDLLQEALTESGLTSQDIDCIAYTKGYGWESGQRWRNIPATWLGQNSQHLTSATITTPTPPHIPYVPHYCFFPISRIITSISISLGPGMGAPLVSVAVVARTVAQLWNKPLVGVNHCIGHIEMGRLITGATSPTVLYVSGGNTQVIAYSEHRYRIFGETIDIAVGNCLDRFARVLKISNDPSPGYNIEQMAKRGKKLVELPYTVKGMDVSFSGILSFIEDVAHRMLATGECTPEDLCFSLQETVFAMLVEITERAMAHCGSQEALIVGGVGCNVRLQEMMATMCQERGARLFATDERFCIDNGAMIAQAGWEMFRAGHRTPLSDSGVTQRYRTDEVEVTWRD

SEQ ID NO: 912840 - protein, 421 aa, Homo sapiens
MPAVLGFEGSANKIGVGVVRDGKVLANPRRTYVTPPGTGFLPGDTARHHRAVILDLLQEALTESGLTSQDIDCIAYTKGPGMGAPLVSVAVVARTVAQLWNKPLVGVNHCIGHIEMGRLITGATSPTVLYVSGGNTQVPVILATPEAGQENHLNPGGRSCGEPRSHHCIPAWATRAKLRLKQTNKQKTKKNNKGHYLIYYFGVIAYSEHRYRIFGETIDIAVGNCLDRFARVLKISNDPSPGYNIEQMAKRYRGHKVEAGWLLGLQGFPHIRGKKLVELPYTVKGMDVSFSGILSFIEDVAHRMLATGECTPEDLCFSLQETVFAMLVEITERAMAHCGSQEALIVGGVGCNVRLQEMMATMCQERGARLFATDERFCIDNGAMIAQAGWEMFRAGHRTPLSDSGVTQRYRTDEVEVTWRD

SEQ ID NO: 912841 - protein, 178 aa, Homo sapiens; identical to SEQ ID NO: 912836

SEQ ID NO: 912842 - protein, 244 aa, Homo sapiens
MPAVLGFEGSANKIGVGVVRDGKVLANPRRTYVTPPGTGFLPGDTARHHRAVILDLLQEALTESGLTSQDIDCIAYTKGPGMGAPLVSVAVVARTVAQLWNKPLVGVNHCIGHIEMGRLITGATSPTVLYVSGGNTQVIAYSEHRYRIFGETIDIAVGNCLDRFARVLKISIRPSPGYTIDRWAAGQKWVAAYLDGGGPPRLLLGGPSVPAGPGTVPAPWRGHTPHCPPWGVWPHPRRKLDRGA

SEQ ID NO: 912843 - protein, 194 aa, Homo sapiens
DTLVRGWVMNRHEGEGEWASGGVRSFSRAAAAMAPIKVGDAIPAVEVFEGEPGNKVNLAELFKGKKGVLFGVPGAFTPGCSKTHLPGFVEQAEALKAKGVQVVACLSVNDAFVTGEWGRAHKAEGKVRLLADPTGAFGKETDLLLDDSLVSIFGNRRLKRFSMVVQDGIVKALNVEPDGTGLTCSLAPNIISQL

SEQ ID NO: 912844 - protein, 214 aa, Homo sapiens
MGLAGVCALRRSAGYILVGGAGGQSAAAAARRCSEGEWASGGVRSFSRAAAAMAPIKVGDAIPAVEVFEGEPGNKVNLAELFKGKKGVLFGVPGAFTPGCSKTHLPGFVEQAEALKAKGVQVVACLSVNDAFVTGEWGRAHKAEGKVRLLADPTGAFGKETDLLLDDSLVSIFGNRRLKRFSMVVQDGIVKALNVEPDGTGLTCSLAPNIISQL

SEQ ID NO: 912845 - protein, 255 aa, Homo sapiens
PSARYEASVFTRRCRRCAASGAPPAAVAPARRRSGSGRGAGMGLAGVCALRRSAGYILVGGAGGQSAAAAARRCSEGEWASGGVRSFSRAAAAMAPIKVGDAIPAVEVFEGEPGNKVNLAELFKGKKGVLFGVPGAFTPGCSKTHLPGFVEQAEALKAKGVQVVACLSVNDAFVTGEWGRAHKAEGKVRLLADPTGAFGKETDLLLDDSLVSIFGNRRLKRFSMVVQDGIVKALNVEPDGTGLTCSLAPNIISQL

SEQ ID NO: 912846 - protein, 214 aa, Homo sapiens; identical to SEQ ID NO: 912844

SEQ ID NO: 912847 - protein, 214 aa, Homo sapiens; identical to SEQ ID NO: 912844

SEQ ID NO: 912848 - protein, 214 aa, Homo sapiens; identical to SEQ ID NO: 912844

SEQ ID NO: 912849 - protein, 214 aa, Homo sapiens; identical to SEQ ID NO: 912844

SEQ ID NO: 912850 - protein, 214 aa, Homo sapiens; identical to SEQ ID NO: 912844

SEQ ID NO: 912851 - protein, 167 aa, Homo sapiens
GTWPFSRTPAVGDAIPAVEVFEGEPGNKVNLAELFKGKKGVLFGVPGAFTPGCSKTHLPGFVEQAEALKAKGVQVVACLSVNDAFVTGEWGRAHKAEGKVRLLADPTGAFGKETDLLLDDSLVSIFGNRRLKRFSMVVQDGIVKALNVEPDGTGLTCSLAPNIISQL

SEQ ID NO: 912852 - protein, 230 aa, Homo sapiens
MGLAGVCALRRSAGYILVGGAGGQSAAAAARRCSEGEWASGGVRSFSRAAAAMAPIKVGDAIPAVEVFEGEPGNKVNLAELFKGKKGVLFGVPGAFTPGCSKTHLPGFVEQAEALKAKGVQVVACLSVNDAFVTGEWGRAHKAEGKVRLLADPTGAFGKETDLLLDDSLVSIFGNRRLKSLQAQADAAAWAPLSGRFSMVVQDGIVKALNVEPDGTGLTCSLAPNIISQL

SEQ ID NO: 912853 - protein, 167 aa, Homo sapiens
APAQWRRPGPPSAGCRRCAASGAPPAAVAPARRRSGSGRGAGMGLAGVCALRRSAGYILVGGAGGQSAAAAARRCSEGEWASGGVRSFSRAAAAMAPIKVRLLADPTGAFGKETDLLLDDSLVSIFGNRRLKRFSMVVQDGIVKALNVEPDGTGLTCSLAPNIISQL

SEQ ID NO: 912854 - protein, 170 aa, Homo sapiens
MGLAGVCALRRSAGYILVGGAGGQSAAAAARRCSEGEWASGGVRSFSRAAAAMAPIKVGDAIPAVEVFEGEPGNKVNLAELFKGKKGVLFGVPGAFTPGCSKVRLLADPTGAFGKETDLLLDDSLVSIFGNRRLKRFSMVVQDGIVKALNVEPDGTGLTCSLAPNIISQL

SEQ ID NO: 912855 - protein, 167 aa, Homo sapiens; identical to SEQ ID NO: 912853

SEQ ID NO: 912856 - protein, 214 aa, Homo sapiens; identical to SEQ ID NO: 912844

SEQ ID NO: 912857 - protein, 79 aa, Homo sapiens
IRWCPSWESSSNKVCLLPKGPSGKETDLLLDDSLVSIFGNRRLKRFSMVVQDGIVKALNVEPDGTGLTCSLAPNIISQL

SEQ ID NO: 912858 - protein, 214 aa, Homo sapiens; identical to SEQ ID NO: 912844

SEQ ID NO: 912859 - protein, 214 aa, Homo sapiens; identical to SEQ ID NO: 912844

SEQ ID NO: 912860 - protein, 214 aa, Homo sapiens; identical to SEQ ID NO: 912844

SEQ ID NO: 912861 - protein, 102 aa, Homo sapiens
PSARYEASVFTRRCRRCAASGAPPAAVAPARRRSGSGRGAGMGLAGVCALRRSAGYILVGGAGGQSAAAAARRCSEGEWASGGVRSFSRAAAAMAPIKAGVQ

SEQ ID NO: 912862 - protein, 119 aa, Homo sapiens
PFVPLPQTHLPGFVEQAEALKAKGVQVVACLSVNDAFVTGEWGRAHKAEGKVRLLADPTGAFGKETDLLLDDSLVSIFGNRRLKRFSMVVQDGIVKALNVEPDGTGLTCSLAPNIISQL

SEQ ID NO: 912863 - protein, 403 aa, Homo sapiens
APAQWRRPGPPSAGCRRCAASGAPPAAVAPARRRSGSGRGAGMGLAGVCALRRSAGYILVGGAGGQSAAAAARRCSEGEWASGGVRSFSRAAAAMAPIKVGDAIPAVEVFEGEPGNKVNLAELFKGKKGVLFGVPGAFTPGCSKTHLPGFVEQAEALKAKGVQVVACLSVNDAFVTGEWGRAHKAEGKVRLLADPTGAFGKETDLLLDDSLVSIFGNRRLKRVKVESPLWRESSVGESPLWERVLCGEGPLWEESSVGESPLCGRVVCGESPVWGESSVERVLCGGESCVGESPLWGESSVWRESCVGESPVWGESSVGESPLGRESCVGESSLWGESSVWRESCVVVSPLWGRVLCGGSPLWSSLGPLAVHCLSPCPASKPKLMQLPGPLFPAGSPWWYRMA

SEQ ID NO: 912864 - protein, 170 aa, Homo sapiens; identical to SEQ ID NO: 912854

SEQ ID NO: 912865 - protein, 232 aa, Homo sapiens
  misc_feature (149)..(149): Xaa can be any naturally occurring amino acid
  misc_feature (154)..(154): Xaa can be any naturally occurring amino acid
  misc_feature (160)..(160): Xaa can be any naturally occurring amino acid
  misc_feature (168)..(168): Xaa can be any naturally occurring amino acid
  misc_feature (174)..(175): Xaa can be any naturally occurring amino acid
  misc_feature (178)..(178): Xaa can be any naturally occurring amino acid
  misc_feature (181)..(183): Xaa can be any naturally occurring amino acid
  misc_feature (185)..(185): Xaa can be any naturally occurring amino acid
  misc_feature (189)..(189): Xaa can be any naturally occurring amino acid
  misc_feature (191)..(191): Xaa can be any naturally occurring amino acid
  misc_feature (193)..(193): Xaa can be any naturally occurring amino acid
  misc_feature (201)..(201): Xaa can be any naturally occurring amino acid
  misc_feature (206)..(206): Xaa can be any naturally occurring amino acid
  misc_feature (214)..(215): Xaa can be any naturally occurring amino acid
  misc_feature (217)..(218): Xaa can be any naturally occurring amino acid
  misc_feature (220)..(221): Xaa can be any naturally occurring amino acid
  misc_feature (223)..(225): Xaa can be any naturally occurring amino acid
  misc_feature (227)..(228): Xaa can be any naturally occurring amino acid
  misc_feature (230)..(230): Xaa can be any naturally occurring amino acid
  misc_feature (232)..(232): Xaa can be any naturally occurring amino acid
APAQWRRPGPPSAGCRRCAASGAPPAAVAPARRRSGSGRGAGMGLAGVCALRRSAGYILVGGAGGQSAAAAARRCSEGEWASGGVRSFSRAAAAMAPIKVGDAIPAVEVFEGEPGNKVNLAELFKGKKGVLFGVPGAFTPGCSKTHLAXEFVGXRLKALXGQREFQGXLALSRXXKEXPLXXXRXWGRXHXGXERPRVRLXGLDPXGGPFGKGXXTXXLXXAXXXEXXGXVX

SEQ ID NO: 912866 - protein, 702 aa, Homo sapiens
MASPPCEEAVVSEEITSRSPVRADLPISLFWGTARIHCGQLRATHPNVLALPPCCVLSVLELELGGISVMPVVWQESWSGEGLIDGVVTMLAPQVEVIVICLVSKEACERKAGDCAEFIVGHLSKILGERETCYSFVQPRVSQSYLITDSSPHPLTHLTPFFFFHITSTGTWIPLGNTKIIKGSYLLSPHQLYITRHCGEHFYIHLSICPVAQSGATRYLHFTNEEAEVQRAKITCPELHSKIQIQLDLRAGLVELQYCTTPKHFIPEASSILSFVNNIAGNIFRLKIGDFFSLGHVSVLKDYYTISDDISNRQNGHFSRNVPLLNVQVRKKIFMVGGTYRVYNRILKLGYTFFRKVCILSVCVSCVSFPTCEMPVQVLYQAGSLTLAGLSVVHELLSDWGWAGRRYRISFFPLLEPRTFKAKELWEKNGAVIMAVRRPGCFLCREVSADEDLFRERILASRGHCFPARTKGREASFSLLPTCSVLLFALGISLICALFFFFLNNSPSPTGVSNTSQFPLVLPGLSPCAVPSESWTIFQFNQGRDQVQFHASDAQQQIYDVPGLLLIRVWSVPPCDEAAVSEETLQGYLLEQTCLSLFPWGALRVHRGQLRATFSHVSSASLLCALSIESVAQWDFSHASSAFGMRVCRKLELTDWVVSRLAPRREDIIYFVGDGAYQWKEGTVIVETQNASVRRNIATTWI

SEQ ID NO: 912867 - protein, 246 aa, Homo sapiens
WIYFFVKRSRGVDAVYEMSFLQDPSFFTMGMWSIGAGALGAAALALLLANTDVFLSKPQKAALEYLEDIDLKTLEKEPRTFKAKELWEKNGAVIMAVRRPGCFLCREEAADLSSLKSMLDQLGVPLYAVVKEHIRTEVKDFQPYFKGEIFLDEKKKFYGPQRRKMMFMGFIRLGVWYNFFRAWNGGFSGNLEGEGFILGGVFVVGSGKQGILLEHREKEFGDKVNLLSVLEAAKMIKPQTLASEKK

SEQ ID NO: 912868 - protein, 229 aa, Homo sapiens
MSFLQDPSFFTMGMWSIGAGALGAAALALLLANTDVFLSKPQKAALEYLEDIDLKTLEKEPRTFKAKELWEKNGAVIMAVRRPGCFLCREEAADLSSLKSMLDQLGVPLYAVVKEHIRTEVKDFQPYFKGEIFLDEKKKFYGPQRRKMMFMGFIRLGVWYNFFRAWNGGFSGNLEGEGFILGGVFVVGSGKQGILLEHREKEFGDKVNLLSVLEAAKMIKPQTLASEKK

SEQ ID NO: 912869 - protein, 245 aa, Homo sapiens
MDRGVGEIGRGDAVYEMSFLQDPSFFTMGMWSIGAGALGAAALALLLANTDVFLSKPQKAALEYLEDIDLKTLEKEPRTFKAKELWEKNGAVIMAVRRPGCFLCREEAADLSSLKSMLDQLGVPLYAVVKEHIRTEVKDFQPYFKGEIFLDEKKKFYGPQRRKMMFMGFIRLGVWYNFFRAWNGGFSGNLEGEGFILGGVFVVGSGKQGILLEHREKEFGDKVNLLSVLEAAKMIKPQTLASEKK

SEQ ID NO: 912870 - protein, 252 aa, Homo sapiens
MKFQLPCGSSNAFFLLLNLQKCQMSFLQDPSFFTMGMWSIGAGALGAAALALLLANTDVFLSKPQKAALEYLEDIDLKTLEKEPRTFKAKELWEKNGAVIMAVRRPGCFLCREEAADLSSLKSMLDQLGVPLYAVVKEHIRTEVKDFQPYFKGEIFLDEKKKFYGPQRRKMMFMGFIRLGVWYNFFRAWNGGFSGNLEGEGFILGGVFVVGSGKQGILLEHREKEFGDKVNLLSVLEAAKMIKPQTLASEKK

SEQ ID NO: 912871 - protein, 585 aa, Homo sapiens
MASPPCEEAVVSEEITSRSPVRADLPISLFWGTARIHCGQLRATHPNVLALPPCCVLSVLELELGGISVMPVVWQESWSGEGLIDGVVTMLAPQVEVIVICLVSKEACERKAGDCAEFIVGHLSKILGERETCYSFVQPRVSQSYLITDSSPHPLTHLTPFFFFHITSTGTWIPLGNTKIIKGSYLLSPHQLYITRHCGEHFYIHLSICPVAQSGATRYLHFTNEEAEVQRAKITCPELHSKIQIQLDLRAGLVELQYCTTPKHFIPEASSILSFVNNIAGNIFRLKIGDFFSLGHVSVLKDYYTISDDISNRQNGHFSRNVPLLNVQVRKKIFMVGGTYRVYNRILKLGYTFFRKVCILSVCVSCVSFPTCEMPVQVLYQAGSLTLAGLSVVHELLSDWGWAGRRYRISFFPLLEPRTFKAKELWEKNGAVIMAVRRPGCFLCREEAADLSSLKSMLDQLGVPLYAVVKEHIRTEVKDFQPYFKGEIFLDEKKKFYGPQRRKMMFMGFIRLGVWYNFFRAWNGGFSGNLEGEGFILGGVFVVGSGKQGILLEHREKEFGDKVNLLSVLEAAKMIKPQTLASEKK

SEQ ID NO: 912872 - protein, 229 aa, Homo sapiens; identical to SEQ ID NO: 912868

SEQ ID NO: 912873 - protein, 229 aa, Homo sapiens; identical to SEQ ID NO: 912868

SEQ ID NO: 912874 - protein, 709 aa, Homo sapiens
MTLLLRLYVHAHHIRTLLKWRLKKLDAKGNNDRFYSITTAEGESPQYRTELSSNLCRGDGILKGEGGGSNRTREVQNYKKLVRRLVNVIRLSVSTNFSNLFIKVRILASHRDQESALSFLIIIDKGMAPRKSEKHIPVQQKIHISPKGTERIYNCKFYKVCPLRRGRDWVPWLMPIIPALWVAKWVHHLRSGVQEQPGQHGETLSLLKIQKLACCGGAHLYSQLLGWLRQENRLNPGGGGCSEPGSRHCTSAWVTECDSISRKTREIEKPMIRHWLKQMVNSFGSLELPQAGTQRGLGYSLRQGLELLETMLVFVQVSPCPGGAKLFVLKINDLQLSRFQWAVWVGLSFCFFFFFMYRVLLCHLGYSVISGPSHGSLQLQTGCKLFWLSLPSYWAYRWMPPYPTDFIFVGMGVSLYCPGWSQTPGLPKCLDYRCKPPHVASLCISNRFQVILMFCWSMGHNFEKHGSKGLYRLKSLISVGFGLEVSAAFDKHCRFPFYLFDKLRIHMQRNARKFKERKKMSLLYKLVVLNLGYTVESPGAGVGGGVQCEKLLNQNLWGRPQATFFFFFLDRSCLSPRLECSNAIMAHCRLNFWAQVISSHLSLPSSWDYRRGLPHPTNFKIFCRGKLLYYLAQAGLELLGSSSHPASAFQSSGITDMSHSTRPTIFLKAPGDDSNMQPRLKTTTLKGSASSVEDQHTHVRRPYLEPGCP

SEQ ID NO: 912875 - protein, 229 aa, Homo sapiens; identical to SEQ ID NO: 912868

SEQ ID NO: 912876 - protein, 229 aa, Homo sapiens; identical to SEQ ID NO: 912868

SEQ ID NO: 912877 - protein, 229 aa, Homo sapiens; identical to SEQ ID NO: 912868

SEQ ID NO: 912878 - protein, 229 aa, Homo sapiens; identical to SEQ ID NO: 912868

SEQ ID NO: 912879 - protein, 152 aa, Homo sapiens
MAVRRPGCFLCREEAADLSSLKSMLDQLGVPLYAVVKEHIRTEVKDFQPYFKGEIFLDEKKKFYGPQRRKMMFMGFIRLGVWYNFFRAWNGGFSGNLEGEGFILGGVFVVGSGKQGILLEHREKEFGDKVNLLSVLEAAKMIKPQTLASEKK

SEQ ID NO: 912880 - protein, 178 aa, Homo sapiens
PLLSTGEDKEPGLQREPDTLCGGPQPAGTDVPEPLCLLQEAADLSSLKSMLDQLGVPLYAVVKEHIRTEVKDFQPYFKGEIFLDEKKKFYGPQRRKMMFMGFIRLGVWYNFFRAWNGGFSGNLEGEGFILGGVFVVGSGKQGILLEHREKEFGDKVNLLSVLEAAKMIKPQTLASEKK

SEQ ID NO: 912881 - protein, 498 aa, Homo sapiens
ECAKPKGRLGHKRRQLPCLSLPPACIQAPPSPAALGPGSPEARGPYSGWGSGRRSPEGWRTESCQRRLGAGPGGPALLGPRPLVSSGVSQAPYQARPGSLALICTGPASSGRCAARGEREETGPPGAGRRRAGPGAAHFPWGGPTRRPRLSWPSEAHEEARPNAGAWSIEAGPSRDSRAWPDAGNHTLAQTASPDGTEPGHSPGCKNSAGVSTPTSGSMCPPQAQAEVGPTMTEKAEMVCAPSPSPAARPKAASPGPPQVEEVGHRGGSSPPRLPPGVPVISLGHSRPPGVAMPTTELGTLRPPLLQLSTLGTAPPTLALHYHPHPFLNSVYIGPAGPFSIFPSSRLKRRPSHCELDLAEGHQPQKVARRVFTNSRERWRQQNVNGAFAELRKLLPTHPPDRKLSKNEVLRLAMKYIGFLVRLLRDQAAALAAGPTPPGPRKRPVHRVPDDGARRGSGRRAEAAARSQPAPPADPDGSPGGAARPIKMEQTALSPEVR

SEQ ID NO: 912882 - protein, 131 aa, Homo sapiens
MAEPDYIEDDNPELIRPQKLINPVKTSRNHQDLHRELLMNQKRGLAPQNKPELQKVMEKRKRDQVIKQKEEEAQKKKSDLEIELLKRQQKLEQLELEKQKLQEEQENAPEFVKVKGNLRRTGQEVAQAQES

SEQ ID NO: 912883 - protein, 204 aa, Homo sapiens
REPPCAGLACGPGRRPRSRPRAASGRRRAVGPLGAAAGAGSELGGSRAPLCARRDSPPEDIDHKDSYLITRSIMAEPDYIEDDNPELIRPQKLINPVKTSRNHQDLHRELLMNQKRGLAPQNKPELQKVMEKRKRDQVIKQKEEEAQKKKSDLEIELLKRQQKLEQLELEKQKLQEEQENAPEFVKVKGNLRRTGQEVAQAQES

SEQ ID NO: 912884 - protein, 131 aa, Homo sapiens; identical to SEQ ID NO: 912882

SEQ ID NO: 912885 - protein, 107 aa, Homo sapiens
RSPQDYSRSSQRNFLNQKRGLAPQNKPELQKVMEKRKRDQVIKQKEEEAQKKKSDLEIELLKRQQKLEQLELEKQKLQEEQENAPEFVKVKGNLRRTGQEVAQAQES

SEQ ID NO: 912886 - protein, 204 aa, Homo sapiens; identical to SEQ ID NO: 912883

SEQ ID NO: 912887 - protein, 148 aa, Homo sapiens
REPPCAGLACGPGRRPRSRPRAASGRRRAVGPLGAAAGAGSELGGSRAPLCARRDSPPEDIDHKDSYLITRSIMAEPDYIEDDNPELIRPQKLINPVKTSRNHQDLHRELLMNQKRTGLPLREADPLQVAITVVASSASRLLQSRVPF

SEQ ID NO: 912888 - protein, 131 aa, Homo sapiens; identical to SEQ ID NO: 912882

SEQ ID NO: 912889 - protein, 192 aa, Homo sapiens
ECFSLNLNCGSFDIQKESSLWGWLILVLGAFLHRSKELPQSEDSPPEDIDHKDSYLITRSIMAEPDYIEDDNPELIRPQKLINPVKTSRNHQDLHRELLMNQKRGLAPQNKPELQKVMEKRKRDQVIKQKEEEAQKKKSDLEIELLKRQQKLEQLELEKQKLQEEQENAPEFVKVKGNLRRTGQEVAQAQES

SEQ ID NO: 912890 - protein, 204 aa, Homo sapiens; identical to SEQ ID NO: 912883

SEQ ID NO: 912891 - protein, 104 aa, Homo sapiens
  misc_feature (8)..(8): Xaa can be any naturally occurring amino acid
GSFEFFFXILTMKLLMVLMLAALSQHCYAGSGCPLLENVISKTINPQVSKTEYKELLQEFIDDNATTNAIDELKECFLNQTDETLSNVEVFMQLIYDSSLCDLF

SEQ ID NO: 912892 - protein, 113 aa, Homo sapiens
HSGFLDPCHPRLNTDSSSLTMKLLMVLMLAALSQHCYAGSGCPLLENVISKTINPQVSKTEYKELLQEFIDDNATTNAIDELKECFLNQTDETLSNVEVFMQLIYDSSLCDLF

SEQ ID NO: 912893 - protein, 767 aa, Homo sapiens
FPGLESDLSTLIVWLSKNRSIQHLALGKNFNNMKSKNLTPVLDNLVQMIQDEESPLQSLSLADSKLKTEVTIIINALGSNTSLTKVDISGNGMGDMGAKMLAKALQINTKLRTVIWDKNNITAQGFQDIAVAMEKNYTLRFMPIPMYDASQALKTNPEKTEDALQKIENYLLRNHETRKYLQEQAYRLQQGIVTSTTQQMIDRICVKVQDHLNSLRNCGGDAIQEDLKSAERLMRDAKNSKTLLPNLYHVGGASWAGASGLLSSPIQETLESMAGEVTRVVDEQLKALLESMVDAAENLCPNVMKKAHIRQDLIHASTEKISIPRTFVKNVLLEQSGIDILNKISEVKLTVASFLSDRIVDEILDALSHCHHKLADHFSRRGKTLPQQESLEIELAEEKPVKRSIITVEELTEIERLEDLDTCMMTPKSKRKSIHSRMLRPVSRAFEMEFDLDKALEEVPIHIEDPPFPSLRQEKRSSGFISELPSEEGKKLEHFTKLRPKRNKKQQPTQAAVCAANIVSQDGEQNGLMGRVDEGVDEFFTKKVTKMDSKKWSTRGSESHELNEGGDEKKKRDSRKSSGFLNLIKSRSKSERPPTILMTEEPSSPKGAVRSPPVDCPRKDTKAAEHNGNSERIEEIKTPDSFEESQGEEIGKVERSDSKSSPQAGRRYGVQVMGSGLLAEMKAKQVQRTALVWEHQKRIPKQNPKRKQAPGLGAHPAHLRARSPSCSPPNPVWQHGPSSRRNQEPPHGLMTFQTLHLARKLPFFHLS

SEQ ID NO: 912894 - protein, 758 aa, Homo sapiens
FPGLESDLSTLIVWLSKNRSIQHLALGKNFNNMKSKNLTPVLDNLVQMIQDEESPLQSLSLADSKLKTEVTIIINALGSNTSLTKVDISGNGMGDMGAKMLAKALQINTKLRTVIWDKNNITAQGFQDIAVAMEKNYTLRFMPIPMYDASQALKTNPEKTEDALQKIENYLLRNHETRKYLQEQAYRLQQGIVTSTTQQMIDRICVKVQDHLNSLRNCGGDAIQEDLKSAERLMRDAKNSKTLLPNLYHVGGASWAGASGLLSSPIQETLESMAGEVTRVVDEQLKALLESMVDAAENLCPNVMKKAHIRQDLIHASTEKISIPRTFVKNVLLEQSGIDILNKISEVKLTVASFLSDRIVDESWMHSHIAIINWLTISADVARPFLNKEKPVKRSIITVEELTEIERLEDLDTCMMTPKSKRKSIHSRMLRPVSRAFEMEFDLDKALEEVPIHIEDPPFPSLRQEKRSSGFISELPSEEGKKLEHFTKLRPKRNKKQQPTQAAVCAANIVSQDGEQNGLMGRVDEGVDEFFTKKVTKMDSKKWSTRGSESHELNEGGDEKKKRDSRKSSGFLNLIKSRSKSERPPTILMTEEPSSPKGAVRSPPVDCPRKDTKAAEHNGNSERIEEIKTPDSFEESQGEEIGKVERSDSKSSPQAGRRYGVQVMGSGLLAEMKAKQVQRTALVWEHQKRIPKQNPKRKQAPGLGAHPAHLRARSPSCSPPNPVWQHGPSSRRNQEPPHGLMTFQTLHLARKLPFFHLS

SEQ ID NO: 912895 - protein, 671 aa, Homo sapiens
LVLEVSIALQINTKLRTVIWDKNNITAQGFQDIAVAMEKNYTLRFMPIPMYDASQALKTNPEKTEDALQKIENYLLRNHETRKYLQEQAYRLQQGIVTSTTQQMIDRICVKVQDHLNSLRNCGGDAIQEDLKSAERLMRDAKNSKTLLPNLYHVGGASWAGASGLLSSPIQETLESMAGEVTRVVDEQLKALLESMVDAAENLCPNVMKKAHIRQDLIHASTEKISIPRTFVKNVLLEQSGIDILNKISEVKLTVASFLSDRIVDEILDALSHCHHKLADHFSRRGKTLPQQESLEIELAEEKPVKRSIITVEELTEIERLEDLDTCMMTPKSKRKSIHSRMLRPVSRAFEMEFDLDKALEEVPIHIEDPPFPSLRQEKRSSGFISELPSEEGKKLEHFTKLRPKRNKKQQPTQAAVCAANIVSQDGEQNGLMGRVDEGVDEFFTKKVTKMDSKKWSTRGSESHELNEGGDEKKKRDSRKSSGFLNLIKSRSKSERPPTILMTEEPSSPKGAVRSPPVDCPRKDTKAAEHNGNSERIEEIKTPDSFEESQGEEIGKVERSDSKSSPQAGRRYGVQVMGSGLLAEMKAKQVQRTALVWEHQKRIPKQNPKRKQAPGLGAHPAHLRARSPSCSPPNPVWQHGPSSRRNQEPPHGLMTFQTLHLARKLPFFHLS

SEQ ID NO: 912896 - protein, 767 aa, Homo sapiens; identical to SEQ ID NO: 912893

SEQ ID NO: 912897 - protein, 124 aa, Homo sapiens [sequence omitted]

SEQ ID NO: 912898 - protein, 323 aa, Homo sapiens; identical to SEQ ID NO: 813767

SEQ ID NO: 912899 - protein, 152 aa, Homo sapiens
MKLFRLSAGRAAQTRQVCSRRPRGRVPRSLQIELRQNTSQKAAGDVDIGDAAYYFERDIKGESLFQGRGGLDLRVRGEPLQVERTLIYYLDEIPPKFSMKRLTAGLIAVIVVVVVALVAGMAVLVITNRRKSGKYKKVEIKELGELRKEPSL

SEQ ID NO: 912900 - protein, 323 aa, Homo sapiens; identical to SEQ ID NO: 813767

SEQ ID NO: 912901 - protein, 323 aa, Homo sapiens; identical to SEQ ID NO: 813767

SEQ ID NO: 912902 - protein, 323 aa, Homo sapiens; identical to SEQ ID NO: 813767

SEQ ID NO: 912903 - protein, 349 aa, Homo sapiens
MSKSKDDAPHELESQFILRLPPEYASTVRRAVQSGHVNLKDRLTIELHPDGRHGIVRVDRVPLASKLVDLPCVMESLKTIDKKTFYKTADICQMLVSTVDGDLYPPVEEPVASTDPKASKKKDKDKEKKFIWNHGITLPLKNVRKRRFRKTAKKKYIESPDVEKEVKRLLSTDAEAVSTRWEIIAEDETKEAENQGLDISSPGMSGHRQGHDSLEHDELREIFNDLSSSSEDEDETQHQDEEDINIIDTEEDLERQLQDKLNESDEQHQENEGTNQLVMGIQKQIDNMKGKLQETQDRAKRQEDLIMKVENLALKNRFQAVLDELKQKEDREKEQLSSLQEELESLLEK

SEQ ID NO: 912904 - protein, 271 aa, Homo sapiens
MSKSKDDAPHELESQFILRLPPEYASTVRRAVQSGHVNLKDRLTIELHPDGRHGIVRVDRVPLASKLVDLPCVMESLKTIDKKTFYKTADICQMLVSTVDGDLYPPVEEPVASTDPKASKKKDKDKEKKFIWNHGITLPLKNVRKRRFRKTAKKKYIESPDVEKEVKRLLSTDAEAVSTRWEIIAEDETKEAENQGLDISSPGMSGHRQGHDSLEHDELREIFNDLSSSSEDEDETQHQDEEDINIIDTEEDLERQLQDKLNESDEQHQEK

SEQ ID NO: 912905 - protein, 349 aa, Homo sapiens; identical to SEQ ID NO: 912903

SEQ ID NO: 912906 - protein, 250 aa, Homo sapiens
MSKSKDDAPHELESQFILRLPPEYASTVRRAVQSGHVNLKDRLTIELHPDGRHGIVRVDRVPLASKLVDLPCVMESLKTIDKKTFYKTADICQMLVSTVDGDLYPPVEEPVASTDPKASKKKDKDKEKKFIWNHGITLPLKNVRKRRFRKTAKKKYIESPDVEKEVKRLLSTDAEAVSTRWEIIAEDETKEAENQGLDISSPGMSGHRQGHDSLEHDELREIFNDLSSSSEDEDETQHQDEKMIVGKLQD

SEQ ID NO: 912907 - protein, 98 aa, Homo sapiens
PPAPRRDVALPFLLGRRPGRRAGEVRGLVMRAAPLGKISRCPSRALSSVIGSGSLCQAAGRIKETTRRRSALSRLAPCGLLFPSLRPGETELIIVTGL

SEQ ID NO: 912908 - protein, 132 aa, Homo sapiens
PPAPRRDVALPFLLGRRPGRRAGEVRGLVMRAAPLGKISRCPSRALSSVIGSGSLCQAAGRIKETTRRRSALSRLAPCGLLFPSLRPGETELIIVTGLWSLALSSRLECNGTISAHCNLRLLNSTNSSASAS

SEQ ID NO: 912909 - protein, 132 aa, Homo sapiens; identical to SEQ ID NO: 912908

SEQ ID NO: 912910 - protein, 349 aa, Homo sapiens; identical to SEQ ID NO: 912903

SEQ ID NO: 912911 - protein, 276 aa, Homo sapiens [sequence omitted]

SEQ ID NO: 912912 - protein, 255 aa, Homo sapiens
LALGSVLATGASQEDRDHHQLWIQASDRYQLSCKKFIWNHGITLPLKNVRKRRFRKTAKKKYIESPDVEKEVKRLLSTDAEAVSTRWEIIAEDETKEAENQGLDISSPGMSGHRQGHDSLEHDELREIFNDLSSSSEDEDETQHQDEEDINIIDTEEDLERQLQDKLNESDEQHQENEGTNQLVMGIQKQIDNMKGKLQETQDRAKRQEDLIMKVENLALKNRFQAVLDELKQKEDREKEQLSSLQEELESLLEK

SEQ ID NO: 912913 - protein, 218 aa, Homo sapiens
MKRYIISSTKTARQDERITKTADVDVEHKTSSNRHPHSRWNKRTPKQVRAGEGTKIRETKTNHTKTRRLTTHRREIVNAIHRRKEYVAVKHQAAIIPRHDKTITVQPGRLDYKTQENTGGRGIEISSEEEERQQENREEAEKETGEDMRRERSRKKKEGGAKTARDREHNEGERTKRKKEGGGRDKAERQETERDEDERRARRKDEEERVDGAKKEEE

SEQ ID NO: 912914 - protein, 586 aa, Homo sapiens
MVPRTFCKETGYLVLIAVMLVSRTYCDVWMIQNGTLIESGIIGRSRKDFKRYLLNFIAAMPLISLVNNFLKYGLNELKLCFRVRLTKYLYEEYLQAFTYYKMGNLDNRIANPDQLLTQDVEKFCNSVVDLYSNLSKPFLDIVLYIFKLTSAIGAQGPASMMAYLVVSGLFLTRLRRPIGKMTITEQKYEGEYRYVNSRLITNSEEIAFYNGNKREKQTVHSVFRKLVEHLHNFILFRFSMGFIDSIIAKYLATVVGYLVVSRPFLDLSHPRHLKSTHSELLEDYYQSGRMLLRMSQALGRIVLAGREMTRLAGFTARITELMQVLKDLNHGKYERTMVSQQEKGIEGVQVIPLIPGAGEIIIADNIIKFDHVPLATPNGDVLIRDLNFEVRSGANVLICGPNGCGKSSLFRVLGELWPLFGGRLTKPERGKLFYVPQRPYMTLGTLRDQVIYPDGREDQKRKGISDLVLKEYLDNVQLGHILEREGGWDSVQDWMDVLSGGEKQRMAMARLFYHKPQFAILDECTSAVSVDVEGYIYSHCRKVGITLFTVSHRKSLWKHHEYYLHMDGRGNYEFKQITEDTVEFGS

SEQ ID NO: 912915 - protein, 586 aa, Homo sapiens; identical to SEQ ID NO: 912914

SEQ ID NO: 912916 - protein, 426 aa, Homo sapiens [sequence omitted]

SEQ ID NO: 912917 - protein, 138 aa, Homo sapiens
WRGSTHASEKRTGILNLDLVLKEYLDNVQLGHILEREGGWDSVQDWMDVLSGGEKQRMAMARLFYHKPQFAILDECTSAVSVDVEGYIYSHCRKVGITLFTVSHRKSLWKHHEYYLHMDGRGNYEFKQITEDTVEFGS

SEQ ID NO: 912918 - protein, 659 aa, Homo sapiens
MAAFSKYLTARNSSLAGAAFLLLCLLHKRRRALGLHGKKSGKPPLQNNEKEGKKERAVVDKVFFSRLIQILKIMVPRTFCKETGYLVLIAVMLVSRTYCDVWMIQNGTLIESGIIGRSRKDFKRYLLNFIAAMPLISLVNNFLKYGLNELKLCFRVRLTKYLYEEYLQAFTYYKMGNLDNRIANPDQLLTQDVEKFCNSVVDLYSNLSKPFLDIVLYIFKLTSAIGAQGPASMMAYLVVSGLFLTRLRRPIGKMTITEQKYEGEYRYVNSRLITNSEEIAFYNGNKREKQTVHSVFRKLVEHLHNFILFRFSMGFIDSIIAKYLATVVGYLVVSRPFLDLSHPRHLKSTHSELLEDYYQSGRMLLRMSQALGRIVLAGREMTRLAGFTARITELMQVLKDLNHGKYERTMVSQQEKGIEGVQVIPLIPGAGEIIIADNIIKFDHVPLATPNGDVLIRDLNFEVRSGANVLICGPNGCGKSSLFRVLGELWPLFGGRLTKPERGKLFYVPQRPYMTLGTLRDQVIYPDGREDQKRKGISDLVLKEYLDNVQLGHILEREGGWDSVQDWMDVLSGGEKQRMAMARLFYHKPQFAILDECTSAVSVDVEGYIYSHCRKVGITLFTVSHRKSLWKHHEYYLHMDGRGNYEFKQITEDTVEFGS

SEQ ID NO: 912919 - protein, 259 aa, Homo sapiens
RSEVAAAAAAAASPRRLAGTGSAMAAFSKYLTARNSSLAGAAFLLLCLLHKRRRALGLHGKKSGKPPLQNNEKEGKKERAVVDKVFFSRLIQILKIMVPRTFCKETGYLVLIAVMLVSRTYCDVWMIQNGTLIESGIIGRSRKDFKRYLLNFIAAMPLISLVNNFLKYGLNELKLCFRVRLTKYLYEEYLQAFTYYKMGNLDNRIANPDQLLTQDVEKFCNSVVDLYSNLSKPFLDIVLYIFKLTSAIGAQVLGKILWH

SEQ ID NO: 912920 - protein, 659 aa, Homo sapiens; identical to SEQ ID NO: 912918

SEQ ID NO: 912921 - protein, 664 aa, Homo sapiens
RSEVAAAAAAAASPRRLAGTGSAMAAFSKYLTARNSSLAGAAFLLLCLLHKRRRALGLHGKKSGKPPLQNNEKEGKKERAVVDKVFFSRLIQILKIMVPRTFCKETGYLVLIAVMLVSRTYCDVWMIQNGTLIESGIIGRSRKDFKRYLLNFIAAMPLISLVNNFLKYGLNELKLCFRVRLTKYLYEEYLQAFTYYKMGNLDNRIANPDQLLTQDVEKFCNSVVDLYSNLSKPFLDIVLYIFKLTSAIGAQGPASMMAYLVVSGLFLTRLRRPIGKMTITEQKYEGEYRYVNSRLITNSEEIAFYNGNKREKQTVHSVFRKLVEHLHNFILFRFSMGFIDSIIAKYLATVVGYLVVSRPFLDLSHPRHLKSTHSELLEDYYQSGRMLLRMSQALGRIVLAGREMTRLAGFTARITELMQVLKDLNHGKYERTMVSQQEKGIEGVQVIPLIPGAGEIIIADNIIKFDHVPLATPNGDVLIRDLNFEVRSGANVLICGPNGCGKSSLFRVLGELWPLFGGRLTKPERGQVIYPDGREDQKRKGISDLVLKEYLDNVQLGHILEREGGWDSVQDWMDVLSGGEKQRMAMARLFYHKPQFAILDECTSAVSVDVEGYIYSHCRKVGITLFTVSHRKSLWKHHEYYLHMDGRGNYEFKQITEDTVEFGS

SEQ ID NO: 912922 - protein, 664 aa, Homo sapiens
RSEVAAAAAAAASPRRLAGTGSAMAAFSKYLTARNSSLAGAAFLLLCLLHKRRRALGLHGKKSGKPPLQNNEKEGKKERAVVDKVFFSRLIQILKIMVPRTFCKETGYLVLIAVMLVSRTYCDVWMIQNGTLIESGIIGRSRKDFKRYLLNFIAAMPLISLVNNFLKYGLNELKLCFRVRLTKYLYEEYLQAFTYYKMGNLDNRIANPDQLLTQDVEKFCNSVVDLYSNLSKPFLDIVLYIFKLTSAIGAQGPASMMAYLVVSGLFLTRLRRPIGKMTITEQKYEGEYRYVNSRLITNSEEIAFYNGNKREKQTVHSVFRKLVEHLHNFILFRFSMGFIDSIIAKYLATVVGYLVVSRPFLDLSHPRHLKSTHSELLEDYYQSGRMLLRMSQALGRIVLAGREMTRLAGFTARITELMQVLKDLNHGKYERTMVSQQEKGIEGVQVIPLIPGAGEIIIADNIIKFDHVPLATPNGDVLIRDLNFEVRSGANVLICGPNGCGKSSLFRVLGELWPLFGGRLTKPERGKLFYVPQRPYMTLGTLRDQVIYPDGREDQLGHILEREGGWDSVQDWMDVLSGGEKQRMAMARLFYHKPQFAILDECTSAVSVDVEGYIYSHCRKVGITLFTVSHRKSLWKHHEYYLHMDGRGNYEFKQITEDTVEFGS

SEQ ID NO: 912923 - protein, 659 aa, Homo sapiens; identical to SEQ ID NO: 912918

SEQ ID NO: 912924 - protein, 659 aa, Homo sapiens; identical to SEQ ID NO: 912918

SEQ ID NO: 912925 - protein, 435 aa, Homo sapiens
MGRTREAGCVAAGVVIGAGACYCVYRLAWGRDENEKIWDEDEESTDTSEIGVETVKGAKTNAGAGSGAKLQGDSEVKPEVSLGLEDCPGVKEKAHSGSHSGGGLEAKAKALFNTLKEQASAKAGKGARVGTISGNRTLAPSLPCPGGRGGGCHPTRSGSRAGGRASGKSKGKARSKSTRAPATTWPVRRGKFNFPYKIDDILSAPDLQKVLNILERTNDPFIQEVALVTLGNNAAYSFNQNAIRELGGVPIIAKLIKTKDPIIREKTYNALNNLSVNAENQGKIKTYISQVCDDTMVCRLDSAVQMAGLRLLTNMTVTNHYQHLLSYSFPDFFALLFLGNHFTKIQIMKLIINFTENPAMTRELVSCKVPSELISLFNKEWDREILLNILTLFENINDNIKNEGLASSRKEFSRSSLFFLFKESGVCVKKILTKL

SEQ ID NO: 912926 - protein, 453 aa, Homo sapiens
MGRTREAGCVAAGVVIGAGACYCVYRLAWGRDENEKIWDEDEESTDTSEIGVETVKGAKTNAGAGSGAKLQGDSEVKPEVSLGLEDCPGVKEKAHSGSHSGGGLEAKAKALFNTLKEQASAKAGKGARVGTISGNRTLAPSLPCPGGRGGGCHPTRSGSRAGGRASGKSKGKARSKSTRAPATTWPVRRGKFNFPYKIDDILSAPDLQKVLNILERTNDPFIQEVALVTLGNNAAYSFNQNAIRELGGVPIIAKLIKTKDPIIREKTYNALNNLSVNAENQGKIKTYISQVCDDTMVCRLDSAVQMAGLRLLTNMTVTNHYQHLLSYSFPDFFALLFLGNHFTKIQIMKLIINFTENPAMTRELVSCKVPSELISLFNKEWDREILLNILTLFENINDNIKNEGLASSRKEFSRSSLFFLFKESGVCVKKIKALANHNDLVVKVKVLKVLTKL

SEQ ID NO: 912927 - protein, 134 aa, Homo sapiens
SSGINAEWPLRPGLFSFFSFFLFSGVQDVEARGTWWVLWCEIPDFLGSSGRSPVINCADNTGAKNLYIISVKGIKGRLNRLPAAGVGDMVMATVKKGKPELRKKVHPAVVIRQRKSYRRKRWACFFILKIMQES

SEQ ID NO: 912928 - protein, 116 aa, Homo sapiens
  misc_feature (8)..(8): Xaa can be any naturally occurring amino acid
KTARWRTXLKMSKRGTWWVLWCEIPDFLGSSGRSPVINCADNTGAKNLYIISVKGIKGRLNRLPAAGVGDMVMATVKKGKPELRKKVHPAVVIRQRKSYRRKRWACFFILKIMQES

SEQ ID NO: 912929 - protein, 113 aa, Homo sapiens
PRVRGRVGSKRGTWWVLWCEIPDFLGSSGRSPVINCADNTGAKNLYIISVKGIKGRLNRLPAAGVGDMVMATVKKGKPELRKKVHPAVVIRQRKSYRRKRWACFFILKIMQES

SEQ ID NO: 912930 - protein, 116 aa, Homo sapiens; identical to SEQ ID NO: 912928
  misc_feature (8)..(8): Xaa can be any naturally occurring amino acid

SEQ ID NO: 912931 - protein, 112 aa, Homo sapiens
  misc_feature (3)..(3): Xaa can be any naturally occurring amino acid
  misc_feature (6)..(6): Xaa can be any naturally occurring amino acid
  misc_feature (16)..(17): Xaa can be any naturally occurring amino acid
  misc_feature (35)..(35): Xaa can be any naturally occurring amino acid
FFXPAXKNSLLGRGGXXGAKSRFLLKLAGAPPINXADNTGAKNLYIISVKGIKGRLNRLPAAGVGDMVMATVKKGKPELRKKVHPAVVIRQRKSYRRKRWACFFILKIMQES

SEQ ID NO: 912932 - protein, 259 aa, Homo sapiens
MWGARPGALETPSKPHEKGPRGPQRHTGNRGQTMTPKENREPKHKATEIPPKYKPPEDNPKRRDTTPQEHTSENTTRRPQPQRAQSEATVNKNSGPKRGKHNTPQKQHAKPQTAPTQSNTQKHTTANPPPQHDTPQHATNIYGHHIPYSLPSHITLINQFIHTTTLTSSVPFSHNAECHPSVVRSVRVRLLLAALTPGAAISGGRALGVGVESVGDCGVIGRRYGRGQLDWRVERGTTPWRAGGRYTGEAGGRSGRRRE

SEQ ID NO: 912933 - protein, 135 aa, Homo sapiens
DHASRTRGLDPKRPKMSKRSFFLFSGVQDVEARGTWWVLWCEIPDFLGSSGRRPVINCADNTGAKNLYIISVKGIKGRLNRLPAAGVGDMVMATVKKGKPELRKKVHPAVVIRQRKSYRRKRWACFFILKIMQES

SEQ ID NO: 912934 - protein, 133 aa, Homo sapiens
VAITMSPTPAAGSLFSRSFFLFSGVQDVEARGTWWVLWCEIPDFLGSSGRSPVINCADNTGAKNLYIISVKGIKGRLNRLPAAGVGDMVMATVKKGKPELRKKVHPAVVIRQRKSYRRKRWACFFILKIMQES

SEQ ID NO: 912935 - protein, 140 aa, Homo sapiens
SGLGPREEGGRGVKVHIPVSFESTSFFLFSGVQDVEARGTWWVLWCEIPDFLGSSGRSPVINCADNTGAKNLYIISVKGIKGRLNRLPAAGVGDMVMATVKKGKPELRKKVHPAVVIRQRKSYRRKRWACFFILKIMQES

SEQ ID NO: 912936 - protein, 140 aa, Homo sapiens; identical to SEQ ID NO: 912935

SEQ ID NO: 912937 - protein, 140 aa, Homo sapiens; identical to SEQ ID NO: 912935

SEQ ID NO: 912938 - protein, 140 aa, Homo sapiens; identical to SEQ ID NO: 912935

SEQ ID NO: 912939 - protein, 140 aa, Homo sapiens; identical to SEQ ID NO: 912935

SEQ ID NO: 912940 - protein, 140 aa, Homo sapiens; identical to SEQ ID NO: 912935

SEQ ID NO: 912941 - protein, 140 aa, Homo sapiens; identical to SEQ ID NO: 912935

SEQ ID NO: 912942 - protein, 140 aa, Homo sapiens; identical to SEQ ID NO: 912935

SEQ ID NO: 912943 - protein, 118 aa, Homo sapiens
GRLLLLNSRPRRRSKRGTWWVLWCEIPDFLGSSGRSPVINCADNTGAKNLYIISVKGIKGRLNRLPAAGVGDMVMATVKKGKPELRKKVHPAVVIRQRKSYRRKRWACFFILKIMQES

SEQ ID NO: 912944 - protein, 112 aa, Homo sapiens
GLSFNQAVKRGTWWVLWCEIPDFLGSSGRSPVINCADNTGAKNLYIISVKGIKGRLNRLPAAGVGDMVMATVKKGKPELRKKVHPAVVIRQRKSYRRKRWACFFILKIMQES

SEQ ID NO: 912945 - protein, 128 aa, Homo sapiens
KQWYQRRVAITAGAFFFFPAFKMSKRGTWWVLWCEIPDFLGSSGRSPVINCADNTGAKNLYIISVKGIKGRLNRLPAAGVGDMVMATVKKGKPELRKKVHPAVVIRQRKSYRRKRWACFFILKIMQES

SEQ ID NO: 912946 - protein, 128 aa, Homo sapiens; identical to SEQ ID NO: 912945

SEQ ID NO: 912947 - protein, 133 aa, Homo sapiens; identical to SEQ ID NO: 912934

SEQ ID NO: 912948 - protein, 104 aa, Homo sapiens
VAITMSPTPAAGSLFSRSFFLFSGVQDVEARGTWWVLWCEIPDFLGSSGRSPVINCADNTGAKNLYIISVKGIKGRLNRLPAAGVGDMVMATVKKGKPELRKKG

SEQ ID NO: 912949 - protein, 126 aa, Homo sapiens
VAITMSPTPAAGSLFSRSFFLFSGVQDVEARGTWWVLWCEIPDFLGSSGRSPVINCADNTGAKNLYIISVKGIKGRLNRLPAAGVGDMVMATVKKGKPELRKKVHPAVVIRQRKSYRRKVLPLQDQ

SEQ ID NO: 912950 - protein, 136 aa, Homo sapiens
VAITMSPTPAAGSLFSRSFFLFSGVQDVEARGTWWVLWCEIPDFLGSSGRSPVINCADNTGAKNLYIISVKGIKGRLNRLPAAGVGDMVMATVKKGKPELRKKVHPAVVIRQRKSYRRKEEENDPDHFLLPEEEND

SEQ ID NO: 912951 - protein, 124 aa, Homo sapiens
VAITMSPTPAAGSLFSRSFFLFSGVQDVEARGTWWVLWCEIPDFLGSSGRSPVINCADNTGAKNLYIISVKGIKGRLNRLPAAGVGDMVMATVKKGKPELRKKGYIQQCHSQRSHSLKDACFLF

SEQ ID NO: 912952 - protein, 66 aa, Homo sapiens
  misc_feature (61)..(63): Xaa can be any naturally occurring amino acid
LSSTQEEVHQLRRGIEKLRVRIEADEKKQLHIAEKLKERERENDSLKDKVENLERELQMSXXXQES

SEQ ID NO: 912953 - protein, 140 aa, Homo sapiens; identical to SEQ ID NO: 912935

SEQ ID NO: 912954 - protein, 128 aa, Homo sapiens; identical to SEQ ID NO: 912945

SEQ ID NO: 912955 - protein, 113 aa, Homo sapiens; identical to SEQ ID NO: 912929

SEQ ID NO: 912956 - protein, 121 aa, Homo sapiens
DHASRTRGLDPKRPKMSKRGTWWVLWCEIPDFLGSSGRSPVINCADNTGAKNLYIISVKGIKGRLNRLPAAGVGDMVMATVKKGKPELRKKVHPAVVIRQRKSYRRKRWACFFILKIMQES

SEQ ID NO: 912957 - protein, 80 aa, Homo sapiens
GRLLLLNSRPRRRVEAVKGIKGRLNRLPAAGVGDMVMATVKKGKPELRKKVHPAVVIRQRKSYRRKRWACFFILKIMQES

SEQ ID NO: 912958 - protein, 66 aa, Homo sapiens; identical to SEQ ID NO: 912952
  misc_feature (61)..(63): Xaa can be any naturally occurring amino acid

SEQ ID NO: 912959 - protein, 140 aa, Homo sapiens; identical to SEQ ID NO: 912935

SEQ ID NO: 912960 - protein, 140 aa, Homo sapiens; identical to SEQ ID NO: 912935

SEQ ID NO: 912961 - protein, 140 aa, Homo sapiens; identical to SEQ ID NO: 912935

SEQ ID NO: 912962 - protein, 140 aa, Homo sapiens; identical to SEQ ID NO: 912935

SEQ ID NO: 912963 - protein, 140 aa, Homo sapiens; identical to SEQ ID NO: 912935

SEQ ID NO: 912964 - protein, 140 aa, Homo sapiens; identical to SEQ ID NO: 912935

SEQ ID NO: 912965 - protein, 113 aa, Homo sapiens
MPCRSNCVLRKGTWWVLWCEIPDFLGSSGRSPVINCADNTGAKNLYIISVKGIKGRLNRLPAAGVGDMVMATVKKGKPELRKKVHPAVVIRQRKSYRRKRWACFFILKIMQES

SEQ ID NO: 912966 - protein, 106 aa, Homo sapiens
MSKRGTWWVLWCEIPDFLGSSGRSPVINCADNTGAKNLYIISVKGIKGRLNRLPAAGVGDMVMATVKKGKPELRKKVHPAVVIRQRKSYRRKRWACFFILKIMQES

SEQ ID NO: 912967 - protein, 140 aa, Homo sapiens; identical to SEQ ID NO: 912935

SEQ ID NO: 912968 - protein, 133 aa, Homo sapiens; identical to SEQ ID NO: 912934

SEQ ID NO: 912969 - protein, 133 aa, Homo sapiens; identical to SEQ ID NO: 912934

SEQ ID NO: 912970 - protein, 126 aa, Homo sapiens; identical to SEQ ID NO: 912949

SEQ ID NO: 912971 - protein, 124 aa, Homo sapiens
VAITMSPTPAAGSLFSRSFFLFSGVQDVEARGTWWVLWCEIPDFLGSSGRSPVINCADNTGAKNLYIISVKGIKGRLNRLPAAGVGDMVMATVKKGKPELRKKVHHLREGDQGTAEQTSRCWCG

SEQ ID NO: 912972 - protein, 136 aa, Homo sapiens
VAITMSPTPAAGSLFSRSFFLFSGVQDVEARGTWWVLWCEIPDFLGSSGRSPVINCADNTGAKNLYIISVKGIKGRLNRLPAAGVGDMVMATVKKGKPELRKKVHPAVDLKVRHDYMCCFLFCIETSYMILPYIDL

SEQ ID NO: 912973 - protein, 112 aa, Homo sapiens
DHASRTRGLDPKRPKMSKLPFFFFPAFKMSKRGEVLFLEDPPPSVVQWLADSSGAVALGSWGALLSFRPERESQATARALPGPSKVAVGCWRVEMAGSRRECSLDTARSLRE

SEQ ID NO: 912974 - protein, 867 aa, Homo sapiens
RATLSCTWASRKMVVMARLSRPERPDLVFEEEDLPYEEEIMRNQFSVKCWLRYIEFKQGAPKPRLNQLYERALKLLPCSYKLWYRYLKARRAQVKHRCVTDPAYEDVNNCHERAFVFMHKMPRLWLDYCQFLMDQGRVTHTRRTFDRALRALPITQHSRIWPLYLRFLRSHPLPETAVRGYRRFLKLSPESAEEYIEYLKSSDRLDEAAQRLATVVNDERFVSKAGKSNYQLWHELCDLISQNPDKVQSLNVDAIIRGGLTRFTDQLGKLWCSLADYYIRSGHFEKARDVYEEAIRTVMTVRDFTQVFDSYAQFEESMIAAKMETASELGREEEDDVDLELRLARFEQLISRRPLLLNSVLLRQNPHHVHEWHKRVALHQGRPREIINTYTEAVQTVDPFKATGKPHTLWVAFAKFYEDNGQLDDARVILEKATKVNFKQVDDLASVWCQCGELELRHENYDEALRLLRKATALPARRAEYFDGSEPVQNRVYKSLKVWSMLADLEESLGTFQSTKAVYDRILDLRIATPQIVINYAMFLEEHKYFEESFKAYERGISLFKWPNVSDIWSTYLTKFIARYGGRKLERARDLFEQALDGCPPKYAKTLYLLYAQLEEEWGLARHAMAVYERATRAVEPAQQYDMFNIYIKRAAEIYGVTHTRGIYQKAIEVLSDEHAREMCLRFADMECKLGEIDRARAIYSFCSQICDPRTTGAFWQTWKDFEVRHGNEDTIKEMLRIRRSVQATYNTQVNFMASQMLKVSGSATGTVSDLAPGQSGMDDMKLLEQRAEQLAAEAERDQPLRAQSKILFVRSDASREELAELAQQVNPEEIQLGEDEDEDEMDLEPNEVRLEQQSVPAAVFGSLKED

SEQ ID NO: 912975 - protein, 132 aa, Homo sapiens
  misc_feature (115)..(115): Xaa can be any naturally occurring amino acid
  misc_feature (120)..(120): Xaa can be any naturally occurring amino acid
ARGWKNSLPQETASELGREEEDDVDLELRLARFEQLISRRPLLLNSVLLRQNPHHVHEWHKRVALHQGRPREIINTYTEAVQTVDPFKATGKPHTLWVAFAKFYEDNGQLDDARXILGKXTKGELSSRLMTW

SEQ ID NO: 912976 - protein, 877 aa, Homo sapiens
  misc_feature (28)..(29): Xaa can be any naturally occurring amino acid
  misc_feature (33)..(33): Xaa can be any naturally occurring amino acid
LARQSAAGAGGAGQLGVQSSRRRDPRPXXTARXDSLSGHSEMSSCHQWRGHRVTIRRVPKLGMHREVPGVELEGTTNRVTQAVCSAGEDYKLWYRYLKARRAQVKHRCVTDPAYEDVNNCHERAFVFMHKMPRLWLDYCQFLMDQGRVTHTRRTFDRALRALPITQHSRIWPLYLRFLRSHPLPETAVRGYRRFLKLSPESAEEYIEYLKSSDRLDEAAQRLATVVNDERFVSKAGKSNYQLWHELCDLISQNPDKVQSLNVDAIIRGGLTRFTDQLGKLWCSLADYYIRSGHFEKARDVYEEAIRTVMTVRDFTQVFDSYAQFEESMIAAKMETASELGREEEDDVDLELRLARFEQLISRRPLLLNSVLLRQNPHHVHEWHKRVALHQGRPREIINTYTEAVQTVDPFKATGKPHTLWVAFAKFYEDNGQLDDARVILEKATKVNFKQVDDLASVWCQCGELELRHENYDEALRLLRKATALPARRAEYFDGSEPVQNRVYKSLKVWSMLADLEESLGTFQSTKAVYDRILDLRIATPQIVINYAMFLEEHKYFEESFKAYERGISLFKWPNVSDIWSTYLTKFIARYGGRKLERARDLFEQALDGCPPKYAKTLYLLYAQLEEEWGLARHAMAVYERATRAVEPAQQYDMFNIYIKRAAEIYGVTHTRGIYQKAIEVLSDEHAREMCLRFADMECKLGEIDRARAIYSFCSQICDPRTTGAFWQTWKDFEVRHGNEDTIKEMLRIRRSVQATYNTQVNFMASQMLKVSGSATGTVSDLAPGQSGMDDMKLLEQRAEQLAAEAERDQPLRAQSKILFVRSDASREELAELAQQVNPEEIQLGEDEDEDEMDLEPNEVRLEQQSVPAAVFGSLKED

SEQ ID NO: 912977 - protein, 962 aa, Homo sapiens
RATLSCTWASRKMVVMARLSRPERPDLVFEEEDLPYEEEIMRNQFSVKCWLRYIEFKQGAPKPRLNQLYERALKLLPCSYKLWYRYLKARRAQVKHRCVTDPAYEDVNNCHERAFVFMHKFGARRGDESGSGAQSMVVGGAGTGAGLSMLGMGAWIPVASLLGSWAGLSPGAGGFWVPPHLCGGPRCGSATGHRVSVARPWSPWLSPSRLSPHPQMPRLWLDYCQFLMDQGRVTHTRRTFDRALRALPITQHSRIWPLYLRFLRSHPLPETAVRGYRRFLKLSPESAEEYIEYLKSSDRLDEAAQRLATVVNDERFVSKAGKSNYQLWHELCDLISQNPDKVQSLNVDAIIRGGLTRFTDQLGKLWCSLADYYIRSGHFEKARDVYEEAIRTVMTVRDFTQVFDSYAQFEESMIAAKMETASELGREEEDDVDLELRLARFEQLISRRPLLLNSVLLRQNPHHVHEWHKRVALHQGRPREIINTYTEAVQTVDPFKATGKPHTLWVAFAKFYEDNGQLDDARVILEKATKVNFKQVDDLASVWCQCGELELRHENYDEALRLLRKATALPARRAEYFDGSEPVQNRVYKSLKVWSMLADLEESLGTFQSTKAVYDRILDLRIATPQIVINYAMFLEEHKYFEESFKAYERGISLFKWPNVSDIWSTYLTKFIARYGGRKLERARDLFEQALDGCPPKYAKTLYLLYAQLEEEWGLARHAMAVYERATRAVEPAQQYDMFNIYIKRAAEIYGVTHTRGIYQKAIEVLSDEHAREMCLRFADMECKLGEIDRARAIYSFCSQICDPRTTGAFWQTWKDFEVRHGNEDTIKEMLRIRRSVQATYNTQVNFMASQMLKVSGSATGTVSDLAPGQSGMDDMKLLEQRAEQLAAEAERDQPLRAQSKILFVRSDASREELAELAQQVNPEEIQLGEDEDEDEMDLEPNEVRLEQQSVPAAVFGSLKED

SEQ ID NO: 912978 - protein, 361 aa, Homo sapiens
RATLSCTWASRKMVVMARLSRPERPDLVFEEEDLPYEEEIMRNQFSVKCWLRYIEFKQGAPKPRLNQLYERALKLLPCSYKLWYRYLKARRAQVKHRCVTDPAYEDVNNCHERAFVFMHKMPRLWLDYCQFLMDQGRVTHTRRTFDRALRALPITQHSRIWPLYLRFLRSHPLPETAVRGYRRFLKLSPESAEEYIEYLKSSDRLDEAAQRLATVVNDERFVSKAGKSNYQLWHELCDLISQNPDKVQSLNVDAIIRGGLTRFTDQLGKLWCSLADYYIRSGHFEKARDVYEEAIRTVMTVRDFTQVFDSYAQFEESMIAAKMETASELGREEEVAPAFPTEVRLEQQSVPAAVFGSLKED

SEQ ID NO: 912979 - protein, 502 aa, Homo sapiens
AVVPRIRDVETFQAVEALELCWDGRCQVFMRSTPDRHGIDCSAVTRWIEGSPQGWILEASAGIEPLVGYVAAELSKIAESMDAPHERMYTTDEAPSAGVPANEALGRCLGHCRAEYFDGSEPVQNRVYKSLKVWSMLADLEESLGTFQSTKAVYDRILDLRIATPQIVINYAMFLEEHKYFEESFKAYERGISLFKWPNVSDIWSTYLTKFIARYGGRKLERARDLFEQALDGCPPKYAKTLYLLYAQLEEEWGLARHAMAVYERATRAVEPAQQYDMFNIYIKRAAEIYGVTHTRGIYQKAIEVLSDEHAREMCLRFADMECKLGEIDRARAIYSFCSQICDPRTTGAFWQTWKDFEVRHGNEDTIKEMLRIRRSVQATYNTQVNFMASQMLKVSGSATGTVSDLAPGQSGMDDMKLLEQRAEQLAAEAERDQPLRAQSKILFVRSDASREELAELAQQVNPEEIQLGEDEDEDEMDLEPNEVRLEQQSVPAAVFGSLKED

SEQ ID NO: 912980 - protein, 317 aa, Homo sapiens
MAYERGISLFKWPNVSDIWSTYLTKFIARYGGRKLERARDLFEQALDGCPPKYAKTLYLLYAQLEEEWGLARHAMAVYERATRAVEPAQQYDMFNIYIKRAAEIYGVTHTRGIYQKAIEVLSDEHAREMCLRFADMECKLGEIDRARAIYSFCSQICDPRTTGAFWQTWKDFEVRHGNEDTIKEMLRIRRSVQATYNTQVNFMASQMLKVSGSATGTVSDLAPGQSGMDDMKLLEQRAEQLAAEAERDQPLRAQSKILFVRSDASREELAELAQQVNPEEIQLGEDEDEDEMDLEPNEVRLEQQSVPAAVFGSLKED

SEQ ID NO: 912981 - protein, 359 aa, Homo sapiens
HASADAWGFKAYERGISLFKWPNVSDIWSTYLTKFIARYGGRKLERARDLFEQALDGCPPKYAKTLYLLYAQLEEEWGLARHAMAVYERATRAVEPAQQYDMFNIYIKRAAEIYGVTHTRGIYQKAIEVLSDEHAREMCLRFADMECKLGEIDRARAIYSFCSQICDPRVGLWGGTGIRVGGCGGVSQLTGTHTHPCPAPQQTTGAFWQTWKDFEVRHGNEDTIKEMLRIRRSVQATYNTQVNFMASQMLKVSGSATGTVSDLAPGQSGMDDMKLLEQRAEQLAAEAERDQPLRAQSKILFVRSDASREELAELAQQVNPEEIQLGEDEDEDEMDLEPNEVRLEQQSVPAAVFGSLKED

SEQ ID NO: 912982 - protein, 867 aa, Homo sapiens; identical to SEQ ID NO: 912974

SEQ ID NO: 912983 - protein, 841 aa, Homo sapiens
  misc_feature (180)..(180): Xaa can be any naturally occurring amino acid
  misc_feature (182)..(182): Xaa can be any naturally occurring amino acid
RATLSCTWASRKMVVMARLSRPERPDLVFEEEDLPYEEEIMRNQFSVKCWLRYIEFKQGAPKPRLNQLYERALKLLPCSYKLWYRYLKARRAQVKHRCVTDPAYEDVNNCHERAFVFMHKMPRLWLDYCQFLMDQGRVTHTRRTFDRALRALPITQHSRIWPLYLRFLRSHPLPETAAVXAXAPPSYKPELLSSAEAVHCSTSSSLWHELCDLISQNPDKVQSLNVDAIIRGGLTRFTDQLGKLWCSLADYYIRSGHFEKARDVYEEAIRTVMTVRDFTQVFDSYAQFEESMIAAKMETASELGREEEDDVDLELRLARFEQLISRRPLLLNSVLLRQNPHHVHEWHKRVALHQGRPREIINTYTEAVQTVDPFKATGKPHTLWVAFAKFYEDNGQLDDARVILEKATKVNFKQVDDLASVWCQCGELELRHENYDEALRLLRKATALPARRAEYFDGSEPVQNRVYKSLKVWSMLADLEESLGTFQSTKAVYDRILDLRIATPQIVINYAMFLEEHKYFEESFKAYERGISLFKWPNVSDIWSTYLTKFIARYGGRKLERARDLFEQALDGCPPKYAKTLYLLYAQLEEEWGLARHAMAVYERATRAVEPAQQYDMFNIYIKRAAEIYGVTHTRGIYQKAIEVLSDEHAREMCLRFADMECKLGEIDRARAIYSFCSQICDPRTTGAFWQTWKDFEVRHGNEDTIKEMLRIRRSVQATYNTQVNFMASQMLKVSGSATGTVSDLAPGQSGMDDMKLLEQRAEQLAAEAERDQPLRAQSKILFVRSDASREELAELAQQVNPEEIQLGEDEDEDEMDLEPNEVRLEQQSVPAAVFGSLKED

SEQ ID NO: 912984 - protein, 351 aa, Homo sapiens
RATLSCTWASRKMVVMARLSRPERPDLVFEEEDLPYEEEIMRNQFSVKCWLRYIEFKQGAPKPRLNQLYERALKLLPCSYKLWYRYLKARRAQVKHRCVTDPAYEDVNNCHERAFVFMHKMPRLWLDYCQFLMDQGRVTHTRRTFDRALRALPITQHSRIWPLYLRFLRSHPLPETAVRGYRRFLKLSPESAEEYIEYLKSSDRLDEAAQRLATVVNDERFVSKAGKSNYQLWHELCDLISQNPDKVQSLNVDAIIRGGLTRFTDQLGKLWCSLADYYIRSGHFEKARDVYEEAIRTVMTVRDFTQVFDSYAQFEESMIAAKMETASELGREEEVWTWSCAWPAEDDVGIL

SEQ ID NO: 912985 - protein, 292 aa, Homo sapiens
  misc_feature (4)..(4): Xaa can be any naturally occurring amino acid
  misc_feature (7)..(7): Xaa can be any naturally occurring amino acid
TAVXSGXGSEAGWRDLFEQALDGCPPKYAKTLYLLYAQLEEEWGLARHAMAVYERATRAVEPAQQYDMFNIYIKRAAEIYGVTHTRGIYQKAIEVLSDEHAREMCLRFADMECKLGEIDRARAIYSFCSQICDPRTTGAFWQTWKDFEVRHGNEDTIKEMLRIRRSVQATYNTQVNFMASQMLKVSGSATGTVSDLAPGQSGMDDMKLLEQRAEQLAAEAERDQPLRAQSKILFVRSDASREELAELAQQVNPEEIQLGEDEDEDEMDLEPNEVRLEQQSVPAAVFGSLKED

SEQ ID NO: 912986 - protein, 224 aa, Homo sapiens
  misc_feature (16)..(16): Xaa can be any naturally occurring amino acid
APQRVPASAGLMPQNXGVIGLRHHFAIHYPAGGGLWDGLHGVAAVQGITKIKVLAIYSFCSQICDPRTTGAFWQTWKDFEVRHGNEDTIKEMLRIRRSVQATYNTQVNFMASQMLKVSGSATGTVSDLAPGQSGMDDMKLLEQRAEQLAAEAERDQPLRAQSKILFVRSDASREELAELAQQVNPEEIQLGEDEDEDEMDLEPNEVRLEQQSVPAAVFGSLKED

SEQ ID NO: 912987 - protein, 541 aa, Homo sapiens
VIFPVPQLTSGMACTGWTSPLPLCVCLLLTCGFAEAGKLLVVPMDGSHWFTMRSVVEKLILRGHEVVVVMPEVSWQLGRSLNCTVKTYSTSYTLEDLDREFKAFAHAQWKAQVRSIYSLLMGSYNDIFDLFFSNCRSLFNDRKLVEYLKESSFDAVFLDPFDTCGLIVAKYFSLPSVVFARGIFCHYLEEGAQCPAPLSYVPRISLRVLRCHDFQGESTEPHHALGGTFIMPRFFKNALEIASEILQTPVTEYDLYSHTSIWLLRTDFVLDYPKPVMPNMIFIGGINCHQGKPLPMEFEAYINASGEHGIVVFSLGSMVSEIPEKKAMAIADALGKIPQTVLWRYTGTRPSNLANNTILVKWLPQNDLLGHPMTRAFITHAGSHGVYESICNGVPMVMMPLFGDQMDNAKRMETKGAGVTLNVLEMTSEDLENALKAVINDKSYKENIMRLSSLHKDRPVEPLDLAVFWVEFVMRHKGAPHLRPAAHDLTWYQYHSLDVIGFLLAVVLTVAFITFKCCAYGYRKCLGKKGRVKKAHKSKTH

SEQ ID NO: 912988 - protein, 532 aa, Homo sapiens
MACLLRSFQRISAGVFFLALWGMVVGDKLLVVPQDGSHWLSMKDIVEVLSDRGHEIVVVVPEVNLLLKESKYYTRKIYPVPYDQEELKNRYQSFGNNHFAERSFLTAPQTEYRNNMIVIGLYFINCQSLLQDRDTLNFFKESKFDALFTDPALPCGVILAEYLGLPSVYLFRGFPCSLEHTFSRSPDPVSYIPRCYTKFSDHMTFSQRVANFLVNLLEPYLFYCLFSKYEELASAVLKRDVDIITLYQKVSVWLLRYDFVLEYPRPVMPNMVFIGGINCKKRKDLSQEFEAYINASGEHGIVVFSLGSMVSEIPEKKAMAIADALGKIPQTVLWRYTGTRPSNLANNTILVKWLPQNDLLGHPMTRAFITHAGSHGVYESICNGVPMVMMPLFGDQMDNAKRMETKGAGVTLNVLEMTSEDLENALKAVINDKSYKENIMRLSSLHKDRPVEPLDLAVFWVEFVMRHKGAPHLRPAAHDLTWYQYHSLDVIGFLLAVVLTVAFITFKCCAYGYRKCLGKKGRVKKAHKSKTH

SEQ ID NO: 912989 - protein, 538 aa, Homo sapiens
RSKGAMAVESQGGRPLVLGLLLCVLGPVVSHAGKILLIPVDGSHWLSMLGAIQQLQQRGHEIVVLAPDASLYIRDGAFYTLKTYPVPFQREDVKESFVSLGHNVFENDSFLQRVIKTYKKIKKDSAMLLSGCSHLLHNKELMASLAESSFDVMLTDPFLPCSPIVAQYLSLPTVFFLHALPCSLEFEATQCPNPFSYVPRPLSSHSDHMTFLQRVKNMLIAFSQNFLCDVVYSPYATLASEFLQREVTVQDLLSSASVWLFRSDFVKDYPRPIMPNMVFVGGINCLHQNPLSQEFEAYINASGEHGIVVFSLGSMVSEIPEKKAMAIADALGKIPQTVLWRYTGTRPSNLANNTILVKWLPQNDLLGHPMTRAFITHAGSHGVYESICNGVPMVMMPLFGDQMDNAKRMETKGAGVTLNVLEMTSEDLENALKAVINDKSYKENIMRLSSLHKDRPVEPLDLAVFWVEFVMRHKGAPHLRPAAHDLTWYQYHSLDVIGFLLAVVLTVAFITFKCCAYGYRKCLGKKGRVKKAHKSKTH

SEQ ID NO: 912990 - protein, 337 aa, Homo sapiens
FCAWYFSHLLYHSSLDSQLLALGCSSLMARAGWTSPVPLCVCLLLTCGFAEAGKLLVVPMDGSHWFTMQSVVEKLILRGHEVVVVMPEVSWQLERSLNCTVKTYSTSYTLEDQNREFMVFAHAQWKAQAQSIFSLLMSSSSGFLDLFFSHCRSLFNDRKLVEYLKESSFDAVFLDPFDTCGLIVAKYFSLPSVVFTRGILCHHLEEGAQCPAPLSYVPKYLLGFSDAMTFKERVRNHIVHLEEHLLCQYLFKNALEIALKFSKPLFTAYDLYSHTSIWLLRTDFVLDYPKPVMPNMIFIGGINCHQGKPLPMVSHLSFSTLRIIWLWKLKKDSLLNC

SEQ ID NO: 912991 - protein, 333 aa, Homo sapiens
PAAGSGCSSLMARTGWTSPIPLCVSLLLTCGFAEAGKLLVVPMDGSHWFTMQSVVEKLILRGHEVVVVMPEVSWQLGKSLNCTVKTYSTSYTLEDLDREFMDFADAQWKAQVRSLFSLFLSSSNGFFNLFFSHCRSLFNDRKLVEYLKESSFDAVFLDPFDACGLIVAKYFSLPSVVFARGIVCHYLEEGAQCPAPLSYVPRILLGFSDAMTFKERVRNHIMHLEEHLFCQYFSKNVLEIASEILQTPVTAYDLYSHTSIWLLRTDFVLEYPKPVMPNMIFIGGINCHQGKPVPMARIYFFHPTGICPKPESFSLQQSLRKKKKSALAWEHSK

SEQ ID NO: 912992 - protein, 541 aa, Homo sapiens; identical to SEQ ID NO: 912987

SEQ ID NO: 912993 - protein, 541 aa, Homo sapiens; identical to SEQ ID NO: 912987

SEQ ID NO: 912994 - protein, 265 aa, Homo sapiens
MPNMVFIGGINCANGKPLSQEFEAYINASGEHGIVVFSLGSMVSEIPEKKAMAIADALGKIPQTVLWRYTGTRPSNLANNTILVKWLPQNDLLGHPMTRAFITHAGSHGVYESICNGVPMVMMPLFGDQMDNAKRMETKGAGVTLNVLEMTSEDLENALKAVINDKSYKENIMRLSSLHKDRPVEPLDLAVFWVEFVMRHKGAPHLRPAAHDLTWYQYHSLDVIGFLLAVVLTVAFITFKCCAYGYRKCLGKKGRVKKAHKSKTH

SEQ ID NO: 912995 - protein, 281 aa, Homo sapiens
MACLLRSFQRISAGVFFLALWGMVVGDKLLVVPQDGSHWLSMKDIVEVLSDRGHEIVVVVPEVNLLLKESKYYTRKIYPVPYDQEELKNRYQSFGNNHFAERSFLTAPQTEYRNNMIVIGLYFINCQSLLQDRDTLNFFKESKFDALFTDPALPCGVILAEYLGLPSVYLFRGFPCSLEHTFSRSPDPVSYIPRCYTKFSDHMTFSQRVANFLVNLLEPYLFYCLFSKYEELASAVLKRDVDIITLYQKVSVWLLRYDFVLEYPRPVMPNMVFIGGINFCI

SEQ ID NO: 912996 - protein, 222 aa, Homo sapiens
MACLLRSFQRISAGVFFLALWGMVVGDKLLVVPQDGSHWLSMKDIVEVLSDRGHEIVVVVPEVNLLLKESKYYTRKIYPVPYDQEELKNRYQSFGNNHFAERSFLTAPQTEYRNNMIVIGLYFINCQSLLQDRDTLNFFKESKFDALFTDPALPCGVILAEYLGLPSVYLFRGFPCSLEHTFSRSPDPVSYIRPGMHIRPGTHAYLGVWRTVREAITSDGSF

SEQ ID NO: 912997 - protein, 543 aa, Homo sapiens
SQLSVASAEMARGLQVPLPRLATGLLLLLSVQPWAESGKVLVVPTDGSPWLSMREALRELHARGHQAVVLTPEVNMHIKEEKFFTLTAYAVPWTQKEFDRVTLGYTQGFFETEHLLKRYSRSMAIMNNVSLALHRCCVELLHNEALIRHLNATSFDVVLTDPVNLCGAVLAKYLSIPAVFFWRYIPCDLDFKGTQCPNPSSYIPKLLTTNSDHMTFLQRVKNMLYPLALSYICHTFSAPYASLASELFQREVSVVDLVSYASVWLFRGDFVMDYPRPIMPNMVFIGGINCANGKPLSQEFEAYINASGEHGIVVFSLGSMVSEIPEKKAMAIADALGKIPQTVLWRYTGTRPSNLANNTILVKWLPQNDLLGHPMTRAFITHAGSHGVYESICNGVPMVMMPLFGDQMDNAKRMETKGAGVTLNVLEMTSEDLENALKAVINDKSYKENIMRLSSLHKDRPVEPLDLAVFWVEFVMRHKGAPHLRPAAHDLTWYQYHSLDVIGFLLAVVLTVAFITFKCCAYGYRKCLGKKGRVKKAHKSKTH

SEQ ID NO: 912998 - protein, 532 aa, Homo sapiens; identical to SEQ ID NO: 912988

SEQ ID NO: 912999 - protein, 149 aa, Homo sapiens
GSVPAYWAYDQEELKNRYQSFGNNHFAERSFLTAPQTEYRNNMIVIGLYFINCQSLLQDRDTLNFFKESKFDALFTDPALPCGVILAEYLGLPSVYLFRGFPCSLEHTFSRSPDPVSYIRPGMHIRPGTHAYLGVWRTVREAITSDGSF

SEQ ID NO: 913000 - protein, 235 aa, Homo sapiens
MPNMVFIGGINCANGKPLSQEFEAYINASGEHGIVVFSLGSMVSEIPEKKAMAIADALGKIPQTVLWRYTGTRPSNLANNTILVKWLPQNDLLGHPMTRAFITHAGSHGVYESICNGVPMVMMPLFGDQMDNAKRMETKGAGVTLNVLEMTSEDLENALKAVINDKRFQGDFLRPPALQDAGGRGRRSCGVGSATGPHWRTRLPAAHRGGPEPTATPRSPEGTRDHTPGGRNSHR

SEQ ID NO: 913001 - protein, 540 aa, Homo sapiens
PAAGSGCSSLMARTGWTSPIPLCVSLLLTCGFAEAGKLLVVPMDGSHWFTMQSVVEKLILRGHEVVVVMPEVSWQLGKSLNCTVKTYSTSYTLEDLDREFMDFADAQWKAQVRSLFSLFLSSSNGFFNLFFSHCRSLFNDRKLVEYLKESSFDAVFLDPFDACGLIVAKYFSLPSVVFARGIVCHYLEEGAQCPAPLSYVPRILLGFSDAMTFKERVRNHIMHLEEHLFCQYFSKNVLEIASEILQTPVTAYDLYSHTSIWLLRTDFVLEYPKPVMPNMIFIGGINCHQGKPVPMEFEAYINASGEHGIVVFSLGSMVSEIPEKKAMAIADALGKIPQTVLWRYTGTRPSNLANNTILVKWLPQNDLLGHPMTRAFITHAGSHGVYESICNGVPMVMMPLFGDQMDNAKRMETKGAGVTLNVLEMTSEDLENALKAVINDKSYKENIMRLSSLHKDRPVEPLDLAVFWVEFVMRHKGAPHLRPAAHDLTWYQYHSLDVIGFLLAVVLTVAFITFKCCAYGYRKCLGKKGRVKKAHKSKTH

SEQ ID NO: 913002 - protein, 443 aa, Homo sapiens
MACLLRSFQRISAGVFFLALWGMVVGDKLLVVPQDGSHWLSMKDIVEVLSDRGHEIVVVVPEVNLLLKESKYYTRKIYPVPYDQEELKNRYQSFGNNHFAERSFLTAPQTEYRNNMIVIGLYFINCQSLLQDRDTLNFFKESKFDALFTDPALPCGVILAEYLGLPSVYLFRGFPCSLEHTFSRSPDPVSYIPRCYTKFSDHMTFSQRVANFLVNLLEPYLFYCLFSKYEELASAVLKRDVDIITLYQKVSVWLLRYDFVLEYPRPVMPNMVFIGGINCKKRKDLSQEFEAYINASGEHGIVVFSLGSMVSEIPEKKAMAIADALGKIPQTVLWRYTGTRPSNLANNTILVKWLPQNDLLGHPMTRAFITHAGSHGVYESICNGVPMVMMPLFGDQMDNAKRMETKGAGVTLNVLEMTSEDLENALKAVINDKRKKQQSGRQM

SEQ ID NO: 913003 - protein, 440 aa, Homo sapiens
MACLLRSFQRISAGVFFLALWGMVVGDKLLVVPQDGSHWLSMKDIVEVLSDRGHEIVVVVPEVNLLLKESKYYTRKIYPVPYDQEELKNRYQSFGNNHFAERSFLTAPQTEYRNNMIVIGLYFINCQSLLQDRDTLNFFKESKFDALFTDPALPCGVILAEYLGLPSVYLFRGFPCSLEHTFSRSPDPVSYIPRCYTKFSDHMTFSQRVANFLVNLLEPYLFYCLFSKYEELASAVLKRDVDIITLYQKVSVWLLRYDFVLEYPRPVMPNMVFIGGINCKKRKDLSQVFVELLHNEALIRHLNATSFDVVLTDPVNLCAAVLAKYLSIPTVFFLRNIPCDLDFKGTQCPNPSSYIPRLLTTNSDHMTFMQRVKNMLYPLALSYICHAFSAPYASLASELFQREVSVVDILSHASVWLFRGDFVMDYPRPIMPNMVFIGGI

SEQ ID NO: 913004 - protein, 261 aa, Homo sapiens
MRAKDACLKEAVAHENNRALFHAAKAYEQAGMMLKEMQKLPEAVQLIEKASMMYLENGTPDTAAMALERAGKLIENVDPEKAVQLYQQTANVFENEERLRQAVELLGKASRLLVRGRRFDEAALSIQKEKNIYKEIENYPTCYKKTIAQVLVHLHRNDYVAAERCVRESYSIPGFNGSEDCAALEQLLEGYDQQDQDQVSDVCNSPLFKYMDNDYAKLGLSLVVPGGGIKKKSPATPQAKPDGVTATAADEEEDEYSGGLC

SEQ ID NO: 913005 - protein, 261 aa, Homo sapiens; identical to SEQ ID NO: 913004

SEQ ID NO: 913006 - protein, 261 aa, Homo sapiens; identical to SEQ ID NO: 913004

SEQ ID NO: 913007 - protein, 261 aa, Homo sapiens; identical to SEQ ID NO: 913004

SEQ ID NO: 913008 - protein, 261 aa, Homo sapiens; identical to SEQ ID NO: 913004

SEQ ID NO: 913009 - protein, 106 aa, Homo sapiens
QEFGTRAERCVRESYSIPGFNGSEDCAALEQLLEGYDQQDQDQVSDVCNSPLFKYMDNDYAKLGLSLVVPGGGIKKKSPATPQAKPDGVTATAADEEEDEYSGGLC

SEQ ID NO: 913010 - protein, 225 aa, Homo sapiens [sequence omitted]

SEQ ID NO: 913011 - protein, 261 aa, Homo sapiens; identical to SEQ ID NO: 913004

SEQ ID NO: 913012 - protein, 261 aa, Homo sapiens; identical to SEQ ID NO: 913004

SEQ ID NO: 913013 - protein, 387 aa, Homo sapiens
FFSSQAAALLVVLGSSHTLQRARKHSAPGLPDTCALLQPPAASAAAAPSMSGPDVETPSAIQICRIMRPDDANVAGNVHGGTILKMIEEAGAIISTRHCNSQNGERCVAALARVERTDFLSPMCIGEVAHVSAEITYTSKHSVEVQVNVMSENILTGAKKLTNKATLWYVPLSLKNVDKVLEVPPVVYSRQEQEEEGRKRYEAQKLERMETKWRNGDIVQPVLNPEPNTVSYSQSSLIHLVGPSDCTLHGFVHGGVTMKLMDEVAGIVAARHCKTNIVTASVDAINFHDKIRKGCVITISGRMTFTSNKSMEIEVLVDADPVVDSSQKRYRAASAFFTYVSLSQEGRSLPVPQLVPETEDEKKRFEEGKGRYLQMKAKRQGHAEPQP

SEQ ID NO: 913014 - protein, 370 aa, Homo sapiens
MARPGLIHSAPGLPDTCALLQPPAASAAAAPSMSGPDVETPSAIQICRIMRPDDANVAGNVHGGTILKMIEEAGAIISTRHCNSQNGERCVAALARVERTDFLSPMCIGEVAHVSAEITYTSKHSVEVQVNVMSENILTGAKKLTNKATLWYVPLSLKNVDKVLEVPPVVYSRQEQEEEGRKRYEAQKLERMETKWRNGDIVQPVLNPEPNTVSYSQSSLIHLVGPSDCTLHGFVHGGVTMKLMDEVAGIVAARHCKTNIVTASVDAINFHDKIRKGCVITISGRMTFTSNKSMEIEVLVDADPVVDSSQKRYRAASAFFTYVSLSQEGRSLPVPQLVPETEDEKKRFEEGKGRYLQMKAKRQGHAEPQP

SEQ ID NO: 913015 - protein, 370 aa, Homo sapiens; identical to SEQ ID NO: 913014

SEQ ID NO: 913016 - protein, 321 aa, Homo sapiens
MRPDDANVAGNVHGGTILKMIEEAGAIISTRHCNSQNGERCVAALARVERTDFLSPMCIGEVAHVSAEITYTSKHSVEVQVNVMSENILTGAKKLTNKATLWYVPLSLKNVDKVLEVPPVVYSRQEQEEEGRKRYEAQKLERMETKWRNGDIVQPVLNPEPNTVSYSQSSLIHLVGPSDCTLHGFVHGGVTMKLMDEVAGIVAARHCKTNIVTASVDAINFHDKIRKGCVITISGRMTFTSNKSMEIEVLVDADPVVDSSQKRYRAASAFFTYVSLSQEGRSLPVPQLVPETEDEKKRFEEGKGRYLQMKAKRQGHAEPQP

SEQ ID NO: 913017 - protein, 367 aa, Homo sapiens
YNAVCYPQWKRHKGVTIPFFTMYRIIASLKKGNTFQNCGACITGRIMRPDDANVAGNVHGGTILKMIEEAGAIISTRHCNSQNGERCVAALARVERTDFLSPMCIGEVAHVSAEITYTSKHSVEVQVNVMSENILTGAKKLTNKATLWYVPLSLKNVDKVLEVPPVVYSRQEQEEEGRKRYEAQKLERMETKWRNGDIVQPVLNPEPNTVSYSQSSLIHLVGPSDCTLHGFVHGGVTMKLMDEVAGIVAARHCKTNIVTASVDAINFHDKIRKGCVITISGRMTFTSNKSMEIEVLVDADPVVDSSQKRYRAASAFFTYVSLSQEGRSLPVPQLVPETEDEKKRFEEGKGRYLQMKAKRQGHAEPQP

SEQ ID NO: 913018 - protein, 354 aa, Homo sapiens
RGETMLLLRRSLSLNVLRKEVDRACFGEKAKQIMRPDDANVAGNVHGGTILKMIEEAGAIISTRHCNSQNGERCVAALARVERTDFLSPMCIGEVAHVSAEITYTSKHSVEVQVNVMSENILTGAKKLTNKATLWYVPLSLKNVDKVLEVPPVVYSRQEQEEEGRKRYEAQKLERMETKWRNGDIVQPVLNPEPNTVSYSQSSLIHLVGPSDCTLHGFVHGGVTMKLMDEVAGIVAARHCKTNIVTASVDAINFHDKIRKGCVITISGRMTFTSNKSMEIEVLVDADPVVDSSQKRYRAASAFFTYVSLSQEGRSLPVPQLVPETEDEKKRFEEGKGRYLQMKAKRQGHAEPQP

SEQ ID NO: 913019 - protein, 262 aa, Homo sapiens
MARPGLIHSAPGLPDTCALLQPPAASAAAAPSMSGPDVETPSAIQICRIMRPDDANVAGNVHGGTILKMIEEAGAIISTRHCNSQNGERCVAALARVERTDFLSPMCIGEVAHVSAEITYTSKHSVEVQVNVMSENILTGAKKLTNKATLWYVPLSLKNVDKVLEVPPVVYSRQEQEEEGRKRYEAQKLERMETKWRNGDIVQPVLNPEPNTVSYSQSSLIHLVGPSDCTLHGFVHGGVTMKLMDEVAGIVAARHCKTNIGH

SEQ ID NO: 913020 - protein, 256 aa, Homo sapiens
IELVPLTLNLGCGSVRVNVMSKHLTGAKKLTNKATLWYVPLSLKNVDKVLEVPPVVYSRQEQEEEGRKRYEAQKLERMETKWRNGDIVQPVLNPEPNTVSYSQSSLIHLVGPSDCTLHGFVHGGVTMKLMDEVAGIVAARHCKTNIVTASVDAINFHDKIRKGCVITISGRMTFTSNKSMEIEVLVDADPVVDSSQKRYRAASAFFTYVSLSQEGRSLPVPQLVPETEDEKKRFEEGKGRYLQMKAKRQGHAEPQP

SEQ ID NO: 913021 - protein, 130 aa, Homo sapiens
MKLMDEVAGIVAARHCKTNIVTASVDAINFHDKIRKGCVITISGRMTFTSNKSMEIEVLVDADPVVDSSQKRYRAASAFFTYVSLSQEGRSLPVPQLVPETEDEKKRFEEGKGRYLQMKAKRQGHAEPQP

SEQ ID NO: 913022 - protein, 154 aa, Homo sapiens
MKLMDEVAGIVAARHCKTNIVTASVDAINFHDKIRKAHVCLLALTTQLLPPLPALARSAPCCVITISGRMTFTSNKSMEIEVLVDADPVVDSSQKRYRAASAFFTYVSLSQEGRSLPVPQLVPETEDEKKRFEEGKGRYLQMKAKRQGHAEPQP

SEQ ID NO: 913023 - protein, 108 aa, Homo sapiens
QTYTPKLYLYHSSINATQCCPERREALGRNPRECFRARCRVWEEPSTTNKAAAWLDPRVLGGHLSWGGCFPRGCGTLGLPWTVSALPAPAPACTLEPQAQPHRLVSGW

SEQ ID NO: 913024 - protein, 370 aa, Homo sapiens; identical to SEQ ID NO: 913014

SEQ ID NO: 913025 - protein, 380 aa, Homo sapiens
MKLLARALRLCEFGRQASSRRLVAGQGCVGPRRGCCAPVQVVGPRADLPPCGACITGRIMRPDDANVAGNVHGGTILKMIEEAGAIISTRHCNSQNGERCVAALARVERTDFLSPMCIGEVAHVSAEITYTSKHSVEVQVNVMSENILTGAKKLTNKATLWYVPLSLKNVDKVLEVPPVVYSRQEQEEEGRKRYEAQKLERMETKWRNGDIVQPVLNPEPNTVSYSQSSLIHLVGPSDCTLHGFVHGGVTMKLMDEVAGIVAARHCKTNIVTASVDAINFHDKIRKGCVITISGRMTFTSNKSMEIEVLVDADPVVDSSQKRYRAASAFFTYVSLSQEGRSLPVPQLVPETEDEKKRFEEGKGRYLQMKAKRQGHAEPQP

SEQ ID NO: 913026 - protein, 329 aa, Homo sapiens
MAFQLSRIMRPDDANVAGNVHGGTILKMIEEAGAIISTRHCNSQNGERCVAALARVERTDFLSPMCIGEVAHVSAEITYTSKHSVEVQVNVMSENILTGAKKLTNKATLWYVPLSLKNVDKVLEVPPVVYSRQEQEEEGRKRYEAQKLERMETKWRNGDIVQPVLNPEPNTVSYSQSSLIHLVGPSDCTLHGFVHGGVTMKLMDEVAGIVAARHCKTNIVTASVDAINFHDKIRKGCVITISGRMTFTSNKSMEIEVLVDADPVVDSSQKRYRAASAFFTYVSLSQEGRSLPVPQLVPETEDEKKRFEEGKGRYLQMKAKRQGHAEPQP

SEQ ID NO: 913027 - protein, 327 aa, Homo sapiens
MRGAGQVLPSCGGPSVKLIATECRVAHHSACPAFVKAVPDTAVRERCVAALARVERTDFLSPMCIGEVAHVSAEITYTSKHSVEVQVNVMSENILTGAKKLTNKATLWYVPLSLKNVDKVLEVPPVVYSRQEQEEEGRKRYEAQKLERMETKWRNGDIVQPVLNPEPNTVSYSQSSLIHLVGPSDCTLHGFVHGGVTMKLMDEVAGIVAARHCKTNIVTASVDAINFHDKIRKGCVITISGRMTFTSNKSMEIEVLVDADPVVDSSQKRYRAASAFFTYVSLSQEGRSLPVPQLVPETEDEKKRFEEGKGRYLQMKAKRQGHAEPQP

SEQ ID NO: 913028 - protein, 286 aa, Homo sapiens
MARPGLIHSAPGLPDTCALLQPPAASAAAAPSMSGPDVETPSAIQICRIMRPDDANVAGNVHGGTILKMIEEAGAIISTRHCNSQNGERCVAALARVERTDFLSPMCIGEVAHVSAEITYTSKHSVEVQVNVMSENILTGAKKLTNKATLWYVPLSLKNVDKVLEVPPVVYSRQEQEEEGRKRYEAQKLERMETKWRNGDIVQPVLNPEPNTVSYSQSSLIHLVGPSDCTLHGFVHGGVTMKLMDEVAGIVAARHCKTNIVTASVDAINFHDKIRKARDRGREEAL

SEQ ID NO: 913029 - protein, 250 aa, Homo sapiens
  misc_feature (250)..(250): Xaa can be any naturally occurring amino acid
MARPGLIHSAPGLPDTCALLQPPAASAAAAPSMSGPDVETPSAIQICRIMRPDDANVAGNVHGGTILKMIEEAGAIISTRHCNSQNGERCVAALARVERTDFLSPMCIGEVAHVSAEITYTSKHSVEVQVNVMSENILTGAKKLTNKATLWYVPLSLKNVDKVLEVPPVVYSRQEQEEEGRKRYEAQKLERMETKWRNGDIVQPVLNPEPNTVSYSQSSLIHLVGPSDCTLHGFVHGGVTMKLIPQVPKX

SEQ ID NO: 913030 - protein, 237 aa, Homo sapiens
MARPGLIHSAPGLPDTCALLQPPAASAAAAPSMSGPDVETPSAIQICRIMRPDDANVAGNVHGGTILKMIEEAGAIISTRHCNSQNGERCVAALARVERTDFLSPMCIGEVAHVSAEITYTSKHSVEVQVNVMSENILTGAKKLTNKATLWYVPLSLKNVDKVLEVPPVVYSRQEQEEEGRKRYEAQKLERMETKWRNGDIVQPVLNPATGASSSHGNGPSVQSLRSSPLGQKPNSH

SEQ ID NO: 913031 - protein, 176 aa, Homo sapiens
MALLVVKQRMQMYNSPYHRVTDCVRAVWQNEGAGAFYRSYTTQLTMNVPFQAIHFMTYEFLQEHFNPQRRYNPSSHVLSGACAGAVAAAATTPLDVCKTLLNTQESLALNSHITGHITGMASAFRTVYQVGGVTAYFRGVQARVIYQIPSTAIAWSVYEFFKYLITKRQEEWRAGK

SEQ ID NO: 913032 - protein, 405 aa, Homo sapiens
SGSRRPRALWAAPEADTTGPGGGGGSGGSGGGGGRRSWPGWMELEGRGAGGVAGGPAAGPGRSPGESALLDGWLQRGVGRGAGGGEAGACRPPVRQDPDSGPDYEALPAGATVTTHMVAGAVAGILEHCVMYPIDCVKTRMQSLQPDPAARYRNVLEALWRIIRTEGLWRPMRGLNVTATGAGPAHALYFACYEKLKKTLSDVIHPGGNSHIANGAAGCVATLLHDAAMNPAEVVKQRMQMYNSPYHRVTDCVRAVWQNEGAGAFYRSYTTQLTMNVPFQAIHFMTYEFLQEHFNPQRRYNPSSHVLSGACAGAVAAAATTPLDVCKTLLNTQESLALNSHITGHITGMASAFRTVYQVGGVTAYFRGVQARVIYQIPSTAIAWSVYEFFKYLITKRQEEWRAGK

SEQ ID NO: 913033 - protein, 209 aa, Homo sapiens [sequence omitted]

SEQ ID NO: 913034 - protein, 176 aa, Homo sapiens; identical to SEQ ID NO: 913031

SEQ ID NO: 913035 - protein, 176 aa, Homo sapiens; identical to SEQ ID NO: 913031

SEQ ID NO: 913036 - protein, 205 aa, Homo sapiens
SGSRRPRALWAAPEADTTGPGGGGGSGGSGGGGGRRSWPGWMELEGRGAGGVAGGPAAGPGRSPGESALLDGWLQRGVGRGAGGGEAGACRPPVRQDPDSGPDYEALPAGATVTTHMVAGAVAGILEHCVMYPIDCVKTRMQSLQPDPAARYRNVLEALWRIIRTEGLWRPMRGLNVTATGAGPAHALYFACYEKCGRVCGNITS

SEQ ID NO: 913037 - protein, 209 aa, Homo sapiens [sequence omitted]

SEQ ID NO: 913038 - protein, 176 aa, Homo sapiens; identical to SEQ ID NO: 913031

SEQ ID NO: 913039 - protein, 221 aa, Homo sapiens
MSWSALLALHVAVVFLFAGAAGCVATLLHDAAMNPAEVVKQRMQMYNSPYHRVTDCVRAVWQNEGAGAFYRSYTTQLTMNVPFQAIHFMTYEFLQEHFNPQRRYNPSSHVLSGACAGAVAAAATTPLDVCKTLLNTQESLALNSHITGHITGMASAFRTVYQVGGVTAYFRGVQARVIYQIPSTAIAWSVYEFFKYLSFQALSTCSKAHHSTFDNLSPSWA

SEQ ID NO: 913040 - protein, 245 aa, Homo sapiens
SGSRRPRALWAAPEADTTGPGGGGGSGGSGGGGGRRSWPGWMELEGRGAGGVAGGPAAGPGRSPGESALLDGWLQRGVGRGAGGGEAGACRPPVRQDPDSGPDYEALPAGATVTTHMVAGAVAGILEHCVMYPIDCVKTRMQSLQPDPAARYRNVLEALWRIIRTEGLWRPMRGLNVTATGAGPAHALYFACYEKLKKTLSDVIHPGGNSHIANGIEPSCAGSPTFPTLWALLLSVLSSLSMVWS

SEQ ID NO: 913041 - protein, 164 aa, Homo sapiens
SGSRRPRALWAAPEADTTGPGGGGGSGGSGGGGGRRSWPGWMELEGRGAGGVAGGPAAGPGRSPGESALLDGWLQRGVGRGAGGGEAGACRPPVRQDPDSGPDYEALPAGATVTTHMVAGAVAGILEHCVMYPIDCVKVRPAPGFEPDLGLTRPLGLVRSQDPG

SEQ ID NO: 913042 - protein, 265 aa, Homo sapiens
MQSLQPDPAARYRNVLEALWRIIRTEGLWRPMRGLNVTATGAGPAHALYFACYEKLKKTLSDVIHPGGNSHIANGAAGCVATLLHDAAMNPAEVVKQRMQMYNSPYHRVTDCVRAVWQNEGAGAFYRSYTTQLTMNVPFQAIHFMTYEFLQEHFNPQRRYNPSSHVLSGACAGAVAAAATTPLDVCKTLLNTQESLALNSHITGHITGMASAFRTVYQVGGVTAYFRGVQARVIYQIPSTAIAWSVYEFFKYLITKRQEEWRAGK

SEQ ID NO: 913043 - protein, 234 aa, Homo sapiens
NEARCSDDTAASWSHSTVFWNAPTSMSWSALLALHVAVVFLFAGAAGCVATLLHDAAMNPAEVVKQRMQMYNSPYHRVTDCVRAVWQNEGAGAFYRSYTTQLTMNVPFQAIHFMTYEFLQEHFNPQRRYNPSSHVLSGACAGAVAAAATTPLDVCKTLLNTQESLALNSHITGHITGMASAFRTVYQVGGVTAYFRGVQARVIYQIPSTAIAWSVYEFFKYLITKRQEEWRAGK

SEQ ID NO: 913044 - protein, 209 aa, Homo sapiens [sequence omitted]

SEQ ID NO: 913045 - protein, 209 aa, Homo sapiens [sequence omitted]

SEQ ID NO: 913046 - protein, 176 aa, Homo sapiens; identical to SEQ ID NO: 913031

SEQ ID NO: 913047 - protein, 401 aa, Homo sapiens [sequence omitted]

SEQ ID NO: 913048 - protein, 401 aa, Homo sapiens [sequence omitted]

SEQ ID NO: 913049 - protein, 401 aa, Homo sapiens [sequence omitted]

SEQ ID NO: 913050 - protein, 401 aa, Homo sapiens [sequence omitted]

SEQ ID NO: 913051 - protein, 401 aa, Homo sapiens [sequence omitted]

SEQ ID NO: 913052 - protein, 401 aa, Homo sapiens [sequence omitted]

SEQ ID NO: 913053 - protein, 597 aa, Homo sapiens
MLSRGWFHRDLSGLDAETLLKGRGVHGSFLARPSRKNQGDFSLSVRVGDQVTHIRIQNSGDFYDLYGGEKFATLTELVEYYTQQQGVLQDRDGTIIHLKYPLNCSDPTSERWYHGHMSGGQAETLLQAKGEPWTFLVRESLSQPGDFVLSVLSDQPKAGPGSPLRVTHIKVMCEGGRYTVGGLETFDSLTDLVEHFKKTGIEEASGAFVYLRQPYYATRVNAADIENRVLELNKKQESEDTAKAGFWEEFESLQKQEVKNLHQRLEGQRPENKGKNRYKNILPFDHSRVILQGRDSNIPGSDYINANYIKNQLLGPDENAKTYIASQGCLEATVNDFWQMAWQENSRVIVMTTREVEKGRNKCVPYWPEVGMQRAYGPYSVTNCGEHDTTEYKLRTLQVSPLDNGDLIREIWHYQYLSWPDHGVPSEPGGVLSFLDQINQRQESLPHAGPIIVHCSAGIGRTGTIIVIDMLMENISTKGLDCDIDIQKTIQMVRAQRSGMVQTEAQYKFIYVAIAQFIETTKKKLEVLQSQKGQESEYGNITYPPAMKNAHAKASRTSSKHKEDVYENLHTKNKREEKVKKQRSADKEKSKGSLKRK

SEQ ID NO: 913054 - protein, 595 aa, Homo sapiens
MVRWFHRDLSGLDAETLLKGRGVHGSFLARPSRKNQGDFSLSVRVGDQVTHIRIQNSGDFYDLYGGEKFATLTELVEYYTQQQGVLQDRDGTIIHLKYPLNCSDPTSERWYHGHMSGGQAETLLQAKGEPWTFLVRESLSQPGDFVLSVLSDQPKAGPGSPLRVTHIKVMCEGGRYTVGGLETFDSLTDLVEHFKKTGIEEASGAFVYLRQPYYATRVNAADIENRVLELNKKQESEDTAKAGFWEEFESLQKQEVKNLHQRLEGQRPENKGKNRYKNILPFDHSRVILQGRDSNIPGSDYINANYIKNQLLGPDENAKTYIASQGCLEATVNDFWQMAWQENSRVIVMTTREVEKGRNKCVPYWPEVGMQRAYGPYSVTNCGEHDTTEYKLRTLQVSPLDNGDLIREIWHYQYLSWPDHGVPSEPGGVLSFLDQINQRQESLPHAGPIIVHCSAGIGRTGTIIVIDMLMENISTKGLDCDIDIQKTIQMVRAQRSGMVQTEAQYKFIYVAIAQFIETTKKKLEVLQSQKGQESEYGNITYPPAMKNAHAKASRTSSKHKEDVYENLHTKNKREEKVKKQRSADKEKSKGSLKRK

SEQ ID NO: 913055 - protein, 604 aa, Homo sapiens
PTFSCKAPRMVRWFHRDLSGLDAETLLKGRGVHGSFLARPSRKNQGDFSLSVRVGDQVTHIRIQNSGDFYDLYGGEKFATLTELVEYYTQQQGVLQDRDGTIIHLKYPLNCSDPTSERWYHGHMSGGQAETLLQAKGEPWTFLVRESLSQPGDFVLSVLSDQPKAGPGSPLRVTHIKVMCEGGRYTVGGLETFDSLTDLVEHFKKTGIEEASGAFVYLRQPYYATRVNAADIENRVLELNKKQESEDTAKAGFWEEFESLQKQEVKNLHQRLEGQRPENKGKNRYKNILPFDHSRVILQGRDSNIPGSDYINANYIKNQLLGPDENAKTYIASQGCLEATVNDFWQMAWQENSRVIVMTTREVEKGRNKCVPYWPEVGMQRAYGPYSVTNCGEHDTTEYKLRTLQVSPLDNGDLIREIWHYQYLSWPDHGVPSEPGGVLSFLDQINQRQESLPHAGPIIVHCSAGIGRTGTIIVIDMLMENISTKGLDCDIDIQKTIQMVRAQRSGMVQTEAQYKFIYVAIAQFIETTKKKLEVLQSQKGQESEYGNITYPPAMKNAHAKASRTSSKHKEDVYENLHTKNKREEKVKKQRSADKEKSKGSLKRK

SEQ ID NO: 913056 - protein, 578 aa, Homo sapiens
LRLGTRLGVNSPRASRKIQGDFSLSVRVGDQVTHIRIQNSGDFYDLYGGEKFATLTELVEYYTQQQGVLQDRDGTIIHLKYPLNCSDPTSERWYHGHMSGGQAETLLQAKGEPWTFLVRESLSQPGDFVLSVLSDQPKAGPGSPLRVTHIKVMCEGGRYTVGGLETFDSLTDLVEHFKKTGIEEASGAFVYLRQPYYATRVNAADIENRVLELNKKQESEDTAKAGFWEEFESLQKQEVKNLHQRLEGQRPENKGKNRYKNILPFDHSRVILQGRDSNIPGSDYINANYIKNQLLGPDENAKTYIASQGCLEATVNDFWQMAWQENSRVIVMTTREVEKGRNKCVPYWPEVGMQRAYGPYSVTNCGEHDTTEYKLRTLQVSPLDNGDLIREIWHYQYLSWPDHGVPSEPGGVLSFLDQINQRQESLPHAGPIIVHCSAGIGRTGTIIVIDMLMENISTKGLDCDIDIQKTIQMVRAQRSGMVQTEAQYKFIYVAIAQFIETTKKKLEVLQSQKGQESEYGNITYPPAMKNAHAKASRTSSKHKEDVYENLHTKNKREEKVKKQRSADKEKSKGSLKRK

SEQ ID NO: 913057 - protein, 633 aa, Homo sapiens
PTFSCKAPRMVRWFHRDLSGLDAETLLKGRGVHGSFLARPSRKNQGDFSLSVRVGDQVTHIRIQNSGDFYDLYGGEKFATLTELVEYYTQQQGVLQDRDGTIIHLKYPLNCSDPTSERWYHGHMSGGQAETLLQAKGEPWTFLVRESLSQPGDFVLSVLSDQPKAGPGSPLRVTHIKVMCEGGRYTVGGLETFDSLTDLVEHFKKTGIEEASGAFVYLRQPYYATRVNAADIENRVLELNKKQESEDTAKAGFWEEFESLQKQEVKNLHQRLEGQRPENKGKNRYKNILPFDHSRVILQGRDSNIPGSDYINANYIKNQLLGPDENAKTYIASQGCLEATVNDFWQMAWQENSRVIVMTTREVEKGRNKCVPYWPEVGMQRAYGPYSVTNCGEHDTTEYKLRTLQVSPLDNGDLIREIWHYQYLSWPDHGVPSEPGGVLSFLDQINQRQESLPHAGPIIVHCSAGIGRTGTIIVIDMLMENISTKGLDCDIDIQKTIQMVRAQRSGMVQTEAQYKFIYVAIAQFIETTKKKLEVLQSQKGQESEYGNITYPPAMKNAHAKASRTSSKSLESSAGTVAASPVRRGGQRGLPVPGPPVLSPDLHQLPVLAPLHPAADTRRMCMRTCTLRTRGRRK

SEQ ID NO: 913058 - protein, 126 aa, Homo sapiens
MGSPVSLGVSSASWTRSTSGRKVCLTQGPSSCTAAPASAAQAPSLSSTCSWRTSPPRAWTVTLTSRRPSRWCGRSARAWCRRRRSTSSSTWPSPSSLKPLRRSWRSCSRRRARSRSTGTSPIPHSP

SEQ ID NO: 913059 - protein, 454 aa, Homo sapiens
MVRWFHRDLSGLDAETLLKGRGVHGSFLARPSRKNQGDFSLSVRVGDQVTHIRIQNSGDFYDLYGGEKFATLTELVEYYTQQQGVLQDRDGTIIHLKYPLNCSDPTSERWYHGHMSGGQAETLLQAKGEPWTFLVRESLSQPGDFVLSVLSDQPKAGPGSPLRVTHIKVMCEGGRYTVGGLETFDSLTDLVEHFKKTGIEEASGAFVYLRQPYYATRVNAADIENRVLELNKKQESEDTAKAGFWEEFESLQKQEVKNLHQRLEGQRPENKGKNRYKNILPFDHSRVILQGRDSNIPGSDYINANYIKNQLLGPDENAKTYIASQGCLEATVNDFWQMAWQENSRVIVMTTREVEKGRNKCVPYWPEVGMQRAYGPYSVTNCGEHDTTEYKLRTLQVSPLDNGDLIREIWHYQYLSWPDHGVPSEPGGVLSFLDQINQRQESLPHAGPIIVHCR

SEQ ID NO: 913060 - protein, 219 aa, Homo sapiens
MVAAGEPASAPQSPRWSVSMQSWANLHHHLPGDPGHIPSHHWRLRLLLWCLGLELSAGYPPSRGGLDWPLMAPPSFPSAGIGRTGTIIVIDMLMENISTKGLDCDIDIQKTIQMVRAQRSGMVQTEAQYKFIYVAIAQFIETTKKKLEVLQSQKGQESEYGNITYPPAMKNAHAKASRTSSKHKEDVYENLHTKNKREEKVKKQRSADKEKSKGSLKRK

SEQ ID NO: 913061 - protein, 256 aa, Homo sapiens
MVRWFHRDLSGLDAETLLKGRGVHGSFLARPSRKNQGDFSLSVRVGDQVTHIRIQNSGDFYDLYGGEKFATLTELVEYYTQQQGVLQDRDGTIIHLKYPLNCSDPTSERWYHGHMSGGQAETLLQAKGEPWTFLVRESLSQPGDFVLSVLSDQPKAGPGSPLRVTHIKVMCEGGRYTVGGLETFDSLTDLVEHFKKTGIEEASGAFVYLRQPYYATRVNAADIENRVLELNKKQESEDTAKAGFWEEFESLLHSLD

SEQ ID NO: 913062 - protein, 193 aa, Homo sapiens
MLSRGWFHRDLSGLDAETLLKGRGVHGSFLARPSRKNQGDFSLSVRWYHGHMSGGQAETLLQAKGEPWTFLVRESLSQPGDFVLSVLSDQPKAGPGSPLRVTHIKVMCEGGRYTVGGLETFDSLTDLVEHFKKTGIEEASGAFVYLRQPYYATRVNAADIENRVLELNKKQESEDTAKAGFWEEFESLLHSLD

SEQ ID NO: 913063 - protein, 595 aa, Homo sapiens; identical to SEQ ID NO: 913054

SEQ ID NO: 913064 - protein, 597 aa, Homo sapiens; identical to SEQ ID NO: 913053

SEQ ID NO: 913065 - protein, 712 aa, Homo sapiens
KKTGIEEASGAFVYLRQPYYATRVNAADIENRVLELNKKAGSRRKWLITERFFLTWLGPLCTAVPLAQPRPLRPSAVASPSLQRDAVPWGGKGLPPTVDRRQGCLVPTGPLLTALPGPPRWFHRDLSGLDAETLLKGRGVHGSFLARPSRKNQGDFSLSVRVGDQVTHIRIQNSGDFYDLYGGEKFATLTELVEYYTQQQGVLQDRDGTIIHLKYPLNCSDPTSERWYHGHMSGGQAETLLQAKGEPWTFLVRESLSQPGDFVLSVLSDQPKAGPGSPLRVTHIKVMCEGGRYTVGGLETFDSLTDLVEHFKKTGIEEASGAFVYLRQPYYATRVNAADIENRVLELNKKQESEDTAKAGFWEEFESLQKQEVKNLHQRLEGQRPENKGKNRYKNILPFDHSRVILQGRDSNIPGSDYINANYIKNQLLGPDENAKTYIASQGCLEATVNDFWQMAWQENSRVIVMTTREVEKGRNKCVPYWPEVGMQRAYGPYSVTNCGEHDTTEYKLRTLQVSPLDNGDLIREIWHYQYLSWPDHGVPSEPGGVLSFLDQINQRQESLPHAGPIIVHCSAGIGRTGTIIVIDMLMENISTKGLDCDIDIQKTIQMVRAQRSGMVQTEAQYKFIYVAIAQFIETTKKKLEVLQSQKGQESEYGNITYPPAMKNAHAKASRTSSKHKEDVYENLHTKNKREEKVKKQRSADKEKSKGSLKRK

SEQ ID NO: 913066 - protein, 556 aa, Homo sapiens
MLSRGVGDQVTHIRIQNSGDFYDLYGGEKFATLTELVEYYTQQQGVLQDRDGTIIHLKYPLNCSDPTSERWYHGHMSGGQAETLLQAKGEPWTFLVRESLSQPGDFVLSVLSDQPKAGPGSPLRVTHIKVMCEGGRYTVGGLETFDSLTDLVEHFKKTGIEEASGAFVYLRQPYYATRVNAADIENRVLELNKKQESEDTAKAGFWEEFESLQKQEVKNLHQRLEGQRPENKGKNRYKNILPFDHSRVILQGRDSNIPGSDYINANYIKNQLLGPDENAKTYIASQGCLEATVNDFWQMAWQENSRVIVMTTREVEKGRNKCVPYWPEVGMQRAYGPYSVTNCGEHDTTEYKLRTLQVSPLDNGDLIREIWHYQYLSWPDHGVPSEPGGVLSFLDQINQRQESLPHAGPIIVHCSAGIGRTGTIIVIDMLMENISTKGLDCDIDIQKTIQMVRAQRSGMVQTEAQYKFIYVAIAQFIETTKKKLEVLQSQKGQESEYGNITYPPAMKNAHAKASRTSSKHKEDVYENLHTKNKREEKVKKQRSADKEKSKGSLKRK

SEQ ID NO: 913067 - protein, 481 aa, Homo sapiens
MSGGQAETLLQAKGEPWTFLVRESLSQPGDFVLSVLSDQPKAGPGSPLRVTHIKVMCEGGRYTVGGLETFDSLTDLVEHFKKTGIEEASGAFVYLRQPYYATRVNAADIENRVLELNKKQESEDTAKAGFWEEFESLQKQEVKNLHQRLEGQRPENKGKNRYKNILPFDHSRVILQGRDSNIPGSDYINANYIKNQLLGPDENAKTYIASQGCLEATVNDFWQMAWQENSRVIVMTTREVEKGRNKCVPYWPEVGMQRAYGPYSVTNCGEHDTTEYKLRTLQVSPLDNGDLIREIWHYQYLSWPDHGVPSEPGGVLSFLDQINQRQESLPHAGPIIVHCSAGIGRTGTIIVIDMLMENISTKGLDCDIDIQKTIQMVRAQRSGMVQTEAQYKFIYVAIAQFIETTKKKLEVLQSQKGQESEYGNITYPPAMKNAHAKASRTSSKHKEDVYENLHTKNKREEKVKKQRSADKEKSKGSLKRK

SEQ ID NO: 913068 - protein, 622 aa, Homo sapiens
MVRWFHRDLSGLDAETLLKGRGVHGSFLARPSRKNQGDFSLSVRVGDQVTHIRIQNSGDFYDLYGGEKFATLTELVEYYTQQQGVLQDRDGTIIHLKYPLNCSDPTSERWYHGHMSGGQAETLLQAKGEPWTFLVRESLSQPGDFVLSVLSDQPKAGPGSPLRVTHIKVMCEGGRYTVGGLETFDSLTDLVEHFKKTGIEEASGAFVYLRQPYYATRVNAADIENRVLELNKKQESEDTAKAGFWEEFESLQKQEVKNLHQRLEGQRPENKGKNRYKNILPFDHSRVILQGRDSNIPGSDYINANYIKNQLLGPDENAKTYIASQGCLEATVNDFWQMAWQENSRVIVMTTREVEKGRNKCVPYWPEVGMQRAYGPYSVTNCGEHDTTEYKLRTLQVSPLDNGDLIREIWHYQYLSWPDHGVPSEPGGVLSFLDQINQRQESLPHAGPIIVHCSAGIGRTGTIIVIDMLMENISTKGLDCDIDIQKTIQMVRAQRSGMVQTEAQYKFIYVAIAQFIETTKKKLEVLQSQKGQESEYGNITYPPAMKNAHAKASRTSSKHKEDVYENLHTKNKREEKVKKQRSADKEKSKGSLKRNLSPDPVEAFRDGQTHNLNLGVPHSFVI

SEQ ID NO: 913069 - protein, 340 aa, Homo sapiens
EDPHLDMRIGQRPENKGKNRYKNILPFDHSRVILQGRDSNIPGSDYINANYIKNQLLGPDENAKTYIASQGCLEATVNDFWQMAWQENSRVIVMTTREVEKGRNKCVPYWPEVGMQRAYGPYSVTNCGEHDTTEYKLRTLQVSPLDNGDLIREIWHYQYLSWPDHGVPSEPGGVLSFLDQINQRQESLPHAGPIIVHCSAGIGRTGTIIVIDMLMENISTKGLDCDIDIQKTIQMVRAQRSGMVQTEAQYKFIYVAIAQFIETTKKKLEVLQSQKGQESEYGNITYPPAMKNAHAKASRTSSKHKEDVYENLHTKNKREEKVKKQRSADKEKSKGSLKRK

SEQ ID NO: 913070 - protein, 317 aa, Homo sapiens
MVRWFHRDLSGLDAETLLKGRGVHGSFLARPSRKNQGDFSLSVRVGDQVTHIRIQNSGDFYDLYGGEKFATLTELVEYYTQQQGVLQDRDGTIIHLKYPLNCSDPTSERWYHGHMSGGQAETLLQAKGEPWTFLVRESLSQPGDFVLSVLSDQPKAGPGSPLRVTHIKVMCEGGRYTVGGLETFDSLTDLVEHFKKTGIEEASGAFVYLRQPYYATRVNAADIENRVLELNKKQESEDTAKAGFWEEFESLQKQEVKNLHQRLEGQRPENKGKNRYKNILPCEHPGCPIHPGYRPLPSCLPSSHRSPPSTPGGAISP

SEQ ID NO: 913071 - protein, 157 aa, Homo sapiens
MVRWFHRDLSGLDAETLLKGRGVHGSFLARPSRKNQGDFSLSVRVGDQVTHIRIQNSGDFYDLYGGEKFATLTELVEYYTQQQGVLQDRDGTIIHLKYPLNCSDPTSERWYHGHMSGGQAETLLQAKGEPLSPDPVEAFRDGQTHNLNLGVPHSFVI

SEQ ID NO: 913072 - protein, 65 aa, Homo sapiens
GGESEEAAVSRQGEEQGFPQEEVSGAVLRWPWYSSSAWVSSLPCPVSLAPLPSLGGWGGRSLILC

SEQ ID NO: 913073 - protein, 387 aa, Homo sapiens
MGAFLDKPKTEKHNAHGAGNGLRYGLSSMQGWRVEMEDAHTAVVGIPHGLEDWSFFAVYDGHAGSRVANYCSTHLLEHITTNEDFRAAGKSGSALELSVENVKNGIRTGFLKIDEYMRNFSDLRNGMDRSGSTAVGVMISPKHIYFINCGDSRAVLYRNGQVCFSTQDHKPCNPREKERIQNAGGSVMIQRVNGSLAVSRALGDYDYKCVDGKGPTEQLVSPEPEVYEILRAEEDEFIILACDGIWDVMSNEELCEYVKSRLEVSDDLENVCNWVVDTCLHKGSRDNMSIVLVCFSNAPKVSDEAVKKDSELDKHLESRVEEIMEKSGEEGMPDLAHVMRILSAENIPNLPPGGGLAGKRNVIEAVYSRLNPHRESDGGAGDLEDPW

SEQ ID NO: 913074 - protein, 479 aa, Homo sapiens
MGAFLDKPKTEKHNAHGAGNGLRYGLSSMQGWRVEMEDAHTAVVGIPHGLEDWSFFAVYDGHAGSRVANYCSTHLLEHITTNEDFRAAGKSGSALELSVENVKNGIRTGFLKIDEYMRNFSDLRNGMDRSGSTAVGVMISPKHIYFINCGDSRAVLYRNGQVCFSTQDHKPCNPREKERIQNAGGSVMIQRVNGSLAVSRALGDYDYKCVDGKGPTEQLVSPEPEVYEILRAEEDEFIILACDGIWDVMSNEELCEYVKSRLEVSDDLENVCNWVVDTCLHKGSRDNMSIVLVCFSNAPKVSDEAVKKDSELDKHLESRVEEIMEKSGEEGMPDLAHVMRILSAENIPNLPPGGGLAGKRNVIEAVYSRLNPHRESDGASDEAEESGSQGKLVEALRQMRINHRGNYRQLLEEMLTSYRLAKVEGEESPAEPAATATSSNSDAGNPVTMQESHTESESGLAELDSSNEDAGTKMSGEKI

SEQ ID NO: 913075 - protein, 387 aa, Homo sapiens; identical to SEQ ID NO: 913073

SEQ ID NO: 913076 - protein, 479 aa, Homo sapiens; identical to SEQ ID NO: 913074

SEQ ID NO: 913077 - protein, 479 aa, Homo sapiens; identical to SEQ ID NO: 913074

SEQ ID NO: 913078 - protein, 330 aa, Homo sapiens
MGAFLDKPKTEKHNAHGAGNGLRYGLSSMQGWRVEMEDAHTAVVGIPHGLEDWSFFAVYDGHAGSRVANYCSTHLLEHITTNEDFRAAGKSGSALELSVENVKNGIRTGFLKIDEYMRNFSDLRNGMDRSGSTAVGVMISPKHIYFINCGDSRAVLYRNGQVCFSTQDHKPCNPREKERIQNAGGSVMIQRVNGSLAVSRALGDYDYKCVDGKGPTEQLVSPEPEVYEILRAEEDEFIILACDGIWDVMSNEELCEYVKSRLEVSDDLENVCNWVVDTCLHKRLWRSLARKECLILPMSCASCLQKISQICLLGEVLLASVMLLKLFIVD

SEQ ID NO: 913079 - protein, 431 aa, Homo sapiens
MGAFLDKPKTEKHNAHGAGNGLRYGLSSMQGWRVEMEDAHTAVVGIPHGLEDWSFFAVYDGHAGSRVANYCSTHLLEHITTNEDFRAAGKSGSALELSVENVKNGIRTGFLKIDEYMRNFSDLRNGMDRSGSTAVGVMISPKHIYFINCGDSRAVLYRNGQVCFSTQDHKPCNPREKERIQNAGGSVMIQRVNGSLAVSRALGDYDYKCVDGKGPTEQLVSPEPEVYEILRAEEDEFIILACDGIWDVMSNEELCEYVKSRLEVSDDLENVCNWVVDTCLHKGSRDNMSIVLVCFSNAPKVSDEAVKKDSELDKHLESRVEEIMEKSGEEGMPDLAHVMRILSAENIPNLPPGGGLAGKRNVIEAVYSRLNPHRESDGMAVLGTSICKPAESSGDKKGSGWQTFQALRSTRTKRFFCKPERKINPALYNYK

SEQ ID NO: 913080 - protein, 337 aa, Homo sapiens
MGAFLDKPKTEKHNAHGAGNGLRYGLSSMQGWRVEMEDAHTAVVGIPHGLEDWSFFAVYDGHAGSRVANYCSTHLLEHITTNEDFRAAGKSGSALELSVENVKNGIRTGFLKIDEYMRNFSDLRNGMDRSGSTAVGVMISPKHIYFINCGDSRAVLYRNGQVCFSTQDHKPCNPREKERIQNAGGSVMIQRVNGSLAVSRALGDYDYKCVDGKGPTEQLVSPEPEVYEILRAEEDEFIILACDGIWDVMSNEELCEYVKSRLEVSDDLENVCNWVVDTCLHKRLWRSLARKECLILPMSCASCLQKISQICLLGEVLLASSNAIETSKLGVQLEFYM

SEQ ID NO: 913081 - protein, 192 aa, Homo sapiens
MSIVLVCFSNAPKVSDEAVKKDSELDKHLESRVEEIMEKSGEEGMPDLAHVMRILSAENIPNLPPGGGLAGKRNVIEAVYSRLNPHRESDGASDEAEESGSQGKLVEALRQMRINHRGNYRQLLEEMLTSYRLAKVEGEESPAEPAATATSSNSDAGNPVTMQESHTESESGLAELDSSNEDAGTKMSGEKI

SEQ ID NO: 913082 - protein, 330 aa, Homo sapiens; identical to SEQ ID NO: 913078

SEQ ID NO: 913083 - protein, 359 aa, Homo sapiens
MQGWRVEMEDAHTAVVGIPHGLEDWSFFAVYDGHAGSRVANYCSTHLLEHITTNEDFRAAGKSGSALELSVENVKNGIRTGFLKIDEYMRNFSDLRNGMDRSGSTAVGVMISPKHIYFINCGDSRAVLYRNGQVCFSTQDHKPCNPREKERIQNAGGSVMIQRVNGSLAVSRALGDYDYKCVDGKGPTEQLVSPEPEVYEILRAEEDEFIILACDGIWDVMSNEELCEYVKSRLEVSDDLENVCNWVVDTCLHKGSRDNMSIVLVCFSNAPKVSDEAVKKDSELDKHLESRVEEIMEKSGEEGMPDLAHVMRILSAENIPNLPPGGGLAGKRNVIEAVYSRLNPHRESDGGAGDLEDPW

SEQ ID NO: 913084 - protein, 387 aa, Homo sapiens; identical to SEQ ID NO: 913073

SEQ ID NO: 913085 - protein, 386 aa, Homo sapiens
MGAFLDKPKTEKHNAHGAGNGLRYGLSSMQGWRVEMEDAHTAVVGIPHGLEDWSFFAVYDGHAGSRVANYCSTHLLEHITTNEDFRAAGKSGSALELSVENVKNGIRTGFLKIDEYMRNFSDLRNGMDRSGSTAVGVMISPKHIYFINCGDSRAVLYRNGQVCFSTQDHKPCNPREKERIQNAGGSVMIQRVNGSLAVSRALGDYDYKCVDGKGPTEQLVSPEPEVYEILRAEEDEFIILACDGIWDVMSNEELCEYVKSRLEVSDDLENVCNWVVDTCLHKGSRDNMSIVLVCFSNAPKVSDEAVKKDSELDKHLESRVEEIMEKSGEEGMPDLAHVMRILSAENIPNLPPGGGLAGKRNVIEAVYSRLNPHRESDGVSFILFHK

SEQ ID NO: 913086 - protein, 571 aa, Homo sapiens
LPGEGGGRRAAGTGCGGGCGGGGGSSMDWGTELWDQFEVLERHTQWGLDLLDRYVKFVKERTEVEQAYAKQLRSLVKKYLPKRPAKDDPESKFSQQQSFVQILQEVNDFAGQRELVAENLSVRVCLELTKYSQEMKQERKMHFQEGRRAQQQLENGFKQLENSKRKFERDCREAEKAAQTAERLDQDINATKADVEKAKQQAHLRSHMAEESKNEYAAQLQRFNRDQAHFYFSQMPQIFDKLQDMDERRATRLGAGYGLLSEAELEVVPIIAKCLEGMKVAANAVDPKNDSHVLIELHKSGFARPGDVEFEDFSQPMNRAPSDSSLGTPSDGRPELRGPGRSRTKRWPFGKKNKTVVTEDFSHLPPEQQRKRLQQQLEERSRELQKEVDQREALKKMKDVYEKTPQMGDPASLEPQIAETLSNIERLKLEVQKYEAWLAEAESRVLSNRGDSLSRHARPPDPPASAPPDSSSNSASQDTKESSEEPPSEESQDTPIYTEFDEDFEEEPTSPIGHCVAIYHFEGSSEGTISMAEGEDLSLMEEDKGDGWTRVRRKEGGEGYVPTSYLRVTLN

SEQ ID NO: 913087 - protein, 571 aa, Homo sapiens; identical to SEQ ID NO: 913086

SEQ ID NO: 913088 - protein, 627 aa, Homo sapiens
LPGEGGGRRAAGTGCGGGCGGGGGSSMDWGTELWDQFEVLERHTQWGLDLLDRYVKFVKERTEVEQAYAKQLRSLVKKYLPKRPAKDDPESKFSQQQSFVQILQEVNDFAGQRELVAENLSVRVCLELTKYSQEMKQERKMHFQEGRRAQQQLENGFKQLENSKRKFERDCREAEKAAQTAERLDQDINATKADVEKAKQQAHLRSHMAEESKNEYAAQLQRFNRDQAHFYFSQMPQIFDKLQDMDERRATRLGAGYGLLSEAELEVVPIIAKCLEGMKVAANAVDPKNDSHVLIELHKSGFARPGDVEFEDFSQPMNRAPSDSSLGTPSDGRPELRGPGRSRTKRWPFGKKNKPRPPPLSPLGGPVPSALPNGPPSPRSGRDPLAILSEISKSVKPRLASFRSLRGSRGTVVTEDFSHLPPEQQRKRLQQQLEERSRELQKEVDQREALKKMKDVYEKTPQMGDPASLEPQIAETLSNIERLKLEVQKYEAWLAEAESRVLSNRGDSLSRHARPPDPPASAPPDSSSNSASQDTKESSEEPPSEESQDTPIYTEFDEDFEEEPTSPIGHCVAIYHFEGSSEGTISMAEGEDLSLMEEDKGDGWTRVRRKEGGEGYVPTSYLRVTLN

SEQ ID NO: 913089 - protein, 437 aa, Homo sapiens
MKQERKMHFQEGRRAQQQLENGFKQLENSKRKFERDCREAEKAAQTAERLDQDINATKADVEKAKQQAHLRSHMAEESKNEYAAQLQRFNRDQAHFYFSQMPQIFDKLQDMDERRATRLGAGYGLLSEAELEVVPIIAKCLEGMKVAANAVDPKNDSHVLIELHKSGFARPGDVEFEDFSQPMNRAPSDSSLGTPSDGRPELRGPGRSRTKRWPFGKKNKTVVTEDFSHLPPEQQRKRLQQQLEERSRELQKEVDQREALKKMKDVYEKTPQMGDPASLEPQIAETLSNIERLKLEVQKYEAWLAEAESRVLSNRGDSLSRHARPPDPPASAPPDSSSNSASQDTKESSEEPPSEESQDTPIYTEFDEDFEEEPTSPIGHCVAIYHFEGSSEGTISMAEGEDLSLMEEDKGDGWTRVRRKEGGEGYVPTSYLRVTLN

SEQ ID NO: 913090 - protein, 650 aa, Homo sapiens
LPGEGGGRRAAGTGCGGGCGGGGGSSMDWGTELWDQFEVLERHTQWGLDLLDRYVKFVKERTEVEQAYAKQLRSLVKKYLPKRPAKDDPESKFSQQQSFVQILQEVNDFAGQRELVAENLSVRVCLELTKYSQEMKQERKMHFQEGRRAQQQLENGFKQLENVSLQRYSDCGPEAWGQGCGSGVRELPSLSDLDLPSPIGFQYSLDPYLLDDIPIIPETLVSHPAVFGDGGSLTPVLSPTQSKRKFERDCREAEKAAQTAERLDQDINATKADVEKAKQQAHLRSHMAEESKNEYAAQLQRFNRDQAHFYFSQMPQIFDKLQDMDERRATRLGAGYGLLSEAELEVVPIIAKCLEGMKVAANAVDPKNDSHVLIELHKSGFARPGDVEFEDFSQPMNRAPSDSSLGTPSDGRPELRGPGRSRTKRWPFGKKNKTVVTEDFSHLPPEQQRKRLQQQLEERSRELQKEVDQREALKKMKDVYEKTPQMGDPASLEPQIAETLSNIERLKLEVQKYEAWLAEAESRVLSNRGDSLSRHARPPDPPASAPPDSSSNSASQDTKESSEEPPSEESQDTPIYTEFDEDFEEEPTSPIGHCVAIYHFEGSSEGTISMAEGEDLSLMEEDKGDGWTRVRRKEGGEGYVPTSYLRVTLN

SEQ ID NO: 913091 - protein, 586 aa, Homo sapiens
LPGEGGGRRAAGTGCGGGCGGGGGSSMDWGTELWDQFEVLERHTQWGLDLLDRYVKFVKERTEVEQAYAKQLRSLVKKYLPKRPAKDDPESKFSQQQSFVQILQEVNDFAGQRELVAENLSVRVCLELTKYSQEMKQERKMHFQEGRRAQQQLENGFKQLENSKRKFERDCREAEKAAQTAERLDQDINATKADVEKAKQQAHLRSHMAEESKNEYAAQLQRFNRDQAHFYFSQMPQIFDKLQDMDERRATRLGAGYGLLSEAELEVVPIIAKCLEGMKVAANAVDPKNDSHVLIELHKSGFARPGDVEFEDFSQPMNRAPSDSSLGTPSDGRPELRGPGRSRTKRWPFGKKNKTVVTEDFSHLPPEQQRKRLQQQLEERSRELQKEVDQREALKKMKDVYEKTPQMGDPASLEPQIAETLSNIERLKLEVQKYEAWLAEAESRVLSNRGDSLSRHARPPDPPASAPPDSSSNSASQDTKESSEEPPSEESQDTPIYTEFDEDFEEEPTSPIGHCVAIYHFEGPAKRGGGGAPNPLIWSSEGTISMAEGEDLSLMEEDKGDGWTRVRRKEGGEGYVPTSYLRVTLN

SEQ ID NO: 913092 - protein, 115 aa, Homo sapiens
KHPIICRLIHFSNSSSNSASQDTKESSEEPPSEESQDTPIYTEFDEDFEEEPTSPIGHCVAIYHFEGSSEGTISMAEGEDLSLMEEDKGDGWTRVRRKEGGEGYVPTSYLRVTLN

SEQ ID NO: 913093 - protein, 439 aa, Homo sapiens
LPGEGGGRRAAGTGCGGGCGGGGGSSMDWGTELWDQFEVLERHTQWGLDLLDRYVKFVKERTEVEQAYAKQLRSLVKKYLPKRPAKDDPESKFSQQQSFVQILQEVNDFAGQRELVAENLSVRVCLELTKYSQEMKQERKMHFQEGRRAQQQLENGFKQLENSKRKFERDCREAEKAAQTAERLDQDINATKADVEKAKQQAHLRSHMAEESKNEYAAQLQRFNRDQAHFYFSQMPQIFDKLQDMDERRATRLGAGYGLLSEAELEVVPIIAKCLEGMKVAANAVDPKNDSHVLIELHKSGFARPGDVEFEDFSQPMNRAPSDSSLGTPSDGRPELRGPGRSRTKRWPFGKKNKPRPPKPSPPVKTQPTAPLPPTTTPKNTHTTTSAENRRPQSNNRKGTRDPDKDCKNNQKEIGTTLKPNLHTRHHRDTGTRPAHATR

SEQ ID NO: 913094 - protein, 167 aa, Homo sapiens
LPGEGGGRRAAGTGCGGGCGGGGGSSMDWGTELWDQFEVLERHTQWGLDLLDRYVKFVKERTEVEQAYAKQLRSLVKKYLPKRPAKDDPESKFSQQQSFVQILQEVNDFAGQRELVAENLSVRVCLELTKYSQEMKQERKMHFQEGRRAQQQLENGFKQLENVSLQR

SEQ ID NO: 913095 - protein, 154 aa, Homo sapiens
GRRAVGSQNRDPGPSPLLPHHVPCQDQFEVLERHTQWGLDLLDRYVKFVKERTEVEQAYAKQLRSLVKKYLPKRPAKDDPESKFSQQQSFVQILQEVNDFAGQRELVAENLSVRVCLELTKYSQENCLNSGGRGFSELHPSLGNKSETPSQKKK

SEQ ID NO: 913096 - protein, 562 aa, Homo sapiens
GRRAVGSQNRDPGPSPLLPHHVPCQDQFEVLERHTQWGLDLLDRYVKFVKERTEVEQAYAKQLRSLVKKYLPKRPAKDDPESKFSQQQSFVQILQEVNDFAGQRELVAENLSVRVCLELTKYSQEMKQERKMHFQEGRRAQQQLENGFKQLENSKRKFERDCREAEKAAQTAERLDQDINATKADVEKAKQQAHLRSHMAEESKNEYAAQLQRFNRDQAHFYFSQMPQIFDKLQDMDERRATRLGAGYGLLSEAELEVVPIIAKCLEGMKVAANAVDPKNDSHVLIELHKSGFARPGDVEFEDFSQPMNRAPSDSSLGTPSDGRPELRGPGRSRTKRWPFGKKNKTVVTEDFSHLPPEQQRKRLQQQLEERSRELQKEVDQREALKKMKDVYEKTPQMGDPASLEPQIAETLSNIERLKLEVQKYEAWLAEAESRVLSNRGDSLSRHARPPDPPASAPPDSSSNSASQDTKESSEEPPSEESQDTPIYTEFDEDFEEEPTSPIGHCVAIYHFEGSSEGTISMAEGEDLSLMEEDKGDGWTRVRRKEGGEGYVPTSYLRVTLN

SEQ ID NO: 913097 - protein, 544 aa, Homo sapiens
LPGEGGGRRAAGTGCGGGCGGGGGSSMDWGTELWDQFEVLERHTQWGLDLLDRYVKFVKERTEVEQAYAKQLRSLVKKYLPKRPAKDDPESKFSQQQSFVQILQEVNDFAGQRELVAENLSVRVCLELTKYSQEMKQERKMHFQEGRRAQQQLENGFKQLENSKRKFERDCREAEKAAQTAERLDQDINATKADVEKAKQQAHLRSHMAEESKNEYAAQLQRFNRDQAHFYFSQMPQIFDKLQDMDERRATRLGAGYGLLSEAELEVVPIIAKCLEGMKVAANAVDPKNDSHVLIELHKSGFARPGDVEFEDFSQPMNRAPSDSSLGTPSDGRPELRGPGRSRTKRWPFGKKNKTVVTEDFSHLPPEQQRKRLQQQLEERSRELQKEVDQREALKKMKDVYEKTPQMGDPASLEPQIAETLSNIERLKLEVQKYEAWLAEAESRVLSNRGDSLSRHARPPDPPASAPPDSSSNSASQDTKESSEEPPSEESQDTPIYTEFDEDFEEEPTSPIGHCVAIYHFEDLGPPPPPSQGVQRGHYLYGRG

SEQ ID NO: 913098 - protein, 241 aa, Homo sapiens
ISDGCRVWQARLLDPKFSPLPTLQTVVTEDFSHLPPEQQRKRLQQQLEERSRELQKEVDQREALKKMKDVYEKTPQMGDPASLEPQIAETLSNIERLKLEVQKYEAWLAEAESRVLSNRGDSLSRHARPPDPPASAPPDSSSNSASQDTKESSEEPPSEESQDTPIYTEFDEDFEEEPTSPIGHCVAIYHFEGSSEGTISMAEGEDLSLMEEDKGDGWTRVRRKEGGEGYVPTSYLRVTLN

SEQ ID NO: 913099 - protein, 108 aa, Homo sapiens
DLAGSFSSPTGALQDIKESSEEPPSEESQDTPIYTEFDEDFEEEPTSPIGHCVAIYHFEGSSEGTISMAEGEDLSLMEEDKGDGWTRVRRKEGGEGYVPTSYLRVTLN

SEQ ID NO: 913100 - protein, 356 aa, Homo sapiens
LPGEGGGRRAAGTGCGGGCGGGGGSSMDWGTELWDQFEVLERHTQWGLDLLDRYVKFVKERTEVEQAYAKQLRSLVKKYLPKRPAKDDPESKFSQQQSFVQILQEVNDFAGQRELVAENLSVRVCLELTKYSQEMKQERKMHFQEGRRAQQQLENGFKQLENSKRKFERDCREAEKAAQTAERLDQDINATKADVEKAKQQAHLRSHMAEESKNEYAAQLQRFNRDQAHFYFSQMPQIFDKLQDMDERRATRLGAGYGLLSEAELEVVPIIAKCLEGMKVAANAVDPKNDSHVLIELHKSGFARPGDVEFEDFSQPMNRAPSDSSLGTPSDGRPELRGPGRSRTKRWPTAHAGTEL

SEQ ID NO: 913101 - protein, 151 aa, Homo sapiens
MEPVLVLCVHLVHLRSCIYPAHAIDPALFASPVAASGHEKDRITGSQIHKPHQEDHPRNAWRLRSSLRLLHLETQDEDPAWGCQRFFACLTPMTPPGPYGSTQKQFSPTGGQLQPITISSLPQPLSSKHLLPVHPHPFPQTAFEKSLTYEL

SEQ ID NO: 913102 - protein, 151 aa, Homo sapiens; identical to SEQ ID NO: 913101

SEQ ID NO: 913103 - protein, 93 aa, Homo sapiens
PAPRSSGQSACGGRAHGPAGRAGSGRPGRGGATTSCEQRCAPGPPAPSSGFPCGKDVGGPCDLWRHGQICPPMASPETKKMVRPGGGRAEEST

SEQ ID NO: 913104 - protein, 103 aa, Homo sapiens
PAPRSSGQSACGGRAHGPAGRAGSGRPGRGGATTSCEQRCAPGPPAPSSGFPCGKDVGGPCDLWRHGQICPPDLLGEKPSRKLQKDKYRIRVWEKPRGLVSII

SEQ ID NO: 913105 - protein, 72 aa, Homo sapiens
PAPRSSGQSACGGRAHGPAGRAGSGRPGRGGATTSCEQRCAPGPPAPSSGFPCGKDVGGPCDLWRHGQICPP

SEQ ID NO: 913106 - protein, 103 aa, Homo sapiens; identical to SEQ ID NO: 913104

SEQ ID NO: 913107 - protein, 165 aa, Homo sapiens
RQPRAPPGRARVAAEHMGPRAGRARGGRDEEGRRRAASKDVPRDPRHLPVDFLAERMLAVPVTCGDTARSALQPDLLARRRLKRCPSRWLCLSAAWSFVQVFSEPDGFTVIFSGLGNNAGGTMHWNDTRPAHFRILKVVLREAVAECLMDSYSLDVHGGRRTAAG

SEQ ID NO: 913108 - protein, 165 aa, Homo sapiens; identical to SEQ ID NO: 913107

SEQ ID NO: 913109 - protein, 165 aa, Homo sapiens; identical to SEQ ID NO: 913107

SEQ ID NO: 913110 - protein, 165 aa, Homo sapiens; identical to SEQ ID NO: 913107

SEQ ID NO: 913111 - protein, 165 aa, Homo sapiens; identical to SEQ ID NO: 913107

SEQ ID NO: 913112 - protein, 165 aa, Homo sapiens; identical to SEQ ID NO: 913107

SEQ ID NO: 913113 - protein, 165 aa, Homo sapiens; identical to SEQ ID NO: 913107

SEQ ID NO: 913114 - protein, 165 aa, Homo sapiens; identical to SEQ ID NO: 913107

SEQ ID NO: 913115 - protein, 74 aa, Homo sapiens
KGTGDLPGAGPLEWWVLGSFRGPLQVHSLLFSALFCAQKADLCGCIIRVDATQGCHALWYQFGRHWQDGKAGGE

SEQ ID NO: 913116 - protein, 131 aa, Homo sapiens
ATPPYAPPFLFTAYLPRLIKDRITGSQIHKPHQEDHPRNAWRLRSSLRLLHLETQDEDPAWGCQRFFACLTPMTPPGPYGSTQKQFSPTGGQLQPITISSLPQPLSSKHLLPVHPHPFPQTAFEKSLTYEL

SEQ ID NO: 913117 - protein, 165 aa, Homo sapiens; identical to SEQ ID NO: 913107

SEQ ID NO: 913118 - protein, 165 aa, Homo sapiens; identical to SEQ ID NO: 913107

SEQ ID NO: 913119 - protein, 165 aa, Homo sapiens; identical to SEQ ID NO: 913107

SEQ ID NO: 913120 - protein, 96 aa, Homo sapiens
PAPRSSGQSACGGRAHGPAGRAGSGRPGRGGATTSCEQRCAPGPPAPSSGFPCGKDVGGPCDLWRHGQICPPMASPETKKMVRPGGGRAEEVELVC

SEQ ID NO: 913121 - protein, 88 aa, Homo sapiens
RQPRAPPGRARVAAEHMGPRAGRARGGRDEEGRRRAASKDVPRDPRHLPVDFLAERMLAVPVTCGDTARSALQLNWFVELYGWSQPTG

SEQ ID NO: 913122 - protein, 159 aa, Homo sapiens
FGMKAVEAKRPLGQSQAGGSSQGPSRQVAFLPQRPEEAEHPRGAWGHHPASLWENGSRKCPLACVLHLGPRLPSFWKPCLTTGLPLLWESLLTLQLIIDLYVFCMSDTHDSTWTLWLHPEAIQPNRRTASTHYDFISAPTTQQQAPVTCPPPPLPPNCL

SEQ ID NO: 913123 - protein, 112 aa, Homo sapiens
RGLSLSEQQQRLFYTNPPTKLQTLFQKVIRYATFPIAPVNNTTITDWPFEISFQVFCMSDTHDSTWTLWLHPEAIQPNRRTASTHYDFISAPTTQQQAPVTCPPPPLPPNCL

SEQ ID NO: 913124 - protein, 174 aa, Homo sapiens
FNLDKWDSAIDLNLVLLLTQHSFSEPVLVLCVHLVHLRSCIYPAHAIDPALFASPVAASGHEKDRITGSQIHKPHQEDHPRNAWRLRSSLRLLHLETQDEDPAWGCQRFFACLTPMTPPGPYGSTQKQFSPTGGQLQPITISSLPQPLSSKHLLPVHPHPFPQTAFEKSLTYEL

SEQ ID NO: 913125 - protein, 165 aa, Homo sapiens; identical to SEQ ID NO: 913107

SEQ ID NO: 913126 - protein, 165 aa, Homo sapiens; identical to SEQ ID NO: 913107

SEQ ID NO: 913127 - protein, 117 aa, Homo sapiens
PLLSENKNGRLGRDGIVWICLKNMHKTTLPPNSISKSMEAESQECLQTQGLSMGGHGTKSHESDNKLEQKFWKAKEKTVTAHNKQKTFVLSVSIYHPNSQTWRKLLFLSTPTCMLFA

SEQ ID NO: 913128 - protein, 130 aa, Homo sapiens
PAPRSSGQSACGGRAHGPAGRAGSGRPGRGGATTSCEQRCAPGPPAPSSGFPCGKDVGGPCDLWRHGQICPPMGKGGREEEKHRAPEYLRTYRTAGAQDGLPLDTKKEPPGWLDAEERDTRPHDGRGHPH

SEQ ID NO: 913129 - protein, 165 aa, Homo sapiens; identical to SEQ ID NO: 913107

SEQ ID NO: 913130 - protein, 165 aa, Homo sapiens; identical to SEQ ID NO: 913107

SEQ ID NO: 913131 - protein, 165 aa, Homo sapiens; identical to SEQ ID NO: 913107

SEQ ID NO: 913132 - protein, 165 aa, Homo sapiens; identical to SEQ ID NO: 913107

SEQ ID NO: 913133 - protein, 126 aa, Homo sapiens
MDCGRVSLIWTVMRKDRITGSQIHKPHQEDHPRNAWRLRSSLRLLHLETQDEDPAWGCQRFFACLTPMTPPGPYGSTQKQFSPTGGQLQPITISSLPQPLSSKHLLPVHPHPFPQTAFEKSLTYEL

SEQ ID NO: 913134 - protein, 242 aa, Homo sapiens
RALETYQGLGHWSGGCWGASVGPSRSTPCSSLPCFVPRRLTCVDALSGWMQHRAAMLSGISLEGTGRMGRQAGSEVRGPILPLPPCCSLTDSEPVLVLCVHLVHLRSCIYPAHAIDPALFASPVAASGHEKDRITGSQIHKPHQEDHPRNAWRLRSSLRLLHLETQDEDPAWGCQRFFACLTPMTPPGPYGSTQKQFSPTGGQLQPITISSLPQPLSSKHLLPVHPHPFPQTAFEKSLTYEL

SEQ ID NO: 913135 - protein, 165 aa, Homo sapiens; identical to SEQ ID NO: 913107

SEQ ID NO: 913136 - protein, 165 aa, Homo sapiens; identical to SEQ ID NO: 913107

SEQ ID NO: 913137 - protein, 165 aa, Homo sapiens; identical to SEQ ID NO: 913107

SEQ ID NO: 913138 - protein, 165 aa, Homo sapiens; identical to SEQ ID NO: 913107

SEQ ID NO: 913139 - protein, 96 aa, Homo sapiens; identical to SEQ ID NO: 913120

SEQ ID NO: 913140 - protein, 127 aa, Homo sapiens
PAPRSSGQSACGGRAHGPAGRAGSGRPGRGGATTSCEQRCAPGPPAPSSGFPCGKDVGGPCDLWRHGQICPPMASPETKKMVRPGGGRAEEAWTLLLSPPSTYEGVWTVLEQDGLGFRNKRSQKLKT

SEQ ID NO: 913141 - protein, 103 aa, Homo sapiens; identical to SEQ ID NO: 913104

SEQ ID NO: 913142 - protein, 142 aa, Homo sapiens
  misc_feature (136)..(136): Xaa can be any naturally occurring amino acid
  misc_feature (141)..(141): Xaa can be any naturally occurring amino acid
RKLLHSCFREAGLQMGRSRSRSPRRERRRSRSTSRERERRRRERSRSRERDRRRSRSRSPHRRRSRSPRRHRSTSPSPSRLKERRDEEKKETKETKSKERQITEEDLEGKTEEEIEMMKLMGFASFDSTKKVDGSXKCPYXP

SEQ ID NO: 913143 - protein, 172 aa, Homo sapiens
RKLLHSCFREAGLQMGRSRSRSPRRERRRSRSTSRERERRRRERSRSRERDRRRSRSRSPHRRRSRSPRRHRSTSPSPSRLKERRDEEKKETKETKSKERQITEEDLEGKTEEEIEMMKLMGFASFDSTKGKKVDGSVNAYAINVSQKRKYRAVHESKRWIQQTLWISLHEN

SEQ ID NO: 913144 - protein, 172 aa, Homo sapiens; identical to SEQ ID NO: 913143

SEQ ID NO: 913145 - protein, 172 aa, Homo sapiens; identical to SEQ ID NO: 913143

SEQ ID NO: 913146 - protein, 172 aa, Homo sapiens; identical to SEQ ID NO: 913143

SEQ ID NO: 913147 - protein, 189 aa, Homo sapiens [sequence omitted]

SEQ ID NO: 913148 - protein, 189 aa, Homo sapiens [sequence omitted]

SEQ ID NO: 913149 - protein, 172 aa, Homo sapiens; identical to SEQ ID NO: 913143

SEQ ID NO: 913150 - protein, 189 aa, Homo sapiens [sequence omitted]

SEQ ID NO: 913151 - protein, 118 aa, Homo sapiens
RKLLHSCFREAGLQMGRSRSRSPRRERRRSRSTSRERERRRRERSRSRERDRRRSRSRSPHRRRSRSPRRHRSTSPSPSRLKERRDEEKKETKETKSKERQITEEDLEGKTEEEGEEY

SEQ ID NO: 913152 - protein, 152 aa, Homo sapiens
RKLLHSCFREAGLQMGRSRSRSPRRERRRSRSTSRERERRRRERSRSPRRHRSTSPSPSRLKERRDEEKKETKETKSKERQITEEDLEGKTEEEIEMMKLMGFASFDSTKGKKVDGSVNAYAINVSQKRKYRAVHESKRWIQQTLWISLHEN

SEQ ID NO: 913153 - protein, 172 aa, Homo sapiens; identical to SEQ ID NO: 913143

SEQ ID NO: 913154 - protein, 190 aa, Homo sapiens
RKLLHSCFREAGLQMGRSRSRSPRRERRRSRSTSRERERRRRERSRSRERDRRRSRSRSPHRRRSRSPRRHRSTSPSPSRLKERRDEEKKETKETKSKERQITEEDLEGKTEEEIEMMKLMGFASFDSTKGKKVDGSVNAYAINVSQKRKYRQYMNRKGGFNRPLDFIGMAVHESKRWIQQTLWISLHEN

SEQ ID NO: 913155 - protein, 150 aa, Homo sapiens
RKLLHSCFREAGLQMGRSRSRSPRRERRRSRSTSRERERRRRERSRSRERDRRRSRSRSPHRRRSRSPRRHRSTSPSPSRLKERRDEEKKETKETKSKERQITEEDLEGKTEEEIEMMKLMGFASFDSTKAVHESKRWIQQTLWISLHEN

SEQ ID NO: 913156 - protein, 381 aa, Homo sapiens
AELRILSPVGKRGWSPGLVKCDQPARGADFAGWSPEALSQSHKCRGGAFFGGPNEERGRSWPVKRRGWGRGDGESGINTPRRWRLLLCSGFCHCVGGAQLTGPLPLLSSVVAREAPSALLRGVHSGLHSGLHSGLHSGSGGGSEPVGSGGWSRGSGPRCRMAAAVRMNIQMLLEAADYLERREREAEHGYASMLPYNNKDRDALKRRNKSKKNNSSSRSTHNEMEKNRRAHLRLCLEKLKGLVPLGPESSRHTTLSLLTKAKLHIKKLEDCDRKAVHQIDQLQREQRHLKRQLEKLGIERIRMDSIGSTVSSERSDSDREEIDVDVESTDYLTGDLDWSSSSVSDSDERGSMQSLGSDEGYSSTSIKRIKLQDSHKACLGL

SEQ ID NO: 913157 - protein, 189 aa, Homo sapiens [sequence omitted]

SEQ ID NO: 913158 - protein, 175 aa, Homo sapiens
RKLLHSCFREAGLQMGRSRSRSPRRERRRSRSTSRERERRRRERSRSRERDRRRSRSRSPHRRRSRSPRRHRSTSPSPSRLKERRDEEKKETKETKSKERQITEEDLEGKTEEEIEMMKLMGFASFDSTKGKKVDGSVNAYAINVSQKRKYRVCIAPIIMFELINQFFTSNFIMR

SEQ ID NO: 913159 - protein, 109 aa, Homo sapiens
MKFISTSLLLMLLVSSLSPVQGVLEVYYTSLRCRCVQESSVFIPRRFIDRIQILPRGNGCPRKEIIVWKKNKSIVCVDPQAEWIQRMMEVLRKRSSSTLPVPVFKRKIP

SEQ ID NO: 913160 - protein, 109 aa, Homo sapiens; identical to SEQ ID NO: 913159

SEQ ID NO: 913161 - protein, 109 aa, Homo sapiens; identical to SEQ ID NO: 913159

SEQ ID NO: 913162 - protein, 444 aa, Homo sapiens
MSKKGRPQRQRREVHEDAHKQVSPILRRSPDITKSPLTKSEQLLRIDDHDFSMRPGFGGPAIPVGVDVQVESLDSISEVDMDFTMTLYLRHYWKDERLSFPSTNNLSMTFDGRLVKKIWVPDMFFVHSKRSFIHDTTTDNVMLRVQPDGKVLYSLRVTVTAMCNMDFSRFPLDTQTCSLEIESYAYTEDDLMLYWKKGNDSLKTDERISLSQFLIQEFHTTTKLAFYSSTGWYNRLYINFTLRRHIFFFLLQTYFPATLMVMLSWVSFWIDRRAVPARVPLGITTVLTMSTIITGVNASMPRVSYIKAVDIYLWVSFVFVFLSVLEYAAVNYLTTVQERKEQKLREKLPCTSGLPPPRTAMLDGNYSDGEVNDLDNYMPENGEKPDRMMVQLTLASERSSPQRKSQRSSYVSMRIDTHAIDKYSRIIFPAAYILFNLIYWSIFS

SEQ ID NO: 913163 - protein, 468 aa, Homo sapiens
MKAKAVASQNLTNLLSSVTGSISGWPKVKRPQRQRREVHEDAHKQVSPILRRSPDITKSPLTKSEQLLRIDDHDFSMRPGFGGPAIPVGVDVQVESLDSISEVDMDFTMTLYLRHYWKDERLSFPSTNNLSMTFDGRLVKKIWVPDMFFVHSKRSFIHDTTTDNVMLRVQPDGKVLYSLRVTVTAMCNMDFSRFPLDTQTCSLEIESYAYTEDDLMLYWKKGNDSLKTDERISLSQFLIQEFHTTTKLAFYSSTGWYNRLYINFTLRRHIFFFLLQTYFPATLMVMLSWVSFWIDRRAVPARVPLGITTVLTMSTIITGVNASMPRVSYIKAVDIYLWVSFVFVFLSVLEYAAVNYLTTVQERKEQKLREKLPCTSGLPPPRTAMLDGNYSDGEVNDLDNYMPENGEKPDRMMVQLTLASERSSPQRKSQRSSYVSMRIDTHAIDKYSRIIFPAAYILFNLIYWSIFS

SEQ ID NO: 913164 - protein, 462 aa, Homo sapiens
MLAVPNMRFGIFLLWWGWVLATESRMHWPGREVHEMSKKGSPILRRSPDITKSPLTKSEQLLRIDDHDFSMRPGFGGPAIPVGVDVQVESLDSISEVDMDFTMTLYLRHYWKDERLSFPSTNNLSMTFDGRLVKKIWVPDMFFVHSKRSFIHDTTTDNVMLRVQPDGKVLYSLRVTVTAMCNMDFSRFPLDTQTCSLEIESYAYTEDDLMLYWKKGNDSLKTDERISLSQFLIQEFHTTTKLAFYSSTGWYNRLYINFTLRRHIFFFLLQTYFPATLMVMLSWVSFWIDRRAVPARVPLGITTVLTMSTIITGVNASMPRVSYIKAVDIYLWVSFVFVFLSVLEYAAVNYLTTVQERKEQKLREKLPCTSGLPPPRTAMLDGNYSDGEVNDLDNYMPENGEKPDRMMVQLTLASERSSPQRKSQRSSYVSMRIDTHAIDKYSRIIFPAAYILFNLIYWSIFS

SEQ ID NO: 913165 - protein, 415 aa, Homo sapiens
MSKKGRPQRQRREVHEDAHKQVSPILRRSPDITKSPLTKSEQLLRIDDHDFSMRPGFGGPAIPVGVDVQVESLDSISEVDMDFTMTLYLRHYWKDERLSFPSTNNLSMTFDGRLVKKIWVPDMFFVHSKRSFIHDTTTDNVMLRVQPDGKVLYSLRVTVTAMCNMDFSRFPLDTQTCSLEIESYAYTEDDLMLYWKKGNDSLKTDERISLSQFLIQEFHTTTKLAFYSSTGWYNRLYINFTLRRHIFFFLLQTYFPATLMVMLSWVSFWIDRRAVPARVPLGITTVLTMSTIITGVNASMPRVSYIKAVDIYLWVSFVFVFLSVLEYAAVNYLTTVQERKEQKLREKLPCTSGLPPPRTAMLDGNYSDGEVNDLDNYMPENGEKPDRMMVQLTLASERSSPQRKSQRSSYVSMRI

SEQ ID NO: 913166 - protein, 410 aa, Homo sapiens
ARGLIRPSSAAGDRSSEMAGFGAMEKFLVEYKSAVEKKLAEYKCNTNTAIELKFETAFGYKGLKILLYYIAGSLSTMFRVEYASKVDENFDCVEADDVEGKIRQIIPPGFCTNTNDFLSLLEKEVDFKPFGTLLHTYSVLSPTGGENFTFQIYKADMTCRGFREYHERLQTFLMWFIETASFIDVDDERWHYFLVFEKYNKDGATLFATVGYMTVYNYYVYPDKTRPRVSQMLILTPFQGQGHGAQLLETVHRYYTEFPTVLDITAEDPSKSYVKLRDFVLVKLCQDLPCFSREKLMQGFNEDMAIEAQQKFKINKQHARRVYEILRLLVTDMSDAEQYRSYRLDIKRRLISPYKKKQRDLAKMRKCLRPEELTNQMNQIEISMQHEQLEESFQELVEDYRRVIERLAQE

SEQ ID NO: 913167 - protein, 378 aa, Homo sapiens
TRGSTHASAFFPEYTHQLFGDDETAFGYKGLKILLYYIAGSLSTMFRVEYASKVDENFDCVEADDVEGKIRQIIPPGFCTNTNDFLSLLEKEVDFKPFGTLLHTYSVLSPTGGENFTFQIYKADMTCRGFREYHERLQTFLMWFIETASFIDVDDERWHYFLVFEKYNKDGATLFATVGYMTVYNYYVYPDKTRPRVSQMLILTPFQGQGHGAQLLETVHRYYTEFPTVLDITAEDPSKSYVKLRDFVLVKLCQDLPCFSREKLMQGFNEDMAIEAQQKFKINKQHARRVYEILRLLVTDMSDAEQYRSYRLDIKRRLISPYKKKQRDLAKMRKCLRPEELTNQMNQIEISMQHEQLEESFQELVEDYRRVIERLAQE

SEQ ID NO: 913168 - protein, 272 aa, Homo sapiens
RAHISRGEYLDFEIYKADMTCRGFREYHERLQTFLMWFIETASFIDVDDERWHYFLVFEKYNKDGATLFATVGYMTVYNYYVYPDKTRPRVSQMLILTPFQGQGHGAQLLETVHRYYTEFPTVLDITAEDPSKSYVKLRDFVLVKLCQDLPCFSREKLMQGFNEDMAIEAQQKFKINKQHARRVYEILRLLVTDMSDAEQYRSYRLDIKRRLISPYKKKQRDLAKMRKCLRPEELTNQMNQIEISMQHEQLEESFQELVEDYRRVIERLAQE

SEQ ID NO: 913169 - protein, 284 aa, Homo sapiens
NSEAETLYPFTIYYRPDTAHCYDAPSPSNYSLQQAFSNPSLRLLASTLNTCLRFIDAGLMKRWHYLSELFEKYNKDGATLFATVGYMTVYNYYVYPDKTRPRVSQMLILTPFQGQGHGAQLLETVHRYYTEFPTVLDITAEDPSKSYVKLRDFVLVKLCQDLPCFSREKLMQGFNEDMAIEAQQKFKINKQHARRVYEILRLLVTDMSDAEQYRSYRLDIKRRLISPYKKKQRDLAKMRKCLRPEELTNQMNQIEISMQHEQLEESFQELVEDYRRVIERLAQE

SEQ ID NO: 913170 - protein, 419 aa, Homo sapiens
ARGLIRPSSAAGDRSSEMAGFGAMEKFLVEYKSAVEKKLAEYKCNTNTAIELKLVRFPEDLENDIRTFFPEYTHQLFGDDETAFGYKGLKILLYYIAGSLSTMFRVEYASKVDENFDCVEADDVEGKIRQIIPPGFCTNTNDFLSLLEKEVDFKPFGTLLHTYSVLSPTGGENFTFQIYKADMTCRGFREYHERLQTFLMWFIETASFIDVDDERWHYFLVFEKYNKDGATLFATVGYMTVYNYYVYPDKGHGAQLLETVHRYYTEFPTVLDITAEDPSKSYVKLRDFVLVKLCQDLPCFSREKLMQGFNEDMAIEAQQKFKINKQHARRVYEILRLLVTDMSDAEQYRSYRLDIKRRLISPYKKKQRDLAKMRKCLRPEELTNQMNQIEISMQHEQLEESFQELVEDYRRVIERLAQE

SEQ ID NO: 913171 - protein, 116 aa, Homo sapiens
ARGLIRPSSAAGDRSSEMAGFGAMEKFLVEYKSAVEKKLAEYKCNTNTAIELKLQMMLRAKLDKSFHLDFAQTRMISFLYWKRKLISSHSEPYFIPTQFSVQQEEKTLPFRYIRLT

SEQ ID NO: 913172 - protein, 362 aa, Homo sapiens
ARGLIRPSSAAGDRSSEMAGFGAMEKFLVEYKSAVEKKLAEYKCNTNTAIELKLVRFPEDLENDIRTFFPEYTHQLFGDDETAFGYKGLKILLYYIAGSLSTMFRVEYASKVDENFDCVEADDVEGKIRQIIPPGFCTNTNDFLSLLEKEVDFKPFGTLLHTYSVLSPTGGENFTFQIYKADMTCRGFREYHERLQTFLMWFIETASFIDVDDERWHYFLVFEKYNKDGATLFATVGYMTVYNYYVYPDKTRPRVSQMLILTPFQGQGHGAQLLETVHRYYTEFPTVLDITAEDPSKSYVKLRDFVLVKLCQDLPCFSREKLMQGFNEDMAIEAQQKFKINKQHARRVYEILRLLLRQSGPG

SEQ ID NO: 913173 - protein, 436 aa, Homo sapiens
ARGLIRPSSAAGDRSSEMAGFGAMEKFLVEYKSAVEKKLAEYKCNTNTAIELKLVRFPEDLENDIRTFFPEYTHQLFGDDETAFGYKGLKILLYYIAGSLSTMFRVEYASKVDENFDCVEADDVEGKIRQIIPPGFCTNTNDFLSLLEKEVDFKPFGTLLHTYSVLSPTGGENFTFQIYKADMTCRGFREYHERLQTFLMWFIETASFIDVDDERWHYFLVFEKYNKDGATLFATVGYMTVYNYYVYPDKTRPRVSQMLILTPFQGQGHGAQLLETVHRYYTEFPTVLDITAEDPSKSYVKLRDFVLVKLCQDLPCFSREKLMQGFNEDMAIEAQQKFKINKQHARRVYEILRLLVTDMSDAEQYRSYRLDIKRRLISPYKKKQRDLAKMRKCLRPEELTNQMNQIEISMQHEQLEESFQELVEDYRRVIERLAQE

SEQ ID NO: 913174 - protein, 436 aa, Homo sapiens; identical to SEQ ID NO: 913173

SEQ ID NO: 913175 - protein, 418 aa, Homo sapiens
ARGLIRPSSAAGDRSSEMAGFGAMEKFLVEYKSAVEKKLAEYKCNTNTAIELKLVRFPEDLENDIRTFFPEYTHQLFGDDETAFGYKGLKILLYYIAGSLSTMFRVEYASKVDENFDCVEADDVEGKIRQIIPPGFCTNTNDFLSLLEKEVDFKPFGTLLHTYSVLSPTGGEYHERLQTFLMWFIETASFIDVDDERWHYFLVFEKYNKDGATLFATVGYMTVYNYYVYPDKTRPRVSQMLILTPFQGQGHGAQLLETVHRYYTEFPTVLDITAEDPSKSYVKLRDFVLVKLCQDLPCFSREKLMQGFNEDMAIEAQQKFKINKQHARRVYEILRLLVTDMSDAEQYRSYRLDIKRRLISPYKKKQRDLAKMRKCLRPEELTNQMNQIEISMQHEQLEESFQELVEDYRRVIERLAQE

SEQ ID NO: 913176 - protein, 238 aa, Homo sapiens
VGGILFASQDLDVDDERWHYFLVFEKYNKDGATLFATVGYMTVYNYYVYPDKTRPRVSQMLILTPFQGQGHGAQLLETVHRYYTEFPTVLDITAEDPSKSYVKLRDFVLVKLCQDLPCFSREKLMQGFNEDMAIEAQQKFKINKQHARRVYEILRLLVTDMSDAEQYRSYRLDIKRRLISPYKKKQRDLAKMRKCLRPEELTNQMNQIEISMQHEQLEESFQELVEDYRRVIERLAQE

SEQ ID NO: 913177 - protein, 114 aa, Homo sapiens
MQGFNEDMAIEAQQKFKINKQHARRVYEILRLLVTDMSDAEQYRSYRLDIKRRLISPYKKKQRDLAKMRKCLRPEELTNQMNQIEISMQHEQLEESFQELVEDYRRVIERLAQE

SEQ ID NO: 913178 - protein, 212 aa, Homo sapiens
VGAMALAGAMALVGAMALVGAMALVGAMALAGAMALVGAMALVGAMALTLKEESKSGSEFPTVLNITAEDPSKSYVKLRDFVLVKLCQDLPCFSREKLMQGFNEDMAIEAQQKFKINKQHARRVYEILRLLVTDMSDAEQYRSYRLDIKRRLISPYKKKQRDLAKMRKCLRPEELTNQMNQIEISMQHEQLEESFQELVEDYRRVIERLAQE

SEQ ID NO: 913179 - protein, 461 aa, Homo sapiens
MYNTVWSMDRDDADWREVMMPYSTELIFYIEMDPPALPPKPPKPMTSAVPNGMKDSSVSLQDAEWYWGDISREEVNDKLRDMPDGTFLVRDASTKMQGDYTLTLRKGGNNKLIKIYHRDGKYGFSDPLTFNSVVELINHYHHESLAQYNPKLDVKLMYPVSRYQQDQLVKEDNIDAVGKKLQEYHSQYQEKSKEYDRLYEEYTRTSQEIQMKRTAIEAFNETIKIFEEQCHTQEQHSKEYIERFRREGNEKEIERIMMNYDKLKSRLGEIHDSKMRLEQDLKKQALDNREIDKKMNSIKPDLIQLRKIRDQHLVWLNHKGVRQKRLNVWLGIKNEDADENYFINEEDENLPHYDEKTWFVEDINRVQAEDLLYGKPDGAFLIRESSKKGCYACSVVADGEVKHCVIYSTARGYGFAEPYNLYSSLKELVLHYQQTSLVQHNDSLNVRLAYPVHAQMPSLCR

SEQ ID NO: 913180 - protein, 402 aa, Homo sapiens
MYNTVWSMDRDDADWREVMMPYSTELIFYIEMDPPALPPKPPKPMTSAVPNGMKDSSVSLQDAEWYWGDISREEVNDKLRDMPDGTFLVRDASTKMQGDYTLTLRKGGNNKLIKIYHRDGKYGFSDPLTFNSVVELINHYHHESLAQYNPKLDVKLMYPVSRYQQDQLVKEDNIDAVGKKLQEYHSQYQEKSKEYDRLYEEYTRTSQEIQMKRTAIEAFNETIKIFEEQCHTQEQHSKEYIERFRREGNEKEIERWLNHKGVRQKRLNVWLGIKNEDADENYFINEEDENLPHYDEKTWFVEDINRVQAEDLLYGKPDGAFLIRESSKKGCYACSVVADGEVKHCVIYSTARGYGFAEPYNLYSSLKELVLHYQQTSLVQHNDSLNVRLAYPVHAQMPSLCR

SEQ ID NO: 913181 - protein, 461 aa, Homo sapiens; identical to SEQ ID NO: 913179

SEQ ID NO: 913182 - protein, 417 aa, Homo sapiens
MTSAVPNGMKDSSVSLQDAEWYWGDISREEVNDKLRDMPDGTFLVRDASTKMQGDYTLTLRKGGNNKLIKIYHRDGKYGFSDPLTFNSVVELINHYHHESLAQYNPKLDVKLMYPVSRYQQDQLVKEDNIDAVGKKLQEYHSQYQEKSKEYDRLYEEYTRTSQEIQMKRTAIEAFNETIKIFEEQCHTQEQHSKEYIERFRREGNEKEIERIMMNYDKLKSRLGEIHDSKMRLEQDLKKQALDNREIDKKMNSIKPDLIQLRKIRDQHLVWLNHKGVRQKRLNVWLGIKNEDADENYFINEEDENLPHYDEKTWFVEDINRVQAEDLLYGKPDGAFLIRESSKKGCYACSVVADGEVKHCVIYSTARGYGFAEPYNLYSSLKELVLHYQQTSLVQHNDSLNVRLAYPVHAQMPSLCR

SEQ ID NO: 913183 - protein, 899 aa, Homo sapiens
MESCYNPGLDGIIEYDDFKLNSSIVEPKEPAPETADGPYLVIVEQPKQRGFRFRYGCEGPSHGGLPGASSEKGRKTYPTVKICNYEGPAKIEVDLVTHSDPPRAHAHSLVGKQCSELGICAVSVGPKDMTAQFNNLGVLHVTKKNMMGTMIQKLQRQRLRSRPQGLTEAEQRELEQEAKELKKVMDLSIVRLRFSAFLRASDGSFSLPLKPVISQPIHDSKSPGASNLKISRMDKTAGSVRGGDEVYLLCDKVQKDDIEVRFYEDDENGWQAFGDFSPTDVHKQYAIVFRTPPYHKMKIERPVTVFLQLKRKRGGDVSDSKQFTYYPLVEDKEEVQRKRRKALPTFSQPFGGGSHMGGGSGGAAGGYGGAGGGGSLGFFPSSLAYSPYQSGAGPMGCYPGGGGGAQMAATVPSRDSGEEAAEPSAPSRTPQCEPQAPEMLQRAREYNARLFGLAQRSARALLDYGVTADARALLAGQRHLLTAQDENGDTPLHLAIIHGQTSVIEQIVYVIHHAQDLGVVNLTNHLHQTPLHLAVITGQTSVVSFLLRVGADPALLDRHGDSAMHLALRAGAGAPELLRALLQSGAPAVPQLLHMPDFEGLYPVHLAVRARSPECLDLLVDSGAEVEATERQGGRTALHLATEMEELGLVTHLVTKLRANVNARTFAGNTPLHLAAGLGYPTLTRLLLKAGADIHAENEEPLCPLPSPPTSDSDSDSEGPEKDTRSSFRGHTPLDLTCSTKVKTLLLNAAQNTMEPPLTPPSPAGPGLSLGDTALQNLEQLLDGPEAQGSWAELAERLGLRSLVDTYRQTTSPSGSLLRSYELAGGDLAGLLEALSDMGLEEGVRLLRGPETRDKLPSTEVKEDSAYGSQSVEQEAEKLGPPPEPPGGLCHGHPQPQVH

SEQ ID NO: 913184 - protein, 403 aa, Homo sapiens
MESCYNPGLDGIIEYDDFKLNSSIVEPKEPAPETADGPYLVIVEQPKQRGFRFRYGCEGPSHGGLPGASSEKGRKTYPTVKICNYEGPAKIEVDLVTHSDPPRAHAHSLVGKQCSELGICAVSVGPKDMTAQFNNLGVLHVTKKNMMGTMIQKLQRQRLRSRPQGLTEAEQRELEQEAKELKKVMDLSIVRLRFSAFLRASDGSFSLPLKPVISQPIHDSKSPGASNLKISRMDKTAGSVRGGDEVYLLCDKVQKDDIEVRFYEDDENGWQAFGDFSPTDVHKQYAIVFRTPPYHKMKIERPVTVFLQLKRKRGGDVSDSKQFTYYPLVEDKEEVQRKRRKALPTFSQPFGGGSHMGGGSGGAAGGYGGAGGGEGVLMEGGVKVREAVEEKNLGEAGRGGSRL

SEQ ID NO: 913185 - protein, 899 aa, Homo sapiens; identical to SEQ ID NO: 913183

SEQ ID NO: 913186 - protein, 669 aa, Homo sapiens [sequence omitted]

SEQ ID NO: 913187 - protein, 928 aa, Homo sapiens
MESCYNPGLDGIIEYDDFKLNSSIVEPKEPAPETADGPYLVIVEQPKQRGFRFRYGCEGPSHGGLPGASSEKGRKTYPTVKICNYEGPAKIEVDLVTHSDPPRAHAHSLVGKQCSELGICAVSVGPKDMTAQFNNLGVLHVTKKNMMGTMIQKLQRQRLRSRPQGLTEAEQRELEQEAKELKKVMDLSIVRLRFSAFLRASDGSFSLPLKPVISQPIHDSKSPGASNLKISRMDKTAGSVRGGDEVYLLCDKVQKDDIEVRFYEDDENGWQAFGDFSPTDVHKQVPRARARARAGGKIRLRTHCHPVSPCTPQYAIVFRTPPYHKMKIERPVTVFLQLKRKRGGDVSDSKQFTYYPLVEDKEEVQRKRRKALPTFSQPFGGGSHMGGGSGGAAGGYGGAGGGGSLGFFPSSLAYSPYQSGAGPMGCYPGGGGGAQMAATVPSRDSGEEAAEPSAPSRTPQCEPQAPEMLQRAREYNARLFGLAQRSARALLDYGVTADARALLAGQRHLLTAQDENGDTPLHLAIIHGQTSVIEQIVYVIHHAQDLGVVNLTNHLHQTPLHLAVITGQTSVVSFLLRVGADPALLDRHGDSAMHLALRAGAGAPELLRALLQSGAPAVPQLLHMPDFEGLYPVHLAVRARSPECLDLLVDSGAEVEATERQGGRTALHLATEMEELGLVTHLVTKLRANVNARTFAGNTPLHLAAGLGYPTLTRLLLKAGADIHAENEEPLCPLPSPPTSDSDSDSEGPEKDTRSSFRGHTPLDLTCSTKVKTLLLNAAQNTMEPPLTPPSPAGPGLSLGDTALQNLEQLLDGPEAQGSWAELAERLGLRSLVDTYRQTTSPSGSLLRSYELAGGDLAGLLEALSDMGLEEGVRLLRGPETRDKLPSTEVKEDSAYGSQSVEQEAEKLGPPPEPPGGLCHGHPQPQVH

SEQ ID NO: 913188 - protein, 507 aa, Homo sapiens
MESCYNPGLDGIIEYDDFKLNSSIVEPKEPAPETADGPYLVIVEQPKQRGFRFRYGCEGPSHGGLPGASSEKGRKTYPTVKICNYEGPAKIEVDLVTHSDPPRAHAHSLVGKQCSELGICAVSVGPKDMTAQFNNLGVLHVTKKNMMGTMIQKLQRQRLRSRPQGLTEAEQRELEQEAKELKKVMDLSIVRLRFSAFLRASDGSFSLPLKPVISQPIHDSKSPGASNLKISRMDKTAGSVRGGDEVYLLCDKVQKDDIEVRFYEDDENGWQAFGDFSPTDVHKQYAIVFRTPPYHKMKIERPVTVFLQLKRKRGGDVSDSKQFTYYPLVEDKEEVQRKRRKALPTFSQPFGGGSHMGGGSGGAAGGYGGAGGGGSLGFFPSSLAYSPYQSGAGPMGCYPGGGGGAQMAATVPSRDSGEEAAEPSAPSRTPQCEPQAPEMLQRAREYNARLFGLAQRSARALLDYGVTADARALLAGQRHLLTAQDENGDTWLAGTWQVYWRPCLTWA

SEQ ID NO: 913189 - protein, 368 aa, Homo sapiens
MESCYNPGLDGIIEYDDFKLNSSIVEPKEPAPETADGPYLVIVEQPKQRGFRFRYGCEGPSHGGLPGASSEKGRKTYPTVKICNYEGPAKIEVDLVTHSDPPRAHAHSLVGKQCSELGICAVSVGPKDMTAQFNNLGVLHVTKKNMMGTMIQKLQRQRLRSRPQGLTEAEQRELEQEAKELKKVMDLSIVRLRFSAFLRASDGSFSLPLKPVISQPIHDSKSPGASNLKISRMDKTAGSVRGGDEVYLLCDKVQKDDIEVRFYEDDENGWQAFGDFSPTDVHKQYAIVFRTPPYHKMKIERPVTVFLQLKRKRGGDVSDSKQFTYYPLVEDKEEVQRKRRKALPTFSQPFGGGSRTPCTASPPISNLI

SEQ ID NO: 913190 - protein, 899 aa, Homo sapiens; identical to SEQ ID NO: 913183

SEQ ID NO: 913191 - protein, 75 aa, Homo sapiens
VVDGGGFKIGPHIVPADIIKQMQRGPETRDKLPSTEVKEDSAYGSQSVEQEAEKLGPPPEPPGGLCHGHPQPQVH

SEQ ID NO: 913192 - protein, 837 aa, Homo sapiens
MTGRGSLVIMALDLTTQIKICNYEGPAKIEVDLVTHSDPPRAHAHSLVGKQCSELGICAVSVGPKDMTAQFNNLGVLHVTKKNMMGTMIQKLQRQRLRSRPQGLTEAEQRELEQEAKELKKVMDLSIVRLRFSAFLRASDGSFSLPLKPVISQPIHDSKSPGASNLKISRMDKTAGSVRGGDEVYLLCDKVQKDDIEVRFYEDDENGWQAFGDFSPTDVHKQYAIVFRTPPYHKMKIERPVTVFLQLKRKRGGDVSDSKQFTYYPLVEDKEEVQRKRRKALPTFSQPFGGGSHMGGGSGGAAGGYGGAGGGGSLGFFPSSLAYSPYQSGAGPMGCYPGGGGGAQMAATVPSRDSGEEAAEPSAPSRTPQCEPQAPEMLQRAREYNARLFGLAQRSARALLDYGVTADARALLAGQRHLLTAQDENGDTPLHLAIIHGQTSVIEQIVYVIHHAQDLGVVNLTNHLHQTPLHLAVITGQTSVVSFLLRVGADPALLDRHGDSAMHLALRAGAGAPELLRALLQSGAPAVPQLLHMPDFEGLYPVHLAVRARSPECLDLLVDSGAEVEATERQGGRTALHLATEMEELGLVTHLVTKLRANVNARTFAGNTPLHLAAGLGYPTLTRLLLKAGADIHAENEEPLCPLPSPPTSDSDSDSEGPEKDTRSSFRGHTPLDLTCSTKVKTLLLNAAQNTMEPPLTPPSPAGPGLSLGDTALQNLEQLLDGPEAQGSWAELAERLGLRSLVDTYRQTTSPSGSLLRSYELAGGDLAGLLEALSDMGLEEGVRLLRGPETRDKLPSTEVKEDSAYGSQSVEQEAEKLGPPPEPPGGLCHGHPQPQVH

SEQ ID NO: 913193 - protein, 613 aa, Homo sapiens
MESCYNPGLDGIIEYDDFKLNSSIVEPKEPAPETADGPYLVIVEQPKQRGFRFRYGCEGPSHGGLPGASSEKGRKTYPTVKICNYEGPAKIEVDLVTHSDPPRAHAHSLVGKQCSELGICAVSVGPKDMTAQFNNLGVLHVTKKNMMGTMIQKLQRQRLRSRPQGLTEAEQRELEQEAKELKKVMDLSIVRLRFSAFLRASDGSFSLPLKPVISQPIHDSKSPGASNLKISRMDKTAGSVRGGDEVYLLCDKVQKDDIEVRFYEDDENGWQAFGDFSPTDVHKQYAIVFRTPPYHKMKIERPVTVFLQLKRKRGGDVSDSKQFTYYPLVEDKEEVQRKRRKALPTFSQPFGGGSHMGGGSGGAAGGYGGAGGGGSLGFFPSSLAYSPYQSGAGPMGCYPGGGGGAQMAATVPSRDSGEEAAEPSAPSRTPQCEPQAPEMLQRAREYNARLFGLAQRSARALLDYGVTADARALLAGQRHLLTAQDENGDTPLHLAIIHGQTSVIEQIVYVIHHAQDLGVVNLTNHLHQTPLHLAVITGQTSVVSFLLRVGADPALLDRHGDSAMHLALRAGAGAPELLRALLQSGAPAVPQLLHMPDFEGLYPVHLAVRPQVH

SEQ ID NO: 913194 - protein, 201 aa, Homo sapiens
MGEAEKFHYIYSCDLDINVQLKIGSLEGKREQKSYKAVLEDPMLKFSGLYQETCSDLYVTCQVFAEGKPLALPVRTSYKAFSTRWNWNEWLKLPVKYPDLPRNAQVALTIWDVYGPGKAVPVGGTTVSLFGKYGMFRQGMHDLKVWPNVEADGSEPTKTPGRTSSTLSEDQMSRLAKVKKVIWNRCKALTDVYCSIYTLTL

SEQ ID NO: 913195 - protein, 887 aa, Homo sapiens
MGEAEKFHYIYSCDLDINVQLKIGSLEGKREQKSYKAVLEDPMLKFSGLYQETCSDLYVTCQVFAEGKPLALPVRTSYKAFSTRWNWNEWLKLPVKYPDLPRNAQVALTIWDVYGPGKAVPVGGTTVSLFGKYGMFRQGMHDLKVWPNVEADGSEPTKTPGRTSSTLSEDQMSRLAKLTKAHRQGHMVKVDWLDRLTFREIEMINESEKRSSNFMYLMVEFRCVKCDDKEYGIVYYEKDGDESSPILTSFELVKVPDPQMSMENLVESKHHKLARSLRSGPSDHDLKPNAATRDQLNIIVSYPPTKQLTYEEQDLVWKFRYYLTNQEKALTKFLKCVNWDLPQEAKQALELLGKWKPMDVEDSLELLSSHYTNPTVRRYAVARLRQADDEDLLMYLLQLVQALKYENFDDIKNGLEPTKKDSQSSVSENVSNSGINSAEIDSSQIITSPLPSVSSPPPASKTKEVPDGENLEQDLCTFLISRACKNSTLANYLYWYVIVECEDQDTQQRDPKTHEMYLNVMRRFSQALLKGDKSVRVMRSLLAAQQTFVDRLVHLMKAVQRESGNRKKKNERLQALLGDNEKMNLSDVELIPLPLEPQVKIRGIIPETATLFKSALMPAQLFFKTEDGGKYPVIFKHGDDLRQDQLILQIISLMDKLLRKENLDLKLTPYKVLATSTKHGFMQFIQSVPVAEVLDTEGSIQNFFRKYAPSENGPNGISAEVMDTYVKSCAGYCVITYILGVGDRHLDNLLLTKTGKLFHIDFGYILGRDPKPLPPPMKLNKEMVEGMGGTQSEQYQEFRKQCYTAFLHLRRYSNLILNLFSLMVDANIPDIALEPDKTVKKVQDKFRLDLSDEEAVHYMQSLIDESVHALFAAVVEQIHKFAQYWRK

SEQ ID NO: 913196 - protein, 372 aa, Homo sapiens
MYLNVMRRFSQALLKGDKSVRVMRSLLAAQQTFVDRLVHLMKAVQRESGNRKKKNERLQALLGDNEKMNLSDVELIPLPLEPQVKIRGIIPETATLFKSALMPAQLFFKTEDGGKYPVIFKHGDDLRQDQLILQIISLMDKLLRKENLDLKLTPYKVLATSTKHGFMQFIQSVPVAEVLDTEGSIQNFFRKYAPSENGPNGISAEVMDTYVKSCAGYCVITYILGVGDRHLDNLLLTKTGKLFHIDFGYILGRDPKPLPPPMKLNKEMVEGMGGTQSEQYQEFRKQCYTAFLHLRRYSNLILNLFSLMVDANIPDIALEPDKTVKKVQDKFRLDLSDEEAVHYMQSLIDESVHALFAAVVEQIHKFAQYWRK

SEQ ID NO: 913197 - protein, 372 aa, Homo sapiens; identical to SEQ ID NO: 913196

SEQ ID NO: 913198 - protein, 508 aa, Homo sapiens
MGEAEKFHYIYSCDLDINVQLKIGSLEGKREQKSYKAVLEDPMLKFSGLYQETCSDLYVTCQVFAEGKPLALPVRTSYKAFSTRWNWNEWLKLPVKYPDLPRNAQVALTIWDVYGPGKAVPVGGTTVSLFGKYGMFRQGMHDLKVWPNVEADGSEPTKTPGRTSSTLSEDQMSRLAKLTKAHRQGHMVKVDWLDRLTFREIEMINESEKRSSNFMYLMVEFRCVKCDDKEYGIVYYEKDGDESSPILTSFELVKVPDPQMSMENLVESKHHKLARSLRSGPSDHDLKPNAATRDQLNIIVSYPPTKQLTYEEQDLVWKFRYYLTNQEKALTKFLKCVNWDLPQEAKQALELLGKWKPMDVEDSLELLSSHYTNPTVRRYAVARLRQADDEDLLMYLLQLVQALKYENFDDIKNGLEPTKKDSQSSVSENVSNSGINSAEIDSSQIITSPLPSVSSPPPASKTKEVPDGENLEQDLCTFLISRACKNSTLANYLYWYVKIIFCLFSYYP

SEQ ID NO: 913199 - protein, 887 aa, Homo sapiens; identical to SEQ ID NO: 913195

SEQ ID NO: 913200 - protein, 166 aa, Homo sapiens
RGLLGVRGRKGSLEGKREQKSYKAVLEDPMLKFSGLYQETCSDLYVTCQVFAEGKPLALPVRTSYKAFSTRWNWNEWLKLPVKYPDLPRNAQVALTIWDVYGPGKAVPVGGTTVSLFGKYGMFRQGMHDLKVWPNVEADGSEPTKTPGRTSSTLSEDQMSRLAKEH

SEQ ID NO: 913201 - protein, 757 aa, Homo sapiens
MGEAEKFHYIYSCDLDINVQLKIGSLEGKREQKSYKAVLEDPMLKFSGLYQETCSDLYVTCQVFAEGKPLALPVRTSYKAFSTRWNWNEWLKLPVKYPDLPRNAQVALTIWDVYGPGKAVPVGGTTVSLFGKYGMFRQGMHDLKVWPNVEADGSEPTKTPGRTSSTLSEDQMSRLAKLTKAHRQGHMVKVDWLDRLTFREIEMINESEKRSSNFMYLMVEFRCVKCDDKEYGIVYYEKDGDESSPILTSFELVKVPDPQMSMENLVESKHHKLARSLRSGPSDHDLKPNAATRDQLNIIVSYPPTKQLTYEEQDLVWKFRYYLTNQEKALTKFLKCVNWDLPQEAKQALELLGKWKPMDVEDSLELLSSHYTNPTVRRYAVARLRQADDEDLLMYLLQLVQALKYENFDDIKNGLEPTKKDSQSSVSENVSNSGINSAEIDSSQIITSPLPSVSSPPPASKTKEVPDGENLEQDLCTFLISRACKNSTLANYLYWYVIVECEDQDTQQRDPKTHEMYLNVMRRFSQALLKGDKSVRVMRSLLAAQQTFVDRLVHLMKAVQRESGNRKKKNERLQALLGDNEKMNLSDVELIPLPLEPQVKIRGIIPETATLFKSALMPAQLFFKTEDGGKYPVIFKHGDDLRQDQLILQIISLMDKLLRKENLDLKLTPYKVLATSTKHGFMQFIQSVPVAEVLDTEGSIQNFFRKYAPSENGPNGISAEVMDTYVKSCAGYCVITYILGVGDRHLDNLLLTKTGNN

SEQ ID NO: 913202 - protein, 756 aa, Homo sapiens
MGEAEKFHYIYSCDLDINVQLKIGSLEGKREQKSYKAVLEDPMLKFSGLYQETCSDLYVTCQVFAEGKPLALPVRTSYKAFSTRWNWNEWLKLPVKYPDLPRNAQVALTIWDVYGPGKAVPVGGTTVSLFGKYGMFRQGMHDLKVWPNVEADGSEPTKTPGRTSSTLSEDQMSRLAKLTKAHRQGHMVKVDWLDRLTFREIEMINESEKRSSNFMYLMVEFRCVKCDDKEYGIVYYEKDGDESSPILTSFELVKVPDPQMSMENLVESKHHKLARSLRSGPSDHDLKPNAATRDQLNIIVSYPPTKQLTYEEQDLVWKFRYYLTNQEKALTKFLKCVNWDLPQEAKQALELLGKWKPMDVEDSLELLSSHYTNPTVRRYAVARLRQADDEDLLMYLLQLVQALKYENFDDIKNGLEPTKKDSQSSVSENVSNSGINSAEIDSSQIITSPLPSVSSPPPASKTKEVPDGENLEQDLCTFLISRACKNSTLANYLYWYVIVECEDQDTQQRDPKTHEMYLNVMRRFSQALLKGDKSVRVMRSLLAAQQTFVDRLVHLMKAVQRESGNRKKKNERLQALLGDNEKMNLSDVELIPLPLEPQVKIRGIIPETATLFKSALMPAQLFFKTEDGGKYPVIFKHGDDLRQDQLILQIISLMDKLLRKENLDLKLTPYKVLATSTKHGFMQFIQSVPVAEVLDTEGSIQNFFRKYAPSENGPNGISAEVMDTYVKSCAGYCVITYILGVGDRHLDNLLLTKTGG

SEQ ID NO: 913203 - protein, 768 aa, Homo sapiens
MKKQFNRMRQLANQTVGRAEKTEVLSEDLLQVEKRLELVKQVSHSTHKKLTACLQGQQGAEADKRSKKLPLTTLAQCLMEGSAILGDDTLLGKMLKLCGETEDKLAQELIHFELQVERDVIEPLFLLAEVEIPNIQKQRKHLAKLVLDMDSSRTRWQQTSKSSGLSSSLQPAGAKADALREEMEEAANRVEICRDQLSADMYSFVAKEIDYANYFQTLIEVQAEYHRKSLTLLQAVLPQIKAQQEAWVEKPSFGKPLEEHLTISGREIAFPIEACVTMLLECGMQEEGLFRVAPSASKLKKLKAALDCCVVDVQEYSADPHAIAGALKSYLRELPEPLMTFELYDEWIQASNVQEQDKKLQALWNACEKLPKANHNNIRYLIKFLSKLSEYQDVNKMTPSNMAIVLGPNLLWPQAEGNITEMMTTVSLQIVGIIEPIIQHADWFFPGEIEFNITGNYGSPVHVNHNANYSSMPSPDMDPADRRQPEQARRPLSVATDNMMLEFYKKDGMGVRVMDTNWVARRGSSAGRKVSCAPPSMQPPAPPAELAAPLPSPLPEQPLDSPAAPALSPSGLGLQPGPERTSTTKSKELSPGSAQKGSPGSSQGTACAGTQPGAQPGAQPGASPSPSQPPADQSPHTLRKVSKKLAPIPPKVPFGQPGAMADQSAGQPSPVSLSPTPPSTPSPYGLSYPQGYSLASGQLSPAAAPPLASPSVFTSTLSKSRPTPKPRQRPTLPPPQPPTVNLSASSPQSTEAPMLDGMSPGESMSTAV

SEQ ID NO: 913204 - protein, 221 aa, Homo sapiens
ILSWLWQRVEAQLVAASAADCALLLASVRGPLLPGLGCPGLCLGRREQPGCWEHSPQCIASRAPGVLKLRCSSPNADLLECGGGSLSPVICYAWPPAPPAELAAPLPSPLPEQPLDSPAAPALSPSGLGLQPGPERTSFKEAGTDSTQGPLWPAGGYGRPVRWPAVPSQPVPHPAQHPVTLWTELPSGVLLGLGPALPSCSSSPGLSFCLYKHFEQIAAHS

SEQ ID NO: 913205 - protein, 768 aa, Homo sapiens; identical to SEQ ID NO: 913203

SEQ ID NO: 913206 - protein, 768 aa, Homo sapiens; identical to SEQ ID NO: 913203

SEQ ID NO: 913207 - protein, 780 aa, Homo sapiens
MKKQFNRMRQLANQTVGRAEKTEVLSEDLLQVEKRLELVKQVSHSTHKKLTACLQGQQGAEADKRSKKLPLTTLAQCLMEGSAILGDDTLLGKMLKLCGETEDKLAQELIHFELQVERDVIEPLFLLAEVEIPNIQKQRKHLAKLVLDMDSSRTRWQQTSKSSGLSSSLQPAGAKADALREEMEEAANRVEICRDQLSADMYSFVAKEIDYANYFQTLIEVQAEYHRKSLTLLQAVLPQIKAQQEAWVEKPSFGKPLEEHLTISGREIAFPIEACVTMLLECGMQEEGLFRVAPSASKLKKLKAALDCCVVDVQEYSADPHAIAGALKSYLRELPEPLMTFELYDEWIQASNVQEQDKKLQALWNACEKLPKANHNNIRYLIKFLSKLSEYQDVNKMTPSNMAIVLGPNLLWPQAEGNITEMMTTVSLQIVGIIEPIIQHADWFFPGEIEFNITGNYGSPVHVNHNANYSSMPSPDMDPADRRQPEQARRPLSVATDNMMLEFYKKDGMGVRVMDTNWVARRGSSAGRKVSCAPPSMQPPAPPAELAAPLPSPLPEQPLDSPAAPALSPSGLGLQPGPERTSTTKSKELSPGSAQKGSPGSSQGTACAGTQPGAQPGAQPGASPSPSQPPADQSPHTLRKVSKKLAPIPPKVPFGQPGAMADQSAGQPSPVSLSPTPPSTPSPYGLSYPQGYSLASGQLSPAAAPPLASPSVFTSTLSKSRPTPKPRQRPTLPPPQPPTVNLSASSPQSTEAPMLDGMSPGESMSTGNQATGSLTFFYEL

SEQ ID NO: 913208 - protein, 818 aa, Homo sapiens
MKKQFNRMRQLANQTVGRAEKTEVLSEDLLQVEKRLELVKQVSHSTHKKLTACLQGQQGAEADKRSKKLPLTTLAQCLMEGSAILGDDTLLGKMLKLCGETEDKLAQELIHFELQVERDVIEPLFLLAEVEIPNIQKQRKHLAKLVLDMDSSRTRWQQTSKSSGLSSSLQPAGAKADALREEMEEAANRVEICRDQLSADMYSFVAKEIDYANYFQTLIEVQAEYHRKSLTLLQAVLPQIKAQQEAWVEKPSFGKPLEEHLTISGREIAFPIEACVTMLLECGMQEEGLFRVAPSASKLKKLKAALDCCVVDVQEYSADPHAIAGALKSYLRELPEPLMTFELYDEWIQASNVQEQDKKLQALWNACEKLPKANHNNIRYLIKFLSKLSEYQDVNKMTPSNMAIVLGPNLLWPQAEGNITEMMTTVSLQIVGIIEPIIQHADWFFPGEIEFNITGNYGSPVHVNHNANYSSMPSPDMDPADRRQPEQARRPLSVATDNMMLEFYKKDGLRKIQSMGVRVMDTNWVARRGSSAGRKVSCAPPSMQPPAPPAELAAPLPSPLPEQPLDSPAAPALSPSGLGLQPGPERTSTTKSKELSPGSAQKGSPGSSQGTACAGTQPGAQPGAQPGASPSPSQPPADQSPHTLRKVSKKLAPIPPKVPFGQPGAMADQSAGQPSPVSLSPTPPSTPSPYGLSYPQGYSLASGQLSPAAAPPLASPSVFTSTLSKSRPTPKPRQRPTLPPPQPPTVNLSASSPQSTEAPMLDGMSPGESMSTDLVHFDIPSIHIELGSTLRLSPLEHMRRHSVTDKRDSEEESESTAL

SEQ ID NO: 913209 - protein, 153 aa, Homo sapiens
NFVFCCCVVFSLSVSKKLAPIPPKVPFGQPGAMADQSAGQPSPVSLSPTPPSTPSPYGLSYPQGYSLASGQLSPAAAPPLASPSVFTSTLSKSRPTPKPRQRPTLPPPQPPTVNLSASSPQSTEAPMLDGMSPGESMSTGNQATGSLTFFYEL

SEQ ID NO: 913210 - protein, 768 aa, Homo sapiens; identical to SEQ ID NO: 913203

SEQ ID NO: 913211 - protein, 768 aa, Homo sapiens; identical to SEQ ID NO: 913203

SEQ ID NO: 913212 - protein, 221 aa, Homo sapiens [sequence omitted]

SEQ ID NO: 913213 - protein, 457 aa, Homo sapiens
RVAGAPPPPLPKAARRRGAASLEPRSQPPPLTALGVQEEEQQRRRLLQRRAGARKNNIADPEELFTKLERIGKGSFGEVFKGIDNRTQQVVAIKIIDLEEAEDEIEDIQQEITVLSQCDSSYVTKYYGSYLKGSKLWIIMEYLGGGSALDLLRAGPFDEFQIATMLKEILKGLDYLHSEKKIHRDIKAANVLLSEQGDVKLADFGVAGQLTDTQIKRNTFVGTPFWMAPEVIQQSAYDSKADIWSLGITAIELAKGEPPNSDMHPMRVLFLIPKNNPPTLVGDFTKSFKEFIDACLNKDPSFRPTAKELLKHKFIVKNSKKTSYLTELIDRFKRWKAEGHSDDESDSEGSDSESTSRENNTHPEWSFTTVRKKPDPKKVQNGAEQDLVQTLSCLSMIITPAFAELKQQDENNASRNQAIEELEKSIAVAEAACPGITDKMVKKLIEKFQKCSADESP

SEQ ID NO: 913214 - protein, 445 aa, Homo sapiens
GGWGASTSSSYSGEAQRSGITRAQVPATTTHSARRSGRGAAAEAAASAAGGRQKGPDRKAWEGRRTTPGGRSQSEPKAPPPQKRSEAAFASMAHSPVAVQVPGMQNNIADPEELFTKLERIGKGSFGEVFKGIDNRTQQVVAIKIIDLEEAEDEIEDIQQEITVLSQCDSSYVTKYYGSYLKGSKLWIIMEYLGGGSALDLLRAGPFDEFQIATMLKEILKGLDYLHSEKKIHRDIKAANVLLSEQGDVKLADFGVAGQLTDTQIKRNTFVGTPFWMAPEVIQQSAYDSKRPTAKELLKHKFIVKNSKKTSYLTELIDRFKRWKAEGHSDDESDSEGSDSESTSRENNTHPEWSFTTVRKKPDPKKVQNGAEQDLVQTLSCLSMIITPAFAELKQQDENNASRNQAIEELEKSIAVAEAACPGITDKMVKKLIEKFQKCSADESP

SEQ ID NO: 913215 - protein, 409 aa, Homo sapiens
GGWGASTSSSYSGEAQRSGITRAQVPATTTHSARRSGRGAAAEAAASAAGGRQKGPDRKAWEGRRTTPGGRSQSEPKAPPPQKRSEAAFASMAHSPVAVQVPGMQNNIADPEELFTKLERIGKGSFGEVFKGIDNRTQQVVAIKIIDLEEAEDEIEDIQQEITVLSQCDSSYVTKYYGSYLKGSKLWIIMEYLGGGSALDLLRAGPFDEFQIATMLKEILKGLDYLHSEKKIHRDIKAANVLLSEQGDVKLADFGVAGQLTDTQIKRNTFVGTPFWMAPEVIQQSAYDSKADIWSLGITAIELAKGEPPNSDMHPMRVLFLIPKNNPPTLVGDFTKSFKEFIDACLNKDPSFRPTAKELLKHKFIVKNSKKTSYLTELIDRFKRWKAEGHSDDESDSEGSDSSKILCKP

SEQ ID NO: 913216 - protein, 507 aa, Homo sapiens
GGWGASTSSSYSGEAQRSGITRAQVPATTTHSARRSGRGAAAEAAASAAGGRQKGPDRKAWEGRRTTPGGRSQSEPKAPPPQKRSEAAFASMAHSPVAVQVPGMQNNIADPEELFTKLERIGKGSFGEVFKGIDNRTQQVVAIKIIDLEEAEDEIEDIQQEITVLSQCDSSYVTKYYGSYLKGSKLWIIMEYLGGGSALDLLRAGPFDEFQIATMLKEILKGLDYLHSEKKIHRDIKAANVLLSEQGDVKLADFGVAGQLTDTQIKRNTFVGTPFWMAPEVIQQSAYDSKADIWSLGITAIELAKGEPPNSDMHPMRVLFLIPKNNPPTLVGDFTKSFKEFIDACLNKDPSFRPTAKELLKHKFIVKNSKKTSYLTELIDRFKRWKAEGHSDDESDSEGSDSESTSRENNTHPEWSFTTVRKKPDPKKVQNGAEQDLVQTLSCLSMIITPAFAELKQQDENNASRNQAIEELEKSIAVAEAACPGITDKMVKKLIEKFQKCSADESP

SEQ ID NO: 913217 - protein, 507 aa, Homo sapiens; identical to SEQ ID NO: 913216

SEQ ID NO: 913218 - protein, 507 aa, Homo sapiens; identical to SEQ ID NO: 913216

SEQ ID NO: 913219 - protein, 228 aa, Homo sapiens
GGWGASTSSSYSGEAQRSGITRAQVPATTTHSARRSGRGAAAEAAASAAGGRQKGPDRKAWEGRRTTPGGRSQSEPKAPPPQKRSEAAFASMAHSPVAVQVPGMQNNIADPEELFTKLERIGKGSFGEVFKGIDNRTQQVVAIKIIDLEEAEDEIEDIQQEITVLSQCDSSYVTKYYGSYLKGSKLWIIMEYLGGGSALDLNGALPPYERSLIQRKYRMGQSKILCKP

SEQ ID NO: 913220 - protein, 99 aa, Homo sapiens
HRCLKDLSRPVGVRHPVDETARRFQSWGEAKTLPAPRSPGQPPPAAPCRLPAWARPAVLGLPSGDLGGQPSRDVTPRAPGSSAPAPSPIKQTPRRAATL

SEQ ID NO: 913221 - protein, 99 aa, Homo sapiens; identical to SEQ ID NO: 913220

SEQ ID NO: 913222 - protein, 99 aa, Homo sapiens; identical to SEQ ID NO: 913220

SEQ ID NO: 913223 - protein, 99 aa, Homo sapiens; identical to SEQ ID NO: 913220

SEQ ID NO: 913224 - protein, 163 aa, Homo sapiens
MPSIKLQSSDGEIFEVDVEIAKQSVTIKTMLEDLGMDDEGDDDPVPLPNVNAAILKKVIQWCTHHKDDPPPPEDDENKEKRTDDIPVWDQEFLKVDQGTLFELILAANYLDIKGLLDVTCKTVANMIKGKTPEEIRKTFNIKNDFTEEEEAQVRKENQWCEEK

SEQ ID NO: 913225 - protein, 99 aa, Homo sapiens; identical to SEQ ID NO: 913220

SEQ ID NO: 913226 - protein, 99 aa, Homo sapiens; identical to SEQ ID NO: 913220

SEQ ID NO: 913227 - protein, 99 aa, Homo sapiens; identical to SEQ ID NO: 913220

SEQ ID NO: 913228 - protein, 99 aa, Homo sapiens; identical to SEQ ID NO: 913220

SEQ ID NO: 913229 - protein, 99 aa, Homo sapiens; identical to SEQ ID NO: 913220

SEQ ID NO: 913230 - protein, 99 aa, Homo sapiens; identical to SEQ ID NO: 913220

SEQ ID NO: 913231 - protein, 99 aa, Homo sapiens; identical to SEQ ID NO: 913220

SEQ ID NO: 913232 - protein, 108 aa, Homo sapiens
MYSLDLNSSSQMPSIKLQSSDGEIFEVDVEIAKQSVTIKTMLEDLGMDDEGDDDPVPLPNVNAAILKKVHSQWLSPTTRDDPPPPEDDENKEKRTDDIPVVGPRIPES

SEQ ID NO: 913233 - protein, 99 aa, Homo sapiens; identical to SEQ ID NO: 913220

SEQ ID NO: 913234 - protein, 107 aa, Homo sapiens
PGSNSMRSVIKILRMVVLEVITVVYTIRDVRKRDLGIWITPRDLGMDDEGDDDPVPLPNVNAAILKKVHSQWLSPTTRDDPPPPEDDENKEKRTDDIPVVGPRIPES

SEQ ID NO: 913235 - protein, 99 aa, Homo sapiens; identical to SEQ ID NO: 913220

SEQ ID NO: 913236 - protein, 99 aa, Homo sapiens; identical to SEQ ID NO: 913220

SEQ ID NO: 913237 - protein, 99 aa, Homo sapiens; identical to SEQ ID NO: 913220

SEQ ID NO: 913238 - protein, 99 aa, Homo sapiens; identical to SEQ ID NO: 913220

SEQ ID NO: 913239 - protein, 99 aa, Homo sapiens; identical to SEQ ID NO: 913220

SEQ ID NO: 913240 - protein, 99 aa, Homo sapiens; identical to SEQ ID NO: 913220

SEQ ID NO: 913241 - protein, 99 aa, Homo sapiens; identical to SEQ ID NO: 913220

SEQ ID NO: 913242 - protein, 99 aa, Homo sapiens; identical to SEQ ID NO: 913220

SEQ ID NO: 913243 - protein, 99 aa, Homo sapiens; identical to SEQ ID NO: 913220

SEQ ID NO: 913244 - protein, 99 aa, Homo sapiens; identical to SEQ ID NO: 913220

SEQ ID NO: 913245 - protein, 99 aa, Homo sapiens; identical to SEQ ID NO: 913220

SEQ ID NO: 913246 - protein, 99 aa, Homo sapiens; identical to SEQ ID NO: 913220

SEQ ID NO: 913247 - protein, 99 aa, Homo sapiens; identical to SEQ ID NO: 913220

SEQ ID NO: 913248 - protein, 99 aa, Homo sapiens; identical to SEQ ID NO: 913220

SEQ ID NO: 913249 - protein, 99 aa, Homo sapiens; identical to SEQ ID NO: 913220

SEQ ID NO: 913250 - protein, 99 aa, Homo sapiens; identical to SEQ ID NO: 913220

SEQ ID NO: 913251 - protein, 99 aa, Homo sapiens; identical to SEQ ID NO: 913220

SEQ ID NO: 913252 - protein, 99 aa, Homo sapiens; identical to SEQ ID NO: 913220

SEQ ID NO: 913253 - protein, 354 aa, Homo sapiens
MATPLVAGPAALRFAAAASWQVVRGRCVEHFPRVLEFLRSLRAVAPGLVRYRHHERLCMGLKAKVVVELILQGRPWAQVLKALNHHFPESGPIVRDPKATKQDLRKILEAQETFYQQVKQLSEAPVDLASKLQELEQEYGEPFLAAMEKLLFEYLCQLEKALPTPQAQQLQDVLSWMQPGVSITSSLAWRQYGVDMGWLLPECSVTDSVNLAEPMEQNPPQQQRLALHNPLPKAKPGTHLPQGPSSRTHPEPLAGRHFNLAPLGRRRVQSQWASTRGGHKERPTVMLFPFRNLGSPTQVISKPESKEEHAIYTADLAMGTRAASTGKSKSPCQTLGGRALKENPVDLPATEQKE

SEQ ID NO: 913254 - protein, 372 aa, Homo sapiens
MATPLVAGPAALRFAAAASWQVVRGRCVEHFPRVLEFLRSLRAVAPGLVRYRHHERLCMGLKAKVVVELILQGRPWAQVLKALNHHFPESGPIVRDPKATKQDLRKILEAQETFYQQVKQLSEAPVDLASKLQELEQEYGEPFLAAMEKLLFEYLCQLEKALPTPQAQQLQDVLSWMQPGVSITSSLAWRQYGVDMGWLLPECSVTDSVNLAEPMEQNPPQQQRLALHNPLPKAKPGTHLPQGPSSRTHPEPLAGRHFNLAPLGRRRVQSQWASTRGGHKERPTVMLFPFRNLGSPTQVISKPESKEEHAIYTADLAMGTRAASTGKSKSPCQTLGGRALKENPVDLPATEQKDQELLGLLHGPPETIIITS

SEQ ID NO: 913255 - protein, 137 aa, Homo sapiens
MATPLVAGPAALRFAAAASWQVVRGRCVEHFPRVLEFLRSLRAVAPGLVRYRHHERLCMGLKAKVVVELILQGRPWAQVLKALNHHFPESGPIVRDPKATKQDLRKILEAQETFYQQVKQLSEAPVDLASKLQVRLV

SEQ ID NO: 913256 - protein, 354 aa, Homo sapiens; identical to SEQ ID NO: 913253

SEQ ID NO: 913257 - protein, 140 aa, Homo sapiens
MEQNPPQQQRLALHNPLPKAKPGTHLPQGPSSRTHPEPLAGRHFNLAPLGRRRVQSQWASTRGGHKERPTVMLFPFRNLGSPTQVISKPESKEEHAIYTADLAMGTRAASTGKSKSPCQTLGGRALKENPVDLPATEQKE

SEQ ID NO: 913258 - protein, 190 aa, Homo sapiens
MEKLLFEYLCQLEKALPTPQAQQLQDVLSWMQPGVSITSSLAWRQYGVDMGWLLPECSVTDSVNLAEPMEQNPPQQQRLALHNPLPEPLAGRHFNLAPLGRRRVQSQWASTRGGHKERPTVMLFPFRNLGSPTQVISKPESKEEHAIYTADLAMGTRAASTGKSKSPCQTLGGRALKENPVDLPATEQKE

SEQ ID NO: 913259 - protein, 243 aa, Homo sapiens
LVRGWFESAEAEAPVDLASKLQELEQEYGEPFLAAMEKLLFEYLCQLEKALPTPQAQQLQDVLSWMQPGVSITSSLAWRQYGVDMGWLLPECSVTDSVNLAEPMEQNPPQQQRLALHNPLPKAKPGTHLPQGPSSRTHPEPLAGRHFNLAPLGRRRVQSQWASTRGGHKERPTVMLFPFRNLGSPTQVISKPESKEEHAIYTADLAMGTRAASTGKSKSPCQTLGGRALKENPVDLPATEQKE

SEQ ID NO: 913260 - protein, 354 aa, Homo sapiens; identical to SEQ ID NO: 913253

SEQ ID NO: 913261 - protein, 373 aa, Homo sapiens
MATPLVAGPAALRFAAAASWQVVRGRCVEHFPRVLEFLRSLRAVAPGLVRYRHHERLCMGLKAKVVVELILQGRPWAQVLKALNHHFPESGPIVRDPKATKQDLRKILEAQETFYQQVKQLSEAPVDLASKLQELEQEYGEPFLAAMEKLLFEYLCQLEKALPTPQAQQLQDVLSWMQPGVSITSSLAWRQYGVDMGWLLPECSVTDSVNLAEPMEQNPPQQQRLALHNPLPKAKPGTHLPQGPSSRTHPEPLAGRHFNLAPLGRRRVQSQWASTRGGHKERPTVMLFPFRNLGSPTQVISKPESKEEHAIYTADLAMGTRAASTGKSKSPCQTLGGRALKENPVDLLRNCLDCYMDPLRLSLLPPRARKPGR

SEQ ID NO: 913262 - protein, 354 aa, Homo sapiens; identical to SEQ ID NO: 913253

SEQ ID NO: 913263 - protein, 372 aa, Homo sapiens; identical to SEQ ID NO: 913254

SEQ ID NO: 913264 - protein, 208 aa, Homo sapiens [sequence omitted]

SEQ ID NO: 913265 - protein, 354 aa, Homo sapiens; identical to SEQ ID NO: 913253

SEQ ID NO: 913266 - protein, 354 aa, Homo sapiens; identical to SEQ ID NO: 913253

SEQ ID NO: 913267 - protein, 288 aa, Homo sapiens
PGRPPWVRVKAPGGSVGHDPRAAGELKADSLLRNQAMAELEFVQIIIIVVVMMVMVVVITCLLSHYKLSARSFISRHSQGRRREDALSSEGCLWPSESTVSGNGIPEPQVYAPPRPTDRLAVPPFAQRERFHRFQPTYPYLQHEIDLPPTISLSDGEEPPPYQGPCTLQLRDPEQQLELNRESVRAPPNRTIFDSDLMDSARLGGPCPPSSNSGISATCYGSGGRMEGPPPTYSEVIGHYPGSSFQHQQSSGPPSLLEGTRLHHTHIAPLESAAIWSKEKDKQKGHPL

SEQ ID NO: 913268 - protein, 288 aa, Homo sapiens; identical to SEQ ID NO: 913267

SEQ ID NO: 913269 - protein, 381 aa, Homo sapiens
NPISLDLNEEEEAAAAAAAEALGWGKLAAEAQPRRQRAPRCQPIFRTPPAGTADAPGAAEGRPGGRSGARSRALSPAAPRELGGDPSPASRGAPPPPRASCMRGPSSGRRPEPPPAAPEPPAPRAAPPPPSMHRLMGVNSTAAAAAGQPNVSCTCNCKRSLFQSMEITELEFVQIIIIVVVMMVMVVVITCLLSHYKLSARSFISRHSQGRRREDALSSEGCLWPSESTVSGNGIPEPQVYAPPRPTDRLAVPPFAQRERFHRFQPTYPYLQHEIDLPPTISLSDGEEPPPYQGPCTLQLRDPNVSCTCNCKRSLFQSMEITELEFVSVIGHYPGSSFQHQQSSGPPSLLEGTRLHHTHIAPLESAAIWSKEKDKQKGHPL

SEQ ID NO: 913270 - protein, 288 aa, Homo sapiens; identical to SEQ ID NO: 913267

SEQ ID NO: 913271 - protein, 418 aa, Homo sapiens
NPISLDLNEEEEAAAAAAAEALGWGKLAAEAQPRRQRAPRCQPIFRTPPAGTADAPGAAEGRPGGRSGARSRALSPAAPRELGGDPSPASRGAPPPPRASCMRGPSSGRRPEPPPAAPEPPAPRAAPPPPSMHRLMGVNSTAAAAAGQPNVSCTCNCKRSLFQSMEITELEFVQIIIIVVVMMVMVVVITCLLSHYKLSARSFISRHSQGRRREDALSSEGCLWPSESTVSGNGIPEPQVYAPPRPTDRLAVPPFAQRERFHRFQPTYPYLQHEIDLPPTISLSDGEEPPPYQGPCTLQLRDPEQQLELNRESVRAPPNRTIFDSDLMDSARLGGPCPPSSNSGISATCYGSGGRMEGPPPTYSEVIGHYPGSSFQHQQSSGPPSLLEGTRLHHTHIAPLESAAIWSKEKDKQKGHPL

SEQ ID NO: 913272 - protein, 288 aa, Homo sapiens; identical to SEQ ID NO: 913267

SEQ ID NO: 913273 - protein, 288 aa, Homo sapiens; identical to SEQ ID NO: 913267

SEQ ID NO: 913274 - protein, 176 aa, Homo sapiens
  misc_feature (36)..(36): Xaa can be any naturally occurring amino acid
  misc_feature (53)..(53): Xaa can be any naturally occurring amino acid
  misc_feature (58)..(58): Xaa can be any naturally occurring amino acid
RTAQQQQKSNKTLVGPCGALKSSSFFTASSLSVNRXRISEDSFVIHNGQLVDXISVGXKPFYDRMSMCWDSPSFQDQIKTDVRAIIQVEVYLVLKYWLPFPGGMIPCSTNSNNGSSSSLTSVNLTFRSSISSKSSGDSFRNIFSFSFTETLAKSFIDPCLSLIYLRHCSCRIRHEG

SEQ ID NO: 913275 - protein, 340 aa, Homo sapiens
RESSQAVGGGAGREAPSSCASAKMAAAAGSCARVAAWGGKLRRGLAVSRQAVRSPGPLAAAVAGAALAGAGAAWHHSRVSVAARDGSFTVSAQKNVEHGIIYIGKPSLRKQRFMQFSSLEHEGEYYMTPRDFLFSVMFEQMERKTSVKKLTKKDIEDTLSGIQTAGCGSTFFRDLGDKGLISYTEYLFLLTILTKPHSGFHVAFKMLDTDGNEMIEKREFFKLQKIISKQDDLMTVKTNETGYQEAIVKEPEINTTLQMRFFGKRGQRKLHYKEFRRFMENLQTEIQEMEFLQFSKGLSFMRKEDFAEWLLFFTNTENKDIYWKNVREKLSAGERSLREL

SEQ ID NO: 913276 - protein, 344 aa, Homo sapiens
MQFSSLEHEGEYYMTPRDFLFSVMFEQMERKTSVKKLTKKDIEDTLSGIQTAGCGSTFFRDLGDKGLISYTEYLFLLTILTKPHSGFHVAFKMLDTDGNEMIEKREFFKLQKIISKQDDLMTVKTNETGYQEAIVKEPEINTTLQMRFFGKRGQRKLHYKEFRRFMENLQTEIQEMEFLQFSKGLSFMRKEDFAEWLLFFTNTENKDIYWKNVREKLSAGESISLDEFKSFCHFTTHLEDFAIAMQMFSLAHRPVRLAEFKRAVKVATGQELSNNILDTVFKIFDLDGDECLSHEEFLGVLKNRMHRGLWVPQHQSIQEYWKCVKKESIKGVKEVWKQAGKGLF

SEQ ID NO: 913277 - protein, 466 aa, Homo sapiens
RESSQAVGGGAGREAPSSCASAKMAAAAGSCARVAAWGGKLRRGLAVSRQAVRSPGPLAAAVAGAALAGAGAAWHHSRVSVAARDGSFTVSAQKNVEHGIIYIGKPSLRKQRFMQFSSLEHEGEYYMTPRDFLFSVMFEQMERKTSVKKLTKKDIEDTLSGIQTAGCGSTFFRDLGDKGLISYTEYLFLLTILTKPHSGFHVAFKMLDTDGNEMIEKREFFKDCTIDSERQLQKIISKQDDLMTVKTNETGYQEAIVKEPEINTTLQMRFFGKRGQRKLHYKEFRRFMENLQTEIQEMEFLQFSKGLSFMRKEDFAEWLLFFTNTENKDIYWKNVREKLSAGESISLDEFKSFCHFTTHLEDFAIAMQMFSLAHRPVRLAEFKRAVKVATGQELSNNILDTVFKIFDLDGDECLSHEEFLGVLKNRMHRGLWVPQHQSIQEYWKCVKKESIKGVKEVWKQAGKGLF

SEQ ID NO: 913278 - protein, 448 aa, Homo sapiens
RESSQAVGGGAGREAPSSCASAKMAAAAGSCARVAAWGGKLRRGLAVSRQAVRSPGPLAAAVAGAALAGAGAAWHHSRVSVAARDGSFTVSAQKNVEHGIIYIGKPSLRKQRFMQFSSLEHEGEYYMTPRDFLFSVMFEQMERKTSVKKLTKKDIEDTLSGIQTAGCGSTFFRDLGDKGLISYTEYLFLLTILTKPHSGFHVAFKMLDTDGNEMIEKREFFKLQKIISKQDDLMTVKTNETGYQEAIVKEPEINTTLQMRFFGKRGQRKLHYKEFRRFMENLQTEIQEMEFLQFSKGLSFMRKEDFAEWLLFFTNTENKDIYWKNVREKLSAGESISLDEFKSFCHFTTHLEDFAIAMQMFSLAHRPVRLAEFKRAVKVATGQELSNNILDTVFKIFDLDGDECLSHEEFLGVLKNRMHRGLWSPTFQGSENWKGWRKEPLRREGGNL

SEQ ID NO: 913279 - protein, 457 aa, Homo sapiens
RESSQAVGGGAGREAPSSCASAKMAAAAGSCARVAAWGGKLRRGLAVSRQAVRSPGPLAAAVAGAALAGAGAAWHHSRVSVAARDGSFTVSAQKNVEHGIIYIGKPSLRKQRFMQFSSLEHEGEYYMTPRDFLFSVMFEQMERKTSVKKLTKKDIEDTLSGIQTAGCGSTFFRDLGDKGLISYTEYLFLLTILTKPHSGFHVAFKMLDTDGNEMIEKREFFKLQKIISKQDDLMTVKTNETGYQEAIVKEPEINTTLQMRFFGKRGQRKLHYKEFRRFMENLQTEIQEMEFLQFSKGLSFMRKEDFAEWLLFFTNTENKDIYWKNVREKLSAGESISLDEFKSFCHFTTHLEDFAIAMQMFSLAHRPVRLAEFKRAVKVATGQELSNNILDTVFKIFDLDGDECLSHEEFLGVLKNRMHRGLWVPQHQSIQEYWKCVKKESIKGVKEVWKQAGKGLF

SEQ ID NO: 913280 - protein, 457 aa, Homo sapiens; identical to SEQ ID NO: 913279

SEQ ID NO: 913281 - protein, 365 aa, Homo sapiens
MKNVEHGIIYIGKPSLRKQRFMQFSSLEHEGEYYMTPRDFLFSVMFEQMERKTSVKKLTKKDIEDTLSGIQTAGCGSTFFRDLGDKGLISYTEYLFLLTILTKPHSGFHVAFKMLDTDGNEMIEKREFFKLQKIISKQDDLMTVKTNETGYQEAIVKEPEINTTLQMRFFGKRGQRKLHYKEFRRFMENLQTEIQEMEFLQFSKGLSFMRKEDFAEWLLFFTNTENKDIYWKNVREKLSAGESISLDEFKSFCHFTTHLEDFAIAMQMFSLAHRPVRLAEFKRAVKVATGQELSNNILDTVFKIFDLDGDECLSHEEFLGVLKNRMHRGLWVPQHQSIQEYWKCVKKESIKGVKEVWKQAGKGLF

SEQ ID NO: 913282 - protein, 405 aa, Homo sapiens
RESSQAVGGGAGREAPSSCASAKMAAAAGSCARVAAWGGKLRRGLAVSRQAVRSPGPLAAAVAGAALAGAGAAWHHSRVSVAARDGSFTVSAQKNVEHGIIYIGKPSLRKQRFMQFSSLEHEGEYYMTPRDFLFSVMFEQMERKTSVKKLTKKDIEDTLSGIQTAGCGSTFFRDLGDKGLISYTEYLFLLTILTKPHSGFHVAFKMLDTDGNEMIEKREFFKLQKIISKQDDLMTVKTNETGYQEAIVKEPEINTTLQMRFFGKRGQRKLHYKEFRRFMENLQTEIQEMEFLQFSKGLSFMRKEDFAEWLLFFTNTENKDIYWKNVREKLSAGESISLDEFKSFCHFTTHLEDFAIAIAKVQLTYMAGRQRGVKERWKGHTGRDLNNNLGNGLKTLFGLEESAKQ

SEQ ID NO: 913283 - protein, 222 aa, Homo sapiens
ISSPRRHVSRFLLRSLLCQRSQQDNMAPKKPEPKKEAAKPAPAPAPAPAPAPAPAPEAPKEPAFDPKSVKIDFTADQIEEFKEAFSLFDRTPTGEMKITYGQCGDVLRALGRNPTNAEVLRVLGKPKPEEMNVKMLDFETFLPILQHISRNKEQGTYEDFVEGLRVFDKESNGTVMGAELRHVLATLGEKMTEAEVEQLLAGQEDANGCINYEAFVKHIMSG

SEQ ID NO: 913284 - protein, 197 aa, Homo sapiens
MAPKKPEPKKEAAKPAPAPAPAPAPAPAPAPEAPKEPAFDPKSVKIDFTADQIEEFKEAFSLFDRTPTGEMKITYGQCGDVLRALGRNPTNAEVLRVLGKPKPEEMNVKMLDFETFLPILQHISRNKEQGTYEDFVEGLRVFDKESNGTVMGAELRHVLATLGEKMTEAEVEQLLAGQEDANGCINYEAFVKHIMSG

SEQ ID NO: 913285 - protein, 127 aa, Homo sapiens
MKITYGQCGDVLRALGRNPTNAEVLRVLGKPKPEEMNVKMLDFETFLPILQHISRNKEQGTYEDFVEGLRVFDKESNGTVMGAELRHVLATLGEKMTEAEVEQLLAGQEDANGCINYEAFVKHIMSG

SEQ ID NO: 913286 - protein, 222 aa, Homo sapiens; identical to SEQ ID NO: 913283

SEQ ID NO: 913287 - protein, 244 aa, Homo sapiens
ISSPRRHVSRFLLRSLLCQRSQQDNMAPKKPEPKKEAAKPAPAPAPAPAPAPAPAPEAPKEPAFDPKSVKIDFTADQIEEFKEAFSLFDRTPTGEMKITYGQCGDVLRALGRNPTNAEVLRVLGKPKPEEMNVKMLDFETFLPILQHISRNKEQGTYEDFVEGLRVFDKESNGTVMGAELRHVLATLGEKMTEAEVEQLLAGQEDANGCINYEVSQIAFPAAFLPPLTQYGTLYSQGHATSLLF

SEQ ID NO: 913288 - protein, 209 aa, Homo sapiens
ISSPRRHVSRFLLRSLLCQRSQQDNMAPKKPEPKKEAAKPAPAPAPAPAPAPAPAPEAPKEPAFDPKSVKIDFTADQIEEFKEAFSLFDRTPTGEMKITYGQCGDVLRALGRNPTNAEVLRVLGKPKPEEMNVKMLDFETFLPILQHISRNKEQGTYEDFVEGLRVFDKESNGTGEKMTEAEVEQLLAGQEDANGCINYEAFVKHIMSG

SEQ ID NO: 913289 - protein, 125 aa, Homo sapiens
  misc_feature (122)..(122): Xaa can be any naturally occurring amino acid
ISSPRRHVSRFLLRSLLCQRSQQDNMAPKKPEPKKEAAKPAPAPAPAPAPAPAPAPEAPKEPAFDPKSVKIDFRQPMGRRAHLSLGRRVAEWVRRPQHSCSLRHFGRMSGASPAGSACKPGXGST

SEQ ID NO: 913290 - protein, 278 aa, Homo sapiens
MDCQNGHQHISQELEVLRIHMQLVTVQFTQLGKGALEIIQVLYGISQGSQHLLAMCLDFGVAHDGRGRGQVLLCQRSQQDNMAPKKPEPKKEAAKPAPAPAPAPAPAPAPAPEAPKEPAFDPKSVKIDFTADQIEEFKEAFSLFDRTPTGEMKITYGQCGDVLRALGRNPTNAEVLRVLGKPKPEEMNVKMLDFETFLPILQHISRNKEQGTYEDFVEGLRVFDKESNGTVMGAELRHVLATLGEKMTEAEVEQLLAGQEDANGCINYEAFVKHIMSG

SEQ ID NO: 913291 - protein, 224 aa, Homo sapiens
NCSSQLISLAAPAYLRRLLCQRSQQDNMAPKKPEPKKEAAKPAPAPAPAPAPAPAPAPEAPKEPAFDPKSVKIDFTADQIEEFKEAFSLFDRTPTGEMKITYGQCGDVLRALGRNPTNAEVLRVLGKPKPEEMNVKMLDFETFLPILQHISRNKEQGTYEDFVEGLRVFDKESNGTVMGAELRHVLATLGEKMTEAEVEQLLAGQEDANGCINYEAFVKHIMSG

SEQ ID NO: 913292 - protein, 222 aa, Homo sapiens; identical to SEQ ID NO: 913283

SEQ ID NO: 913293 - protein, 175 aa, Homo sapiens
ISSPRRHVSRFLLRSLLCQRSQQDNMAPKKPEPKKEAAKPAPAPAPAPAPAPAPAPEAPKEPAFDPKSVKIDFTADQIEEFKEAFSLFDRTPTGEMKITYGQCGDVLRALGRNPTNAEVLRVLGKPKPEEMNVKMLDFETFLPILQHISRNKEQGTYEDFVEGLRVFDKESNGTG

SEQ ID NO: 913294 - protein, 171 aa, Homo sapiens
MDCQNGHQHISQELEVLRIHMQLVTVQFTQLGKGALEIIQVLYGIPKEVSTFLPCALTLGLPMMAEAEDRYSSAKDPNKTTWLPRSLSLRRRQPSQLQLQLQPLHQPDFVEGLRVFDKESNGTVMGAELRHVLATLGEKMTEAEVEQLLAGQEDANGCINYEAFVKHIMSG

SEQ ID NO: 913295 - protein, 187 aa, Homo sapiens
MPEVERKPKITASRKLLLKSLMLAKAKECWEQEHEEREAEKVRYLAERIPTLQTRGLSLSALQDLCRELHAKVEVVDEERYDIEAKCLHNTREIKDLKLKVMDLRGKFKRPPLRRVRVSADAMLRALLGSKHKVSMDLRANLKSVKKEDTEKERPVEVGDWRKNVEAMSGMEGRKKMFDAAKSPTSQ

SEQ ID NO: 913296 - protein, 70 aa, Homo sapiens
LGSAPRQSAVYGEAQASPAPRGLNKVLSHCHHAGSREKTQDHCLPQTLAEEPDAGQGQGMLGAGARGARG

SEQ ID NO: 913297 - protein, 187 aa, Homo sapiens; identical to SEQ ID NO: 913295

SEQ ID NO: 913298 - protein, 86 aa, Homo sapiens
  misc_feature (14)..(14): Xaa can be any naturally occurring amino acid
GGGEGAHTALRSDXELAVSDLTESQLAVLRSELLLHASSPTQLTHLSACVWSIPSHLSPTSSLQPACPPLELGLNRYPRGRKNASV

SEQ ID NO: 913299 - protein, 176 aa, Homo sapiens
MPEVERKPKITASRKLLLKSLMLAKAKECWEQEHEEREAEKVRYLAERIPTLQTRGLSLSALQDLCRELHAKVEVVDEERYDIEAKCLHNTREIKDLKLKVMDLRGKFKRPPLRRVRVSADAMLRALLGPTQLTHLSACVWSIPSHLSPTSSLQPACPPLELGLNRYPRGRKNASV

SEQ ID NO: 913300 - protein, 70 aa, Homo sapiens; identical to SEQ ID NO: 913296

SEQ ID NO: 913301 - protein, 187 aa, Homo sapiens; identical to SEQ ID NO: 913295

SEQ ID NO: 913302 - protein, 70 aa, Homo sapiens; identical to SEQ ID NO: 913296

SEQ ID NO: 913303 - protein, 187 aa, Homo sapiens; identical to SEQ ID NO: 913295

SEQ ID NO: 913304 - protein, 191 aa, Homo sapiens
MPEVERKPKITASRKLLLKSLMLAKAKECWEQEHEEREAEKVRYLAERIPTLQTRGLSLSALQDLCRELHAKVEVVDEERYDIEAKCLHNTREIKDLKLKVMDLRGKFKRPPLRRVRVSADAMLRALLGSKHKVSMDLRANLKSVKKEDTEKERPVEVGDWRKNVEAMSGMEGRKKMFDAAKLHALLWNWD

SEQ ID NO: 913305 - protein, 2215 aa, Homo sapiens
MVILQQGDHVWMDLRLGQEFDVPIGAVVKLCDSGQVQVVDDEDNEHWISPQNATHIKPMHPTSVHGVEDMIRLGDLNEAGILRNLLIRYRDHLIYTYTGSILVAVNPYQLLSIYSPEHIRQYTNKKIGEMPPHIFAIADNCYFNMKRNSRDQCCIISGESGAGKTESTKLILQFLAAISGQHSWIEQQVLEATPILEAFGNAKTIRNDNSSRFGKYIDIHFNKRGAIEGAKIEQYLLEKSRVCRQALDERNYHVFYCMLEGMSEDQKKKLGLGQASDYNYLAMGNCITCEGRVDSQEYANIRSAMKVLMFTDTENWEISKLLAAILHLGNLQYEARTFENLDACEVLFSPSLATAASLLEVNPPDLMSCLTSRTLITRGETVSTPLSREQALDVRDAFVKGIYGRLFVWIVDKINAAIYKPPSQDVKNSRRSIGLLDIFGFENFAVNSFEQLCINFANEHLQQFFVRHVFKLEQEEYDLESIDWLHIEFTDNQDALDMIANKPMNIISLIDEESKFPKGTDTTMLHKLNSQHKLNANYIPPKNNHETQFGINHFAGIVYYETQGFLEKNRDTLHGDIIQLVHSSRNKFIKQIFQADVAMGAETRKRSPTLSSQFKRSLELLMRTLGACQPFFVRCIKPNEFKKPMLFDRHLCVRQLRYSGMMETIRIRRAGYPIRYSFVEFVERYRVLLPGVKPAYKQGDLRGTCQRMAEAVLGTHDDWQIGKTKIFLKDHHDMLLEVERDKAITDRVILLQKVIRGFKDRSNFLKLKNAATLIQRHWRGHNCRKNYGLMRLGFLRLQALHRSRKLHQQYRLARQRIIQFQARCRAYLVRKAFRHRLWAVLTVQAYARGMIARRLHQRLRAEYLWRLEAEKMRLAEEEKLRKEMSAKKAKEEAERKHQERLAQLAREDAERELKEKEAARRKKELLEQMERARHEPVNHSDMVDKMFGFLGTSGGLPGQEGQAPSGFEDLERGRREMVEEDLDAALPLPDEDEEDLSEYKFAKFAATYFQGTTTHSYTRRPLKQPLLYHDDEGDQLAALAVWITILRFMGDLPEPKYHTAMSDGSEKIPVMTKIYETLGKKTYKRELQALQGEGEAQLPEGQKKSSVRHKLVHLTLKKKSKLTEEVTKRLHDGESTVQGNSMLEDRPTSNLEKLHFIIGNGILRPALRDEIYCQISKQLTHNPSKSSYARGWILVSLCVGCFAPSEKFVKYLRNFIHGGPPGYAPYCEERLRRTFVNGTRTQPPSWLELQATKSKKPIMLPVTFMDGTTKTLLTDSATTAKELCNALADKISLKDRFGFSLYIALFDKVSSLGSGSDHVMDAISQCEQYAKEQGAQERNAPWRLFFRKEVFTPWHSPSEDNVATNLIYQQVVRGVKFGEYRCEKEDDLAELASQQYFVDYGSEMILERLLNLVPTYIPDREITPLKTLEKWAQLAIAAHKKGIYAQRRTDAQKVKEDVVSYARFKWPLLFSRFYEAYKFSGPSLPKNDVIVAVNWTGVYFVDEQEQVLLELSFPEIMAVSSSRECRVWLSLGCSDLGCAAPHSGWAGLTPAGPCSPCWSCRGAKTTAPSFTLATIKGDEYTFTSSNAEDIRDLVVTFLEGLRKRSKYVVALQDNPNPAGEESGFLSFAKGDLIILDHDTGEQVMNSGWANGINERTKQRGDFPTDSVYVMPTVTMPPREIVALVTMTPDQRQDVVRLLQLRTAEPEVRAKPYTLEEFSYDYFRPPPKHTLSRVMVSKARGKDRLWSHTREPLKQALLKKLLGSEELSQEACLAFIAVLKYMGDYPSKRTRSVNELTDQIFEGPLKAEPLKDEAYVQILKQLTDNHIRYSEERGWELLWLCTGLFPPSNILLPHVQRFLQSRKHCPLAIDCLQRLQKALRNGSRKYPPHLVEVEAIQHKTTQIFHKVYFPDDTDEAFEVESSTKAKDFCQNIATRLLLKSSEGFSLFVKIADKVLSVPENDFFFDFVRHLTDWIKKARPIKDGIVPSLTYQVFFMKKLWTTTVPGKDPMADSIFHYYQELPKYLRGYHKCTREEVLQLGALIYRVKFEEDKSYFPSIPKLLRELVPQDLIRQVSPDDWKRSIVAYFNKHAGKSKEEAKLAFLKLIFKWPTFGSAFFEVKQTTEPNFPEILLIAINKYGVSLIDPKTKDILTTHPFTKISNWSSGNTYFHITIGNLVRGSKLLCETSLGYKMDDLLTSYISQMLTAMSKQRGSRSGK

SEQ ID NO: 913306 - protein, 1186 aa, Homo sapiens
MVILQQGDHVWMDLRLGQEFDVPIGAVVKLCDSGQVQVVDDEDNEHWISPQNATHIKPMHPTSVHGVEDMIRLGDLNEAGILRNLLIRYRDHLIYTYTGSILVAVNPYQLLSIYSPEHIRQYTNKKIGEMPPHIFAIADNCYFNMKRNSRDQCCIISGESGAGKTESTKLILQFLAAISGQHSWIEQQVLEATPILEAFGNAKTIRNDNSSRFGKYIDIHFNKRGAIEGAKIEQYLLEKSRVCRQALDERNYHVFYCMLEGMSEDQKKKLGLGQASDYNYLAMGNCITCEGRVDSQEYANIRSAMKVLMFTDTENWEISKLLAAILHLGNLQYEARTFENLDACEVLFSPSLATAASLLEVNPPDLMSCLTSRTLITRGETVSTPLSREQALDVRDAFVKGIYGRLFVWIVDKINAAIYKPPSQDVKNSRRSIGLLDIFGFENFAVNSFEQLCINFANEHLQQFFVRHVFKLEQEEYDLESIDWLHIEFTDNQDALDMIANKPMNIISLIDEESKFPKGTDTTMLHKLNSQHKLNANYIPPKNNHETQFGINHFAGIVYYETQGFLEKNRDTLHGDIIQLVHSSRNKFIKQIFQADVAMGAETRKRSPTLSSQFKRSLELLMRTLGACQPFFVRCIKPNEFKKPMLFDRHLCVRQLRYSGMMETIRIRRAGYPIRYSFVEFVERYRVLLPGVKPAYKQGDLRGTCQRMAEAVLGTHDDWQIGKTKIFLKDHHDMLLEVERDKAITDRVILLQKVIRGFKDRSNFLKLKNAATLIQRHWRGHNCRKNYGLMRLGFLRLQALHRSRKLHQQYRLARQRIIQFQARCRAYLVRKAFRHRLWAVLTVQAYARGMIARRLHQRLRAEYLWRLEAEKMRLAEEEKLRKEMSAKKAKEEAERKHQERLAQLAREDAERELKEKEAARRKKELLEQMERARHEPVNHSDMVDKMFGFLGTSGGLPGQEGQAPSGFEDLERGRREMVEEDLDAALPLPDEDEEDLSEYKFAKFAATYFQGTTTHSYTRRPLKQPLLYHDDEGDQLAALAVWITILRFMGDLPEPKYHTAMSDGSEKIPVMTKIYETLGKKTYKRELQALQGEGEAQLPEGQKKSSVRHKLVHLTLKKKSKLTEEVTKRLHDGESTVQGNSMLEDRPTSNLEKLHFIIGNGILRPALRCRKVFWWLSGASVNLARD

SEQ ID NO: 913307 - protein, 86 aa, Homo sapiens
MVILQQGDHVWMDLRLGQEFDVPIGAVVKLCDSGQVQVVDDEDNERWISRASPCGQHSNPARSTNGKPEIWPSCLAPWSARKARGA

SEQ ID NO: 913308 - protein, 1406 aa, Homo sapiens
MVILQQGDHVWMDLRLGQEFDVPIGAVVKLCDSGQVQVVDDEDNEHWISPQNATHIKPMHPTSVHGVEDMIRLGDLNEAGILRNLLIRYRDHLIYTYTGSILVAVNPYQLLSIYSPEHIRQYTNKKIGEMPPHIFAIADNCYFNMKRNSRDQCCIISGESGAGKTESTKLILQFLAAISGQHSWIEQQVLEATPILEAFGNAKTIRNDNSSRFGKYIDIHFNKRGAIEGAKIEQYLLEKSRVCRQALDERNYHVFYCMLEGMSEDQKKKLGLGQASDYNYLAMGNCITCEGRVDSQEYANIRSAMKVLMFTDTENWEISKLLAAILHLGNLQYEARTFENLDACEVLFSPSLATAASLLEVNPPDLMSCLTSRTLITRGETVSTPLSREQALDVRDAFVKGIYGRLFVWIVDKINAAIYKPPSQDVKNSRRSIGLLDIFGFENFAVNSFEQLCINFANEHLQQFFVRHVFKLEQEEYDLESIDWLHIEFTDNQDALDMIANKPMNIISLIDEESKFPKGTDTTMLHKLNSQHKLNANYIPPKNNHETQFGINHFAGIVYYETQGFLEKNRDTLHGDIIQLVHSSRNKFIKQIFQADVAMGAETRKRSPTLSSQFKRSLELLMRTLGACQPFFVRCIKPNEFKKPMLFDRHLCVRQLRYSGMMETIRIRRAGYPIRYSFVEFVERYRVLLPGVKPAYKQGDLRGTCQRMAEAVLGTHDDWQIGKTKIFLKDHHDMLLEVERDKAITDRVILLQKVIRGFKDRSNFLKLKNAATLIQRHWRGHNCRKNYGLMRLGFLRLQALHRSRKLHQQYRLARQRIIQFQARCRAYLVRKAFRHRLWAVLTVQAYARGMIARRLHQRLRAEYLWRLEAEKMRLAEEEKLRKEMSAKKAKEEAERKHQERLAQLAREDAERELKEKEAARRKKELLEQMERARHEPVNHSDMVDKMFGFLGTSGGLPGQEGQAPSGFEDLERGRREMVEEDLDAALPLPDEDEEDLSEYKFAKFAATYFQGTTTHSYTRRPLKQPLLYHDDEGDQLAALAVWITILRFMGDLPEPKYHTAMSDGSEKIPVMTKIYETLGKKTYKRELQALQGEGEAQLPEGQKKSSVRHKLVHLTLKKKSKLTEEVTKRLHDGESTVQGNSMLEDRPTSNLEKLHFIIGNGILRPALRDEIYCQISKQLTHNPSKSSYARGWILVSLCVGCFAPSEKFVKYLRNFIHGGPPGYAPYCEERLRRTFVNGTRTQPPSWLELQATKSKKPIMLPVTFMDGTTKTLLTDSATTAKELCNALADKISLKDRFGFSLYIALFDKVSSLGSGSDHVMDAISQCEQYAKEQGAQERNAPWRLFFRKEVFTPWHSPSEDNVATNLIYQQVVRGVKFGEYRCEKVSGRESSARLAWLTASCFPRLG

SEQ ID NO: 913309 - protein, 1533 aa, Homo sapiens
MVILQQGDHVWMDLRLGQEFDVPIGAVVKLCDSGQVQVVDDEDNEHWISPQNATHIKPMHPTSVHGVEDMIRLGDLNEAGILRNLLIRYRDHLIYTYTGSILVAVNPYQLLSIYSPEHIRQYTNKKIGEMPPHIFAIADNCYFNMKRNSRDQCCIISGESGAGKTESTKLILQFLAAISGQHSWIEQQVLEATPILEAFGNAKTIRNDNSSRFGKYIDIHFNKRGAIEGAKIEQYLLEKSRVCRQALDERNYHVFYCMLEGMSEDQKKKLGLGQASDYNYLAMGNCITCEGRVDSQEYANIRSAMKVLMFTDTENWEISKLLAAILHLGNLQYEARTFENLDACEVLFSPSLATAASLLEVNPPDLMSCLTSRTLITRGETVSTPLSREQALDVRDAFVKGIYGRLFVWIVDKINAAIYKPPSQDVKNSRRSIGLLDIFGFENFAVNSFEQLCINFANEHLQQFFVRHVFKLEQEEYDLESIDWLHIEFTDNQDALDMIANKPMNIISLIDEESKFPKGTDTTMLHKLNSQHKLNANYIPPKNNHETQFGINHFAGIVYYETQGFLEKNRDTLHGDIIQLVHSSRNKFIKQIFQADVAMGAETRKRSPTLSSQFKRSLELLMRTLGACQPFFVRCIKPNEFKKPMLFDRHLCVRQLRYSGMMETIRIRRAGYPIRYSFVEFVERYRVLLPGVKPAYKQGDLRGTCQRMAEAVLGTHDDWQIGKTKIFLKDHHDMLLEVERDKAITDRVILLQKVIRGFKDRSNFLKLKNAATLIQRHWRGHNCRKNYGLMRLGFLRLQALHRSRKLHQQYRLARQRIIQFQARCRAYLVRKAFRHRLWAVLTVQAYARGMIARRLHQRLRAEYLWRLEAEKMRLAEEEKLRKEMSAKKAKEEAERKHQERLAQLAREDAERELKEKEAARRKKELLEQMERARHEPVNHSDMVDKMFGFLGTSGGLPGQEGQAPSGFEDLERGRREMVEEDLDAALPLPDEDEEDLSEYKFAKFAATYFQGTTTHSYTRRPLKQPLLYHDDEGDQLAALAVWITILRFMGDLPEPKYHTAMSDGSEKIPVMTKIYETLGKKTYKRELQALQGEGEAQLPEGQKKSSVRHKLVHLTLKKKSKLTEEVTKRLHDGESTVQGNSMLEDRPTSNLEKLHFIIGNGILRPALRDEIYCQISKQLTHNPSKSSYARGWILVSLCVGCFAPSEKFVKYLRNFIHGGPPGYAPYCEERLRRTFVNGTRTQPPSWLELQATKSKKPIMLPVTFMDGTTKTLLTDSATTAKELCNALADKISLKDRFGFSLYIALFDKVSSLGSGSDHVMDAISQCEQYAKEQGAQERNAPWRLFFRKEVFTPWHSPSEDNVATNLIYQQVVRGVKFGEYRCEKEDDLAELASQQYFVDYGSEMILERLLNLVPTYIPDREITPLKTLEKWAQLAIAAHKKGIYAQRRTDAQKVKEDVVSYARFKWPLLFSRFYEAYKFSGTPQPAMLPVPCSVAPAHSLQILRYPAACNAPSPLLCSSSPQPTNSQVPHSLQ

SEQ ID NO: 913310 - protein, 2157 aa, Homo sapiens
MHPTSVHGVEDMIRLGDLNEAGILRNLLIRYRDHLIYTYTGSILVAVNPYQLLSIYSPEHIRQYTNKKIGEMPPHIFAIADNCYFNMKRNSRDQCCIISGESGAGKTESTKLILQFLAAISGQHSWIEQQVLEATPILEAFGNAKTIRNDNSSRFGKYIDIHFNKRGAIEGAKIEQYLLEKSRVCRQALDERNYHVFYCMLEGMSEDQKKKLGLGQASDYNYLAMGNCITCEGRVDSQEYANIRSAMKVLMFTDTENWEISKLLAAILHLGNLQYEARTFENLDACEVLFSPSLATAASLLEVNPPDLMSCLTSRTLITRGETVSTPLSREQALDVRDAFVKGIYGRLFVWIVDKINAAIYKPPSQDVKNSRRSIGLLDIFGFENFAVNSFEQLCINFANEHLQQFFVRHVFKLEQEEYDLESIDWLHIEFTDNQDALDMIANKPMNIISLIDEESKFPKGTDTTMLHKLNSQHKLNANYIPPKNNHETQFGINHFAGIVYYETQGFLEKNRDTLHGDIIQLVHSSRNKFIKQIFQADVAMGAETRKRSPTLSSQFKRSLELLMRTLGACQPFFVRCIKPNEFKKPMLFDRHLCVRQLRYSGMMETIRIRRAGYPIRYSFVEFVERYRVLLPGVKPAYKQGDLRGTCQRMAEAVLGTHDDWQIGKTKIFLKDHHDMLLEVERDKAITDRVILLQKVIRGFKDRSNFLKLKNAATLIQRHWRGHNCRKNYGLMRLGFLRLQALHRSRKLHQQYRLARQRIIQFQARCRAYLVRKAFRHRLWAVLTVQAYARGMIARRLHQRLRAEYLWRLEAEKMRLAEEEKLRKEMSAKKAKEEAERKHQERLAQLAREDAERELKEKEAARRKKELLEQMERARHEPVNHSDMVDKMFGFLGTSGGLPGQEGQAPSGFEDLERGRREMVEEDLDAALPLPDEDEEDLSEYKFAKFAATYFQGTTTHSYTRRPLKQPLLYHDDEGDQLAALAVWITILRFMGDLPEPKYHTAMSDGSEKIPVMTKIYETLGKKTYKRELQALQGEGEAQLPEGQKKSSVRHKLVHLTLKKKSKLTEEVTKRLHDGESTVQGNSMLEDRPTSNLEKLHFIIGNGILRPALRDEIYCQISKQLTHNPSKSSYARGWILVSLCVGCFAPSEKFVKYLRNFIHGGPPGYAPYCEERLRRTFVNGTRTQPPSWLELQATKSKKPIMLPVTFMDGTTKTLLTDSATTAKELCNALADKISLKDRFGFSLYIALFDKVSSLGSGSDHVMDAISQCEQYAKEQGAQERNAPWRLFFRKEVFTPWHSPSEDNVATNLIYQQVVRGVKFGEYRCEKEDDLAELASQQYFVDYGSEMILERLLNLVPTYIPDREITPLKTLEKWAQLAIAAHKKGIYAQRRTDAQKVKEDVVSYARFKWPLLFSRFYEAYKFSGPSLPKNDVIVAVNWTGVYFVDEQEQVLLELSFPEIMAVSSSRECRVWLSLGCSDLGCAAPHSGWAGLTPAGPCSPCWSCRGAKTTAPSFTLATIKGDEYTFTSSNAEDIRDLVVTFLEGLRKRSKYVVALQDNPNPAGEESGFLSFAKGDLIILDHDTGEQVMNSGWANGINERTKQRGDFPTDSVYVMPTVTMPPREIVALVTMTPDQRQDVVRLLQLRTAEPEVRAKPYTLEEFSYDYFRPPPKHTLSRVMVSKARGKDRLWSHTREPLKQALLKKLLGSEELSQEACLAFIAVLKYMGDYPSKRTRSVNELTDQIFEGPLKAEPLKDEAYVQILKQLTDNHIRYSEERGWELLWLCTGLFPPSNILLPHVQRFLQSRKHCPLAIDCLQRLQKALRNGSRKYPPHLVEVEAIQHKTTQIFHKVYFPDDTDEAFEVESSTKAKDFCQNIATRLLLKSSEGFSLFVKIADKVLSVPENDFFFDFVRHLTDWIKKARPIKDGIVPSLTYQVFFMKKLWTTTVPGKDPMADSIFHYYQELPKYLRGYHKCTREEVLQLGALIYRVKFEEDKSYFPSIPKLLRELVPQDLIRQVSPDDWKRSIVAYFNKHAGKSKEEAKLAFLKLIFKWPTFGSAFFEVKQTTEPNFPEILLIAINKYGVSLIDPKTKDILTTHPFTKISNWSSGNTYFHITIGNLVRGSKLLCETSLGYKMDDLLTSYISQMLTAMSKQRGSRSGK

SEQ ID NO: 913311 - protein, 313 aa, Homo sapiens
KVLGHQLPQQLGDTGEVGLVLLELDPENIATRLLLKSSEGFSLFVKIADKVLSVPENDFFFDFVRHLTDWIKKARPIKDGIVPSLTYQVFFMKKLWTTTVPGKDPMADSIFHYYQELPKYLRGYHKCTREEVLQLGALIYRVKFEEDKSYFPSIPKLLRELVPQDLIRQVSPDDWKRSIVAYFNKHAGKSKEEAKLAFLKLIFKWPTFGSAFFEVKQTTEPNFPEILLIAINKYGVSLIDPKTKDILTTHPFTKISNWSSGNTYFHITIGNLVRGSKLLCETSLGYKMDDLLTSYISQMLTAMSKQRGSRSGK

SEQ ID NO: 913312 - protein, 110 aa, Homo sapiens
CERRSPRCVPSPTRWRSFPMTTSGDASWGRMGATGLGAAGFRYCLVVCWGCFVKPPPVSRAWVRGSWRAVSVCQDDPSYVSHLIFLPSRDVTAPTPGWAFETESWWGCGL

SEQ ID NO: 913313 - protein, 2177 aa, Homo sapiens
MVILQQGDHVWMDLRLGQEFDVPIGAVVKLCDSGQVQVVDDEDNEHWISPQNATHIKPMHPTSVHGVEDMIRLGDLNEAGILRNLLIRYRDHLIYTYTGSILVAVNPYQLLSIYSPEHIRQYTNKKIGEMPPHIFAIADNCYFNMKRNSRDQCCIISGESGAGKTESTKLILQFLAAISGQHSWIEQQVLEATPILEAFGNAKTIRNDNSSRFGKYIDIHFNKRGAIEGAKIEQYLLEKSRVCRQALDERNYHVFYCMLEGMSEDQKKKLGLGQASDYNYLAMGNCITCEGRVDSQEYANIRSAMKVLMFTDTENWEISKLLAAILHLGNLQYEARTFENLDACEVLFSPSLATAASLLEVNPPDLMSCLTSRTLITRGETVSTPLSREQALDVRDAFVKGIYGRLFVWIVDKINAAIYKPPSQDVKNSRRSIGLLDIFGFENFAVNSFEQLCINFANEHLQQFFVRHVFKLEQEEYDLESIDWLHIEFTDNQDALDMIANKPMNIISLIDEESKFPKGTDTTMLHKLNSQHKLNANYIPPKNNHETQFGINHFAGIVYYETQGFLEKNRDTLHGDIIQLVHSSRNKFIKQIFQADVAMGAETRKRSPTLSSQFKRSLELLMRTLGACQPFFVRCIKPNEFKKPMLFDRHLCVRQLRYSGMMETIRIRRAGYPIRYSFVEFVERYRVLLPGVKPAYKQGDLRGTCQRMAEAVLGTHDDWQIGKTKIFLKDHHDMLLEVERDKAITDRVILLQKVIRGFKDRSNFLKLKNAATLIQRHWRGHNCRKNYGLMRLGFLRLQALHRSRKLHQQYRLARQRIIQFQARCRAYLVRKAFRHRLWAVLTVQAYARGMIARRLHQRLRAEYLWRLEAEKMRLAEEEKLRKEMSAKKAKEEAERKHQERLAQLAREDAERELKEKEAARRKKELLEQMERARHEPVNHSDMVDKMFGFLGTSGGLPGQEGQAPSGFEDLERGRREMVEEDLDAALPLPDEDEEDLSEYKFAKFAATYFQGTTTHSYTRRPLKQPLLYHDDEGDQLAALAVWITILRFMGDLPEPKYHTAMSDGSEKIPVMTKIYETLGKKTYKRELQALQGEGEAQLPEGQKKSSVRHKLVHLTLKKKSKLTEEVTKRLHDGESTVQGNSMLEDRPTSNLEKLHFIIGNGILRPALRDEIYCQISKQLTHNPSKSSYARGWILVSLCVGCFAPSEKFVKYLRNFIHGGPPGYAPYCEERLRRTFVNGTRTQPPSWLELQATKSKKPIMLPVTFMDGTTKTLLTDSATTAKELCNALADKISLKDRFGFSLYIALFDKVSSLGSGSDHVMDAISQCEQYAKEQGAQERNAPWRLFFRKEVFTPWHSPSEDNVATNLIYQQVVRGVKFGEYRCEKEDDLAELASQQYFVDYGSEMILERLLNLVPTYIPDREITPLKTLEKWAQLAIAAHKKGIYAQRRTDAQKVKEDVVSYARFKWPLLFSRFYEAYKFSGPSLPKNDVIVAVNWTGVYFVDEQEQVLLELSFPEIMAVSSSRGAKTTAPSFTLATIKGDEYTFTSSNAEDIRDLVVTFLEGLRKRSKYVVALQDNPNPAGEESGFLSFAKGDLIILDHDTGEQVMNSGWANGINERTKQRGDFPTDSVYVMPTVTMPPREIVALVTMTPDQRQDVVRLLQLRTAEPEVRAKPYTLEEFSYDYFRPPPKHTLSRVMVSKARGKDRLWSHTREPLKQALLKKLLGSEELSQEACLAFIAVLKYMGDYPSKRTRSVNELTDQIFEGPLKAEPLKDEAYVQILKQLTDNHIRYSEERGWELLWLCTGLFPPSNILLPHVQRFLQSRKHCPLAIDCLQRLQKALRNGSRKYPPHLVEVEAIQHKTTQIFHKVYFPDDTDEAFEVESSTKAKDFCQNIATRLLLKSSEGFSLFVKIADKVLSVPENDFFFDFVRHLTDWIKKARPIKDGIVPSLTYQVFFMKKLWTTTVPGKDPMADSIFHYYQELPKYLRGYHKCTREEVLQLGALIYRVKFEEDKSYFPSIPKLLRELVPQDLIRQVSPDDWKRSIVAYFNKHAGKSKEEAKLAFLKLIFKWPTFGSAFFEVKQTTEPNFPEILLIAINKYGVSLIDPKTKDILTTHPFTKISNWSSGNTYFHITIGNLVRGSKLLCETSLGYKMDDLLTSYISQMLTAMSKQRGSRSGK

SEQ ID NO: 913314 - protein, 2010 aa, Homo sapiens
MVILQQGDHVWMDLRLGQEFDVPIGAVVKLCDSGQVQVVDDEDNEHWISPQNATHIKPMHPTSVHGVEDMIRLGDLNEAGILRNLLIRYRDHLIYTYTGSILVAVNPYQLLSIYSPEHIRQYTNKKIGEMPPHIFAIADNCYFNMKRNSRDQCCIISGESGAGKTESTKLILQFLAAISGQHSWIEQQVLEATPILEAFGNAKTIRNDNSSRFGKYIDIHFNKRGAIEGAKIEQYLLEKSRVCRQALDERNYHVFYCMLEGMSEDQKKKLGLGQASDYNYLAMGNCITCEGRVDSQEYANIRSAMKVLMFTDTENWEISKLLAAILHLGNLQYEARTFENLDACEVLFSPSLATAASLLEVNPPDLMSCLTSRTLITRGETVSTPLSREQALDVRDAFVKGIYGRLFVWIVDKINAAIYKPPSQDVKNSRRSIGLLDIFGFENFAVNSFEQLCINFANEHLQQFFVRHVFKLEQEEYDLESIDWLHIEFTDNQDALDMIANKPMNIISLIDEESKFPKGTDTTMLHKLNSQHKLNANYIPPKNNHETQFGINHFAGIVYYETQGFLEKNRDTLHGDIIQLVHSSRNKFIKQIFQADVAMGAETRKRSPTLSSQFKRSLELLMRTLGACQPFFVRCIKPNEFKKPMLFDRHLCVRQLRYSGMMETIRIRRAGYPIRYSFVEFVERYRVLLPGVKPAYKQGDLRGTCQRMAEAVLGTHDDWQIGKTKIFLKDHHDMLLEVERDKAITDRVILLQKVIRGFKDRSNFLKLKNAATLIQRHWRGHNCRKNYGLMRLGFLRLQALHRSRKLHQQYRLARQRIIQFQARCRAYLVRKAFRHRLWAVLTVQAYARGMIARRLHQRLRAEYLWRLEAEKMRLAEEEKLRKEMSAKKAKEEAERKHQERLAQLAREDAERELKEKEAARRKKELLEQMERARHEPVNHSDMVDKMFGFLGTSGGLPGQEGQAPSGFEDLERGRREMVEEDLDAALPLPDEDEEDLSEYKFAKFAATYFQGTTTHSYTRRPLKQPLLYHDDEGDQLAALAVWITILRFMGDLPEPKYHTAMSDGSEKIPVMTKIYETLGKKTYKRELQALQGEGEAQLPEGQKKSSVRHKLVHLTLKKKSKLTEEVTKRLHDGESTVQGNSMLEDRPTSNLEKLHFIIGNGILRPALRDEIYCQISKQLTHNPSKSSYARGWILVSLCVGCFAPSEKFVKYLRNFIHGGPPGYAPYCEERLRRTFVNGTRTQPPSWLELQATKSKKPIMLPVTFMDGTTKTLLTDSATTAKELCNALADKISLKDRFGFSLYIALFDKVSSLGSGSDHVMDAISQCEQYAKEQGAQERNAPWRLFFRKEVFTPWHSPSEDNVATNLIYQQVVRGVKFGEYRCEKEDDLAELASQQYFVDYGSEMILERLLNLVPTYIPDREITPLKTLEKWAQLAIAAHKKGIYAQRRTDAQKVKEDVVSYARFKWPLLFSRFYEAYKFSGPSLPKNDVIVAVNWTGVYFVDEQEQVLLELSFPEIMAVSSSRECRVWLSLGCSDLGCAAPHSGWAGLTPAGPCSPCWSCRGAKTTAPSFTLATIKGDEYTFTSSNAEDIRDLVVTFLEGLRKRSKYVVALQDNPNPAGEESGFLSFAKGDLIILDHDTGEQVMNSGWANGINERTKQRGDFPTDSVYVMPTVTMPPREIVALVTMTPDQRQDVVRLLQLRTAEPEVRAKPYTLEEFSYDYFRPPPKHTLSRVMVSKARGKDRLWSHTREPLKQALLKKLLGSEELSQEACLAFIAVLKYMGDYPSKRTRSVNELTDQIFEGPLKAEPLKDEAYVQILKQLTDNHIRYSEERGWELLWLCTGLFPPSNILLPHVQRFLQSRKHCPLAIDCLQRLQKALRNGSRKYPPHLVEVEAIQHKTTQIFHKVYFPDDTDEVRVTGFYGLQCPGQGRASWVDTKGGLKPLPHHLTFAASSSCPVVESGLRTKAIDSPGQGPLVPDPTPASWSSFLQKGAPPSLSLRRTCLGEKRFSL

SEQ ID NO: 913315 - protein, 1351 aa, Homo sapiens
MVILQQGDHVWMDLRLGQEFDVPIGAVVKLCDSGQVQVVDDEDNEHWISPQNATHIKPMHPTSVHGVEDMIRLGDLNEAGILRNLLIRYRDHLIYTYTGSILVAVNPYQLLSIYSPEHIRQYTNKKIGEMPPHIFAIADNCYFNMKRNSRDQCCIISGESGAGKTESTKLILQFLAAISGQHSWIEQQVLEATPILEAFGNAKTIRNDNSSRFGKYIDIHFNKRGAIEGAKIEQYLLEKSRVCRQALDERNYHVFYCMLEGMSEDQKKKLGLGQASDYNYLAMGNCITCEGRVDSQEYANIRSAMKVLMFTDTENWEISKLLAAILHLGNLQYEARTFENLDACEVLFSPSLATAASLLEVNPPDLMSCLTSRTLITRGETVSTPLSREQALDVRDAFVKGIYGRLFVWIVDKINAAIYKPPSQDVKNSRRSIGLLDIFGFENFAVNSFEQLCINFANEHLQQFFVRHVFKLEQEEYDLESIDWLHIEFTDNQDALDMIANKPMNIISLIDEESKFPKGTDTTMLHKLNSQHKLNANYIPPKNNHETQFGINHFAGIVYYETQGFLEKNRDTLHGDIIQLVHSSRNKFIKQIFQADVAMGAETRKRSPTLSSQFKRSLELLMRTLGACQPFFVRCIKPNEFKKPMLFDRHLCVRQLRYSGMMETIRIRRAGYPIRYSFVEFVERYRVLLPGVKPAYKQGDLRGTCQRMAEAVLGTHDDWQIGKTKIFLKDHHDMLLEVERDKAITDRVILLQKVIRGFKDRSNFLKLKNAATLIQRHWRGHNCRKNYGLMRLGFLRLQALHRSRKLHQQYRLARQRIIQFQARCRAYLVRKAFRHRLWAVLTVQAYARGMIARRLHQRLRAEYLWRLEAEKMRLAEEEKLRKEMSAKKAKEEAERKHQERLAQLAREDAERELKEKEAARRKKELLEQMERARHEPVNHSDMVDKMFGFLGTSGGLPGQEGQAPSGFEDLERGRREMVEEDLDAALPLPDEDEEDLSEYKFAKFAATYFQGTTTHSYTRRPLKQPLLYHDDEGDQLAALAVWITILRFMGDLPEPKYHTAMSDGSEKIPVMTKIYETLGKKTYKRELQALQGEGEAQLPEGQKKSSVRHKLVHLTLKKKSKLTEEVTKRLHDGESTVQGNSMLEDRPTSNLEKLHFIIGNGILRPALRDEIYCQISKQLTHNPSKSSYARGWILVSLCVGCFAPSEKFVKYLRNFIHGGPPGYAPYCEERLRRTFVNGTRTQPPSWLELQATKSKKPIMLPVTFMDGTTKTLLTDSATTAKELCNALADKISLKDRFGFSLYIALFDKVWPPGSTSSRKHLLPAPLRAASAATYLPGLFTLEHLGFPLSLC

SEQ ID NO: 913316 - protein, 132 aa, Homo sapiens
QERLTLSQLGPGFIPVPKCFSCSGPPSDAFSSFFQQTTEPNFPEILLIAINKYGVSLIDPKTKDILTTHPFTKISNWSSGNTYFHITIGNLVRGSKLLCETSLGYKMDDLLTSYISQMLTAMSKQRGSRSGK

SEQ ID NO: 913317 - protein, 55 aa, Homo sapiens
GKWRDPGVGGGRGRLAGEHLGCCLYQVNPPDLMSCLTSRTLITRGETVSTPLSRE

SEQ ID NO: 913318 - protein, 267 aa, Homo sapiens
FRWALNPERLAMPLHKYPVWLWKRLQLREGICSRLPGHYLRSLEEERTPTPVHYRPHGAKFKINPKNGQRERVEDVPIPIYFPPESQRGLWGGEGWILGQIYANNDKLSKRLKKVWKPQLFEREFYSEILDKKFTVTVTMRTLDLIDEAYGLDFYILKTPKEDLCSKFGMDLKRGMLLRLARQDPQLHPEDPERRAAIYDKYKEFAIPEEEAEWVGLTLEEAIEKQRLLEEKDPVPLFKIYVAELIQQLQQQALSEPAVVQKRASGQ

SEQ ID NO: 913319 - protein, 189 aa, Homo sapiens
FRWALNPERLAMPLHKYPVWLWKRLQLREGICSRLPGHYLRSLEEERTPTPVHYRPHGAKFKINPKNGQRERVEDVPIPIYFPPESQRGLWGGEGWILGQIYANNDKLSKRLKKVWKPQLFEREFYSEILDKKFTVTVTMRTLDLIDEAYGLDFYILKASGVGRVSAHRVWDGPVRLTGAPGQHHTGAR

SEQ ID NO: 913320 - protein, 271 aa, Homo sapiens
KARYEAWVLEPERLAMPLHKYPVWLWKRLQLREGICSRLPGHYLRSLEEERTPTPVHYRPHGAKFKINPKNGQRERVEDVPIPIYFPPESQRGLWGGEGWILGQIYANNDKLSKRLKKVWKPQLFEREFYSEILDKKFTVTVTMRTLDLIDEAYGLDFYILKTPKEDLCSKFGMDLKRGMLLRLARQDPQLHPEDPERRAAIYDKYKEFAIPEEEAEWVGLTLEEAIEKQRLLEEKDPVPLFKIYVAELIQQLQQQALSEPAVVQKRASGQ

SEQ ID NO: 913321 - protein, 274 aa, Homo sapiens
RLRYEAWVVVGLNPERLAMPLHKYPVWLWKRLQLREGICSRLPGHYLRSLEEERTPTPVHYRPHGAKFKINPKNGQRERVEDVPIPIYFPPESQRGLWGGEGWILGQIYANNDKLSKRLKKVWKPQLFEREFYSEILDKKFTVTVTMRTLDLIDEAYGLDFYILKTPKEDLCSKFGMDLKRGMLLRLARQDPQLHPEDPERRAAIYDKYKEFAIPEEEAEWVGLTLEEAIEKQRLLEEKDPVPLFKIYVAELIQQLQQQALSEPAVVQKRASGQ

SEQ ID NO: 913322 - protein, 273 aa, Homo sapiens
QVGCGGAPGQKGRGRLAMPLHKYPVWLWKRLQLREGICSRLPGHYLRSLEEERTPTPVHYRPHGAKFKINPKNGQRERVEDVPIPIYFPPESQRGLWGGEGWILGQIYANNDKLSKRLKKVWKPQLFEREFYSEILDKKFTVTVTMRTLDLIDEAYGLDFYILKTPKEDLCSKFGMDLKRGMLLRLARQDPQLHPEDPERRAAIYDKYKEFAIPEEEAEWVGLTLEEAIEKQRLLEEKDPVPLFKIYVAELIQQLQQQALSEPAVVQKRASGQ

SEQ ID NO: 913323 - protein, 137 aa, Homo sapiens
MVFSHLAAEKGNSAHQWEAACVALIRQDRLNAGVGDELLLELEAALAAGAQQASRAPNCLRVQRKTLTFPIPVGSDFPREEAEWVGLTLEEAIEKQRLLEEKDPVPLFKIYVAELIQQLQQQALSEPAVVQKRASGQ

SEQ ID NO: 913324 - protein, 132 aa, Homo sapiens
FRWALNPERLAMPLHKYPVWLWKRLQLREGICSRLPGHYLRSLEEERTPTPVHYRPHGAKFKINPKNGQRERVEDVPIPIYFPPESQRGLWGGEGWILGQIYANNDKAAGTVRAGGGAEESQWPVTTQLLHA

SEQ ID NO: 913325 - protein, 333 aa, Homo sapiens
RLRYEAWVVVGLNPERLAMPLHKYPVWLWKRLQLREGICSRLPGHYLRSLEEERTPTPVHYRPHGAKFKINPKNGQRERVEDVPIPIYFPPESQRGLWGGEGWILGQIYANNDKLSKRLKKVWKPQLFEREFYSEILDKKFTVTVTMRTLDLIDEAYGLDFYILKTPKEDLCSKFGMDLKRGMLLRLARQDPQLHPEDPERRAAIYDKYKEFAIPEEEAEWVGLTLEEAIEKQRLLEEKDPVPLFKIYVAELIQQLQQQALSEPAVVQKRASGQWEPEVHAGQRPRSPGLGGPIRRRAREGDGRAAHGGSPDGKLRAEKSANREQTWGGYTAR

SEQ ID NO: 913326 - protein, 256 aa, Homo sapiens; identical to SEQ ID NO: 786580

SEQ ID NO: 913327 - protein, 256 aa, Homo sapiens; identical to SEQ ID NO: 786580

SEQ ID NO: 913328 - protein, 205 aa, Homo sapiens
FLKIIPCGGQARWLTPVVPALWKTEVGGSLEVRSSRPPLKEKSHKLSKRLKKVWKPQLFEREFYSEILDKKFTVTVTMRTLDLIDEAYGLDFYILKTPKEDLCSKFGMDLKRGMLLRLARQDPQLHPEDPERRAAIYDKYKEFAIPEEEAEWVGLTLEEAIEKQRLLEEKDPVPLFKIYVAELIQQLQQQALSEPAVVQKRASGQ

SEQ ID NO: 913329 - protein, 68 aa, Homo sapiens
QVGCGGAPGQKGRGRLAMPLHKYPVWLWKRLQLREGICSRLPGHYLRSLEEQQALSEPAVVQKRASGQ

SEQ ID NO: 913330 - protein, 354 aa, Homo sapiens
MALFVRLLALALALALGPAATLAGPAKSPYQLVLQHSRLRGRQHGPNVCAVQKVIGTNRKYFTNCKQWYQRKICGKSTVISYECCPGYEKVPGEKGCPAALPLSNLYETLGVVGSTTTQLYTDRTEKLRPEMEGPGSFTIFAPSNEAWASLPAEVLDSLVSNVNIELLNALRYHMVGRRVLTDELKHGMTLTSMYQNSNIQIHHYPNGIVTVNCARLLKADHHATNGVVHLIDKVISTITNNIQQIIEIEDTFETLRAAVAASGLNTMLEGNGQYTLLAPTNEAFEKIPSETLNRILGDPEALRDLLNNHILKSAMCAEAIVAGLSVETLEGTTLEVGCSGDMPHYQREGDHLQ

SEQ ID NO: 913331 - protein, 354 aa, Homo sapiens; identical to SEQ ID NO: 913330

SEQ ID NO: 913332 - protein, 354 aa, Homo sapiens; identical to SEQ ID NO: 913330

SEQ ID NO: 913333 - protein, 354 aa, Homo sapiens; identical to SEQ ID NO: 913330

SEQ ID NO: 913334 - protein, 312 aa, Homo sapiens
MLGPNVCAVQKVIGTNRKYFTNCKQWYQRKICGKSTVISYECCPGYEKVPGEKGCPAALPLSNLYETLGVVGSTTTQLYTDRTEKLRPEMEGPGSFTIFAPSNEAWASLPAEVLDSLVSNVNIELLNALRYHMVGRRVLTDELKHGMTLTSMYQNSNIQIHHYPNGIVTVNCARLLKADHHATNGVVHLIDKVISTITNNIQQIIEIEDTFETLRAAVAASGLNTMLEGNGQYTLLAPTNEAFEKIPSETLNRILGDPEALRDLLNNHILKSAMCAEAIVAGLSVETLEGTTLEVGCSGDMPHYQREGDHLQ

SEQ ID NO: 913335 - protein, 354 aa, Homo sapiens; identical to SEQ ID NO: 913330

SEQ ID NO: 913336 - protein, 354 aa, Homo sapiens; identical to SEQ ID NO: 913330

SEQ ID NO: 913337 - protein, 180 aa, Homo sapiens
MVGRRVLTDELKHGMTLTSMYQNSNIQIHHYPNGIVTVNCARLLKADHHATNGVVHLIDKVISTITNNIQQIIEIEDTFETLRAAVAASGLNTMLEGNGQYTLLAPTNEAFEKIPSETLNRILGDPEALRDLLNNHILKSAMCAEAIVAGLSVETLEGTTLEVGCSGDMPHYQREGDHLQ

SEQ ID NO: 913338 - protein, 354 aa, Homo sapiens; identical to SEQ ID NO: 913330

SEQ ID NO: 913339 - protein, 190 aa, Homo sapiens [sequence omitted]

SEQ ID NO: 913340 - protein, 344 aa, Homo sapiens
MPECLTINGKAIISNKDILATNGVIHYIDELLIPDSAKTLFELAAESDVSTAIDLFRQAGLGNHLSGSERLTLLAPLNSVFKDGTPPIDAHTRNLLRNHIIKDQLASKYLYHGQTLETLGGKKLRVFVYRNSLCIENSCIAAHDKRGRYGTLFTMDRVLTPPMGTVMDVLKGDNRFSMLVAAIQSAGLTETLNREGVYTVFAPTNEAFRALPPRERSRLLGDAKELANILKYHIGDEILVSGGIGALVRLKSLQGDKLEVSLKNNVVSVNKEPVAEPDIMATNGVVHVITNVLQPPANRPQERGDELADSALEIFKQASAFSRASQRSVRLAPVYQKLLERMKH

SEQ ID NO: 913341 - protein, 354 aa, Homo sapiens; identical to SEQ ID NO: 913330

SEQ ID NO: 913342 - protein, 147 aa, Homo sapiens
MYFYQCCGEKKKRKEKNGKCPEMCLVLNKIYLQPGDIGDEILVSGGIGALVRLKSLQGDKLEVSLKNNVVSVNKEPVAEPDIMATNGVVHVITNVLQPPANRPQERGDELADSALEIFKQASAFSRASQRSVRLAPVYQKLLERMKH

SEQ ID NO: 913343 - protein, 320 aa, Homo sapiens
MALFVRLLALALALALGPAATLAGPAKSPYQLVLQHSRLRGRQHGPNVCAVQKVIGTNRKYFTNCKQWYQRKICGKSTVISYECCPGYEKVPGEKGCPAALPLSNLYETLGVVGSTTTQLYTDRTEKLRPEMEGPGSFTIFAPSNEAWASLPAEVLDSLVSNVNIELLNALRYHMVGRRVLTDELKHGMTLTSMYQNSNIQIHHYPNGIVTVNCARLLKADHHATNGVVHLIDKVISTITNNIQQIIEIEDTFETLRAAVAASGLNTMLEGNGQYTLLAPTNEAFEKIPSETLNRILGDPEALRGEHPLAPAAASFVQLD

SEQ ID NO: 913344 - protein, 354 aa, Homo sapiens; identical to SEQ ID NO: 913330

SEQ ID NO: 913345 - protein, 354 aa, Homo sapiens; identical to SEQ ID NO: 913330

SEQ ID NO: 913346 - protein, 354 aa, Homo sapiens; identical to SEQ ID NO: 913330

SEQ ID NO: 913347 - protein, 354 aa, Homo sapiens; identical to SEQ ID NO: 913330

SEQ ID NO: 913348 - protein, 354 aa, Homo sapiens; identical to SEQ ID NO: 913330

SEQ ID NO: 913349 - protein, 471 aa, Homo sapiens
MALFVRLLALALALALGPAATLAGPAKSPYQLVLQHSRLRGRQHGPNVCAVQKVIGTNRKYFTNCKQWYQRKICGKSTVISYECCPGYEKVPGEKGCPAALPLSNLYETLGVVGSTTTQLYTDRTEKLRPEMEGPGSFTIFAPSNEAWASLPAVDDLRLPGGLLWGTALLPRGVGMMNGSLQSFPTVSGSFLLNPLEKAVELELKYVFQVASNAPRSLLGRKTWVLPEEGSLAEERPGLTRAENMFPRVARTHLLNTESAALTDTLSFLLEVLDSLVSNVNIELLNALRYHMVGRRVLTDELKHGMTLTSMYQNSNIQIHHYPNGIVTVNCARLLKADHHATNGVVHLIDKVISTITNNIQQIIEIEDTFETLRAAVAASGLNTMLEGNGQYTLLAPTNEAFEKIPSETLNRILGDPEALRDLLNNHILKSAMCAEAIVAGLSVETLEGTTLEVGCSGDMPHYQREGDHLQ

SEQ ID NO: 913350 - protein, 161 aa, Homo sapiens
QVRGWVVIGRGYPNGIVTVNCARLLKADHHATNGVVHLIDKVISTITNNIQQIIEIEDTFETLRAAVAASGLNTMLEGNGQYTLLAPTNEAFEKIPSETLNRILGDPEALRDLLNNHILKSAMCAEAIVAGLSVETLEGTTLEVGCSGDMPHYQREGDHLQ

SEQ ID NO: 913351 - protein, 354 aa, Homo sapiens; identical to SEQ ID NO: 913330

SEQ ID NO: 913352 - protein, 354 aa, Homo sapiens; identical to SEQ ID NO: 913330

SEQ ID NO: 913353 - protein, 354 aa, Homo sapiens; identical to SEQ ID NO: 913330

SEQ ID NO: 913354 - protein, 242 aa, Homo sapiens
  misc_feature (237)..(237): Xaa can be any naturally occurring amino acid
MDILVSECSARLLQQEEEIKSLTAEIDRLKNCGCLGASPNLEQLQEENLKLKYRLNILRKSLQAERNKPTKNMINIISRLQEVFGHAIKAAYPDLENPPLLVTPSQQAKFGDYQCNSAMGISQMLKTKEQKVNPREIAENITKHLPDNECIEKVEIAGPGFINVHLRKDFVSEQLTSLLVNGVQLPALGENKKVIVDFSSPNIAKEMHVGHLRSTIIGESISRLFEFAGYDVLRFFXKKKFS

SEQ ID NO: 913355 - protein, 205 aa, Homo sapiens
MDILVSECSARLLQQEEEIKSLTAEIDRLKNCGCLGASPNLEQLQEENLKLKYRLNILRKSLQAERNKPTKNMINIISRLQEVFGHAIKAAYPDLENPPLLVTPSQQAKFGDYQCNSAMGISQMLKTKEQKVNPREIAENITKHLPDNECIEKVEIAGPGFINVHLRKDFVSEQLTSLLVNGVQLPALGENKKVYVHSSINILVS

SEQ ID NO: 913356 - protein, 660 aa, Homo sapiens [sequence omitted]

SEQ ID NO: 913357 - protein, 674 aa, Homo sapiens
LRLGTRLGGGADGRMDILVSECSARLLQQEEEIKSLTAEIDRLKNCGCLGASPNLEQLQEENLKLKYRLNILRKSLQAERNKPTKNMINIISRLQEVFGHAIKAAYPDLENPPLLVTPSQQAKFGDYQCNSAMGISQMLKTKEQKVNPREIAENITKHLPDNECIEKVEIAGPGFINVHLRKDFVSEQLTSLLVNGVQLPALGENKKVIVDFSSPNIAKEMHVGHLRSTIIGESISRLFEFAGYDVLRLNHVGDWGTQFGMLIAHLQDKFPDYLTVSPPIGDLQVFYKESKKRFDTEEEFKKRAYQCVVLLQGKNPDITKAWKLICDVSRQELNKIYDALDVSLIERGESFYQDRMNDIVKEFEDRGFVQVDDGRKIVFVPGCSIPLTIVKSDGGYTYDTSDLAAIKQRLFEEKADMIIYVVDNGQSVHFQTIFAAAQMIGWYDPKVTRVFHAGFGVVLGEDKKKFKTRSGETVRLMDLLGEGLKRSMDKLKEKERDKVLTAEELNAAQTSVAYGCIKYADLSHNRLNDYIFSFDKMLDDRGNTAAYLLYAFTRIRSIARLANIDEEMLQKAARETKILLDHEKEWKLGRCILRFPEILQKILDDLFLHTLCDYIYELATAFTEFYDSCYCVEKDRQTGKILKVNMWRMLLCEAVAAVMAKGFDILGIKPVQRM

SEQ ID NO: 913358 - protein, 319 aa, Homo sapiens
MDILVSECSARLLQQEEEIKSLTAEIDRLKNCGCLGASPNLEQLQEENLKLKYRLNILRKSLQAERNKPTKNMINIISRLQEVFGHAIKAAYPDLENPPLLVTPSQQAKFGDYQCNSAMGISQMLKTKEQKVNPREIAENITKHLPDNECIEKVEIAGPGFINVHLRKDFVSEQLTSLLVNGVQLPALGENKKVIVDFSSPNIAKEMHVGHLRSTIIGESISRLFEFAGYDVLRYVLLPCVLFSFLIFLFGKFYRTWNISLKKEHSTKSVVHQLSSSLQPPSKLLKYVLSLSSEPFLLFYFFRLLVEPRTKLLHSTHVS

SEQ ID NO: 913359 - protein, 660 aa, Homo sapiens [sequence omitted]

SEQ ID NO: 913360 - protein, 351 aa, Homo sapiens
LRIPSSQQELNKIYDALDVSLIERGESFYQDRMNDIVKEFEDRGFVQVDDGRKIVFVPGCSIPLTIVKSDGGYTYDTSDLAAIKQRLFEEKADMIIYVVDNGQSVHFQTIFAAAQMIGWYDPKVTRVFHAGFGVVLGEDKKKFKTRSGETVRLMDLLGEGLKRSMDKLKEKERDKVLTAEELNAAQTSVAYGCIKYADLSHNRLNDYIFSFDKMLDDRGNTAAYLLYAFTRIRSIARLANIDEEMLQKAARETKILLDHEKEWKLGRCILRFPEILQKILDDLFLHTLCDYIYELATAFTEFYDSCYCVEKDRQTGKILKVNMWRMLLCEAVAAVMAKGFDILGIKPVQRM

SEQ ID NO: 913361 - protein, 187 aa, Homo sapiens
MDILVSECSARLLQQEEEIKSLTAEIDRLKNCGCLGASPNLEQLQEENLKLKYRLNILRKSLQAERNKPTKNMINIISRLQEVFGHAIKAAYPDLENPPLLVTPSQQAKFGDYQCNSAMGISQMLKTKEQKVNPREIAENITKHLPDNECIDVSEQLTSLLVNGVQLPALGENKKVYVHSSINILVS

SEQ ID NO: 913362 - protein, 128 aa, Homo sapiens
  misc_feature (117)..(117): Xaa can be any naturally occurring amino acid
MDILVSECSARLLQQEEEIKSLTAEIDRLKNCGCLGASPNLEQLQEENLKLKYRLNILRKSLQAERNNFPNLFWLYFKSAKKAMGVYDTKVTYKLVWYIHHRKAYSLLSDKAKGSFXFFPVFVPLPED

SEQ ID NO: 913363 - protein, 660 aa, Homo sapiens [sequence omitted]

SEQ ID NO: 913364 - protein, 138 aa, Homo sapiens [sequence omitted]

SEQ ID NO: 913365 - protein, 147 aa, Homo sapiens
MDILVSECSARLLQQEEEIKSLTAEIDRLKNCGCLGASPNLEQLQEENLKLKYRLNILRKSLQAERNKPTKNMINIISRLQEVFGHAIKAAYPDLENPPLLVTPSQQAKFGDYQCNSAMGISQVMYCHDSWLFDFFKYYYHHCHLQK

SEQ ID NO: 913366 - protein, 694 aa, Homo sapiens
MDILVSECSARLLQQEEEIKSLTAEIDRLKNCGCLGASPNLEQLQEENLKLKYRLNILRKSLQAERNKPTKNMINIISRLQEVFGHAIKAAYPDLENPPLLVTPSQQAKFGDYQCNSAMGISQMLKTKEQKVNPREIAENITKHLPDNECIEKVEIAGPGFINVHLRKDFVSEQLTSLLVNGVQLPALGENKKVIVDFSSPNIAKEMHVGHLRSTIIGESISRLFEFAGYDVLRLNHVGDWGTQFGMLIAHLQDKFPDYLTVSPPIGDLQVFYKVRCGGSVSVIPALGEAEASRLLEFQEFETSLSNKESKKRFDTEEEFKKRAYQCVVLLQGKNPDITKAWKLICDVSRQELNKIYDALDVSLIERGESFYQDRMNDIVKEFEDRGFVQVDDGRKIVFVPGCSIPLTIVKSDGGYTYDTSDLAAIKQRLFEEKADMIIYVVDNGQSVHFQTIFAAAQMIGWYDPKVTRVFHAGFGVVLGEDKKKFKTRSGETVRLMDLLGEGLKRSMDKLKEKERDKVLTAEELNAAQTSVAYGCIKYADLSHNRLNDYIFSFDKMLDDRGNTAAYLLYAFTRIRSIARLANIDEEMLQKAARETKILLDHEKEWKLGRCILRFPEILQKILDDLFLHTLCDYIYELATAFTEFYDSCYCVEKDRQTGKILKVNMWRMLLCEAVAAVMAKGFDILGIKPVQRM

SEQ ID NO: 913367 - protein, 660 aa, Homo sapiens [sequence omitted]

SEQ ID NO: 913368 - protein, 319 aa, Homo sapiens; identical to SEQ ID NO: 913358

SEQ ID NO: 913369 - protein, 162 aa, Homo sapiens
MDILVSECSARLLQQEEEIKSLTAEIDRLKNCGCLGASPNLEQLQEENLKLKYRLNILRKSLQAERNKPTKNMINIISRLQEVFGHAIKAAYPDLENPPLLVTPSQQAKFGDYQCNSAMGISQMLKTKEQKVNPREIAENITKHLPDNECIEKVEIAGPGMT

SEQ ID NO: 913370 - protein, 1833 aa, Homo sapiens
MDGVSSEANEENDNIERPVRRRHSSILKPPRSPLQDLRGGNETVQESNALRNKKNSRRVSFADTIKVFQTESHMKIVRKSEMEETETGENLLLIQNKKLEDNYCEITGMNTLLSAPIHTQMQQKEFSIIEHTRERKHANDQTVIFSDENQMDLTSSHTVMITKGLLDNPISEKSTKIDTTSFLANLKLHTEDSRMKKEVNFSVDQNTSSENKIDFNDFIKRLKTGKCSAFPDVPDKENFEIPIYSKEPNSASSTHQMHVSLKEDENNSNITRLFREKDDGMNFTQCHTANIQTLIPTSSETNSRESKGNDITIYGNDFMDLTFNHTLQILPATGNFSEIENQTQNAMDVTTGYGTKASGNKTVFKSKQNTAFQDLSINSADKIHITRSHIMGAETHIVSQTCNQDARILAMTPESIYSNPSIQGCKTVFYSSCNDAMEMTKCLSNMREEKNLLKHDSNYSKMYCNPDAMSSLTEKTIYSGEENMDITKSHTVAIDNQIFKQDQSNVQIAAAPTPEKEMMLQNLMTTSEDGKMNVNCNSVPHVSKERIQQSLSNPLSISLTDRKTELLSGENTDLTESHTSNLGSQVPLAAYNLAPESTSESHSQSKSSSDECEEITKSRNEPFQRSDIIAKNSLTDTWNKDKDWVLKILPYLDKDSPQSADCNQEIATSHNIVYCGGVLDKQITNRNTVSWEQSLFSTTKPLFSSGQFSMKNHDTAISSHTVKSVLGQNSKLAEPLRKSLSNPTPDYCHDKMIICSEEEQNMDLTKSHTVVIGFGPSELQELGKTNLEHTTGQLTTMNRQIAVKVEKCGKSPIEKSGVLKSNCIMDVLEDESVQKPKFPKEKQNVKIWGRKSVGGPKIDKTIVFSEDDKNDMDITKSYTIEINHRPLLEKRDCHLVPLAGTSETILYTCGQDDMEITRSHTTALECKTVSPDEITTRPMDKTVVFVDNHVELEMTESHTVFIDYQEKERTDRPNFELSQRKSLGTPTVICTPTEESVFFPGNGESDRLVANDSQLTPLEEWSNNRGPVEVADNMELSKSATCKNIKDVQSPGFLNEPLSSKSQRRKSLKLKNDKTIVFSENHKNDMDITQSCMVEIDNESALEDKEDFHLAGASKTILYSCGQDDMEITRSHTTALECKTLLPNEIAIRPMDKTVLFTDNYSDLEVTDSHTVFIDCQATEKILEENPKFGIGKGKNLGVSFPKDNSCVQEIAEKQALAVGNKIVLHTEQKQQLFAATNRTTNEIIKFHSAAMDEKVIGEVVDQACTLEKAQVESCQLNNRDRRNVDFTSSHATAVCGSSDNYSCLPNVISCTDNLEGSAMLLCDKDEEKANYCPVQNDLAYANDFASEYYLESEGQPLSAPCPLLEKEEVIQTSTKGQLDCVITLHKDQDLIKDPRNLLANQTLVYSQDLGEMTKLNSKRVSFKLPKDQMKVYVDDIYVIPQPHFSADQPPLPKKGQSSINKEEVILSKAGNKSLNIIENSSAPICENKPKILNSEEWFAAACKKELKENIQTTNYNTALDFHSNSDVTKQVIQTHVNAGEAPDPVITSNVPCFHSIKPNLNNLNGKTGEFLAFQTVHLPPLPEQLLELGNKAHNDMHIVQATEIHNINIISSNAKDSRDEENKKSHNGAETTSLPPKTVFKDKVRRCSLGIFLPRLPNKRNCSVTGIDDLEQIPADTTDINHLETQPVSSKDSGIGSVAGKLNLSPSQYINEENLPVYPDEINSSDSINIETEEKALIETYQKEISPYENKMGKTCNSQKRTWVQEEEDIHKEKKIRKNEIKFSDTTQDREVSSVLNQRMFLNFGFCFVFLNCGYSQILILVSGRQKIIIST

SEQ ID NO: 913371 - protein, 2316 aa, Homo sapiens
MDGVSSEANEENDNIERPVRRRHSSILKPPRSPLQDLRGGNETVQESNALRNKKNSRRVSFADTIKVFQTESHMKIVRKSEMEETETGENLLLIQNKKLEDNYCEITGMNTLLSAPIHTQMQQKEFSIIEHTRERKHANDQTVIFSDENQMDLTSSHTVMITKGLLDNPISEKSTKIDTTSFLANLKLHTEDSRMKKEVNFSVDQNTSSENKIDFNDFIKRLKTGKCSAFPDVPDKENFEIPIYSKEPNSASSTHQMHVSLKEDENNSNITRLFREKDDGMNFTQCHTANIQTLIPTSSETNSRESKGNDITIYGNDFMDLTFNHTLQILPATGNFSEIENQTQNAMDVTTGYGTKASGNKTVFKSKQNTAFQDLSINSADKIHITRSHIMGAETHIVSQTCNQDARILAMTPESIYSNPSIQGCKTVFYSSCNDAMEMTKCLSNMREEKNLLKHDSNYSKMYCNPDAMSSLTEKTIYSGEENMDITKSHTVAIDNQIFKQDQSNVQIAAAPTPEKEMMLQNLMTTSEDGKMNVNCNSVPHVSKERIQQSLSNPLSISLTDRKTELLSGENTDLTESHTSNLGSQVPLAAYNLAPESTSESHSQSKSSSDECEEITKSRNEPFQRSDIIAKNSLTDTWNKDKDWVLKILPYLDKDSPQSADCNQEIATSHNIVYCGGVLDKQITNRNTVSWEQSLFSTTKPLFSSGQFSMKNHDTAISSHTVKSVLGQNSKLAEPLRKSLSNPTPDYCHDKMIICSEEEQNMDLTKSHTVVIGFGPSELQELGKTNLEHTTGQLTTMNRQIAVKVEKCGKSPIEKSGVLKSNCIMDVLEDESVQKPKFPKEKQNVKIWGRKSVGGPKIDKTIVFSEDDKNDMDITKSYTIEINHRPLLEKRDCHLVPLAGTSETILYTCGQDDMEITRSHTTALECKTVSPDEITTRPMDKTVVFVDNHVELEMTESHTVFIDYQEKERTDRPNFELSQRKSLGTPTVICTPTEESVFFPGNGESDRLVANDSQLTPLEEWSNNRGPVEVADNMELSKSATCKNIKDVQSPGFLNEPLSSKSQRRKSLKLKNDKTIVFSENHKNDMDITQSCMVEIDNESALEDKEDFHLAGASKTILYSCGQDDMEITRSHTTALECKTLLPNEIAIRPMDKTVLFTDNYSDLEVTDSHTVFIDCQATEKILEENPKFGIGKGKNLGVSFPKDNSCVQEIAEKQALAVGNKIVLHTEQKQQLFAATNRTTNEIIKFHSAAMDEKVIGEVVDQACTLEKAQVESCQLNNRDRRNVDFTSSHATAVCGSSDNYSCLPNVISCTDNLEGSAMLLCDKDEEKANYCPVQNDLAYANDFASEYYLESEGQPLSAPCPLLEKEEVIQTSTKGQLDCVITLHKDQDLIKDPRNLLANQTLVYSQDLGEMTKLNSKRVSFKLPKDQMKVYVDDIYVIPQPHFSADQPPLPKKGQSSINKEEVILSKAGNKSLNIIENSSAPICENKPKILNSEEWFAAACKKELKENIQTTNYNTALDFHSNSDVTKQVIQTHVNAGEAPDPVITSNVPCFHSIKPNLNNLNGKTGEFLAFQTVHLPPLPEQLLELGNKAHNDMHIVQATEIHNINIISSNAKDSRDEENKKSHNGAETTSLPPKTVFKDKVRRCSLGIFLPRLPNKRNCSVTGIDDLEQIPADTTDINHLETQPVSSKDSGIGSVAGKLNLSPSQYINEENLPVYPDEINSSDSINIETEEKALIETYQKEISPYENKMGKTCNSQKRTWVQEEEDIHKEKKIRKNEIKFSDTTQDREIFDHHTEEDIDKSANSVLIKNLSRTPSSCSSSLDSIKADGTSLDFSTYRSSQMESQFLRDTICEESLREKLQDGRITIREFFILLQVHILIQKPRQSNLPGNFTVNTPPTPEDLMLSQYVYRPKIQIYREDCEARRQKIEELKLSASNQDKLLVDINKNLWEKMRHCSDKELKAFGIYLNKIKSCFTKMTKVFTHQGKVALYGKLVQSAQNEREKLQIKIDEMDKILKKIDNCLTEMETETKNLEDEEKNNPVEEWDSEMRAAEKELEQLKTEEEELQRNLLELEVQKEQTLAQIDFMQKQRNRTEELLDQLSLSEWDVVEWSDDQAVFTFVYDTIQLTITFEESVVGFPFLDKRYRKIVDVNFQSLLDEDQAPPSSLLVHKLIFQYVEEKESWKKTCTTQHQLPKMLEEFSLVVHHCRLLGEEIEYLKRWGPNYNLMNIDINNNELRLLFSSSAAFAKFEITLFLSAYYPSVPLPSTIQNHVGNTSQDDIATILSKVPLENNYLKNVVKQIYQDLFQDCHFYH

SEQ ID NO: 913372 - protein, 2316 aa, Homo sapiens; identical to SEQ ID NO: 913371

SEQ ID NO: 913373 - protein, 2202 aa, Homo sapiens
MDGVSSEANEENDNIERPVRRRHSSILKPPRSPLQDLRGGNETVQESNALRNKKNSRRVSFADTIKVFQTESHMKIVRKSEMEETETGENLLLIQNKKLEDNYCEITGMNTLLSAPIHTQMQQKEFSIIEHTRERKHANDQTVIFSDENQMDLTSSHTVMITKGLLDNPISEKSTKIDTTSFLANLKLHTEDSRMKKEVNFSVDQNTSSENKIDFNDFIKRLKTGKCSAFPDVPDKENFEIPIYSKEPNSASSTHQMHVSLKEDENNSNITRLFREKDDGMNFTQCHTANIQTLIPTSSETNSRESKGNDITIYGNDFMDLTFNHTLQILPATGNFSEIENQTQNAMDVTTGYGTKASGNKTVFKSKQNTAFQDLSINSADKIHITRSHIMGAETHIVSQTCNQDARILAMTPESIYSNPSIQGCKTVFYSSCNDAMEMTKCLSNMREEKNLLKHDSNYSKMYCNPDAMSSLTEKTIYSGEENMDITKSHTVAIDNQIFKQDQSNVQIAAAPTPEKEMMLQNLMTTSEDGKMNVNCNSVPHVSKERIQQSLSNPLSISLTDRKTELLSGENTDLTESHTSNLGSQVPLAAYNLAPESTSESHSQSKSSSDECEEITKSRNEPFQRSDIIAKNSLTDTWNKDKDWVLKILPYLDKDSPQSADCNQEIATSHNIVYCGGVLDKQITNRNTVSWEQSLFSTTKPLFSSGQFSMKNHDTAISSHTVKSVLGQNSKLAEPLRKSLSNPTPDYCHDKMIICSEEEQNMDLTKSHTVVIGFGPSELQELGKTNLEHTTGQLTTMNRQIAVKVEKCGKSPIEKSGVLKSNCIMDVLEDESVQKPKFPKEKQNVKIWGRKSVGGPKIDKTIVFSEDDKNDMDITKSYTIEINHRPLLEKRDCHLVPLAGTSETILYTCGQDDMEITRSHTTALECKTVSPDEITTRPMDKTVVFVDNHVELEMTESHTVFIDYQEKERTDRPNFELSQRKSLGTPTVICTPTEESVFFPGNGESDRLVANDSQLTPLEEWSNNRGPVEVADNMELSKSATCKNIKDVQSPGFLNEPLSSKSQRRKSLKLKNDKTIVFSENHKNDMDITQSCMVEIDNESALEDKEDFHLAGASKTILYSCGQDDMEITRSHTTALECKTLLPNEIAIRPMDKTVLFTDNYSDLEVTDSHTVFIDCQATEKILEENPKFGIGKGKNLGVSFPKDNSCVQEIAEKQALAVGNKIVLHTEQKQQLFAATNRTTNEIIKFHSAAMDEKVIGEVVDQACTLEKAQVESCQLNNRDRRNVDFTSSHATAVCGSSDNYSCLPNVISCTDNLEGSAMLLCDKDEEKANYCPVQNDLAYANDFASEYYLESEGQPLSAPCPLLEKEEVIQTSTKGQLDCVITLHKDQDLIKDPRNLLANQTLVYSQDLGEMTKLNSKRVSFKLPKDQMKVYVDDIYVIPQPHFSADQPPLPKKGQSSINKEEVILSKAGNKSLNIIENSSAPICENKPKILNSEEWFAAACKKELKENIQTTNYNTALDFHSNSDVTKQVIQTHVNAGEAPDPVITSNVPCFHSIKPNLNNLNGKTGEFLAFQTVHLPPLPEQLLELGNKAHNDMHIVQATEIHNINIISSNAKDSRDEENKKSHNGAETTSLPPKTVFKDKVRRCSLGIFLPRLPNKRNCSVTGIDDLEQIPADTTDINHLETQPVSSKDSGIGSVAGKLNLSPSQYINEENLPVYPDEINSSDSINIETEEKALIETYQKEISPYENKMGKTCNSQKRTWVQEEEDIHKEKKIRKNEIKFSDTTQDREIFDHHTEEDIDKSANSVLIKNLSRTPSSCSSSLDSIKADGTSLDFSTYRSSQMESQFLRDTICEESLREKLQDGRITIREFFILLQVHILIQKPRQSNLPGNFTVNTPPTPEDLMLSQYVYRPKIQIYREDCEARRQKIEELKLSASNQDKLLVDINKNLWEKMRHCSDKELKAFGIYLNKIKSCFTKMTKVFTHQGKVALYGKLVQSAQNEREKLQIKIDEMDKILKKIDNCLTEMETETKNLEDEEKNNPVEEWDSEMRAAEKELEQLKTEEEELQRNLLELEVQKEQTLAQIDFMQKQRNRTEELLDQLSLSEWDVVEWSDDQAVFTFVYDTIQLTITFEESVVGFPFLDKRYRKIVDVNFQSLLDEDQAPPSSLLVHKLIFQYVEEKESWKKTCTTQHQLPKVKPD

SEQ ID NO: 913374 - protein, 558 aa, Homo sapiens
VRFEYFTGGEPGVVSGLLEAAVCFRSKETQSVWTPNKSAQNLSRRFAAAEKFSSKMDGVSSEANEENDNIERPVRRRHSSILKPPRSPLQDLRGGNERVQESNALRNKKNSRRVSFADTIKVFQTESHMKIVRKSEMEETEAGENLLLIQNKKLEDNYCEITGMNTLLSAPIHTQMQQKEFSIIEHTRERKHANDQTVIFSDENQMDLTSSHTVMITKGLLDNPISEKSTKIDTTSFLANLKLHTEDSRMKKEVNFSVDQNTSSENKIDFNDFIKRLKTGKCSAFPDVPDKENFEIPIYSKEPNSASSTHQMHVSLKEDENNSNITRLFREKDDGMNFTQCHTANIQTLIPTSSETNSRESKGNDITIYGNDFMDLTFNHTLQILPATGNFSEIENQTQNAMDVTTGYGTKASGNKTVFKSKQNTAFQDLSINSADKIHITRSHIMGAETHIVSQTCNQDARILAMTPESIYSNPSIQGCKTVFYSSCNDAMEMTKCLSNMREEKNLLKHDSNYSKMYCNPDAMSSLTEKTIYSGEENMDITKSHTVAIDNQIFKQES

SEQ ID NO: 913375 - protein, 2316 aa, Homo sapiens; identical to SEQ ID NO: 913371

SEQ ID NO: 913376 - protein, 38 aa, Homo sapiens
MGLGLDLEEWMDGLFLDKWWISFETKLRCLSQRWCLSA

SEQ ID NO: 913377 - protein, 141 aa, Homo sapiens
CDQLHLRSRQGALYVDVIRVNSYYSWYRNYGTWELIQLQLTAQFENWCKTSQSHYSERYGVETLVRLHQDPPLMFSEEDRKSLLEQYHLGLDQKRRKYVVGELIWNFADFMTNQSKDEGKTGPHYGFTFGIHSLFQRRVKG

SEQ ID NO: 913378 - protein, 128 aa, Homo sapiens
CDQLHLRSRQGALYVDVIRVNSYYSWYRNYGTWELIQLQLTAQFENWCKTSQSHYSERYGVETLVRLHQDPPLMFSEEDRKSLLEQYHLGLDQKRRKYVVGELIWNFADFMTNQCVSFLVGNENSANL

SEQ ID NO: 913379 - protein, 128 aa, Homo sapiens; identical to SEQ ID NO: 913378

SEQ ID NO: 913380 - protein, 141 aa, Homo sapiens; identical to SEQ ID NO: 913377

SEQ ID NO: 913381 - protein, 128 aa, Homo sapiens; identical to SEQ ID NO: 913378

SEQ ID NO: 913382 - protein, 383 aa, Homo sapiens
MLSRKKTKNEVSKPAEVQGKYVKKETSPLLRNLMPSFIRHGPTIPRRTDICLPDSSPNAFSTSGDVVSRNQSFLRTPIQRTPHEIMRRESNRLSAPSYLARSLADVPREYGSSQSFVTEVSFAVENGDSGSRYYYSDNFFDGQRKRPLGDRAHEDYRYYEYNHDLFQRMPQNQGRHASGIGRVAATSLGNLTNHGSEDLPLPPGWSVDWTMRGRKYYIDHNTNTTHWSHPLEREGLPPGWERVESSEFGTYYVDHTNKKAQYRHPCAPSVPRYDQPPPVTYQPQQTERNQSLLVPANPYHTAEIPDWLQVYARAPVKYDHILKWELFQLADLDTYQGMLKLLFMKELEQIVKMYEAYRQALLTELENRKQRQQWYAQQHGKNF

SEQ ID NO: 913383 - protein, 161 aa, Homo sapiens
  misc_feature (5)..(5): Xaa can be any naturally occurring amino acid
MVPPXQTCWGVLSTQCIPPLCLLFPTHGFLLTRAAFLLLLYCSSLWGPLCYTKDLVILKFGAPPGGILLRPPPFCFFFFFFFFFFFVFFFVFVFVFYFLSWNLTLSLRLECSGGTILAHCNLLPGSSYSLASASPVAGTTGACHHTWLIFCIFSRDGASPC

SEQ ID NO: 913384 - protein, 383 aa, Homo sapiens; identical to SEQ ID NO: 913382

SEQ ID NO: 913385 - protein, 358 aa, Homo sapiens
MLSRKKTKNEVSKPAEVQGKYVKKETSPLLRNASRCASCLQTLRVSLDCAASCANSGAEFLSPAAGCRLEKILCLHSSGMVQQFQDELISVFQIQALMPFQLDSGSRYYYSDNFFDGQRKRPLGDRAHEDYRYYEYNHDLFQRMPQNQGRHASGIGRVAATSLGNLTNHGSEDLPLPPGWSVDWTMRGRKYYIDHNTNTTHWSHPLEREGLPPGWERVESSEFGTYYVDHTNKKAQYRHPCAPSVPRYDQPPPVTYQPQQTERNQSLLVPANPYHTAEIPDWLQVYARAPVKYDHILKWELFQLADLDTYQGMLKLLFMKELEQIVKMYEAYRQALLTELENRKQRQQWYAQQHGKNF

SEQ ID NO: 913386 - protein, 367 aa, Homo sapiens
MLSRKKTKNEVSKPAEVQGKYVKKETSPLLRNLMPSFIRHGPTIPRRTDICLPDSSPNAFSTSGDVVSRNQSFLRTPIQRTPHEIMRRESNRLSAPSYLARSLADVPREYGSSQSFVTEVSFAVENGRKRPLGDRAHEDYRYYEYNHDLFQRMPQNQGRHASGIGRVAATSLGNLTNHGSEDLPLPPGWSVDWTMRGRKYYIDHNTNTTHWSHPLEREGLPPGWERVESSEFGTYYVDHTNKKAQYRHPCAPSVPRYDQPPPVTYQPQQTERNQSLLVPANPYHTAEIPDWLQVYARAPVKYDHILKWELFQLADLDTYQGMLKLLFMKELEQIVKMYEAYRQALLTELENRKQRQQWYAQQHGKNF

SEQ ID NO: 913387 - protein, 211 aa, Homo sapiens
MLSRKKTKNEVSKPAEVQGKYVKKETSPLLRNLMPSFIRHGPTIPRRTDICLPDSSPNAFSTSGDVVSRNQSFLRTPIQRTPHEIMRRESNRLSAPSYLARSLADVPREYGSSQSFVTEVSFAVENGDSGSRYYYSDNFFDGQRKRPLGDRAHEDYRYYEYNHDLFQRMPQNQGRHASEDGLSPRGRGCRVKIAPLALQPERERARPCLKK

SEQ ID NO: 913388 - protein, 225 aa, Homo sapiens
MALARRRWAFLTASPSSVAERADFREGTDQRLRGSSARPRASSRRMLSRKKTKNEVSKPAEVQGKYVKKETSPLLRNLMPSFIRHGPTIPRRTDICLPDSSPNAFSTSGDVVSRNQSFLRTPIQRTPHEIMRRESNRLSAPSYLARSLADVPREYGSSQSFVTEVSFAVENGDSGSRYYYSDNFFDGQRKRPLGDRAHEDYRYYEYNHDLFQRMPQNQGRHASVR

SEQ ID NO: 913389 - protein, 383 aa, Homo sapiens; identical to SEQ ID NO: 913382

SEQ ID NO: 913390 - protein, 428 aa, Homo sapiens
MALARRRWAFLTASPSSVAERADFREGTDQRLRGSSARPRASSRRMLSRKKTKNEVSKPAEVQGKYVKKETSPLLRNLMPSFIRHGPTIPRRTDICLPDSSPNAFSTSGDVVSRNQSFLRTPIQRTPHEIMRRESNRLSAPSYLARSLADVPREYGSSQSFVTEVSFAVENGDSGSRYYYSDNFFDGQRKRPLGDRAHEDYRYYEYNHDLFQRMPQNQGRHASGIGRVAATSLGNLTNHGSEDLPLPPGWSVDWTMRGRKYYIDHNTNTTHWSHPLEREGLPPGWERVESSEFGTYYVDHTNKKAQYRHPCAPSVPRYDQPPPVTYQPQQTERNQSLLVPANPYHTAEIPDWLQVYARAPVKYDHILKWELFQLADLDTYQGMLKLLFMKELEQIVKMYEAYRQALLTELENRKQRQQWYAQQHGKNF

SEQ ID NO: 913391 - protein, 383 aa, Homo sapiens; identical to SEQ ID NO: 913382

SEQ ID NO: 913392 - protein, 180 aa, Homo sapiens
MLSRKKTKNEVSKPAEVQGKYVKKETSPLLRNLMPSFIRHGPTIPRRTDICLPDSSPNAFSTSGDVVSRNQSFLRTPIQRTPHEIMRRESNRLSAPSYLARSLADVPREYGSSQSFVTEVSFAVENGDSGSRYYYSDNFFDGQRKRPLGDRAHEDYRYYEYNHDLFQRMPQNQGRHASVR

SEQ ID NO: 913393 - protein, 582 aa, Homo sapiens
MMKLRHKNKKPGEGSKGHKKISWPYPQPAKQNGKKATSKVPSAPHFVHPNDHANREAELKKKWVEEMREKQQAAREQERQKRRTIESYCQDVLRRQEEFEHKEEVLQELNMFPQLDDEATRKAYYKEFRKVVEYSDVILEVLDARDPLGCRCFQMEEAVLRAQGNKKLVLVLNKIDLVPKEVVEKWLDYLRNELPTVAFKASTQHQVKNLNRCSVPVDQASESLLKSKACFGAENLMRVLGNYCRLGEVRTHIRVGVVGLPNVGKSSLINSLKRSRACSVGAVPGITKFMQEVYLDKFIRLLDAPGIVPGPNSEVGTILRNCVHVQKLADPVTPVETILQRCNLEEISNYYGVSGFQTTEHFLTAVAHRLGKKKKGGLYSQEQAAKAVLADWVSGKISFYIPPPATHTLPTHLSAEIVKEMTEVFDIEDTEQANEDTMECLATGESDELLGDTDPLEMEIKLLHSPMTKIADAIENKTTVYKIGDLTGYCTNPNRHQMGWAKRNVDHRPKSNSMVDVCSVDRRSVLQRIMETDPLQQGQALASALKNKKKMQKRADKIASKLSDSMMSALDLSGNADDGVGD

SEQ ID NO: 913394 - protein, 582 aa, Homo sapiens; identical to SEQ ID NO: 913393

SEQ ID NO: 913395 - protein, 582 aa, Homo sapiens; identical to SEQ ID NO: 913393

SEQ ID NO: 913396 - protein, 582 aa, Homo sapiens; identical to SEQ ID NO: 913393

SEQ ID NO: 913397 - protein, 582 aa, Homo sapiens; identical to SEQ ID NO: 913393

SEQ ID NO: 913398 - protein, 582 aa, Homo sapiens; identical to SEQ ID NO: 913393

SEQ ID NO: 913399 - protein, 582 aa, Homo sapiens; identical to SEQ ID NO: 913393

SEQ ID NO: 913400 - protein, 563 aa, Homo sapiens
MGRRCAHQPAKQNGKKATSKVPSAPHFVHPNDHANREAELKKKWVEEMREKQQAAREQERQKRRTIESYCQDVLRRQEEFEHKEEVLQELNMFPQLDDEATRKAYYKEFRKVVEYSDVILEVLDARDPLGCRCFQMEEAVLRAQGNKKLVLVLNKIDLVPKEVVEKWLDYLRNELPTVAFKASTQHQVKNLNRCSVPVDQASESLLKSKACFGAENLMRVLGNYCRLGEVRTHIRVGVVGLPNVGKSSLINSLKRSRACSVGAVPGITKFMQEVYLDKFIRLLDAPGIVPGPNSEVGTILRNCVHVQKLADPVTPVETILQRCNLEEISNYYGVSGFQTTEHFLTAVAHRLGKKKKGGLYSQEQAAKAVLADWVSGKISFYIPPPATHTLPTHLSAEIVKEMTEVFDIEDTEQANEDTMECLATGESDELLGDTDPLEMEIKLLHSPMTKIADAIENKTTVYKIGDLTGYCTNPNRHQMGWAKRNVDHRPKSNSMVDVCSVDRRSVLQRIMETDPLQQGQALASALKNKKKMQKRADKIASKLSDSMMSALDLSGNADDGVGD

SEQ ID NO: 913401 - protein, 466 aa, Homo sapiens
YPFPALISWSSALQVVEYSDVILEVLDARDPLGCRCFQMEEAVLRAQGNKKLVLVLNKIDLVPKEVVEKWLDYLRNELPTVAFKASTQHQVKNLNRCSVPVDQASESLLKSKACFGAENLMRVLGNYCRLGEVRTHIRVGVVGLPNVGKSSLINSLKRSRACSVGAVPGITKFMQEVYLDKFIRLLDAPGIVPGPNSEVGTILRNCVHVQKLADPVTPVETILQRCNLEEISNYYGVSGFQTTEHFLTAVAHRLGKKKKGGLYSQEQAAKAVLADWVSGKISFYIPPPATHTLPTHLSAEIVKEMTEVFDIEDTEQANEDTMECLATGESDELLGDTDPLEMEIKLLHSPMTKIADAIENKTTVYKIGDLTGYCTNPNRHQMGWAKRNVDHRPKSNSMVDVCSVDRRSVLQRIMETDPLQQGQALASALKNKKKMQKRADKIASKLSDSMMSALDLSGNADDGVGD

SEQ ID NO: 913402 - protein, 582 aa, Homo sapiens; identical to SEQ ID NO: 913393

SEQ ID NO: 913403 - protein, 153 aa, Homo sapiens
SSPILTGREQADLNLSAFKLVIMMKLRHKNKKPGEGSKGHKKISWPYPQPAKQNGKKATSKVPSAPHFVHPNDHANREAELKKKWVEEMREKQQAAREQERQKRRTIESYCQDVLRRQEEFEHKEEVLQELNMFPQAGIIGMNHRVRPYIFVF

SEQ ID NO: 913404 - protein, 582 aa, Homo sapiens; identical to SEQ ID NO: 913393

SEQ ID NO: 913405 - protein, 582 aa, Homo sapiens; identical to SEQ ID NO: 913393

SEQ ID NO: 913406 - protein, 582 aa, Homo sapiens; identical to SEQ ID NO: 913393

SEQ ID NO: 913407 - protein, 582 aa, Homo sapiens; identical to SEQ ID NO: 913393

SEQ ID NO: 913408 - protein, 582 aa, Homo sapiens; identical to SEQ ID NO: 913393

SEQ ID NO: 913409 - protein, 604 aa, Homo sapiens
SSPILTGREQADLNLSAFKLVIMMKLRHKNKKPGEGSKGHKKISWPYPQPAKQNGKKATSKVPSAPHFVHPNDHANREAELKKKWVEEMREKQQAAREQERQKRRTIESYCQDVLRRQEEFEHKEEVLQELNMFPQLDDEATRKAYYKEFRKVVEYSDVILEVLDARDPLGCRCFQMEEAVLRAQGNKKLVLVLNKIDLVPKEVVEKWLDYLRNELPTVAFKASTQHQVKNLNRCSVPVDQASESLLKSKACFGAENLMRVLGNYCRLGEVRTHIRVGVVGLPNVGKSSLINSLKRSRACSVGAVPGITKFMQEVYLDKFIRLLDAPGIVPGPNSEVGTILRNCVHVQKLADPVTPVETILQRCNLEEISNYYGVSGFQTTEHFLTAVAHRLGKKKKGGLYSQEQAAKAVLADWVSGKISFYIPPPATHTLPTHLSAEIVKEMTEVFDIEDTEQANEDTMECLATGESDELLGDTDPLEMEIKLLHSPMTKIADAIENKTTVYKIGDLTGYCTNPNRHQMGWAKRNVDHRPKSNSMVDVCSVDRRSVLQRIMETDPLQQGQALASALKNKKKMQKRADKIASKLSDSMMSALDLSGNADDGVGD

SEQ ID NO: 913410 - protein, 582 aa, Homo sapiens; identical to SEQ ID NO: 913393

SEQ ID NO: 913411 - protein, 565 aa, Homo sapiens
MMKLRHKNKKPGEGSKGHKKISWPYPQPAKQNGKKATSKVPSAPHFVHPNDHANREAELKKKWVEEMREKQQAAREQERQKRRTIESYCQDVLRRQEEFEHKEEVLQELNMFPQLDDEATRKAYYKEFRKVVEYSDVILEVLDARDPLGCRCFQMEEAVLRAQGNKKLVLVLNKIDLVPKEVVEKWLDYLRNELPTVAFKASTQHQVKNLNRCSVPVDQASESLLKSKACFGAENLMRVLGNYCRLGEVRTHIRVGVVGLPNVGKSSLINSLKRSRACSVGAVPGITKFMQEVYLDKFIRLLDAPGIVPGPNSEVGTILRNCVHVQKLADPVTPVETILQRCNLEEISNYYGVSGFQTTEHFLTAVAHRLGKKKKGGLYSQEQAAKAVLADWVSGKISFYIPPPATHTLPTHLSAEIVKEMTEVFDIEDTEQANEDTMECLATGESDELLGDTDPLEMEIKLLHSPMTKIADAIENKTTVYKIGDLTGYCTNPNRHQMGWAKRNVDHRPKSNSMVDVCSVDRRSVLQRIMETDPLQQGQALASALKNKKKMQKRAEKSQQAVVQK

SEQ ID NO: 913412 - protein, 1214 aa, Homo sapiens
MKCFFPVLSCLAVLGVVSAQRQVTVQEGPLYRTEGSHITIWCNVSGYQGPSEQNFQWSIYLPSSPEREVQIVSTMDSSFPYAIYTQRVRGGKIFIERVQGNSTLLHITDLQARDAGEYECHTPSTDKQYFGSYSAKMNLVVIPDSLQTTAMPQTLHRVEQDPLELTCEVASETIQHSHLSVAWLRQKVGEKPVEVISLSRDFMLHSSSEYAQRQSLGEVRLDKLGRTTFRLTIFHLQPSDQGEFYCEAAEWIQDPDGSWYAMTRKRSEGAVVNVQPTDKEFTVRLETEKRLHTVGEPVEFRCILEAQNVPDRYFAVSWAFNSSLIATMGPNAVPVLNSEFAHREARGQLKVAKESDSVFVLKIYHLRQEDSGKYNCRVTEREKTVTGEFIDKESKRPKNIPIIVLPLTDNWVVKVPQHHQLLSQGHLESSISVEVASNASVILEGEDLRFSCSVRTAGRPQGRFSVIWQLVDRQNRRSNIMWLDRDGTVQPGSSYWERSSFGGVQMEQVQPNSFSLGIFNSRKEDEGQYECHVTEWVRAVDGEWQIVGERRASTPISITALEMGFAVTAISRTPGVTYSDSFDLQCIIKPHYPAWVPVSVTWRFQPVGTVEFHDLVTFTRDGGVQWGDRSSSFRTRTAIEKAESSNNVRLSISRASDTEAGKYQCVAELWRKNYNNTWTRLAERTSNLLEIRVLQPVTKLQVSKSKRTLTLVENKPIQLNCSVKSQTSQNSHFAVLWYVHKPSDADGKLILKTTHNSAFEYGTYAEEEGLRARLQFERHVSGGLFSLTVQRAEVSDSGSYYCHVEEWLLSPNYAWYKLAEEVSGRTEVTVKQPDSRLRLSQAQGNLSVLETRQVQLECVVLNRTSITSQLMVEWFVWKPNHPERETVARLSRDATFHYGEQAAKNNLKGRLHLESPSPGVYRLFIQNVAVQDSGTYSCHVEEWLPSPSGMWYKRAEDTAGQTALTVMRPDASLQVDTVVPNATVSEKAAFQLDCSIVSRSSQDSRFAVAWYSLRTKAGGKRSSPGLEEQEEEREEEEEEDDDDDDDPTERTALLSVGPDAVFGPEGSPWEGRLRFQRLSPVLYRLTVLQASPQDTGNYSCHVEEWLPSPQKEWYRLTEEESAPIGIRVLDTSPTLQSIICSNDALFYFVFFYPFPIFGILIITILLVRFKSRNSSKNSDGKNGVPLLWIKEPHLNYSPTCLEPPVLSIHPGAID

SEQ ID NO: 913413 - protein, 1194 aa, Homo sapiens
MKCFFPVLSCLAVLGVVSAQRQVTVQEGPLYRTEGSHITIWCNVSGYQGPSEQNFQWSIYLPSSPEREVQIVSTMDSSFPYAIYTQRVRGGKIFIERVQGNSTLLHITDLQARDAGEYECHTPSTDKQYFGSYSAKMNLVVIPDSLQTTAMPQTLHRVEQDPLELTCEVASETIQHSHLSVAWLRQKVGEKPVEVISLSRDFMLHSSSEYAQRQSLGEVRLDKLGRTTFRLTIFHLQPSDQGEFYCEAAEWIQDPDGSWYAMTRKRSEGAVVNVQPTDKEFTVRLETEKRLHTVGEPVEFRCILEAQNVPDRYFAVSWAFNSSLIATMGPNAVPVLNSEFAHREARGQLKVAKESDSVFVLKIYHLRQEDSGKYNCRVTEREKTVTGEFIDKESKRPKNIPIIVLPLKSSISVEVASNASVILEGEDLRFSCSVRTAGRPQGRFSVIWQLVDRQNRRSNIMWLDRDGTVQPGSSYWERSSFGGVQMEQVQPNSFSLGIFNSRKEDEGQYECHVTEWVRAVDGEWQIVGERRASTPISITALEMGFAVTAISRTPGVTYSDSFDLQCIIKPHYPAWVPVSVTWRFQPVGTVEFHDLVTFTRDGGVQWGDRSSSFRTRTAIEKAESSNNVRLSISRASDTEAGKYQCVAELWRKNYNNTWTRLAERTSNLLEIRVLQPVTKLQVSKSKRTLTLVENKPIQLNCSVKSQTSQNSHFAVLWYVHKPSDADGKLILKTTHNSAFEYGTYAEEEGLRARLQFERHVSGGLFSLTVQRAEVSDSGSYYCHVEEWLLSPNYAWYKLAEEVSGRTEVTVKQPDSRLRLSQAQGNLSVLETRQVQLECVVLNRTSITSQLMVEWFVWKPNHPERETVARLSRDATFHYGEQAAKNNLKGRLHLESPSPGVYRLFIQNVAVQDSGTYSCHVEEWLPSPSGMWYKRAEDTAGQTALTVMRPDASLQVDTVVPNATVSEKAAFQLDCSIVSRSSQDSRFAVAWYSLRTKAGGKRSSPGLEEQEEEREEEEEEDDDDDDDPTERTALLSVGPDAVFGPEGSPWEGRLRFQRLSPVLYRLTVLQASPQDTGNYSCHVEEWLPSPQKEWYRLTEEESAPIGIRVLDTSPTLQSIICSNDALFYFVFFYPFPIFGILIITILLVRFKSRNSSKNSDGKNGVPLLWIKEPHLNYSPTCLEPPVLSIHPGAID

SEQ ID NO: 913414 - protein, 1047 aa, Homo sapiens
SLGHGSGLHRVEQDPLELTCEVASETIQHSHLSVAWLRQKVGEKPVEVISLSRDFMLHSSSEYAQRQSLGEVRLDKLGRTTFRLTIFHLQPSDQGEFYCEAAEWIQDPDGSWYAMTRKRSEGAVVNVQPTDKEFTVRLETEKRLHTVGEPVEFRCILEAQNVPDRYFAVSWAFNSSLIATMGPNAVPVLNSEFAHREARGQLKVAKESDSVFVLKIYHLRQEDSGKYNCRVTEREKTVTGEFIDKESKRPKNIPIIVLPLKSSISVEVASNASVILEGEDLRFSCSVRTAGRPQGRFSVIWQLVDRQNRRSNIMWLDRDGTVQPGSSYWERSSFGGVQMEQVQPNSFSLGIFNSRKEDEGQYECHVTEWVRAVDGEWQIVGERRASTPISITALEMGFAVTAISRTPGVTYSDSFDLQCIIKPHYPAWVPVSVTWRFQPVGTVEFHDLVTFTRDGGVQWGDRSSSFRTRTAIEKAESSNNVRLSISRASDTEAGKYQCVAELWRKNYNNTWTRLAERTSNLLEIRVLQPVTKLQVSKSKRTLTLVENKPIQLNCSVKSQTSQNSHFAVLWYVHKPSDADGKLILKTTHNSAFEYGTYAEEEGLRARLQFERHVSGGLFSLTVQRAEVSDSGSYYCHVEEWLLSPNYAWYKLAEEVSGRTEVTVKQPDSRLRLSQAQGNLSVLETRQVQLECVVLNRTSITSQLMVEWFVWKPNHPERETVARLSRDATFHYGEQAAKNNLKGRLHLESPSPGVYRLFIQNVAVQDSGTYSCHVEEWLPSPSGMWYKRAEDTAGQTALTVMRPDASLQVDTVVPNATVSEKAAFQLDCSIVSRSSQDSRFAVAWYSLRTKAGGKRSSPGLEEQEEEREEEEEEDDDDDDDPTERTALLSVGPDAVFGPEGSPWEGRLRFQRLSPVLYRLTVLQASPQDTGNYSCHVEEWLPSPQKEWYRLTEEESAPIGIRVLDTSPTLQSIICSNDALFYFVFFYPFPIFGILIITILLVRFKSRNSSKNSDGKNGVPLLWIKEPHLNYSPTCLEPPVLSIHPGAID

SEQ ID NO: 913415 - protein, 1214 aa, Homo sapiens; identical to SEQ ID NO: 913412

SEQ ID NO: 913416 - protein, 1214 aa, Homo sapiens; identical to SEQ ID NO: 913412

SEQ ID NO: 913417 - protein, 1214 aa, Homo sapiens; identical to SEQ ID NO: 913412

SEQ ID NO: 913418 - protein, 1093 aa, Homo sapiens
MCYIRPPELDNNHIMNNHIMNNHIMNNHIMVIVAKMNLVVIPDSLQTTAMPQTLHRVEQDPLELTCEVASETIQHSHLSVAWLRQKVGEKPVEVISLSRDFMLHSSSEYAQRQSLGEVRLDKLGRTTFRLTIFHLQPSDQGEFYCEAAEWIQDPDGSWYAMTRKRSEGAVVNVQPTDKEFTVRLETEKRLHTVGEPVEFRCILEAQNVPDRYFAVSWAFNSSLIATMGPNAVPVLNSEFAHREARGQLKVAKESDSVFVLKIYHLRQEDSGKYNCRVTEREKTVTGEFIDKESKRPKNIPIIVLPLKSSISVEVASNASVILEGEDLRFSCSVRTAGRPQGRFSVIWQLVDRQNRRSNIMWLDRDGTVQPGSSYWERSSFGGVQMEQVQPNSFSLGIFNSRKEDEGQYECHVTEWVRAVDGEWQIVGERRASTPISITALEMGFAVTAISRTPGVTYSDSFDLQCIIKPHYPAWVPVSVTWRFQPVGTVEFHDLVTFTRDGGVQWGDRSSSFRTRTAIEKAESSNNVRLSISRASDTEAGKYQCVAELWRKNYNNTWTRLAERTSNLLEIRVLQPVTKLQVSKSKRTLTLVENKPIQLNCSVKSQTSQNSHFAVLWYVHKPSDADGKLILKTTHNSAFEYGTYAEEEGLRARLQFERHVSGGLFSLTVQRAEVSDSGSYYCHVEEWLLSPNYAWYKLAEEVSGRTEVTVKQPDSRLRLSQAQGNLSVLETRQVQLECVVLNRTSITSQLMVEWFVWKPNHPERETVARLSRDATFHYGEQAAKNNLKGRLHLESPSPGVYRLFIQNVAVQDSGTYSCHVEEWLPSPSGMWYKRAEDTAGQTALTVMRPDASLQVDTVVPNATVSEKAAFQLDCSIVSRSSQDSRFAVAWYSLRTKAGGKRSSPGLEEQEEEREEEEEEDDDDDDDPTERTALLSVGPDAVFGPEGSPWEGRLRFQRLSPVLYRLTVLQASPQDTGNYSCHVEEWLPSPQKEWYRLTEEESAPIGIRVLDTSPTLQSIICSNDALFYFVFFYPFPIFGILIITILLVRFKSRNSSKNSDGKNGVPLLWIKEPHLNYSPTCLEPPVLSIHPGAID

SEQ ID NO: 913419 - protein, 988 aa, Homo sapiens
MKCFFPVLSCLAVLGVVSAQRQVTVQEGPLYRTEGSHITIWCNVSGYQGPSEQNFQWSIYLPSSPEREVQIVSTMDSSFPYAIYTQRVRGGKIFIERVQGNSTLLHITDLQARDAGEYECHTPSTDKQYFGSYSAKMNLVVIPDSLQTTAMPQTLHRVEQDPLELTCEVASETIQHSHLSVAWLRQKVGEKPVEVISLSRDFMLHSSSEYAQRQSLGEVRLDKLGRTTFRLTIFHLQPSDQGEFYCEAAEWIQDPDGSWYAMTRKRSEGAVVNVQPTDKEFTVRLETEKRLHTVGEPVEFRCILEAQNVPDRYFAVSWAFNSSLIATMGPNAVPVLNSEFAHREARGQLKVAKESDSVFVLKIYHLRQEDSGKYNCRVTEREKTVTGEFIDKESKRPKNIPIIVLPLKSSISVEVASNASVILEGEDLRFSCSVRTAGRPQGRFSVIWQLVDRQNRRSNIMWLDRDGTVQPGSSYWERSSFGGVQMEQVQPNSFSLGIFNSRKEDEGQYECHVTEWVRAVDGEWQIVGERRASTPISITALEMGFAVTAISRTPGVTYSDSFDLQCIIKPHYPAWVPVSVTWRFQPVGTVEFHDLVTFTRDGGVQWGDRSSSFRTRTAIEKAESSNNVRLSISRASDTEAGKYQCVAELWRKNYNNTWTRLAERTSNLLEIRVLQPVTKLQVSKSKRTLTLVENKPIQLNCSVKSQTSQNSHFAVLWYVHKPSDADGKLILKTTHNSAFEYGTYAEEEGLRARLQFERHVSGGLFSLTVQRAEVSDSGSYYCHVEEWLLSPNYAWYKLAEEVSGRTEVTVKQPDSRLRLSQAQGNLSVLETRQVQLECVVLNRTSITSQLMVEWFVWKPNHPERETVARLSRDATFHYGEQAAKNNLKGRLHLESPSPGVYRLFIQNVAVQDSGTYSCHVEEWLPSPSGMWYKRAEDTAGQTALTVMRPGEGPRPQASTPSGVSHLSILFYALDKISLLINYLQLNKK

SEQ ID NO: 913420 - protein, 188 aa, Homo sapiens
MKVASGSTATAAAGPSCALKAGKTASGAGEVVRCLSEQSVAISRCAGGAGARLPALLDEQQVNVLLYDMNGCYSRLKELVPTLPQNRKVSKVEILQHVIDYIRDLQLELNSESEVGTPGGRGLPVRAPLSTLNGEISALTAEGGMRSCGRSHLVSLKRLPQGPADPSHPGGKRNYVLCGSPPNAPRRI

SEQ ID NO: 913421 - protein, 68 aa, Homo sapiens
  misc_feature (15)..(16): Xaa can be any naturally occurring amino acid
PVPGPAQHPLNGREXXPRAAGEITHYSDLEGKEEEQDRSAATAPLTAFQPGAEAEALARRGRSSLHTY

SEQ ID NO: 913422 - protein, 149 aa, Homo sapiens
MKVASGSTATAAAGPSCALKAGKTASGAGEVVRCLSEQSVAISRCAGGAGARLPALLDEQQVNVLLYDMNGCYSRLKELVPTLPQNRKVSKVEILQHVIDYIRDLQLELNSESEVGTPGGRGLPVRAPLSTLNGEISALTAEVRSRSDH

SEQ ID NO: 913423 - protein, 188 aa, Homo sapiens; identical to SEQ ID NO: 913420

SEQ ID NO: 913424 - protein, 138 aa, Homo sapiens
MKVASGSTATAAAGPSCALKAGKTASGAGEVVRCLSEQSVAISRCAGGAGARLPALLDEQQVNVLLYDMNGCYSRLKELVPTLPQNRKVSKVEILQHVIDYIRDEQDRSAATAPLTAFQPGAEAEALARRGRSSLHTY

SEQ ID NO: 913425 - protein, 188 aa, Homo sapiens; identical to SEQ ID NO: 913420

SEQ ID NO: 913426 - protein, 149 aa, Homo sapiens; identical to SEQ ID NO: 913422

SEQ ID NO: 913427 - protein, 175 aa, Homo sapiens
MKVASGSTATAAAGPSCALKAGKTASGAGEVVRCLSEQSVAISRCAGGAGARLPALLDEQQVNVLLYDMNGCYSRLKELVPTLPQNRKVSKVEILQHVIDYIRDLQLELNSESEVGTPGGRGLPVRAPLSTLNGEISALTAEGGMRSCGRSHLVSLRHWRGEGAPLCTPTSHQRL

SEQ ID NO: 913428 - protein, 1353 aa, Homo sapiens
VTPRAAWLGLGFRGSAVLGLCWQPRSPPSRAAGMMNRTTPDQELVPASEPVWERPWSVEEIRRSSQSWSLAADAGLLQFLQEFSQQTISRTHEIKKQVDGLIRETKATDCRLHNVFNDFLMLSNTQFIENRVYDEEVEEPVLKAEAEKTEQEKTREQKEVDLIPKVQEAVNYGLQVLDSAFEQLDIKAGNSDSEEDDANGRVELILEPKDLYIDRPLPYLIGSKLFMEQEDVGLGELSSEEGSVGSDRGSIVDTEEEKEEEESDEDFAHHSDNEQNQHTTQMSDEEEDDDGCDLFADSEKEEEDIEDIEENTRPKRSRPTSFADELAARIKGDAMGRVDEEPTTLPSGEAKPRKTLKEKKERRTPSDDEEDNLFAPPKLTDEDFSPFGSGGGLFSGGKGLFDDEDEESDLFTEASQDRQAGASVKEESSSSKPGKKIPAGAVSVFLGDTDVFGAASVPSLKEPQKPEQPTPRKSPYGPPPTGLFDDDDGDDDDDFFSAPHSKPSKTRKVQSTADIFGDEEGDLFKEKAVASPEATVSQTDENKARAEKKVTLSSSKNLKPSSETKTQKGLFSDEEDSEDLFSSQSASNLKGASLLPGKLPTSVSLFDDEDEEDNLFGGTAAKKQTLSLQAQREEKAKASELSKKKASALLFSSDEEDQWNIPASQTHLASDSRSKGEPRDSGTLQSQEAKAVKKTSLFEEDKEDDLFAIAKDSQKKTQRVSLLFEDDVDSGGSLFGSPPTSVPPATKKKETVSEAPPLLFSDEEEKEAQLGVKSVDKKVESAKESLKFGRTDVAESEKEGLLTRSAQETVKHSDLFSSSSPWDKGTKPRTKTVLSLFDEEEDKMEDQNIIQAPQKEVGKGCDPDAHPKSTGVFQDEELLFSHKLQKDNDPDVDLFAGTKKTKLLEPSVGSLFGDDEDDDLFSSAKSQPLVQEKKRVVKKDHSVNSFKNQKHPESIQGSKEKGIWKPETPQANLAINPAALLPTAASQISEVKPVLPELAFPSSEHRRSHGLESVPVLPGSGEAGVSFDLPAQADTLHSANKSRVKMRGKRRPQTRAARRLAAQESSEAEDMSVPRGPIAQWADGAISPNGHRPQLRAASGEDSTEEALAAAAAPWEGGPVPGVDTSPFAKSLGHSRGEADLFDSGDIFSTGTGSQSVERTKPKAKIAENPANPPVGGKAKSPMFPALGEASSDDDLFQSAKPKPAKKTNPFPLLEDEDDLFTDQKVKKNETKSSSQQDVILTTQDIFEDDIFATEAIKPSQKTREKEKTLESNLFDDNIDIFADLTVKPKEKSKKKVEAKSIFDDDMDDIFSTGIQAKTTKPKSRSAQAAPEPRFEHKVSNIFDDPLNAFGGQ

SEQ ID NO: 913429 - protein, 1374 aa, Homo sapiens
VTPRAAWLGLGFRGSAVLGLCWQPRSPPSRAAGMMNRTTPDQELVPASEPVWERPWSVEEIRRSSQSWSLAADAGLLQFLQEFSQQTISRTHEIKKQVDGLIRETKATDCRLHNVFNDFLMLSNTQFIENRVYDEEVEEPVLKAEAEKTEQEKTREQKEVDLIPKVQEAVNYGLQVLDSAFEQLDIKAGNSDSEEDDANGRVELILEPKDLYIDRPLPYLIGSKLFMEQEDVGLGELSSEEGSVGSDRGSIVDTEEEKEEEESDEDFAHHSDNEQNQHTTQMSDEEEDDDGCDLFADSEKEEEDIEDIEENTRPKRSRPTSFADELAARIKGDAMGRVDEEPTTLPSGEAKPRKTLKEKKERRTPSDDEEDNLFAPPKLTDEDFSPFGSGGGLFSGGKGLFDDEDEESDLFTEASQDRQAGASVKEESSSSKPGKKIPAGAVSVFLGDTDVFGAASVPSLKEPQKPEQPTPRKSPYGPPPTGLFDDDDGDDDDDFFSAPHSKPSKTRKVQSTADIFGDEEGDLFKEKAVASPEATVSQTDENKARAEKKVTLSSSKNLKPSSETKTQKGLFSDEEDSEDLFSSQSASNLKGASLLPGKLPTSVSLFDDEDEEDNLFGGTAAKKQTLSLQAQREEKAKASELSKKKASALLFSSDEEDQWNIPASQTHLASDSRSKGEPRDSGTLQSQEAKAVKKTSLFEEDKEDDLFAIAKDSQKKTQRVSLLFEDDVDSGGSLFGSPPTSVPPATKKKETVSEAPPLLFSDEEEKEAQLGVKSVDKKVESAKESLKFGRTDVAESEKEGLLTRSAQETVKHSDLFSSSSPWDKGTKPRTKTVLSLFDEEEDKMEDQNIIQAPQKEVGKGCDPDAHPKSTGVFQDEELLFSHKLQKDNDPDVDLFAGTKKTKLLEPSVGSLFGDDEDDDLFSSAKSQPLVQEKKRVVKKDHSVNSFKNQKHPESIQGSKEKGIWKPETPQDSSGLAPFKTKEPSTRIGKIQANLAINPAALLPTAASQISEVKPVLPELAFPSSEHRRSHGLESVPVLPGSGEAGVSFDLPAQADTLHSANKSRVKMRGKRRPQTRAARRLAAQESSEAEDMSVPRGPIAQWADGAISPNGHRPQLRAASGEDSTEEALAAAAAPWEGGPVPGVDTSPFAKSLGHSRGEADLFDSGDIFSTGTGSQSVERTKPKAKIAENPANPPVGGKAKSPMFPALGEASSDDDLFQSAKPKPAKKTNPFPLLEDEDDLFTDQKVKKNETKSSSQQDVILTTQDIFEDDIFATEAIKPSQKTREKEKTLESNLFDDNIDIFADLTVKPKEKSKKKVEAKSIFDDDMDDIFSTGIQAKTTKPKSRSAQAAPEPRFEHKVSNIFDDPLNAFGGQ

SEQ ID NO: 913430 - protein, 1024 aa, Homo sapiens
MSRGSPSSSIWGCMGRVDEEPTTLPSGEAKPRKTLKEKKERRTPSDDEEDNLFAPPKLTDEDFSPFGSGGGLFSGGKGLFDDEDEESDLFTEASQDRQAGASVKEESSSSKPGKKIPAGAVSVFLGDTDVFGAASVPSLKEPQKPEQPTPRKSPYGPPPTGLFDDDDGDDDDDFFSAPHSKPSKTRKVQSTADIFGDEEGDLFKEKAVASPEATVSQTDENKARAEKKDLFSSQSASNLKGASLLPGKLPTSVSLFDDEDEEDNLFGGTAAKKQTLSLQAQREEKAKASELSKKKASALLFSSDEEDQWNIPASQTHLASDSRSKGEPRDSGTLQSQEAKAVKKTSLFEEDKEDDLFAIAKDSQKKTQRVSLLFEDDVDSGGSLFGSPPTSVPPATKKKETVSEAPPLLFSDEEEKEAQLGVKSVDKKVESAKESLKFGRTDVAESEKEGLLTRSAQETVKHSDLFSSSSPWDKGTKPRTKTVLSLFDEEEDKMEDQNIIQAPQKEVGKGCDPDAHPKSTGVFQDEELLFSHKLQKDNDPDVDLFAGTKKTKLLEPSVGSLFGDDEDDDLFSSAKSQPLVQEKKRVVKKDHSVNSFKNQKHPESIQGSKEKGIWKPETPQDSSGLAPFKTKEPSTRIGKIQANLAINPAALLPTAASQISEVKPVLPELAFPSSEHRRSHGLESVPVLPGSGEAGVSFDLPAQADTLHSANKSRVKMRGKRRPQTRAARRLAAQESSEAEDMSVPRGPIAQWADGAISPNGHRPQLRAASGEDSTEEALAAAAAPWEGGPVPGVDTSPFAKSLGHSRGEADLFDSGDIFSTGTGSQSVERTKPKAKIAENPANPPVGGKAKSPMFPALGEASSDDDLFQSAKPKPAKKTNPFPLLEDEDDLFTDQKVKKNETKSSSQQDVILTTQDIFEDDIFATEAIKPSQKTREKEKTLESNLFDDNIDIFADLTVKPKEKSKKKVEAKSIFDDDMDDIFSTGIQAKTTKPKSRSAQAAPEPRFEHKVSNIFDDPLNAFGGQ

SEQ ID NO: 913431 - protein, 1374 aa, Homo sapiens; identical to SEQ ID NO: 913429

SEQ ID NO: 913432 - protein, 1256 aa, Homo sapiens
VTPRAAWLGLGFRGSAVLGLCWQPRSPPSRAAGMMNRTTPDQELVPASEPVWERPWSVEEIRRSSQSWSLAADAGLLQFLQEFSQQTISRTHEIKKQVDGLIRETKATDCRLHNVFNDFLMLSNTQFIENRVYDEEVEEPVLKAEAEKTEQEKTREQKEVDLIPKVQEAVNYGLQVLDSAFEQLDIKAGNSDSEEDDANGRVELILEPKDLYIDRPLPYLIGSKLFMEQEDVGLGELSSEEGSVGSDRGSIVDTEEEKEEEESDEDFAHHSDNEQNQHTTQMSDEEEDDDGCDLFADSEKEEEDIEDIEENTRPKRSRPTSFADELAARIKGDAMGRVDEEPTTLPSGEAKPRKTLKEKKERRTPSDDEEDNLFAPPKLTDEDFSPFGSGGGLFSGGKGLFDDEDEESDLFTEASQDRQAGASVKEESSSSKPGKKIPAGAVSVFLGDTDVFGAASVPSLKEPQKPEQPTPRKSPYGPPPTGLFDDDDGDDDDDFFSAPHSKPSKTRKVQSTADIFGDEEGDLFKEKAVASPEATVSQTDENKARAEKKVTLSSSKNLKPSSETKTQKGLFSDEEDSEDLFSSQSASNLKGASLLPGKLPTSVSLFDDEDEEDNLFGGTAAKKQTLSLQAQREEKAKASELSKKKASALLFSSDEEDQWNIPASQTHLASDSRSKGEPRDSGTLQSQEAKAVKKTSLFEEDKEDDLFAIAKDSQKKTQRVSLLFEDDVDSGGSLFGSPPTSVPPATKKKETVSEAPPLLFSDEEEKEAQLGVKSVDKKVESAKESLKFGRTDVAESEKEGLLTRSAQETVKHSDLFSSSSPWDKGTKPRTKTVLSLFDEEEDKMEDQNIIQAPQKEVGKGCDPDAHPKSTGVFQDEELLFSHKLQKDNDPDVDLFAGTKKTKLLEPSVGSLFGDDEDDDLFSSAKSQPLVQEKKRVVKKDHSVNSFKNQKHPESIQGSKEKGIWKPETPQDSSGLAPFKTKEPSTRIGKIQANLAINPAALLPTAASQISEVKPVLPELAFPSSEHRRSHGLESVPVLPGSGEAGVSFDLPAQADTLHSANKSRVKMRGKRRPQTRAARRLAAQESSEAEDMSVPRGPIAQWADGAISPNGHRPQLRAASGEDSTEEALAAAAAPWEGGPVPGVDTSPFAKSLGHSRGEADLFDSGDIFSTGTGSQSVERTKPKAKIAENPANPPVGGKAKSPMFPALGEASSDDDLFQSAKPKPAKKTNPFPLLEDEDDLFTDQKVKKNETKSSR

SEQ ID NO: 913433 - protein, 134 aa, Homo sapiens
MHMLLSSLSVAYTAVFDSPFEGGASSFLQPLPPPFSPPPSSCTCFSMACIWYICILLSSHSNVSPLWLVSDTCRFPALPPGGLLTTEQIMPLLLALPHYSKESIRAPGFGMKPLCNRCQPMCAASSLVTSHFPA

SEQ ID NO: 913434 - protein, 308 aa, Homo sapiens
MRGKRRPQTRAARRLAAQESSEAEDMSVPRGPIAQWADGAISPNGHRPQLRAASGEDSTEEALAAAAAPWEGGPVPGVDTSPFAKSLGHSRGEADLFDSGDIFSTGTGSQSVERTKPKAKIAENPANPPVGGKAKSPMFPALGEASSDDDLFQSAKPKPAKKTNPFPLLEDEDDLFTDQKVKKNETKSSSQQDVILTTQDIFEDDIFATEAIKPSQKTREKEKTLESNLFDDNIDIFADLTVKPKEKSKKKVEAKSIFDDDMDDIFSTGIQAKTTKPKSRSAQAAPEPRFEHKVSNIFDDPLNAFGGQ

SEQ ID NO: 913435 - protein, 1308 aa, Homo sapiens
VTPRAAWLGLGFRGSAVLGLCWQPRSPPSRAAGMMNRTTPDQELVPASEPVWERPWSVEEIRRSSQSWSLAADAGLLQFLQEFSQQTISRTHEIKKQVDGLIRETKATDCRLHNVFNDFLMLSNTQFIENRVYDEEVEEPVLKAEAEKTEQEKTREQKEVDLIPKVQEAVNYGLQVLDSAFEQLDIKAGNSDSEEDDANGRVELILEPKDLYIDRPLPYLIGSKLFMEQEDVGLGELSSEEGSVGSDRGSIVDTEEEKEEEESDEDFAHHSDNEQNQKRSRPTSFADELAARIKGDAMGRVDEEPTTLPSGEAKPRKTLKEKKERRTPSDDEEDNLFAPPKLTDEDFSPFGSGGGLFSGGKGLFDDEDEESDLFTEASQDRQAGASVKEESSSSKPGKKIPAGAVSVFLGDTDVFGAASVPSLKEPQKPEQPTPRKSPYGPPPTGLFDDDDGDDDDDFFSAPHSKPSKTRKVQSTADIFGDEEGDLFKEKAVASPEATVSQTDENKARAEKKDLFSSQSASNLKGASLLPGKLPTSVSLFDDEDEEDNLFGGTAAKKQTLSLQAQREEKAKASELSKKKASALLFSSDEEDQWNIPASQTHLASDSRSKGEPRDSGTLQSQEAKAVKKTSLFEEDKEDDLFAIAKDSQKKTQRVSLLFEDDVDSGGSLFGSPPTSVPPATKKKETVSEAPPLLFSDEEEKEAQLGVKSVDKKVESAKESLKFGRTDVAESEKEGLLTRSAQETVKHSDLFSSSSPWDKGTKPRTKTVLSLFDEEEDKMEDQNIIQAPQKEVGKGCDPDAHPKSTGVFQDEELLFSHKLQKDNDPDVDLFAGTKKTKLLEPSVGSLFGDDEDDDLFSSAKSQPLVQEKKRVVKKDHSVNSFKNQKHPESIQGSKEKGIWKPETPQDSSGLAPFKTKEPSTRIGKIQANLAINPAALLPTAASQISEVKPVLPELAFPSSEHRRSHGLESVPVLPGSGEAGVSFDLPAQADTLHSANKSRVKMRGKRRPQTRAARRLAAQESSEAEDMSVPRGPIAQWADGAISPNGHRPQLRAASGEDSTEEALAAAAAPWEGGPVPGVDTSPFAKSLGHSRGEADLFDSGDIFSTGTGSQSVERTKPKAKIAENPANPPVGGKAKSPMFPALGEASSDDDLFQSAKPKPAKKTNPFPLLEDEDDLFTDQKVKKNETKSSSQQDVILTTQDIFEDDIFATEAIKPSQKTREKEKTLESNLFDDNIDIFADLTVKPKEKSKKKVEAKSIFDDDMDDIFSTGIQAKTTKPKSRSAQAAPEPRFEHKVSNIFDDPLNAFGGQ

SEQ ID NO: 913436 - protein, 997 aa, Homo sapiens
MSSGPIFNTPCKTLLSVCYDEEDNLFAPPKLTDEDFSPFGSGGGLFSGGKGLFDDEDEESDLFTEASQDRQAGASVKEESSSSKPGKKIPAGAVSVFLGDTDVFGAASVPSLKEPQKPEQPTPRKSPYGPPPTGLFDDDDGDDDDDFFSAPHSKPSKTRKVQSTADIFGDEEGDLFKEKAVASPEATVSQTDENKARAEKKDLFSSQSASNLKGASLLPGKLPTSVSLFDDEDEEDNLFGGTAAKKQTLSLQAQREEKAKASELSKKKASALLFSSDEEDQWNIPASQTHLASDSRSKGEPRDSGTLQSQEAKAVKKTSLFEEDKEDDLFAIAKDSQKKTQRVSLLFEDDVDSGGSLFGSPPTSVPPATKKKETVSEAPPLLFSDEEEKEAQLGVKSVDKKVESAKESLKFGRTDVAESEKEGLLTRSAQETVKHSDLFSSSSPWDKGTKPRTKTVLSLFDEEEDKMEDQNIIQAPQKEVGKGCDPDAHPKSTGVFQDEELLFSHKLQKDNDPDVDLFAGTKKTKLLEPSVGSLFGDDEDDDLFSSAKSQPLVQEKKRVVKKDHSVNSFKNQKHPESIQGSKEKGIWKPETPQDSSGLAPFKTKEPSTRIGKIQANLAINPAALLPTAASQISEVKPVLPELAFPSSEHRRSHGLESVPVLPGSGEAGVSFDLPAQADTLHSANKSRVKMRGKRRPQTRAARRLAAQESSEAEDMSVPRGPIAQWADGAISPNGHRPQLRAASGEDSTEEALAAAAAPWEGGPVPGVDTSPFAKSLGHSRGEADLFDSGDIFSTGTGSQSVERTKPKAKIAENPANPPVGGKAKSPMFPALGEASSDDDLFQSAKPKPAKKTNPFPLLEDEDDLFTDQKVKKNETKSSSQQDVILTTQDIFEDDIFATEAIKPSQKTREKEKTLESNLFDDNIDIFADLTVKPKEKSKKKVEAKSIFDDDMDDIFSTGIQAKTTKPKSRSAQAAPEPRFEHKVSNIFDDPLNAFGGQ

SEQ ID NO: 913437 - protein, 458 aa, Homo sapiens
IIFIIPKQAPNTWLYLFGDDEDDDLFSSAKSQPLVQEKKRVVKKDHSVNSFKNQKHPESIQGSKEKGIWKPETPQANLAINPAALLPTAASQISEVKPVLPELAFPSSEHRRSHGLESVPVLPGSGEAGVSFDLPAQADTLHSANKSRVKMRGKRRPQTRAARRLAAQESSEAEDMSVPRGPIAQWADGAISPNGHRPQLRAASGEDSTEEALAAAAAPWEGGPVPGVDTSPFAKSLGHSRGEADLFDSGDIFSTGTGSQSVERTKPKAKIAENPANPPVGGKAKSPMFPALGEASSDDDLFQSAKPKPAKKTNPFPLLEDEDDLFTDQKVKKNETKSSSQQDVILTTQDIFEDDIFATEAIKPSQKTREKEKTLESNLFDDNIDIFADLTVKPKEKSKKKVEAKSIFDDDMDDIFSTGIQAKTTKPKSRSAQAAPEPRFEHKVSNIFDDPLNAFGGQ

SEQ ID NO: 913438 - protein, 292 aa, Homo sapiens
MQKYEKLEKIGEGTYGTVFKAKNRETHEIVALKRVRLDDDDEGVPSSALREICLLKELKHKNIVRLHDVLHSDKKLTLVFEFCDQDLKKYFDSCNGDLDPEIVKSFLFQLLKGLGFCHSRNVLHRDLKPQNLLINRNGELKLADFGLARAFGIPVRCYSAEVVTLWYRPPDVLFGAKLYSTSIDMWSAGCIFAELANAGRPLFPGNDVDDQLKRIFRLLGTPTEEQWPSMTKLPDYKPYPMYPATTSLVNVVPKLNATGRDLLQNLLKCNPVQRISAEEALQHPYFSDFCPP

SEQ ID NO: 913439 - protein, 292 aa, Homo sapiens; identical to SEQ ID NO: 913438

SEQ ID NO: 913440 - protein, 131 aa, Homo sapiens
MQKYEKLEKIGEGTYGTVFKAKNRETHEIVALKRVRLDDDDEGVPSSALREICLLKELKHKNIVRLHDVLHSDKKLTLVFEFCDQDLKKYFDSCNGDLDPEIVTSLQNLKFLPLPPLQWSPRCQTQKLFLQ

SEQ ID NO: 913441 - protein, 284 aa, Homo sapiens
MQKYEKLEKIGEGTYGTVFKAKNRETHEIVALKRGVPSSALREICLLKELKHKNIVRLHDVLHSDKKLTLVFEFCDQDLKKYFDSCNGDLDPEIVKSFLFQLLKGLGFCHSRNVLHRDLKPQNLLINRNGELKLADFGLARAFGIPVRCYSAEVVTLWYRPPDVLFGAKLYSTSIDMWSAGCIFAELANAGRPLFPGNDVDDQLKRIFRLLGTPTEEQWPSMTKLPDYKPYPMYPATTSLVNVVPKLNATGRDLLQNLLKCNPVQRISAEEALQHPYFSDFCPP

SEQ ID NO: 913442 - protein, 575 aa, Homo sapiens
MPGSPVEVKIQSRSSPPTMPPLPPINPGGPRPVSFTPTALSNGINHSPPTLNGAPSPPQRFSNGPASSTSSALTNQQLPATCGARQLSKLKRFLTTLQQFGNDISPEIGEKVRTLVLALVNSTVTIEEFHCKLQEATNFPLRPFVIPFLKANLPLLQRELLHCARAAKQTPSQYLAQHEHLLLNTSIASPADSSELLMEVHGNGKRPSPERREENSFDRDTIAPEPPAKRVCTISPAPRHSPALTVPLMNPGGQFHPTPPPLQHYTLEDIATSHLYREPNKMLEHREVRDRHHSLGLNGGYQDELVDHRLTEREWADEWKHLDHALNCIMEMVEKTRRSMAVLRRCQESDREELNYWKRRYNENTELRKTGTELVSRQHSPGSADSLSNDSQREFNSRPGTGYVPVEFWKKTEEAVNKVKIQAMSEVQKAVAEAEQKAFEVIATERARMEQTIADVKRQAAEDAFLVINEQEESTENCWNCGRKASETCSGCNIARYCGSFCQHKDWERHHRLCGQNLHGQSPHGQGRPLLPVGRGSSARSADCSVPSPALDKTSATTSRSSTPASVTAIDTNGL

SEQ ID NO: 913443 - protein, 604 aa, Homo sapiens
MAKESGISLKEIQVLARQWKVGPEKRVPAMPGSPVEVKIQSRSSPPTMPPLPPINPGGPRPVSFTPTALSNGINHSPPTLNGAPSPPQRFSNGPASSTSSALTNQQLPATCGARQLSKLKRFLTTLQQFGNDISPEIGEKVRTLVLALVNSTVTIEEFHCKLQEATNFPLRPFVIPFLKANLPLLQRELLHCARAAKQTPSQYLAQHEHLLLNTSIASPADSSELLMEVHGNGKRPSPERREENSFDRDTIAPEPPAKRVCTISPAPRHSPALTVPLMNPGGQFHPTPPPLQHYTLEDIATSHLYREPNKMLEHREVRDRHHSLGLNGGYQDELVDHRLTEREWADEWKHLDHALNCIMEMVEKTRRSMAVLRRCQESDREELNYWKRRYNENTELRKTGTELVSRQHSPGSADSLSNDSQREFNSRPGTGYVPVEFWKKTEEAVNKVKIQAMSEVQKAVAEAEQKAFEVIATERARMEQTIADVKRQAAEDAFLVINEQEESTENCWNCGRKASETCSGCNIARYCGSFCQHKDWERHHRLCGQNLHGQSPHGQGRPLLPVGRGSSARSADCSVPSPALDKTSATTSRSSTPASVTAIDTNGL

SEQ ID NO: 913444 - protein, 832 aa, Homo sapiens
MSSCSVSFYLSDHTHLERCGHLLPMGSIWHLLSHSCPAGCAVQVGRTCPHCQGLVSSEKPSWTSKNSSDLIVTGHYIYYVDLSSGTQLLFPSLVLSDSVPPGAHQKGFMKCEPFWEKLINFSSYLPIFKWDITHIPFRMLGTASHILPCLFGFCFLLLLWFFNTKLTLLPRLECSGMILAHCNLCLPGSSNSPASASRVAEITGAHHHAQLDFCIFSRDSGFTMLARLISNSCPQVTCLGLPKCRDYKREPPCPACLFGFDGSLRTPTPPALHLGASGILSHPEISWSKFNWPCSSWPLKHKFKSPPSVHCPESKIKVVSTIKEKGSTQVAFSLDTGTSYCKNFKSWLGAVAHSCNPSTLRDRGRQITVRSGIQDQPGQHGETLSLIKKKRKISRVWWHTPVILATQEAEARESLEPVSQRLQWAEIPPLHSSLGNRAKLCLKKKKKKAKLKNFKSLIYSNQAFSVLQRNLVHDTFKMPRFPLPKVRCDQLKQQQRIMFLCCGTHKPHSFPVSLIHGYPPTPSASLSHSPWWGTLRGTESVPRTGPHLHETWLSHRSQSHYNSLLVFHGFVGLNLKQVFYCYFVCLFVLRREFLSCLPGWSAIAQSRLTVTSASQVRRVSCLSLLSSWDCRHAPPRPTDFVFLVETGFLLVGQAGLKPRTSGDPPTLASQSARITGMSHCVLVLSRFLKSPVAIKLARVAHAFTGWNKEAKTNKIIFIRARCPFLWLRLRFGVQSLACSCGLWLLWTVSFSEIFVMLFHPARAAQRLICKPGQYSTLKLSLQTFCCVNSGQFHTEVTRASAQDLLFTFQESLSEILQLSGQEEEHHWGGVGS

SEQ ID NO: 913445 - protein, 808 aa, Homo sapiens
MGSIWHLLSHSCPAGCAVQVGRTCPHCQGLVSSEKPSWTSKNSSDLIVTGHYIYYVDLSSGTQLLFPSLVLSDSVPPGAHQKGFMKCEPFWEKLIKFFFLASHFQMGHHSYPFQNVRNCLPHSSLSFWVLFFVVVVVFYTKLTLLPRLECSGMILAHCNLCLPGSSNSPASASRVAEITGAHHHAQLIFVFFSRDSGFTMLARLISNSCPQVTCLGLPKCRDYKREPPCPACLFGFDGSLRTPTPPALHLGASGILSHPEISWSKFNWPCSSWPLKHKFKSPPSVHCPESKIKVVSTIKEKGSTQVAFSLDTGTSYCKNFKSWLGAVAHSCNPSTLRDRGRQITVRSGIQDQPGQHGETLSLIKKKRKISRVWWHTPVILATQEAEARESLEPVSQRLQWAEIPPLHSSLGNRAKLCLKKKKKKAKLKNFKSLIYSNQAFSVLQRNLVHDTFKMPRFPLPKVRCDQLKQQQRIMFLCCGTHKPHSFPVSLIHGYPPTPSASLSHSPWWGTLRGTESVPRTGPHLHETWLSHRSQSHYNSLLVFHGFVGLNLKQVFYCYFVCLFVLRREFLSCLPGWSAIAQSRLTVTSASQVRRVSCLSLLSSWDCRHAPPRPTDFVFLVETGFLLVGQAGLKPRTSGDPPTLASQSARITGMSHCVLVLSRFLKSPVAIKLARVAHAFTGWNKEAKTNKIIFIRARCPFLWLRLRFGVQSLACSCGLWLLWTVSFSEIFVMLFHPARAAQRLICKPGQYSTLKLSLQTFCCVNSGQFHTEVTRASAQDLLFTFQESLSEILQLSGQEEEHHWGGVGS

SEQ ID NO: 913446 - protein, 832 aa, Homo sapiens; identical to SEQ ID NO: 913444

SEQ ID NO: 913447 - protein, 832 aa, Homo sapiens; identical to SEQ ID NO: 913444

SEQ ID NO: 913448 - protein, 325 aa, Homo sapiens
MPGSPVEVKIQSRSSPPTMPPLPPINPGGPRPVSFTPTALSNGINHSPPTLNGAPSPPQRFSNGPASSTSSALTNQQLPATCGARQLSKLKRFLTTLQQFGNDISPEIGEKVRTLVLALVNSTVTIEEFHCKLQEATNFPLRPFVIPFLKANLPLLQRELLHCARAAKQTPSQYLAQHEHLLLNTSIASPADSSELLMEVHGNGKRPSPERREENSFDRDTIAPEPPAKRVCTISPAPRHSPALTVPLMNPGGQFHPTPPPLQHYTLEDIATSHLYREPNKMLEHREVRDRHHSLGLNGGYQDELVDHRLTEREWADEWKHLDHA

SEQ ID NO: 913449 - protein, 67 aa, Homo sapiens
HASDEHVDARGKRQVVNVLVSKNYRHSRVGRALGGPCVPSSPSTAPEVELPSQTPSGRAYGCPVYTQ

SEQ ID NO: 913450 - protein, 263 aa, Homo sapiens
MPGSPVEVKIQSRSSPPTMPPLPPINPGGPRPVSFTPTALSNGINHSPPTLNGAPSPPQRFSNGPASSTSSALTNQQLPATCGARQLSKLKRFLTTLQQFGNDISPEIGEKVRTLVLALVNSTVTIEEFHCKLQEATNFPLRPFVIPFLKANLPLLQRELLHCARAAKQTPSQYLAQHEHLLLNTSIASPADSSELLMEVHGNGKRPSPESCIIHLKSMGVASRHEYFSGTLQMPAHPVRNSTLENLWVDCSRSLRSTVLPFP

SEQ ID NO: 913451 - protein, 808 aa, Homo sapiens
MGSIWHLLSHSCPAGCAVQVGRTCPHCQGLVSSEKPSWTSKNSSDLIVTGHYIYYVDLSSGTQLLFPSLVLSDSVPPSAHQKGFMKCEPFWEKLINFSSQLPIFKWDITHIPFRMLGTASHILPCLFGFCFLLLLWFFNTKLTLLPRLECSGMILAHCNLCLPGSSNSPASASRVAEITGAHHHAQLIFVFFSRDSGFTMLARLISNSCPQVTCLGLPKCRDYKREPPCPACLFGFDGSLRTPTPPALHLWASGILSHPEISWSKFNWPCSSWPLKHKFKSPPSVHCPESKIKVVSTIKEKGSTQVAFSLDTGTSYCKNFKSWLGAVAHSCNPSTLRDRGRQITVRSGIQDQPGQHGETLSLIKKNRKISRVWWHTPVILATQEAEARESLEPVSQRLQWAEIPPLHSSLGNRAKLCLKKKKKMAKLKNFKSLIYSNQAFSVLQRNLVHDTFKMPRFPLPKVRCDQLKQQQRIMFLCCGTHKPHSFPVSLIHGYPPTPSASLSHSPWWGTLRGTESVPRTGPHLHETWLSHRSQSHYNSLLVFHGFVGLNLKQVFYCYFVCLFVLRREFLSCLPGWSAIAQSRLTVTSASQVRRVSCLSLLSSWDCRHAPPRPTDFVFLVETGFLLVGQAGLKPRTSGDPPTLASQSARITGMSHCVLVLSRFLKSPVAIKLARVAHAFTGWNKEAKTNKIIFIRARCPFLWLRLRFGVQSLACSCGLWLLWTVSFSEIFVMLFHPARAAQRLICKPGQYSTLKLSLQTFCCVNSGQFHTEVTRASAQDLLFTFQESLSEILQLSGQEEEHHWGGVGS

SEQ ID NO: 913452 - protein, 808 aa, Homo sapiens
MGSIWHLLSHSCPAGCAVQVGRTCPHCQGLVSSEKPSWTSKNSSDLIVTGHYIYYVDLSSGTQLLFPSLVLSDSVPPCAHQKGFMKCEPFWEKLINFSSQLPIFKWDITHIPFRMLGTASHILPCLFGFCFLLLLWFFNTKLTLLPRLECSGMILAHCNLCLPGSSNSPASSLPSSWDYRRPPPRPARFLYFLVETGFHHVGQADLELLTSGTCLGLPKCRDYKREPPCPACLFGFDGSLRTPTLLLSIFEPLASSHTQKSVGVSLIGPAPAGLLKHKFKSPPSVHCPESKIKVVSTIKEKGSTQVAFSLDTGTSYCKNFKSWLGAVAHSCNPSTLRDRGRQITCRSGIQDQPGQHGETLSLIKKNRKISRVWWHTPVILATQEAEARESLEPVSQRLQWAEIPPLHSSLGNRAKLCLKKKKKKAKLKNFKSLIYSNQAFSVLQRNLVHDTFKMPRFPLPKVRCDQLKQQQRIMFLCCGTHKPHSFPVSLIHGYPPTPSASLSHSPWWGTLRGTESVPRTGPHLHETWLSHRSQSHYNSLLVFHGFVGLTPKQVFYCYFVCLFVLRREFLSCLPGWSAIAQSRLTVTSASQVRRVSCLSLLSSWDCRHAPPRPTDFVFLVETGFLLVGQAGLKPRTSGDPPTLASQSARITGMSHCVRSVSRFLKSPVAIKLARVAHAFTGWNKEAKTNKIIFIRARCPFLWLRLRFGVQSLACSCGLWLLWTVSFSEIFVMLFHPARAAQRLICKPGQYSTLKLSLQTFCCVNSGQFHTEVTRASAQDLLFTFQESLSEILQLSGQEEEHHWGGVGS

SEQ ID NO: 913453 - protein, 557 aa, Homo sapiens [sequence omitted]

SEQ ID NO: 913454 - protein, 143 aa, Homo sapiens
MVGVPGAAAFQLGPEKRVPAMPGSPVEVKIQSRSSPPTMPPLPPINPGGPRPVSFTPTALSNGINHSPPTLNGAPSPPQRFSNGPASSTSSALTNQQLPATCGARQLSKLKRFLTTLQQFGNDISPEIGEKVRTLVLALVQSC

SEQ ID NO: 913455 - protein, 327 aa, Homo sapiens
RSDAGPGATVSAAAAAATERARRGATMGAQLSTLGHMVLFPVWFLYSLLMKLFQRSTPAITLESPDIKYPLRLIDREIISHDTRRFRFALPSPQHILGLPVGQHIYLSARIDGNLVVRPYTPISSDDDKGFVDLVIKVYFKDTHPKFPAGGKMSQYLESMQIGDTIEFRGPSGLLVYQGKGKFAIRPDKKSNPIIRTVKSVGMIAGGTGITPMLQVIRAIMKDPDDHTVCHLLFANQTEKDILLRPELEELRNKHSARFKLWYTLDRAPEAWDYGQGFVNEEMIRDHLPPPEEEPLVLMCGPPPMIQYACLPNLDHVGHPTERCFVF

SEQ ID NO: 913456 - protein, 291 aa, Homo sapiens
MVLFPVWFLYSLLMKLFQRSTPAITLESPDIKYPLRLIDREIISHDTRRFRFALPSPQHILGLPVGQHIYLSARIDGNLVVRPYTPISSDDDKGFVDLVIKVYFKDTHPKFPAGGKMSQYLESMQIGDTIEFRGPSGLLVYQGKGKFAIRPDKKSNPIIRTVKSVGMIAGGTGITPMLQVIRAIMKDPDDHTVCHLLFANQTEKDILLRPELEELRNKHSARFKLWYTLDRAPEAWDYGQGFVNEEMIRDHLPPPEEEPLVLMCGPPPMIQYACLPNLDHVGHPTERCFVF

SEQ ID NO: 913457 - protein, 237 aa, Homo sapiens
PPPRGRPGSRGRLDKLGHMVLFPVWFLYSLLMKLFQRSTPAITLESPDIKYPLRLIDREIISHDTRRFRFALPSPQHILGLPVGQHIYLSARIDGNLVVRPYTPISSDDDKGFVDLVIKVYFKDTHPKFPAGGKMSQYLESMQIGDTIEFRGPSGLLVYQGKGKFAIRPDKKSNPIIRTVKSVGMIAGGTGITPMLQVIRAIMKDPDDHTVCHLLFANQNRTRRTSCWELNWGTPGP

SEQ ID NO: 913458 - protein, 327 aa, Homo sapiens; identical to SEQ ID NO: 913455

SEQ ID NO: 913459 - protein, 327 aa, Homo sapiens; identical to SEQ ID NO: 913455

SEQ ID NO: 913460 - protein, 362 aa, Homo sapiens
MLTLRPRSQLCVHLFLLLGSLPPQFPAKPEPPTAELPPLPPTSSRLEQDQEGGAAQILAGPLAGSRGQLGHMVLFPVWFLYSLLMKLFQRSTPAITLESPDIKYPLRLIDREIISHDTRRFRFALPSPQHILGLPVGQHIYLSARIDGNLVVRPYTPISSDDDKGFVDLVIKVYFKDTHPKFPAGGKMSQYLESMQIGDTIEFRGPSGLLVYQGKGKFAIRPDKKSNPIIRTVKSVGMIAGGTGITPMLQVIRAIMKDPDDHTVCHLLFANQTEKDILLRPELEELRNKHSARFKLWYTLDRAPEAWDYGQGFVNEEMIRDHLPPPEEEPLVLMCGPPPMIQYACLPNLDHVGHPTERCFVF

SEQ ID NO: 913461 - protein, 327 aa, Homo sapiens; identical to SEQ ID NO: 913455

SEQ ID NO: 913462 - protein, 327 aa, Homo sapiens; identical to SEQ ID NO: 913455

SEQ ID NO: 913463 - protein, 251 aa, Homo sapiens
MIISHDTRRFRFALPSPQHILGLPVGQHIYLSARIDGNLVVRPYTPISSDDDKGFVDLVIKVYFKDTHPKFPAGGKMSQYLESMQIGDTIEFRGPSGLLVYQGKGKFAIRPDKKSNPIIRTVKSVGMIAGGTGITPMLQVIRAIMKDPDDHTVCHLLFANQTEKDILLRPELEELRNKHSARFKLWYTLDRAPEAWDYGQGFVNEEMIRDHLPPPEEEPLVLMCGPPPMIQYACLPNLDHVGHPTERCFVF

SEQ ID NO: 913464 - protein, 115 aa, Homo sapiens [sequence omitted]

SEQ ID NO: 913465 - protein, 89 aa, Homo sapiens
PPPRGRPGSRGRLDKLGHMVLFPVWFLYSLLMKLFQRSTPAITLASHLPTSHTGAPGSAWPARALVNHLAEQFPWSPFGSRAVSQMGHG

SEQ ID NO: 913466 - protein, 197 aa, Homo sapiens
RSDAGPGATVSAAAAAATERARRGATMGAQLSTLGHMVLFPVWFLYSLLMKLFQRSTPAITLESPDIKYPLRLIDREIISHDTRRFRFALPSPQHILGLPVGQHIYLSARIDGNLVVRPYTPISSDDDKGFVDLVIKVYFKDTHPKFPAGGKMSQYLESMQIGDTIEFRGPSGLLVYQGKASLMAELPQPHVFIPLS

SEQ ID NO: 913467 - protein, 204 aa, Homo sapiens
MNRSLLVGCMQSKDIWGREESICERLKQDGLDVERAESWELGHMVLFPVWFLYSLLMKLFQRSTPAITLESPDIKYPLRLIDREIISHDTRRFRFALPSPQHILGLPVGQHIYLSARIDGNLVVRPYTPISSDDDKGFVDLVIKVYFKDTHPKFPAGGKMSQYLESMQIGDTIEFRGPSGLLVYQGKASLMAELPQPHVFIPLS

SEQ ID NO: 913468 - protein, 264 aa, Homo sapiens
RSDAGPGATVSAAAAAATERARRGATMGAQLSTLGHMVLFPVWFLYSLLMKLFQRSTPAITLESPDIKYPLRLIDREIISHDTRRFRFALPSPQHILGLPVGQHIYLSARIDGNLVVRPYTPISSDDDKGFVDLVIKVYFKDTHPKFPAGGKMSQYLESMQIGDTIEFRGPSGLLVYQGKVIRVGIPWLHGRLRELESLGVLGAGCRPLALCGWVTLVRPAVPLWELSLPGCRGGKLLAQGLQTGHSWGPRLTHCQPLFGFLSI

SEQ ID NO: 913469 - protein, 95 aa, Homo sapiens
WLEWEEGAGHGALPEPQHFLSAVLMTPRPPPTHTIRLRAASSPVCPPFPAVDHSRDVSRHTWAAQSCRCQGPPQPRLSPPLPPQGQAQASPPDAA

SEQ ID NO: 913470 - protein, 327 aa, Homo sapiens; identical to SEQ ID NO: 913455

SEQ ID NO: 913471 - protein, 327 aa, Homo sapiens; identical to SEQ ID NO: 913455

SEQ ID NO: 913472 - protein, 327 aa, Homo sapiens; identical to SEQ ID NO: 913455

SEQ ID NO: 913473 - protein, 336 aa, Homo sapiens
MGAQLSTLGHMVLVRQIVGSVVACLASVEVRRSMLLSNELAYSALRTRPRTIQSTSHAGFIGTRGTNLIHGPISSSAGAGFFPGLYVARLCPVSKPPLRGNHFLGGPPLSGQHIYLSARIDGNLVVRPYTPISSDDDKGFVDLVIKVYFKDTHPKFPAGGKMSQYLESMQIGDTIEFRGPSGLLVYQGKGKFAIRPDKKSNPIIRTVKSVGMIAGGTGITPMLQVIRAIMKDPDDHTVCHLLFANQTEKDILLRPELEELRNKHSARFKLWYTLDRAPEAWDYGQGFVNEEMIRDHLPPPEEEPLVLMCGPPPMIQYACLPNLDHVGHPTERCFVF

SEQ ID NO: 913474 - protein, 227 aa, Homo sapiens
RSDAGPGATVSAAAAAATERARRGATMGAQLSTLGHMVLFPVWFLYSLLMKLFQRSTPAITLESPDIKYPLRLIDREIISHDTRRFRFALPSPQHILGLPVGQHIYLSARIDGNLVVRPYTPISSDDDKGFVDLVIKTEKDILLRPELEELRNKHSARFKLWYTLDRAPEAWDYGQGFVNEEMIRDHLPPPEEEPLVLMCGPPPMIQYACLPNLDHVGHPTERCFVF

SEQ ID NO: 913475 - protein, 79 aa, Homo sapiens
SAASRQTRIQRAPGQVGPYGALPSLVPVQSAHEAVPALHASHHPRPGSAWPARALVNHLAEQFPWSPFGSRAVSQMGHG

SEQ ID NO: 913476 - protein, 82 aa, Homo sapiens
RSDAGPGATVSAAAAAATERARRGATMGAQLSTLGHMVLFPVWFLYSLLMKLFQRSTPAITLESPDIKYPLRLIDREMEKAR

SEQ ID NO: 913477 - protein, 64 aa, Homo sapiens
MRVLYLLFSFLFIFLMPLPGVFGGIGDPVTCLKSGAICHPVFCPRRYKQIGTCGLPGTKCCKKP

SEQ ID NO: 913478 - protein, 409 aa, Homo sapiens [sequence omitted]

SEQ ID NO: 913479 - protein, 1270 aa, Homo sapiens
RRRRRALPPRGPRPGASGSAMWLSPEEVLVANALWVTERANPFFVLQRRRGHGRGGGLTGLLVGTLDVVLDSSARVAPYRILHQTQDSQVYWTVACGSSRKEITKHWEWLENNLLQTLSIFDSEEDITTFVKGKIHGIIAEENKNLQPQGDEDPGKFKEAELKMRKQFGMPEGEKLVNYYSCSYWKGRVPRQGWLYLTVNHLCFYSFLLGKEVSLVVQWVDITRLEKNATLLFPESIRVDTRDQELFFSMFLNIGETFKLMEQLANLAMRQLLDSEGFLEDKALPRPIRPHRNISALKRDLDARAKNECYRATFRLPRDERLDGHTSCTLWTPFNKLHIPGQMFISNNYICFASKEEDACHLIIPLREVTIVEKADSSSVLPSPLSISTKSKMTFLFANLKDRDFLVQRISDFLQKTPSKQPGSIGSRKASVVDPSTESSPAPQEGSEQPASPASPLSSRQSFCAQEAPTASQGLLKLFQKNSPMEDLGAKGAKEKMKEESWHIHFFEYGRGVCMYRTAKTRALVLKGIPESLRGELWLLFSGAWNEMVTHPGYYAELVEKSTGKYSLATEEIERDLHRSMPEHPAFQNELGIAALRRVLTAYAFRNPTIGYCQAMNIVTSVLLLYGSEEEAFWLLVALCERMLPDYYNTRVVGALVDQGIFEELTRDFLPQLSEKMQDLGVISSISLSWFLTLFLSVMPFESAVVIVDCFFYEGIKVILQVALAVLDANMEQLLGCSDEGEAMTMLGRYLDNVVNKQSVSPPIPHLRALLSSSDDPPAEVDIFELLKVSYEKFSSLRAEDIEQMRFKQRLKVIQSLEDTAKRSVVRAIPVDIGFSIEELEDLYMVFKAKHLASQYWGCSRTMAGRRDPSLPYLEQYRIDASQFRELFASLTPWACGSHTPLLAGRMFRLLDENKDSLINFKEFVTGMSGMYHGDLTEKLKVLYKLHLPPALSPEEAESALEAAHYFTEDSSSEASPLASDLDLFLPWEAQEALPQEEQEGSGSEERGEEKGTSSPDYRHYLRMWAKEKEAQKETIKDLPKMNQEQFIELCKTLYNMFSEDPMEQDLYHAIATVASLLLRIGEVGKKFSARTGRKPRDCATEEDEPPAPELHQDAARELQPPAAGDPQAKAGGDTHLGTAPQESQVVVEGGSGEGQGSPSQLLSDDETKDDMSMSSYSVVSTGSLQCEDLADDTVLVGGEACSPTARIGGTVDTDWCISFEQILASILTESVLVNFFEKRVDIGLKIKDQKKVERQFSTASDHEQPGVSG

SEQ ID NO: 913480 - protein, 409 aa, Homo sapiens [sequence omitted]

SEQ ID NO: 913481 - protein, 1270 aa, Homo sapiens; identical to SEQ ID NO: 913479

SEQ ID NO: 913482 - protein, 1270 aa, Homo sapiens; identical to SEQ ID NO: 913479

SEQ ID NO: 913483 - protein, 1270 aa, Homo sapiens; identical to SEQ ID NO: 913479

SEQ ID NO: 913484 - protein, 584 aa, Homo sapiens
RRRRRALPPRGPRPGASGSAMWLSPEEVLVANALWVTERANPFFVLQRRRGHGRGGGLTGLLVGTLDVVLDSSARVAPYRILHQTQDSQVYWTVACGSSRKEITKHWEWLENNLLQTLSIFDSEEDITTFVKGKIHGIIAEENKNLQPQGDEDPGKFKEAELKMRKQFGMPEGEKLVNYYSCSYWKGRVPRQGWLYLTVNHLCFYSFLLGKEVSLVVQWVDITRLEKNATLLFPESIRVDTRDQELFFSMFLNIGETFKLMEQLANLAMRQLLDSEGFLEDKALPRPIRPHRNISALKRDLDARAKNECYRATFRLPRDERLDGHTSCTLWTPFNKLHIPGQMFISNNYICFASKEEEEQFIELCKTLYNMFSEDPMEQDLYHAIATVASLLLRIGEVGKKFSARTGRKPRDCATEEDEPPAPELHQDAARELQPPAAGDPQAKAGGDTHLGTAPQESQVVVEGGSGEGQGSPSQLLSDDETKDDMSMSSYSVVSTGSLQCEDLADDTVLVGGEACSPTARIGGTVDTDWCISFEQILASILTESVLVNFFEKRVDIGLKIKDQKKVERQFSTASDHEQPGVSG

SEQ ID NO: 913485 - protein, 1253 aa, Homo sapiens
RRRRRALPPRGPRPGASGSAMWLSPEEVLVANALWVTERANPFFVLQRRRGHGRGGGLTGLLVGTLDVVLDSSARVAPYRILHQTQDSQVYWTVACGSSRKEITKHWEWLENNLLQTLSIFDSEEDITTFVKGKIHGIIAEENKNLQPQGDEDPGKFKEAELKMRKQFGMPEGEKLVNYYSCSYWKGRVPRQGWLYLTVNHLCFYSFLLGKEVSLVVQWVDITRLEKNATLLFPESIRVDTRDQELFFSMFLNIGETFKLMEQLANLAMRQLLDSEGFLEDKALPRPIRPHRNISALKRDLDARAKNECYRATFRLPRDERLDGHTSCTLWTPFNKLHIPGQMFISNNYICFASKEEDACHLIIPLREVTIVEKADSSSVLPSPLSISTKSKMTFLFANLKDRDFLVQRISDFLQKTPSKQPGSIGSRKASVVDPSTESSPAPQEGSEQPASPASPLSSRQSFCAQEAPTASQGLLKLFQKNSPMEDLGAKGAKEKMKEESWHIHFFEYGRGVCMYRTAKTRALVLKGIPESLRGELWLLFSGAWNEMVTHPGYYAELVEKSTGKYSLATEEIERDLHRSMPEHPAFQNELGIAALRRVLTAYAFRNPTIGYCQAMNIVTSVLLLYGSEEEAFWLLVALCERMLPDYYNTRVVGALVDQGIFEELTRDFLPQLSEKMQDLGVISSISLSWFLTLFLSVMPFESAVVIVDCFFYEGIKVILQVALAVLDANMEQLLGCSDEGEAMTMLGRYLDNVVNKQSVSPPIPHLRALLSSSDDPPAEVDIFELLKVSYEKFSSLRAEDIEQMRFKQRLKVIQSLEDTAKRSVVRAIPVDIGFSIEELEDLYMVFKAKHLASQYWGCSRTMAGRRDPSLPYLEQYRIDASQFRELFASLTPWACGSHTPLLAGRMFRLLDENKDSLINFKEFVTGMSGMYHGDLTEKLKVLYKLHLPPALSPEEAESALEAAHYFTEDSSSEEALPQEEQEGSGSEERGEEKGTSSPDYRHYLRMWAKEKEAQKETIKDLPKMNQEQFIELCKTLYNMFSEDPMEQDLYHAIATVASLLLRIGEVGKKFSARTGRKPRDCATEEDEPPAPELHQDAARELQPPAAGDPQAKAGGDTHLGTAPQESQVVVEGGSGEGQGSPSQLLSDDETKDDMSMSSYSVVSTGSLQCEDLADDTVLVGGEACSPTARIGGTVDTDWCISFEQILASILTESVLVNFFEKRVDIGLKIKDQKKVERQFSTASDHEQPGVSG

SEQ ID NO: 913486 - protein, 1235 aa, Homo sapiens
RRRRRALPPRGPRPGASGSAMWLSPEEVLVANALWVTERANPFFVLQRRRGHGRGGGLTGLLVGTLDVVLDSSARVAPYRILHQTQDSQVYWTVACGSSRKEITKHWEWLENNLLQTLSIFDSEEDITTFVKGKIHGIIAEENKNLQPQGDEDPGKFKEAELKMRKQFGMPEGEKLVNYYSCSYWKGRVPRQGWLYLTVNHLCFYSFLLGKEVSLVVQWVDITRLEKNATLLFPESIRVDTRDQELFFSMFLNIGETFKLMEQLANLAMRQLLDSEGFLEDKALPRPIRPHRNISALKRDLDARAKNECYRATFRLPRDERLDGHTSCTLWTPFNKLHIPGQMFISNNYICFASKEEDACHLIIPLREVTIVEKADSSSVLPSPLSISTKSKMTFLFANLKDRDFLVQRISDFLQKTPSKQPGSIGSRKASVVDPSTESSPAPQEGSEQPASPASPLSSRQSFCAQEAPTASQGLLKLFQKNSPMEDLGAKGAKEKMKEESWHIHFFEYGRGVCMYRTAKTRALVLKGIPESLRGELWLLFSGAWNEMVTHPGYYAELVEKSTGKYSLATEEIERDLHRSMPEHPAFQNELGIAALRRVLTAYAFRNPTIGYCQAMNIVTSVLLLYGSEEEAFWLLVALCERMLPDYYNTRVVGALVDQGIFEELTRDFLPQLSEKMQDLGVISSISLSWFLTLFLSVMPFESAVVIVDCFFYEGIKVILQVALAVLDANMEQLLGCSDEGEAMTMLGRYLDNVVNKQSVSPPIPHLRALLSSSDDPPAEVDIFELLKVSYEKFSSLRAEDIEQMRFKQRLKVIQSLEDTAKRSVVRAIPVDIGFSIEELEDLYMVFKAKHLASQYWGCSRTMAGRRDPSLPYLEQYRIDASQFRELFASLTPWACGSHTPLLAGRMFRLLDENKDSLINFKEFVTGMSGMYHGDLTEKLKVLYKLHLPPALSPEEAESALEAAHYFTEDSSSEEALPQEEQEGSGSEERGEEKGTSSPDYRHYLRMWAKEKEAQKETIKDLPKMNQEQFIELCKTLYNMFSEDPMEQDLYHAIATVASLLLRIGEVGKKFSARTGRKPRDCATEEDEPPAPELHQDAARELQPPAAGDPQAKAGGDTHLGTAPQESQVVVEGGSGEGQGSPSQLLSDDETKDDMSMSSYSVVSTGSLQCEDLADDTVLVGGEACSPTARIGGTVDTDWCISFEQILASILTESVLVNFFEKRVDIGLKIKDLSG

SEQ ID NO: 913487 - protein, 1158 aa, Homo sapiens
RRRRRALPPRGPRPGASGSAMWLSPEEVLVANALWVTERANPFFVLQRRRGHGRGGGLTGLLVGTLDVVLDSSARVAPYRILHQTQDSQVYWTVACGSSRKEITKHWEWLENNLLQTLSIFDSEEDITTFVKGKIHGIIAEENKNLQPQGDEDPGKFKEAELKMRKQFGMPEGEKLVNYYSCSYWKGRVPRQGWLYLTVNHLCFYSFLLGKEVSLVVQWVDITRLEKNATLLFPESIRVDTRDQELFFSMFLNIGETFKLMEQLANLAMRQLLDSEGFLEDKALPRPIRPHRNISALKRDLDARAKNECYRATFRLPRDERLDGHTSCTLWTPFNKLHIPGQMFISNNYICFASKEEDACHLIIPLREVTIVEKADSSSVLPSPLSISTKSKMTFLFANLKDRDFLVQRISDFLQKTPSKQPGSIGSRKASVVDPSTESSPAPQEGSEQPASPASPLSSRQSFCAQEAPTASQGLLKLFQKNSPMEDLGAKGAKEKMKEESWHIHFFEYGRGVCMYRTAKTRALVLKGIPESLRGELWLLFSGAWNEMVTHPGYYAELVEKSTGKYSLATEEIERDLHRSMPEHPAFQNELGIAALRRVLTAYAFRNPTIGYCQAMNIVTSVLLLYGSEEEAFWLLVALCERMLPDYYNTRVVGALVDQGIFEELTRDFLPQLSEKMQDLGVISSISLSWFLTLFLSVMPFESAVVIVDCFFYEGIKVILQVALAVLDANMEQLLGCSDEGEAMTMLGRYLDNVVNKQSVSPPIPHLRALLSSSDDPPAEVDIFELLKVSYEKFSSLRAEDIEQMRFKQRLKVIQSLEDTAKRSVVRAIPVDIGFSIEELEDLYMVFKAKHLASQYWGCSRTMAGRRDPSLPYLEQYRIDASQFRELFASLTPWACGSHTPLLAGRMFRLLDENKDSLINFKEFVTGMSGMYHGDLTEKLKVLYKLHLPPALSPEEAESALEAAHYFTEDSSSEEALPQEEQEGSGSEERGEEKGTSSPDYRHYLRMWAKEKEAQKETIKDLPKMNQEQFIELCKTLYNMFSEDPMEQDLYHAIATVASLLLRIGEVGKKFSARTGRKPRDCATEEDEPPAPELHQDAARELQPPAAGDPQAKAGGDTHLGTAPQESQVVVEGGSGEGQGSPSQLLSDDETKDDIPCW

SEQ ID NO: 913488 - protein, 1114 aa, Homo sapiens
  misc_feature (1090)..(1090): Xaa can be any naturally occurring amino acid
RRRRRALPPRGPRPGASGSAMWLSPEEVLVANALWVTERANPFFVLQRRRGHGRGGGLTGLLVGTLDVVLDSSARVAPYRILHQTQDSQVYWTVACGSSRKEITKHWEWLENNLLQTLSIFDSEEDITTFVKGKIHGIIAEENKNLQPQGDEDPGKFKEAELKMRKQFGMPEGEKLVNYYSCSYWKGRVPRQGWLYLTVNHLCFYSFLLGKEVSLVVQWVDITRLEKNATLLFPESIRVDTRDQELFFSMFLNIGETFKLMEQLANLAMRQLLDSEGFLEDKALPRPIRPHRNISALKRDLDARAKNECYRATFRLPRDERLDGHTSCTLWTPFNKLHIPGQMFISNNYICFASKEEDACHLIIPLREVTIVEKADSSSVLPSPLSISTKSKMTFLFANLKDRDFLVQRISDFLQKTPSKQPGSIGSRKASVVDPSTESSPAPQEGSEQPASPASPLSSRQSFCAQEAPTASQGLLKLFQKNSPMEDLGAKGAKEKMKEESWHIHFFEYGRGVCMYRTAKTRALVLKGIPESLRGELWLLFSGAWNEMVTHPGYYAELVEKSTGKYSLATEEIERDLHRSMPEHPAFQNELGIAALRRVLTAYAFRNPTIGYCQAMNIVTSVLLLYGSEEEAFWLLVALCERMLPDYYNTRVVGALVDQGIFEELTRDFLPQLSEKMQDLGVISSISLSWFLTLFLSVMPFESAVVIVDCFFYEGIKVILQVALAVLDANMEQLLGCSDEGEAMTMLGRYLDNVVNKQSVSPPIPHLRALLSSSDDPPAEVDIFELLKVSYEKFSSLRAEDIEQMRFKQRLKVIQSLEDTAKRSVVRAIPVDIGFSIEELEDLYMVFKAKHLASQYWGCSRTMAGRRDPSLPYLEQYRIDASQFRELFASLTPWACGSHTPLLAGRMFRLLDENKDSLINFKEFVTGMSGMYHGDLTEKLKVLYKLHLPPALSPEEAESALEAAHYFTEDSSSEEALPQEEQEGSGSEERGEEKGTSSPDYRHYLRMWAKEKEAQKETIKDLPKMNQEQFIELCKTLYNMFSEDPMEQDLYHAIATVASLLLRIGESPSNSSTETLTKFQGPLGERGIRXRARKGFYQSINTTSPTIGPHLGIW

SEQ ID NO: 913489 - protein, 517 aa, Homo sapiens
RRRRRALPPRGPRPGASGSAMWLSPEEVLVANALWVTERANPFFVLQRRRGHGRGGGLTGLLVGTLDVVLDSSARVAPYRILHQTQDSQVYWTVACGSSRKEITKHWEWLENNLLQTLSIFDSEEDITTFVKGKIHGIIAEENKNLQPQGDEDPGKFKEAELKMRKQFGMPEGEKLVNYYSCSYWKGRVPRQGWLYLTVNHLCFYSFLLGKEVSLVVQWVDITRLEKNATLLFPESIRVDTRDQELFFSMFLNIGETFKLMEQLANLAMRQLLDSEGFLEDKALPRPIRPHRNISALKRDLDARAKNECYRATFRLPRDERLDGHTSCTLWTPFNKLHIPGQMFISNNYICFASKEEDACHLIIPLREVTIVEKADSSSVLPSPLSISTKSKMTFLFANLKDRDFLVQRISDFLQKTPSKQPGSIGSRKASVVDPSTESSPAPQEGSEQPASPASPLSSRQSFCAQEAPTASQGLLKLFQKNSPMEDLGAKGEVHPQAWAVASCLPLGSRTRLWSQR

SEQ ID NO: 913490 - protein, 492 aa, Homo sapiens
RRRRRALPPRGPRPGASGSAMWLSPEEVLVANALWVTERANPFFVLQRRRGHGRGGGLTGLLVGTLDVVLDSSARVAPYRILHQTQDSQVYWTVACGSSRKEITKHWEWLENNLLQTLSIFDSEEDITTFVKGKIHGIIAEENKNLQPQGDEDPGKFKEAELKMRKQFGMPEGEKLVNYYSCSYWKGRVPRQGWLYLTVNHLCFYSFLLGKEVSLVVQWVDITRLEKNATLLFPESIRVDTRDQELFFSMFLNIGETFKLMEQLANLAMRQLLDSEGFLEDKALPRPIRPHRNISALKRDLDARAKNECYRATFRLPRDERLDGHTSCTLWTPFNKLHIPGQMFISNNYICFASKEEDACHLIIPLREVTIVEKADSSSVLPSPLSISTKSKMTFLFANLKDRDFLVQRISDFLQKTPSKQPGSIGSRKASVVDPSTEPHTRYSSLLLGPLPMRNLLWLSFLHCCCTQSKATLWRPVHFGFVPMTFPARRSG

SEQ ID NO: 913491 - protein, 131 aa, Homo sapiens [sequence omitted]

SEQ ID NO: 913492 - protein, 1253 aa, Homo sapiens; identical to SEQ ID NO: 913485

SEQ ID NO: 913493 - protein, 1005 aa, Homo sapiens
RRRRRALPPRGPRPGASGSAMWLSPEEVLVANALWVTERANPFFVLQRRRGHGRGGGLTGLLVGTLDVVLDSSARVAPYRILHQTQDSQVYWTVACGSSRKEITKHWEWLENNLLQTLSIFDSEEDITTFVKGKIHGIIAEENKNLQPQGDEDPGKFKEAELKMRKQFGMPEGEKLVNYYSCSYWKGRVPRQGWLYLTVNHLCFYSFLLGKEVSLVVQWVDITRLEKNATLLFPESIRVDTRDQELFFSMFLNIGETFKLMEQLANLAMRQLLDSEGFLEDKALPRPIRPHRNISALKRDLDARAKNECYRATFRLPRDERLDGHTSCTLWTPFNKLHIPGQMFISNNYICFASKEEDACHLIIPLREVTIVEKADSSSVLPSPLSISTKSKMTFLFANLKDRDFLVQRISDFLQKTPSKQPGSIGSRKASVVDPSTESSPAPQEGSEQPASPASPLSSRQSFCAQEAPTASQGLLKLFQKNSPMEDLGAKGAKEKMKEESWHIHFFEYGRGVCMYRTAKTRALVLKGIPESLRGELWLLFSGAWNEMVTHPGYYAELVEKSTGKYSLATEEIERDLHRSMPEHPAFQNELGIAALRRVLTAYAFRNPTIGYCQAMNIVTSVLLLYGSEEEAFWLLVALCERMLPELCGSHTPLLAGRMFRLLDENKDSLINFKEFVTGMSGMYHGDLTEKLKVLYKLHLPPALSPEEAESALEAAHYFTEDSSSEEALPQEEQEGSGSEERGEEKGTSSPDYRHYLRMWAKEKEAQKETIKDLPKMNQEQFIELCKTLYNMFSEDPMEQDLYHAIATVASLLLRIGEVGKKFSARTGRKPRDCATEEDEPPAPELHQDAARELQPPAAGDPQAKAGGDTHLGTAPQESQVVVEGGSGEGQGSPSQLLSDDETKDDMSMSSYSVVSTGSLQCEDLADDTVLVGGEACSPTARIGGTVDTDWCISFEQILASILTESVLVNFFEKRVDIGLKIKDQKKVERQFSTASDHEQPGVSG

SEQ ID NO: 913494 - protein, 360 aa, Homo sapiens
GGRTNYRLGYEARVVGLLDENKDSLINFKEFVTGMSGMYHGDLTEKLKVLYKLHLPPALSPEEAESALEAAHYFTEDSSSEEALPQEEQEGSGSEERGEEKGTSSPDYRHYLRMWAKEKEAQKETIKDLPKMNQEQFIELCKTLYNMFSEDPMEQDLYHAIATVASLLLRIGEVGKKFSARTGRKPRDCATEEDEPPAPELHQDAARELQPPAAGDPQAKAGGDTHLGTAPQESQVVVEGGSGEGQGSPSQLLSDDETKDDMSMSSYSVVSTGSLQCEDLADDTVLVGGEACSPTARIGGTVDTDWCISFEQILASILTESVLVNFFEKRVDIGLKIKDQKKVERQFSTASDHEQPGVSG

SEQ ID NO: 913495 - protein, 324 aa, Homo sapiens [sequence omitted]

SEQ ID NO: 913496 - protein, 1270 aa, Homo sapiens; identical to SEQ ID NO: 913479

SEQ ID NO: 913497 - protein, 247 aa, Homo sapiens [sequence omitted]

SEQ ID NO: 913498 - protein, 1253 aa, Homo sapiens; identical to SEQ ID NO: 913485

SEQ ID NO: 913499 - protein, 1235 aa, Homo sapiens; identical to SEQ ID NO: 913486

SEQ ID NO: 913500 - protein, 487 aa, Homo sapiens
RRRRRALPPRGPRPGASGSAMWLSPEEVLVANALWVTERANPFFVLQRRRGHGRGGGLTGLLVGTLDVVLDSSARVAPYRILHQTQDSQVYWTVACGSSRKEITKHWEWLENNLLQTLSIFDSEEDITTFVKGKIHGIIAEENKNLQPQGDEDPGKFKEAELKMRKQFGMPEGEKLVNYYSCSYWKGRVPRQGWLYLTVNHLCFYSFLLGKEVSLVVQWVDITRLEKNATLLFPESIRVDTRDQELFFSMFLNIGETFKLMEQLANLAMRQLLDSEGFLEDKALPRPIRPHRNISALKRDLDARAKNECYRATFRLPRDERLDGHTSCTLWTPFNKLHIPGQMFISNNYICFASKEEDACHLIIPLREVTIVEKADSSSVLPSPLSISTKSKMTFLFANLKDRDFLVQRISDFLQKTPSKQPGSIGSRKASVVDPSTEVRSPLGAAGSSWAQEEPGHPSASPLEPDPMVPAVGLRLGVDVSELARDP

SEQ ID NO: 913501 - protein, 394 aa, Homo sapiens
RRRRRALPPRGPRPGASGSAMWLSPEEVLVANALWVTERANPFFVLQRRRGHGRGGGLTGLLVGTLDVVLDSSARVAPYRILHQTQDSQVYWTVACGSSRKEITKHWEWLENNLLQTLSIFDSEEDITTFVKGKIHGIIAEENKNLQPQGDEDPGKFKEAELKMRKQFGMPEGEKLVNYYSCSYWKGRVPRQGWLYLTVNHLCFYSFLLGKEVSLVVQWVDITRLEKNATLLFPESIRVDTRDQELFFSMFLNIGETFKLMEQLANLAMRQLLDSEGFLEDKALPRPIRPHRNISALKRDLDARAKNECYRATFRLPRDERLDGHTSCTLWTPFNKLHIPGQMFISNNYICFASKEEDACHLIIPLREVTIVEKADYPACCPSPVVIRDRLDHP

SEQ ID NO: 913502 - protein, 124 aa, Homo sapiens
PCYCPQSTRRRTETAGTRVSPGAWNEMVTHPGYYAELVEKSTGKYSLATEEIERDLHRSMPEHPAFQNELGIAALRRVLTAYAFRNPTIGYCQVRGLTGAQRQHLPPEVHRSRSLWSQACVVTL

SEQ ID NO: 913503 - protein, 327 aa, Homo sapiens
MPGPTQTLSPNGENNNDIIQDNNGTIIPFRKHTVRGERSYSWGMAVNVYSTSITQETMSRHDIIAWVNDIVSLNYTKVEQLCSGAAYCQFMDMLFPGCISLKKVKFQAKLEHEYIHNFKLLQASFKRMNVDKVIPVEKLVKGRFQDNLDFIQWFKKFYDANYDGKEYDPVEARQGQDAIPPPDPGEQIFNLPKKSHHANSPTAGAAKSSPAAKPGSTPSRPSSAKRASSSGSASKSDKDLETQVIQLNEQVHSLKLALEGVEKERDFYFGKLREIELLCQEHGQENDDLVQRLMDILYASEEHEGHTEEPEAEEQAHEQQPPQQEEY

SEQ ID NO: 913504 - protein, 327 aa, Homo sapiens; identical to SEQ ID NO: 913503

SEQ ID NO: 913505 - protein, 327 aa, Homo sapiens; identical to SEQ ID NO: 913503

SEQ ID NO: 913506 - protein, 327 aa, Homo sapiens
SGENKAPSCQQRKEATAPEQCPVSQRNSSFQQPGRKPGCSSWGMAVNVYSTSITQETMSRHDIIAWVNDIVSLNYTKVEQLCSGAAYCQFMDMLFPGCISLKKVKFQAKLEHEYIHNFKLLQASFKRMNVDKVIPVEKLVKGRFQDNLDFIQWFKKFYDANYDGKEYDPVEARQGQDAIPPPDPGEQIFNLPKKSHHANSPTAGAAKSSPAAKPGSTPSRPSSAKRASSSGSASKSDKDLETQVIQLNEQVHSLKLALEGVEKERDFYFGKLREIELLCQEHGQENDDLVQRLMDILYASEEHEGHTEEPEAEEQAHEQQPPQQEEY

SEQ ID NO: 913507 - protein, 306 aa, Homo sapiens
AEKTKPPAVSRGRRRQRRSSWGMAVNVYSTSITQETMSRHDIIAWVNDIVSLNYTKVEQLCSGAAYCQFMDMLFPGCISLKKVKFQAKLEHEYIHNFKLLQASFKRMNVDKVIPVEKLVKGRFQDNLDFIQWFKKFYDANYDGKEYDPVEARQGQDAIPPPDPGEQIFNLPKKSHHANSPTAGAAKSSPAAKPGSTPSRPSSAKRASSSGSASKSDKDLETQVIQLNEQVHSLKLALEGVEKERDFYFGKLREIELLCQEHGQENDDLVQRLMDILYASEEHEGHTEEPEAEEQAHEQQPPQQEEY

SEQ ID NO: 913508 - protein, 327 aa, Homo sapiens; identical to SEQ ID NO: 913503

SEQ ID NO: 913509 - protein, 327 aa, Homo sapiens; identical to SEQ ID NO: 913503

SEQ ID NO: 913510 - protein, 105 aa, Homo sapiens
MPGPTQTLSPNGENNNDIIQDNNGTIIPFRKHTVRGERSYSWGMAVNVYSTSITQETMSRHDIIAWVNDIVSLNYTKVEQLCSGKTYSFKCLPKYLQSVMWNVIL

SEQ ID NO: 913511 - protein, 259 aa, Homo sapiens
SGENKAPSCQQRKEATAPEQCPVSQRNSSFQQPGRKPGCSSWGMAVNVYSTSITQETMSRHDIIAWVNDIVSLNYTKVEQLCSGAAYCQFMDMLFPGCISLKKVKFQAKLEHEYIHNFKLLQASFKRMNVDKVIPVEKLVKGRFQDNLDFIQWFKKFYDANYDGKEYDPVEARQGQDAIPPPDPGEQIFNLPKKSHHANSPTAGAAKSSPAAKPGSTPSRPSSAKRASSSGSASKSDKDLETQVIQLNEQVMHQLWPRL

SEQ ID NO: 913512 - protein, 327 aa, Homo sapiens; identical to SEQ ID NO: 913503

SEQ ID NO: 913513 - protein, 315 aa, Homo sapiens
MKQNRDQKCPVSQRNSSFQQPGRKPGCSSWGMAVNVYSTSITQETMSRHDIIAWVNDIVSLNYTKVEQLCSGAAYCQFMDMLFPGCISLKKVKFQAKLEHEYIHNFKLLQASFKRMNVDKVIPVEKLVKGRFQDNLDFIQWFKKFYDANYDGKEYDPVEARQGQDAIPPPDPGEQIFNLPKKSHHANSPTAGAAKSSPAAKPGSTPSRPSSAKRASSSGSASKSDKDLETQVIQLNEQVHSLKLALEGVEKERDFYFGKLREIELLCQEHGQENDDLVQRLMDILYASEEHEGHTEEPEAEEQAHEQQPPQQEEY

SEQ ID NO: 913514 - protein, 200 aa, Homo sapiens [sequence omitted]

SEQ ID NO: 913515 - protein, 259 aa, Homo sapiens
MPGPTQTLSPNGENNNDIIQDNNGTIIPFRKHTVRGERSYSWGMAVNVYSTSITQETMSRHDIIAWVNDIVSLNYTKVEQLCSGAAYCQFMDMLFPGCISLKKVKFQAKLEHEYIHNFKLLQASFKRMNVDKVIPVEKLVKGRFQDNLDFIQWFKKFYDANYDGKEYDPVEARQGQDAIPPPDPGEQIFNLPKKSHHANSPTAGAAKSSPAAKPGSTPSRPSSAKRASSSGSASKSDKDLETQVIQLNEQVMHQLWPRL

SEQ ID NO: 913516 - protein, 149 aa, Homo sapiens
SGENKAPSCQQRKEATAPEQCPVSQRNSSFQQPGRKPGCSSWGMAVNVYSTSITQETMSRHDIIAWVNDIVSLNYTKVEQLCSGAAYCQFMDMLFPGCISLKKVKFQAKLEHEYIHNFKLLQASFKRMNVDKGFQWKAWKGPFKTTWIY

SEQ ID NO: 913517 - protein, 551 aa, Homo sapiens
MPSETPQAEVGPTGCPHRSGPHSAKGSLEKGSPEDKEAKEPLWIRPDAPSRCTWQLGRPASESPHHHTAPAKSPKILPDILKKIGDTPMVRINKIGKKFGLKCELLAKCEFFNAGGSVKDRISLRMIEDAERDGTLKPGDTIIEPTSGNTGIGLALAAAVRGYRCIIVMPEKMSSEKVDVLRALGAEIVRTPTNARFDSPESHVGVAWRLKNEIPNSHILDQYRNASNPLAHYDTTADEILQQCDGKLDMLVASVGTGGTITGIARKLKEKCPGCRIIGVDPEGSILAEPEELNQTEQTTYEVEGIGYDFIPTVLDRTVVDKWFKSNDEEAFTFARMLIAQEGLLCGGSAGSTVAVAVKAAQELQEGQRCVVILPDSVRNYMTKFLSDRWMLQKGFLKEEDLTEKKPWWWHLRVQELGLSAPLTVLPTITCGHTIEILREKGFDQAPVVDEAGVILGMVTLGNMLSSLLAGKVQPSDQVGKVIYKQFKQIRLTDTLGRLSHILEMDHFALVVHEQIQYHSTGKSSQRQMVFGVVTAIDLLNFVAAQERDQK

SEQ ID NO: 913518 - protein, 551 aa, Homo sapiens; identical to SEQ ID NO: 913517

SEQ ID NO: 913519 - protein, 551 aa, Homo sapiens; identical to SEQ ID NO: 913517

SEQ ID NO: 913520 - protein, 258 aa, Homo sapiens
MVRINKIGKKFGLKCELLAKCEFFNAGGSVKDRISLRMIEDAERDGTLKPGDTIIEPTSGNTGIGLALAAAVRGYRCIIVMPEKMSSEKVDVLRALGAEIVRTPTNARFDSPESHVGVAWRLKNEIPNSHILDQYRNASNPLAHYDTTADEILQQCDGKLDMLVASVGTGGTITGIARKLKEKCPGCRIIGVDPEGSILAEPEELNQTEQTTYEVEGIGYDFIPTVLDRTPAVVARGPEHAVGASLAVVSAKVLRCSV

SEQ ID NO: 913521 - protein, 59 aa, Homo sapiens
MFGKRPRPRPPGPGEGAPRGAPATTLRGVGPVPESARQPLAVGRTGAAQGDCSAPRLGV

SEQ ID NO: 913522 - protein, 551 aa, Homo sapiens; identical to SEQ ID NO: 913517

SEQ ID NO: 913523 - protein, 506 aa, Homo sapiens
MPSETPQAEVGPTGCPHRSGPHSAKGSLEKGSPEDKEAKEPLWIRPDAPSRCTWQLGRPASESPHHHTAPAKSPKILPDILKKIGDTPMVRINKIGKKFGLKCELLAKCEFFNAGGSVKDRISLRMIEDAERDGTLKPGDTIIEPTSGNTGIGLALAAAVRGYRCIIVMPEKMSSEKVDVLRALGAEIVRTPTNARFDSPESHVGVAWRLKNEIPNSHILDQYRNASNPLAHYDTTADEILQQCDGKLDMLVASVGTGGTITGIARKLKEKCPGCRIIGVDPEGSILAEPEELNQTEQTTYEVEGIGYDFIPTVLDRTVVDKWFKSNDEEAFTFARMLIAQEGLLCGGSAGSTVAVAVKAAQELQEGQRCVVILPDSVRNYMTKFLSDRWMLQKGFLKEEDLTEKKPWVILGMVTLGNMLSSLLAGKVQPSDQVGKVIYKQFKQIRLTDTLGRLSHILEMDHFALVVHEQIQYHSTGKSSQRQMVFGVVTAIDLLNFVAAQERDQK

SEQ ID NO: 913524 - protein, 463 aa, Homo sapiens [sequence omitted]

SEQ ID NO: 913525 - protein, 551 aa, Homo sapiens; identical to SEQ ID NO: 913517

SEQ ID NO: 913526 - protein, 566 aa, Homo sapiens
MPSETPQAEVGPTGCPHRSGPHSAKGSLEKGSPEDKEAKEPLWIRPDAPSRCTWQLGRPASESPHHHTAPAKSPKILPDILKKIGDTPMVRINKIGKKFGLKCELLAKCEFFNAGGSVKDRISLRMIEDAERDGTLKPGDTIIEPTSGNTGIGLALAAAVRGYRCIIVMPEKMSSEKVDVLRALGAEIVRTPTNARFDSPESHVGVAWRLKNEIPNSHILDQYRNASNPLAHYDTTADEILQQCDGKLDMLVASVGTGGTITGIARKLKEKCPGCRIIGVDPEGSILAEPEELNQTEQTTYEVEGIGYDFIPTVLDRTVVDKWFKSNDEEAFTFARMLIAQEGLLCGGSAGSTVAVAVKAAQELQEGQRCVVILPDSVRNYMTKFLSDRWMLQKGFLKEEDLTEKKPWWWHLRVQELGLSAPLTVLPTITCGHTIEILREKGFDQAPVVDEAGVILGMVTLGNMLSSLLAGKVQPSDQVGKVIYKQFKQIRLTDTLGRLSHILEMDHFALVVHEQIQYHSTGKSSQRQMVFGVVTAIDLLNFVAAQERDQKMFHQGNIEREVGQVG

SEQ ID NO: 913527 - protein, 326 aa, Homo sapiens
TTLEIPRSDYAARSDYAADLRKLDMLVASVGTGGTITGIARKLKEKCPGCRIIGVDPEGSILAEPEELNQTEQTTYEVEGIGYDFIPTVLDRTVVDKWFKSNDEEAFTFARMLIAQEGLLCGGSAGSTVAVAVKAAQELQEGQRCVVILPDSVRNYMTKFLSDRWMLQKGFLKEEDLTEKKPWWWHLRVQELGLSAPLTVLPTITCGHTIEILREKGFDQAPVVDEAGVILGMVTLGNMLSSLLAGKVQPSDQVGKVIYKQFKQIRLTDTLGRLSHILEMDHFALVVHEQIQYHSTGKSSQRQMVFGVVTAIDLLNFVAAQERDQK

SEQ ID NO: 913528 - protein, 566 aa, Homo sapiens
MPSETPQAEVGPTGCPHRSGPHSAKGSLEKGSPEDKEAKEPLWIRPDAPSRCTWQLGRPASESPHHHTAPAKSPKILPDILKKIGDTPMVRINKIGKKFGLKCELLAKCEFFNAGGSVKDRISLRMIEDAERDGTLKPGDTIIEPTSGNTGIGLALAAAVRGYRCIIVMPEKMSSEKVDVLRALGAEIVRTPTNARFDSPESHVGVAWRLKNEIPNSHILDQYRNASNPLAHYDTTADEILQQCDGKLDMLVASVGTGGTITGIARKLKEKCPGCRIIGVDPEGSILAEPEELNQTEQTTYEVEGIGYDFIPTVLDRTVVDKWFKSNDEEAFTFARMLIAQEGLLCGGSAGSTVAVAVKAAQELQEGQRCVVILPDSVRNYMTKFLSDRWMLQKGFLKEEDLTEKKPWWWHLRVQELGLSAPLTVLPTITCGHTIEILREKGFDQAPVVDEAGVILGMVTLGNMLSSLLAGKVQPSDQVGKVIYKQFKQIRLTDTLGRLSHILEMDHFALVVHEQIQSQDQAWAGVVGGPAGRYHPPLRMALRLRFTASPWQMEAFQGPGPTPKLG

SEQ ID NO: 913529 - protein, 538 aa, Homo sapiens
MPSETPQAEVGPTGCPHRSGPHSAKGSLEKGSPEDKEAKEPLWIRPDAPSRCTWQLGRPASESPHHHTAPAKSPKILPDILKKIGDTPMVRINKIGKKFGLKCELLAKCEFFNAGGSVKDRISLRMIEDAERDGTLKPGDTIIEPTSGNTGIGLALAAAVRGYRCIIVMPEKMSSEKVDVLRALGAEIVRTPTNARFDSPESHVGVAWRLKNEIPNSHILDQYRNASNPLAHYDTTADEILQQCDGKLDMLVASVGTGGTITGIARKLKEKCPGCRIIGVDPEGSILAEPEELNQTEQTTYEVEGIGYDFIPTVLDRTVVDKWFKSNDEEAFTFARMLIAQEGLLCGGSAGSTVAVAVKAAQELQEGQRCVVILPDSVRNYMTKFLSDRWMLQKGFLKEEDLTEKKPWWWHLRVQELGLSAPLTVLPTITCGHTIEILREKGFDQAPVVDEAGVILGMVTLGNMLSSLLAGKVQPSDQVGKVIYKQFKQIRLTDTLGRLSHILEMDHFALVVHEQIQYHSTGKFSKSMAVTTPNTICR

SEQ ID NO: 913530 - protein, 409 aa, Homo sapiens
MPSETPQAEVGPTGCPHRSGPHSAKGSLEKGSPEDKEAKEPLWIRPDAPSRCTWQLGRPASESPHHHTAPAKSPKILPDILKKIGDTPMVRINKIGKKFGLKCELLAKCEFFNAGGSVKDRISLRMIEDAERDGTLKPGDTIIEPTSGNTGIGLALAAAVRGYRCIIVMPEKMSSEKVDVLRALGAEIVRTPTNARFDSPESHVGVAWRLKNEIPNSHILDQYRNASNPLAHYDTTADEILQQCDGKLDMLVASVGTGGTITGIARKLKEKCPGCRIIGVDPEGSILAEPEELNQTEQTTYEVEGIGYDFIPTVLDRTVVDKWFKSNDEEAFTFARMLIAQEGLLCGEWVAGTGVWGRQRWLGGTGDGWGRTLSQPPTCMCKTAVLRSVTAAATSLRCCLPAQCGHLLR

SEQ ID NO: 913531 - protein, 255 aa, Homo sapiens
DGCVHAHTRLLAMGAGSPAPRLPPGASSQHLGVSAAPVRSRRGAGQAVRATQQGRGPGGALRGLGDSPIPRTKFLSDRWMLQKGFLKEEDLTEKKPWWWHLRVQELGLSAPLTVLPTITCGHTIEILREKGFDQAPVVDEAGVILGMVTLGNMLSSLLAGKVQPSDQVGKVIYKQFKQIRLTDTLGRLSHILEMDHFALVVHEQIQYHSTGKSSQRQMVFGVVTAIDLLNFVAAQERDQKMFHQGNIEREVGQVG

SEQ ID NO: 913532 - protein, 551 aa, Homo sapiens; identical to SEQ ID NO: 913517

SEQ ID NO: 913533 - protein, 446 aa, Homo sapiens
MAKCEFFNAGGSVKDRISLRMIEDAERDGTLKPGDTIIEPTSGNTGIGLALAAAVRGYRCIIVMPEKMSSEKVDVLRALGAEIVRTPTNARFDSPESHVGVAWRLKNEIPNSHILDQYRNASNPLAHYDTTADEILQQCDGKLDMLVASVGTGGTITGIARKLKEKCPGCRIIGVDPEGSILAEPEELNQTEQTTYEVEGIGYDFIPTVLDRTVVDKWFKSNDEEAFTFARMLIAQEGLLCGGSAGSTVAVAVKAAQELQEGQRCVVILPDSVRNYMTKFLSDRWMLQKGFLKEEDLTEKKPWWWHLRVQELGLSAPLTVLPTITCGHTIEILREKGFDQAPVVDEAGVILGMVTLGNMLSSLLAGKVQPSDQVGKVIYKQFKQIRLTDTLGRLSHILEMDHFALVVHEQIQYHSTGKSSQRQMVFGVVTAIDLLNFVAAQERDQK

SEQ ID NO: 913534 - protein, 153 aa, Homo sapiens [sequence omitted]

SEQ ID NO: 913535 - protein, 52 aa, Homo sapiens
MDEAGVILGMVTLGNMLSSLLAGKVQPSDQVGKVIYKQFKQVPSHLQAAQTD

SEQ ID NO: 913536 - protein, 551 aa, Homo sapiens; identical to SEQ ID NO: 913517

SEQ ID NO: 913537 - protein, 408 aa, Homo sapiens
MLRAGAPGIGLALAAAVRGYRCIIVMPEKMSSEKVDVLRALGAEIVRTPTNARFDSPESHVGVAWRLKNEIPNSHILDQYRNASNPLAHYDTTADEILQQCDGKLDMLVASVGTGGTITGIARKLKEKCPGCRIIGVDPEGSILAEPEELNQTEQTTYEVEGIGYDFIPTVLDRTVVDKWFKSNDEEAFTFARMLIAQEGLLCGGSAGSTVAVAVKAAQELQEGQRCVVILPDSVRNYMTKFLSDRWMLQKGFLKEEDLTEKKPWWWHLRVQELGLSAPLTVLPTITCGHTIEILREKGFDQAPVVDEAGVILGMVTLGNMLSSLLAGKVQPSDQVGKVIYKQFKQIRLTDTLGRLSHILEMDHFALVVHEQIQYHSTGKSSQRQMVFGVVTAIDLLNFVAAQERDQK

SEQ ID NO: 913538 - protein, 551 aa, Homo sapiens; identical to SEQ ID NO: 913517

SEQ ID NO: 913539 - protein, 360 aa, Homo sapiens
QTKGSNEGCSNWRRSFSFELFGYPPWFGLSVFSMIITMSDGLARQGPKNVIRPPGKLDMLVASVGTGGTITGIARKLKEKCPGCRIIGVDPEGSILAEPEELNQTEQTTYEVEGIGYDFIPTVLDRTVVDKWFKSNDEEAFTFARMLIAQEGLLCGGSAGSTVAVAVKAAQELQEGQRCVVILPDSVRNYMTKFLSDRWMLQKGFLKEEDLTEKKPWWWHLRVQELGLSAPLTVLPTITCGHTIEILREKGFDQAPVVDEAGVILGMVTLGNMLSSLLAGKVQPSDQVGKVIYKQFKQIRLTDTLGRLSHILEMDHFALVVHEQIQYHSTGKSSQRQMVFGVVTAIDLLNFVAAQERDQK

SEQ ID NO: 913540 - protein, 269 aa, Homo sapiens
MPSETPQAEVGPTGCPHRSGPHSAKGSLEKGSPEDKVVDKWFKSNDEEAFTFARMLIAQEGLLCGGSAGSTVAVAVKAAQELQEGQRCVVILPDSVRNYMTKFLSDRWMLQKGFLKEEDLTEKKPWWWHLRVQELGLSAPLTVLPTITCGHTIEILREKGFDQAPVVDEAGVILGMVTLGNMLSSLLAGKVQPSDQVGKVIYKQFKQIRLTDTLGRLSHILEMDHFALVVHEQIQYHSTGKSSQRQMVFGVVTAIDLLNFVAAQERDQK

SEQ ID NO: 913541 - protein, 506 aa, Homo sapiens; identical to SEQ ID NO: 913523

SEQ ID NO: 913542 - protein, 360 aa, Homo sapiens
MPSETPQAEVGPTGCPHRSGPHSAKGSLEKGSPEDKEAKEPLWIRPDAPSRCTWQLGRPASESPHHHTAPAKSPKILPDILKKIGDTPMVRINKIGKKFGLKCELLAKCEFFNAGGSVKDRISLRMIEDAERDGTLKPGDTIIEPTSGNTGIGLALAAAVRGYRCIIVMPEKMSSEKVDVLRALGAEIVRTPTNARFDSPESHVGVAWRLKNEIPNSHILDQYRNASNPLAHYDTTADEILQQCDGKLDMLVASVGTGGTITGIARKLKEKCPGCRIIGVDSPKGSHSFAGGPEGGWNQTGATNYGGGGVRYDFLPPGGSGPAGVGQGSPDRVGGSLSPFVAKGGCAGLLRGPRAGLSAL

SEQ ID NO: 913543 - protein, 279 aa, Homo sapiens
GGAAAPAASTSSSAGFCAPGPPLLPPVPRRLMEAPEGGGGGPAARGPEGQPAPEARVHFRVARFIMEAGVKLGMRSIPIATACTIYHKFFCETNLDAYDPYLIAMSSIYLAGKVEEQHLRTRDIINVSNRYFNPSGEPLELDSRFWELRDSIVQCELLMLRVLRFQVSFQHPHKYLLHYLVSLQNWLNRHSWQRTPVAVTAWALLRDSYHGALCLRFQAQHIAVAVLYLALQVYGVEVPAEVEAEKPWWQVFNDDLTKPIIDNIVSDLIQIYTMDTEIP

SEQ ID NO: 913544 - protein, 279 aa, Homo sapiens; identical to SEQ ID NO: 913543

SEQ ID NO: 913545 - protein, 259 aa, Homo sapiens
GGAAAPAASTSSSAGFCAPGPPLLPPVPRRLMEAPEGGGGGPAARGPEGQPAPEARVHFRVARFIMEAGVKLGMRSIPIATACTIYHKFFCETNLDAYDPYLIAMSSIYLAGKVEEQHLRTRDIINVSNRYFNPSGEPLELDSRFWELRDSIVQCELLMLRVLRFQVSFQHPHKYLLHYLVSLQNWLNRHSWQRTPVAVTAWALLRDSYHGALCLRFQAQHIAVAVLYLALQVYGVEVPAEVEAEKPWWQIYTMDTEIP

SEQ ID NO: 913546 - protein, 264 aa, Homo sapiens
GWGGSARREHLQFCRLLRAGAASPSAGAAAPHGSPGGRRRGACSAGPGGAAGARSQGALPSGEVHHGGSIYHKFFCETNLDAYDPYLIAMSSIYLAGKVEEQHLRTRDIINVSNRYFNPSGEPLELDSRFWELRDSIVQCELLMLRVLRFQVSFQHPHKYLLHYLVSLQNWLNRHSWQRTPVAVTAWALLRDSYHGALCLRFQAQHIAVAVLYLALQVYGVEVPAEVEAEKPWWQVFNDDLTKPIIDNIVSDLIQIYTMDTEIP

SEQ ID NO: 913547 - protein, 272 aa, Homo sapiens
ETQTDGGERDETERNSKILDGLHDAPGGPDSPSAGAAAPHGSPGGRRRGACSAGPGGAAGARSQGALPSGEVHHGGSIYHKFFCETNLDAYDPYLIAMSSIYLAGKVEEQHLRTRDIINVSNRYFNPSGEPLELDSRFWELRDSIVQCELLMLRVLRFQVSFQHPHKYLLHYLVSLQNWLNRHSWQRTPVAVTAWALLRDSYHGALCLRFQAQHIAVAVLYLALQVYGVEVPAEVEAEKPWWQVFNDDLTKPIIDNIVSDLIQIYTMDTEIP

SEQ ID NO: 913548 - protein, 127 aa, Homo sapiens
SIAISLRRYFNPSGEPLELDSRFWELRDSIVQCELLMLRVLRFQVSFQHPHKNWLNRHSWQRTPVAVTAWALLRDSYHGALCLRFQAQHIAVAVLYLALQVYGVEVPAEVEAEKPWWQIYTMDTEIP

SEQ ID NO: 913549 - protein, 279 aa, Homo sapiens; identical to SEQ ID NO: 913543

SEQ ID NO: 913550 - protein, 259 aa, Homo sapiens; identical to SEQ ID NO: 913545

SEQ ID NO: 913551 - protein, 279 aa, Homo sapiens; identical to SEQ ID NO: 913543

SEQ ID NO: 913552 - protein, 259 aa, Homo sapiens; identical to SEQ ID NO: 913545

SEQ ID NO: 913553 - protein, 203 aa, Homo sapiens
GGAAAPAASTSSSAGFCAPGPPLLPPVPRRLMEAPEGGGGGPAARGPEGQPAPEARVHFRVARFIMEAGVKLGMRSIPIATACTIYHKFFCETNLDAYDPYLIAMSSIYLAGKVEEQHLRTRDIINVSNRYFNPSGEPLELDSRFWELRDSIVQCELLMLRVLRFQVSFQHPHKVFNDDLTKPIIDNIVSDLIQIYTMDTEIP

SEQ ID NO: 913554 - protein, 292 aa, Homo sapiens
MASSMRSLFSDHGKYVESFRRFLNHSTEHQCMQEFMDKKLPGIIGRIGDTKSEIKILSIGGGAGEIDLQILSKVQAQYPGVCINNEVVEPSAEQIAKYKELVAKTSNLENVKFAWHKETSSEYQSRMLEKKELQKWDFIHMIQMLYYVKDIPATLKFFHSLLGTNAKMLIIVVSGSSGWDKLWKKYGSRFPQDDLCQYITSDDLTQMLDNLGLKYECYDLLSTMDISDCFIDGNENGDLLWDFLTETCNFNATAPPDLRAELGKDLQEPEFSAKKEGKVLFNNTLSFIVIEA

SEQ ID NO: 913555 - protein, 292 aa, Homo sapiens; identical to SEQ ID NO: 913554

SEQ ID NO: 913556 - protein, 307 aa, Homo sapiens
GVPVDRPFWPGRKPNMASSMRSLFSDHGKYVESFRRFLNHSTEHQCMQEFMDKKLPGIIGRIGDTKSEIKILSIGGGAGEIDLQILSKVQAQYPGVCINNEVVEPSAEQIAKYKELVAKTSNLENVKFAWHKETSSEYQSRMLEKKELQKWDFIHMIQMLYYVKDIPATLKFFHSLLGTNAKMLIIVVSGSSGWDKLWKKYGSRFPQDDLCQYITSDDLTQMLDNLGLKYECYDLLSTMDISDCFIDGNENGDLLWDFLTETCNFNATAPPDLRAELGKDLQEPEFSAKKEGKVLFNNTLSFIVIEA

SEQ ID NO: 913557 - protein, 198 aa, Homo sapiens
GVPVDRPFWPGRKPNMASSMRSLFSDHGKYVESFRRFLNHSTEHQCMQEFMDKKLPGIIGRIGDTKSEIKILSIGGGAGEIDLQILSKVQAQYPGVCINNEVVEPSAEQIAKYKELVAKTSNLENVKFAWHKETSSEYQSRMLEKKELQKWDFIHMIQMLYYVKDIPATLKFFHSLLGTNAKMLIIVVSGSSGWDKLW

SEQ ID NO: 913558 - protein, 66 aa, Homo sapiens
GVPVDRPFWPGRKPNMASSMRSLFSDHGKYVESFRRFLNHSTEHQCMQEFMDKKLPGIIGRYQNCC

SEQ ID NO: 913559 - protein, 66 aa, Homo sapiens; identical to SEQ ID NO: 913558

SEQ ID NO: 913560 - protein, 292 aa, Homo sapiens; identical to SEQ ID NO: 913554

SEQ ID NO: 913561 - protein, 238 aa, Homo sapiens
MASSMRSLFSDHGKYVESFRRFLNHSTEHQCMQEFMDKKLPGIIGRIGDTKSEIKILSIGGGAGEIDLQILSKVQAQYPGVCINNEVVEPSAEQIAKYKELVAKTSNLENVKFAWHKETSSEYQSRMLEKKELQKWDFIHMIQMLYYVKDIPATLKFFHSLLGTNAKMLIIVVSGSSGWDKLWKKYGSRFPQDDLCQYITSDDLTQMLDNLGLKYECYDLLSTMDISDCFIDGNESTT

SEQ ID NO: 913562 - protein, 274 aa, Homo sapiens
MASSMRSLFSDHGKYVESFRRFLNHSTEHQCMQEFMDKKLPGIIGRIGDTKSEIKILSIGGGAGEIDLQILSKVQAQYPGVCINNEVVEPSAEQIAKYKELVAKTSNLENVKFAWHKETSSEYQSRMLEKKELQKWDFIHMIQMLYYVKDIPATLKFFHSLLGTNAKMLIIVVSGSSGWDKLWKKYGSRFPQDDLCQYITSDDLTQMLDNLGLKYECYDLLSTMDISDCFIDGNELGTGWVFGGTEIYVRRFKQVGKFKGFVKGGVKRVGGVKF

SEQ ID NO: 913563 - protein, 96 aa, Homo sapiens
GVPVDRPFWPGRKPNMASSMRSLFSDHGKYVESFRRFLNHSTEHQCMQEFMDKKLPGIIGRIGDTKSEIKILSIGGGAGKRIIYIFLLAGRGYSRL

SEQ ID NO: 913564 - protein, 293 aa, Homo sapiens
MAMEMRLPVARKPLSERLGRDTKKHLVVPGDTITTDTGFMRGHGTYMGEEKLIASVAGSVERVNKLICVKALKTRYIGEVGDIVVGRITEVQQKRWKVETNSRLDSVLLLSSMNLPGGELRRRSAEDELAMRGFLQEGDLISAEVQAVFSDGAVSLHTRSLKYGKLGQGVLVQVSPSLVKRQKTHFHDLPCGASVILGNNGFIWIYPTPEHKEEEAGGFIANLEPVSLADREVISRLRNCIISLVTQRMMLYDTSILYCYEASLPHQIKDILKPEIMEEIVMETRQRLLEQEG

SEQ ID NO: 913565 - protein, 293 aa, Homo sapiens; identical to SEQ ID NO: 913564

SEQ ID NO: 913566 - protein, 293 aa, Homo sapiens; identical to SEQ ID NO: 913564

SEQ ID NO: 913567 - protein, 293 aa, Homo sapiens; identical to SEQ ID NO: 913564

SEQ ID NO: 913568 - protein, 293 aa, Homo sapiens; identical to SEQ ID NO: 913564

SEQ ID NO: 913569 - protein, 129 aa, Homo sapiens
MAMEMRLPVARKPLSERLGRDTKKHLVVPGDTITTDTGFMRGHGTYMGEEKLIASVAGSVERVNKLICVKALKTRYIGEVGDIVVGRITEVQQKRWKVETNSRLDSVLLLSSMNLPGGELVRATAGAMD

SEQ ID NO: 913570 - protein, 181 aa, Homo sapiens
MNLPGGELRRRSAEDELAMRGFLQEGDLISAEVQAVFSDGAVSLHTRSLKYGKLGQGVLVQVSPSLVKRQKTHFHDLPCGASVILGNNGFIWIYPTPEHKEEEAGGFIANLEPVSLADREVISRLRNCIISLVTQRMMLYDTSILYCYEASLPHQIKDILKPEIMEEIVMETRQRLLEQEG

SEQ ID NO: 913571 - protein, 275 aa, Homo sapiens
MAMEMRLPVARKPLSERLGRDTKKHLVVPGDTITTDTGFMRGHGTYMGEEKLIASVAGSVERVNKLICVKALKTRYIGEVGDIVVGRITEVQQKRWKVETNSRLDSVLLLSSMNLPGGELRRRSAEDELAMRGFLQEGDLISAEVQAVFSDGAVSLHTRSLKYGKTHFHDLPCGASVILGNNGFIWIYPTPEHKEEEAGGFIANLEPVSLADREVISRLRNCIISLVTQRMMLYDTSILYCYEASLPHQIKDILKPEIMEEIVMETRQRLLEQEG

SEQ ID NO: 913572 - protein, 160 aa, Homo sapiens
MRGFLQEGDLISLGQGVLVQVSPSLVKRQKTHFHDLPCGASVILGNNGFIWIYPTPEHKEEEAGGFIANLEPVSLADREVISRLRNCIISLVTQRMMLYDTSILYCYEASLPHQIKASLKQNIGGDCGGEPGEACDKAVRGVPNRDVGLRSAMVCVHGKN

SEQ ID NO: 913573 - protein, 293 aa, Homo sapiens; identical to SEQ ID NO: 913564

SEQ ID NO: 913574 - protein, 293 aa, Homo sapiens; identical to SEQ ID NO: 913564

SEQ ID NO: 913575 - protein, 263 aa, Homo sapiens
MAMEMRLPVARKPLSERLGRDTKKHLVVPGDTITTDTGFMRGHGTYMGEEKLIASVAGSVERVNKLICVKALKTRYIGEVGDIVVGRITERRRSAEDELAMRGFLQEGDLISAEVQAVFSDGAVSLHTRSLKYGKLGQGVLVQVSPSLVKRQKTHFHDLPCGASVILGNNGFIWIYPTPEHKEEEAGGFIANLEPVSLADREVISRLRNCIISLVTQRMMLYDTSILYCYEASLPHQIKDILKPEIMEEIVMETRQRLLEQEG

SEQ ID NO: 913576 - protein, 270 aa, Homo sapiens
MAMEMRLPVARKPLSERLGRDTKKHLVVPGDTITTDTGFMRGHGTYMGEEKLIASVAGSVERVNKLICVKALKTRYIGEVGDIVVGRITEVQQKRWKVETNSRLDSVLLLSSMNLPGGELRRRSAEDELAMRGFLQEGDLISLGQGVLVQVSPSLVKRQKTHFHDLPCGASVILGNNGFIWIYPTPEHKEEEAGGFIANLEPVSLADREVISRLRNCIISLVTQRMMLYDTSILYCYEASLPHQIKDILKPEIMEEIVMETRQRLLEQEG

SEQ ID NO: 913577 - protein, 195 aa, Homo sapiens
MAMEMRLPVARKPLSERLGRDTKKHLVVPGDTITTDTGFMRGHGTYMGEEKLIASVAGSVERVNKLICVKALKTRYIGEVGDIVVGRITEVQQKRWKVETNSRLDSVLLLSSMNLPGGELRRRSAEDELAMRGFLQEGDLISVSCALHSSLLMLFCGTGKWAFHCMSLTEEPCHPCRDPSLRPSVGLCCILSQSP

SEQ ID NO: 913578 - protein, 2114 aa, Homo sapiens
LTSDSQTRAVLRGSSAGHTVGALADSTEAPSKKPMSSSPSRSAADIYIREYFHSHVSGGHPEATPLRVMYTDRPLSQTDPVTLQYCCLTDDRQAFRPPTRAELARHRVVVTTTSQARELRVPVGFFSHILIDEAAQMLECEALTPLAYASHGTRLVLAGDHMQVTPRLFSVARARAAEHTLLHRLFLCYQQETHEVARQSRLVFHENYRCTDAIVSFISRHFYVAKGNPIHARGKVPPHPRHYPLMFCHVAGNPDRDMSMASWLNLAEIAQVVEKVQEAYNTWPSCWGGREQRCICVVSHGAQVSALRQELRRRDLGQVSVGSFEILPGRQFRVVVLSTVHTCQSLLSPGALAPEFFTDARVLNTVLTRAQSQLVVVGDAVALCSFGACGKLWESFIRECVERHSVCPEGLSMEQVEQGVAQRRRWPPRGTQAGAAGNWEAAPEPVGDLAEEQAAVVTAMVKAEPGDEALSPASRDITATTAQTEAAAAPAGDAVKEDVVPGACAAGAAAAAGVESTEAEDAEADFWPWDGELNADDAILRELLDESQKVMVTVGEDGLLDTVARPESLQQARLYENLPPAALRKLLHAEPERYRHCSFVPETFERASAIPLDDASSGPIQVRGRLDCGMAFAGDEVLVQLLSGDKAPEGRLRGRVLGVLKRKRHELAFVCRMDTWDPRIMVPINGSVTKIFVAELKDPSQVPIYSLRKGRLQRVGLERLTAEARHSRLFWVQIVLWRQGFYYPLGIVREVLPEASTWEQGLRILGLEYSLRVPPSDQATITKVLQKYHTELGRVAGRREDCRAFLTFTVDPQGACNLDDALSVRDLGPRCEVAVHITDVASFVPRDGVLDVEARRQGAAFYAPGREPVPMLPASLCQDVLSLLPGRDRLAISLFLTMEKASGQLKSLRFAPSVVQSDRQLSYEEAEEVIRQHPGAGRELPARLDSVDACVVAACYFSRLLRRHRLRSDCFYEQPDEDGTLGFRAAHIMVKEYMIQFNRLVAEFLVGSECTRTVTPLRWQPAPRSQQLKALCEKHGDRVPLSLHLGHHLHGGGGSPPDTRLHLLASLWKQVQFAARTQDYEQMVDLVTTDDMHPFLAPAGRDLRKALERSAFGRCARGHQQQGGHYSLQVDWYTWATSPIRRYLDVVLQRQILLALGHGGSAYSARDIDGLCQAFSLQHALAQSYQRRARSLHLAVQLKAQPLDKLGFVVDVEAGSRCFRLLFPSNRETLPDPCPVPYGSLQLAEHPHALAGRPGLRLLWRRRVYSAQGSSPPLPLPGTVPDPHTLAVETALWKQLLELVELQRWPEAAALIQEKGEASQRRELVQVQRSHCGHFLEVARELGSGDTLQVQLGTSLQHGFLVPSPQLWTVAPGFSLCLEHVERPGDCFSGRVYRAPRDRYRDVDEYACVWEPFCALESATGAVAENDSVTLQHLSVSWEASRTPQGQLQGAFRLEAAFLEENCADINFSCCYLCIRLEGLLAPTASPRPGPSSLGPGLNVDPGTYTWVAHGQTEDWDQERRADRQEAPRRVHLFVHHMGMEKVPEEVLRPGTLFTVELLPKQLPDLRKEEAVRGLEEASPLVTSIALGRPVPQPLCRVIPSRFLERQTYNIPGGRHKLNPSQNVAVREALEKPFTVIQGPPGTGKTIVGLHIVFWFHKSNQEQVQPGGPPRGEKRLGGPCILYCGPSNKSVDVLAGLLLRRMELKPLRVYSEQAEASEFPVPRVGSRKLLRKSPREGRPNQSLRSITLHHRIRQAPNPYSSEIKAFDTRLQRGELFSREDLVWYKKVLWEARKFELDRHEVILCTCSCAASASLKILDVRQILVDEAGMATEPETLIPLVQFPQAEKVVLLGDHKQLRPVVKNERLQNLGLDRSLFERYHEDAHMLDTQYRMHEGICAFPSVAFYKSKLKTWQGLRRPPSVLGHAGKESCPVIFGHVQGHERSLLVSTDEGNENSKANLEEVAEVVRITKQLTLGRTVEPQDIAVLTPYNAQASEISKALRREGIAGVAVSSITKSQGSEWRYVLVSTVRTCAKSDLDQRPTKSWLKKFLGFVVDPNQVNVAVTRAQEGLCLIGDHLLLRCCPLWRSLLDFCEAQQTLVPAGQVRVCRRPTMPS

SEQ ID NO: 913579 - protein, 356 aa, Homo sapiens
SLEKSSSPGPPWRRAPLSAGEDLVWYKKVLWEARKFELDRHEVILCTCSCAASASLKILDVRQILVDEAGMATEPETLIPLVQFPQAEKVVLLGDHKQLRPVVKNERLQNLGLDRSLFERYHEDAHMLDTQYRMHEGICAFPSVAFYKSKLKTWQGLRRPPSVLGHAGKESCPVIFGHVQGHERSLLVSTDEGNENSKANLEEVAEVVRITKQLTLGRTVEPQDIAVLTPYNAQASEISKALRREGIAGVAVSSITKSQGSEWRYVLVSTVRTCAKSDLDQRPTKSWLKKFLGFVVDPNQVNVAVTRAQEGLCLIGDHLLLRCCPLWRSLLDFCEAQQTLVPAGQVRVCRRPTMPS

SEQ ID NO: 913580 - protein, 75 aa, Homo sapiens
RRQAGPGRLMAEGGGEGGGALDFPCLLASGSPWGRKWVDLEEERQGPVPTLLLLLGIWGQEHLSGWPRGASLGPV

SEQ ID NO: 913581 - protein, 107 aa, Homo sapiens
RQQGLTSHPAGSEWRYVLVSTVRTCAKSDLDQRPTKSWLKKFLGFVVDPNQVNVAVTRAQEGLCLIGDHLLLRCCPLWRSLLDFCEAQQTLVPAGQVRVCRRPTMPS

SEQ ID NO: 913582 - protein, 421 aa, Homo sapiens [sequence omitted]

SEQ ID NO: 913583 - protein, 376 aa, Homo sapiens [sequence omitted]

SEQ ID NO: 913584 - protein, 421 aa, Homo sapiens [sequence omitted]

SEQ ID NO: 913585 - protein, 403 aa, Homo sapiens
MAGEAEAQLDPSLQGLVMFEDVTVYFSREEWGLLNVTQKGLYRDVMLENFALVSSLGLAPSRSPVFTQLEDDEQSWVPSWVDVTPVSRAEARRGFGLDGLCRVEDERAHPEHLKSYRVIQHQDTHSEGKPRRHTEHGAAFPPGSSCGQQQEVHVAEKLFKCSDCGKVFLKAFALLDHLITHSEERPFRCPTGRSAFKKSAHINPRKIHTGETAHVCNECGKAFSYPSKLRKHQKVHTGIKPFKCSDCGKTFNRKDALVLHQRIHTGERPYECSKCGKTPYECAECGKFFKYNNSFILHQRVHTGERPFECKQCGKGYVTRSGLYQHWKVHTGERPYECSLCGKTFTTRSYRNRHQQFHTEERSYECTECGKAFKHSSTLLQHKKVHTPERRQEDRAHGKVVSC

SEQ ID NO: 913586 - protein, 148 aa, Homo sapiens
MAGEAEAQLDPSLQGLVMFEDVTVYFSREEWGLLNVTQKGLYRDVMLENFALVSSLGLAPSRSPVFTQLEDDEQSWVPSWVDVTPVSRAEARRGFGLEVGDGERSHGSKGKRRTDRGDKGAGGPGLGQNRRTTRAGEAPMTHTADSKN

SEQ ID NO: 913587 - protein, 324 aa, Homo sapiens
MVCVEWRMREPILSIYKSYRVIQHQDTHSEGKPRRHTEHGAAFPPGSSCGQQQEVHVAEKLFKCSDCGKVFLKAFALLDHLITHSEERPFRCPTGRSAFKKSAHINPRKIHTGETAHVCNECGKAFSYPSKLRKHQKVHTGIKPFKCSDCGKTFNRKDALVLHQRIHTGERPYECSKCGKTFSVLSTLIRHRKVHIGERPYECAECGKFFKYNNSFILHQRVHTGERPFECKQCGKGYVTRSGLYQHWKVHTGERPYECSLCGKTFTTRSYRNRHQQFHTEERSYECTECGKAFKHSSTLLQHKKVHTPERRQEDRAHGKVVSC

SEQ ID NO: 913588 - protein, 413 aa, Homo sapiens
MAGEAEGLVMFEDVTVYFSREEWGLLNVTQKGLYRDVMLENFALVSSLGLAPSRSPVFTQLEDDEQSWVPSWVDVTPVSRAEARRGFGLDGLCRVEDERAHPEHLKSYRVIQHQDTHSEGKPRRHTEHGAAFPPGSSCGQQQEVHVAEKLFKCSDCGKVFLKAFALLDHLITHSEERPFRCPTGRSAFKKSAHINPRKIHTGETAHVCNECGKAFSYPSKLRKHQKVHTGIKPFKCSDCGKTFNRKDALVLHQRIHTGERPYECSKCGKTFSVLSTLIRHRKVHIGERPYECAECGKFFKYNNSFILHQRVHTGERPFECKQCGKGYVTRSGLYQHWKVHTGERPYECSLCGKTFTTRSYRNRHQQFHTEERSYECTECGKAFKHSSTLLQHKKVHTPERRQEDRAHGKVVSC

SEQ ID NO: 913589 - protein, 421 aa, Homo sapiens [sequence omitted]

SEQ ID NO: 913590 - protein, 274 aa, Homo sapiens
MAGNKGRGRAAYTFNIEAVGFSKGEKLPDVVLKPPPLFPDTDYKPVPLKTGEGEEYMLALKQELRETMKRMPYFIETPEERQDIERYRKKQYMKGIHRDRNGYQIGEELPREMMPRQIPVKKAKRKKGKGQPAKATTSLITDDVLDHQLGALGNNGGDGDKIRVLDIEEQRRTRPTHVHERWTTDETMPSRHTAALEQTRQRKRPYASRTRDDWAHRCHGRDPMTDVTHPIQQPLTDHHQTGDVGRPPHQTPPHTKRELKAFADYDGPPDARAE

SEQ ID NO: 913591 - protein, 233 aa, Homo sapiens
MAGNKGRGRAAYTFNIEAVGFSKGEKLPDVVLKPPPLFPDTDYKPVPLKTGEGEEYMLALKQELRETMKRMPYFIETPEERQDIERYSKRYMKVYKEEWIPDWRRLPREMMPRNKCKKAGPKPKKAKDAGKGTPLTNTEDVLKKMVELEKRGDGEKSDEENEEKEGSKEKSKEGDDDDDDDAAEQEEYDEEEQEEENDYINSYFEDGDDFGADVMTTWMRQPIRHEIFQKIFL

SEQ ID NO: 913592 - protein, 233 aa, Homo sapiens; identical to SEQ ID NO: 913591

SEQ ID NO: 913593 - protein, 161 aa, Homo sapiens
MDGHMFMCNGGREEGLTPAKMIQVSQSQNAVKIGALEGYRGQRVKVFGWVHRLRRQGKNLMFLVLRDGTGYLQCVLADELCQCYNGVLLSTESSVAVYGMLNLTPKGKQAPGGHELSCDFWELIGLAPAGGADNLINEESDVDVQLNNRHMMIQVSQSQNV

SEQ ID NO: 913594 - protein, 600 aa, Homo sapiens
NRNDRASVKPALTRQYYTARYEGWVCAGARWSHKTASVLQSVSLEVTRATAGMVLAELYVSDREGSDATGDGTKEKPFKTGLKALMTVGKEPFPTIYVDSQKENERWNVISKSQLKNIKKMWHREQMKSESREKKEAEDSLRREKNLEEAKKITIKNDPSLPEPKCVKIGALEGYRGQRVKVFGWVHRLRRQGKNLMFLVLRDGTGYLQCVLADELCQCYNGVLLSTESSVAVYGMLNLTPKGKQAPGGHELSCDFWELIGLAPAGGADNLINEESDVDVQLNNRHMMIRGENMSKILKARSMVTRCFRDHFFDRGYYEVTPPTLVQTQVEGGATLFKLDYFGEEAFLTQSSQLYLETCLPALGDVFCIAQSYRAEQSRTRRHLAEYTHVEAECPFLTFDDLLNRLEDLVCDVVDRILKSPAGSIVHELNPNFQPPKRPFKRMNYSDAIVWLKEHDVKKEDGTFYEFGEDIPEAPERLMTDTINEPILLCRFPVEIKSFYMQRCPEDSRLTESVDVLMPNVGEIVGGSMRIFDSEEILAGYKREGIDPTPYYWYTDQRKYGTCPHGGYGLGLERFLTWILNRYHIRDVCLYPRFVQRCTP

SEQ ID NO: 913595 - protein, 335 aa, Homo sapiens
MVLAELYVSDREGSDATGDGTKEKPFKTGLKALMTVGKEPFPTIYVDSQKENERWNVISKSQLKNIKKMWHREQMKSESREKKEAEDSLRREKNLEEAKKITIKNDPSLPEPKCVKIGALEGYRGQRVKVFGWVHRLRRQGKNLMFLVLRDGTGYLQCVLADELCQCYNGVLLSTESSVAVYGMLNLTPKGKQAPGGHELSCDFWELIGLAPAGGADNLINEESDVDVQLNNRHMMIRGENMSKILKARSMVTRCFRDHFFDRGYYEVTPPTLVQTQVEGGATLFKLDYFGEEAFLTQSSQLYLETCLPALGDVFCIAQSYRAEQSRTRRHLAEV

SEQ ID NO: 913596 - protein, 548 aa, Homo sapiens
MVLAELYVSDREGSDATGDGTKEKPFKTGLKALMTVGKEPFPTIYVDSQKENERWNVISKSQLKNIKKMWHREQMKSESREKKEAEDSLRREKNLEEAKKITIKNDPSLPEPKCVKIGALEGYRGQRVKVFGWVHRLRRQGKNLMFLVLRDGTGYLQCVLADELCQCYNGVLLSTESSVAVYGMLNLTPKGKQAPGGHELSCDFWELIGLAPAGGADNLINEESDVDVQLNNRHMMIRGENMSKILKARSMVTRCFRDHFFDRGYYEVTPPTLVQTQVEGGATLFKLDYFGEEAFLTQSSQLYLETCLPALGDVFCIAQSYRAEQSRTRRHLAEYTHVEAECPFLTFDDLLNRLEDLVCDVVDRILKSPAGSIVHELNPNFQPPKRPFKRMNYSDAIVWLKEHDVKKEDGTFYEFGEDIPEAPERLMTDTINEPILLCRFPVEIKSFYMQRCPEDSRLTESVDVLMPNVGEIVGGSMRIFDSEEILAGYKREGIDPTPYYWYTDQRKYGTCPHGGYGLGLERFLTWILNRYHIRDVCLYPRFVQRCTP

SEQ ID NO: 913597 - protein, 469 aa, Homo sapiens
MVLAELYVSDREGSDATGDGTKEKPFKTGLKALMTVGKEPFPTIYVDSQKENERWNVISKSQLKNIKKMWHREQMKSESREKKEAEDSLRREKNLEEAKKITIKNDPSLPEPKCVKIGALEGYRGQRVKVFGWVHRLRRQGKNLMFLVLRDGTGYLQCVLADELCQCYNGVLLSTESSVAVYGMLNLTPKGKQAPGGHELSCDFWELIGLAPAGGADNLINEESDVDVQLNNRHMMIRGENMSKILKARSMVTRCFRDHFFDRGYYEVTPPTLVQTQVEGGATLFKLDYFGEEAFLTQSSQLYLETCLPALGDVFCIAQSYRAEQSRTRRHLAEYTHVEAECPFLTFDDLLNRLEDLVCDVVDRILKSPAGSIVHELNPNFQPPKRPFKRMNYSDAIVWLKEHDVKKEDGTFYEFGEDIPEAPERLMTDTINEPILLCRFPVEIKSFYMQRCPEDSRLTESVSFCFKEY

SEQ ID NO: 913598 - protein, 410 aa, Homo sapiens
MVLAELYVSDREGSDATGDGTKEKPFKTGLKALMTVGKEPFPTIYVDSQKENERWNVISKSQLKNIKKMWHREQMKSESREKKEAEDSLRREKNLEEAKKITIKNDPSLPEPKCVKIGALEGYRGQRVKVFGWVHRLRRQGKNLMFLVLRDGTGYLQCVLADELCQCYNGVLLSTESSVAVYGMLNLTPKGKQAPGGHELSCDFWELIGLAPAGGADNLINEESDVDVQLNNRHMMIRGENMSKILKARSMVTRCFRDHFFDRGYYEVTPPTLVQTQVEGGATLFKLDYFGEEAFLTQSSQLYLETCLPALGDVFCIAQSYRAEQSRTRRHLAEYTHVEAECPFLTFDDLLNRLEDLVCDVVDRILKSPAGSIVHELNPNFQPPKRPFKRMNYSDAIVWLKEISQKLLRD

SEQ ID NO: 913599 - protein, 404 aa, Homo sapiens [sequence omitted]

SEQ ID NO: 913600 - protein, 548 aa, Homo sapiens; identical to SEQ ID NO: 913596

SEQ ID NO: 913601 - protein, 282 aa, Homo sapiens
NRNDRASVKPALTRQYYTARYEAGCEEAFLTQSSQLYLETCLPALGDVFCIAQSYRAEQSRTRRHLAEYTHVEAECPFLTFDDLLNRLEDLVCDVVDRILKSPAGSIVHELNPNFQPPKRPFKRMNYSDAIVWLKEHDVKKEDGTFYEFGEDIPEAPERLMTDTINEPILLCRFPVEIKSFYMQRCPEDSRLTESVDVLMPNVGEIVGGSMRIFDSEEILAGYKREGIDPTPYYWYTDQRKYGTCPHGGYGLGLERFLTWILNRYHIRDVCLYPRFVQRCTP

SEQ ID NO: 913602 - protein, 548 aa, Homo sapiens; identical to SEQ ID NO: 913596

SEQ ID NO: 913603 - protein, 422 aa, Homo sapiens
MVLAELYVSDREGSDATGDGTKEKPFKTGLKALMTVGKEPFPTIYVDSQKENERWNVISKSQLKNIKKMWHREQMKSESREKKEAEDSLRREKNLEEAKKITIKNDPSLPEPKCVKIGALEGYRGQRVKVFGWVHRLRRQGKNLMFLVLRDGTGYLQCVLADELCQCYNGVLLSTESSVAVYGMLNLTPKGKQAPGGHELSCDFWELIGLAPAGGADNLINEESDVDVQLNNRHMMIRGENMSKILKARSMVTRCFRDHFFDRGYYEVTPPTLVQTQVEGGATLFKLDYFGEEAFLTQSSQLYLETCLPALGDVFCIAQSYRAEQSRTRRHLAEYTHVEAECPFLTFDDLLNRLEDLVCDVVDRILKSPAGSIVHELNPNFQPPKRPFKRMNYSDAIVWLKEHDVKKEDGTFYEFGEISRRS

SEQ ID NO: 913604 - protein, 425 aa, Homo sapiens
MVLAELYVSDREGSDATGDGTKEKPFKTGLKALMTVGKEPFPTIYVDSQKENERWNVISKSQLKNIKKMWHREQMKSESREKKEAEDSLRREKNLEEAKKITIKNDPSLPEPKCVKIGALEGYRGQRVKVFGWVHRLRRQGKNLMFLVLRDGTGYLQCVLADELCQCYNGVLLSTESSVAVYGMLNLTPKGKQAPGGHELSCDFWELIGLAPAGGADNLINEESDVDVQLNNRHMMIRGENMSKILKARSMVTRCFRDHFFDRGYYEVTPPNECKHQVDAGVPTLKAGHIGAKARQEQKPQGPGERGPNTVRKSRKKHTPPGERQQKRRGDNHPAERRAPKRMKNTPNAPQTNNQARQQQKPHSKKEQMTTQNNPRGEDKKHEGPEKERNTNDTETTTRNEEATCVAITHVCLIALNPSTPRDPR

SEQ ID NO: 913605 - protein, 548 aa, Homo sapiens; identical to SEQ ID NO: 913596

SEQ ID NO: 913606 - protein, 548 aa, Homo sapiens; identical to SEQ ID NO: 913596

SEQ ID NO: 913607 - protein, 515 aa, Homo sapiens [sequence omitted]

SEQ ID NO: 913608 - protein, 428 aa, Homo sapiens
MIQVSQSQNVFGWVHRLRRQGKNLMFLVLRDGTGYLQCVLADELCQCYNGVLLSTESSVAVYGMLNLTPKGKQAPGGHELSCDFWELIGLAPAGGADNLINEESDVDVQLNNRHMMIRGENMSKILKARSMVTRCFRDHFFDRGYYEVTPPTLVQTQVEGGATLFKLDYFGEEAFLTQSSQLYLETCLPALGDVFCIAQSYRAEQSRTRRHLAEYTHVEAECPFLTFDDLLNRLEDLVCDVVDRILKSPAGSIVHELNPNFQPPKRPFKRMNYSDAIVWLKEHDVKKEDGTFYEFGEDIPEAPERLMTDTINEPILLCRFPVEIKSFYMQRCPEDSRLTESVDVLMPNVGEIVGGSMRIFDSEEILAGYKREGIDPTPYYWYTDQRKYGTCPHGGYGLGLERFLTWILNRYHIRDVCLYPRFVQRCTP

SEQ ID NO: 913609 - protein, 510 aa, Homo sapiens
MVLAELYVSDREGSDATGDGTKEKPFKTGLKALMTVGKEPFPTIYVDSQKENERWNVISKSQLKNIKKMWHREQMKSESREKKEAEDSLRREKNLEEAKKITIKNDPSLPEPKCVKIGALEGYRGQRVKVFGWVHRLRRQGKNLMFLVLRDGTGYLQCVLADELCQCYNGVLLSTESSVAVYGMLNLTPKGKQAPGGHELSCDFWELIGLAPAGGADNLINEESDVDVQLNNRHMMIRGENMSKILKARSMVTRCFRDHFFDRGYYEVTPPTLVQTQVEGGATLFKLDYFGEEAFLTQSSQLYLETCLPALGDVFCIAQSYRAEQSRTRRHLAEYTHVEAECPFLTFDDLLNRLEDLVCDVVDRILKSPAGSIVHELNPNFQPPKRPFKRMNYSDAIVWLKEHDVKKEDGTFYEFGEDIPEAPERLMTDTINEPILLCRFPVEIKSFYMQRCPEDSRLTESVDVLMPNVGEIVGGSMRIFDSEEILAGYKREGIDPTPYYWYTDQVKPIF

SEQ ID NO: 913610 - protein, 510 aa, Homo sapiens; identical to SEQ ID NO: 913609

SEQ ID NO: 913611 - protein, 387 aa, Homo sapiens
MVLAELYVSDREGSDATGDGTKEKPFKTGLKALMTVGKEPFPTIYVDSQKENERWNVISKSQLKNIKKMWHREQMKSESREKKEAEDSLRREKNLEEAKKITIKNDPSLPEPKCVKIGALEGYRGQRVKVFGWVHRLRRQGKNLMFLVLRDGTGYLQCVLADELCQCYNGVLLYTHVEAECPFLTFDDLLNRLEDLVCDVVDRILKSPAGSIVHELNPNFQPPKRPFKRMNYSDAIVWLKEHDVKKEDGTFYEFGEDIPEAPERLMTDTINEPILLCRFPVEIKSFYMQRCPEDSRLTESVDVLMPNVGEIVGGSMRIFDSEEILAGYKREGIDPTPYYWYTDQRKYGTCPHGGYGLGLERFLTWILNRYHIRDVCLYPRFVQRCTP

SEQ ID NO: 913612 - protein, 572 aa, Homo sapiens
MVLAELYVSDREGSDATGDGTKEKPFKTGLKALMTVGKEPFPTIYVDSQKENERWNVISKSQLKNIKKMWHREQMKSESREKKEAEDSLRREKNLEEAKKITIKNDPSLPEPKCVKIGALEGYRGQRVKVFGWVHRLRRQGKNLMFLVLRDGTGYLQCVLADELCQCYNGVLLSTESSVAVYGMLNLTPKGKQAPGGHELSCDFWELIGLAPAGGADNLINEESDVDVQLNNRHMMIRGENMSKILKARSMVTRCFRDHFFDRGYYEVTPPTLVQTQVEGGATLFKLDYFGEEAFLTQSSQLYLETCLPALGDVFCIAQSYRAEQSRTRRHLAEYTHVEAECPFLTFDDLLNRLEDLVCDVVDRILKSPAGSIVHELNPNFQPPKRPFKRMNYSDAIVWLKEHDVKKEDGTFYEFGEDIPEAPERLMTDTINEPILLEMEEKYYRFGIKPEWMTVHRIINHSVDKKGNYHYLVKWRDLPYDQSTWKEDEMNIPEYEEHKQSYWRHRELIMGEDPAQPRKYKKKKKELQGDGPPSSPTNDPTVKYETQPGLSQPLEHLHMYQWKELTGYASPA

SEQ ID NO: 913613 - protein, 404 aa, Homo sapiens
MVLAELYVSDREGSDATGDGTKEKPFKTGLKALMTVGKEPFPTIYVDSQKENERWNVISKSQLKNIKKMWHREQMKSESREKKEAEDSLRREKNLEEAKKITIKNDPSLPEPKCVKIGALEGYRGQRVKVFGWVHRLRRQGKNLMFLVLRDGTGYLQCVLADELCQCYNGVLLSTESSVAVYGMLNLTPKGKQAPGGHELSCDFWELIGLAPAGGADNLINEESDVDVQLNNRHMMIRGENMSKILKARSMVTRCFRDHFFDRGYYEVTPPTLVQTQVEGGATLFKLDYFGEEAFLTQSSQLYLETCLPALGDVFCIAQSYRAEQSRTRRHLAEYTHVEAECPFLTFDDLLNRLEDLVCDVVDRILKSPAGSIVHELNPNFQPPKRPFKRMNYSDAIVWLKEYL

SEQ ID NO: 913614 - protein, 125 aa, Homo sapiens
MVLAELYVSDREGSDATGDGTKEKPFKTGLKALMTVGKEPFPTIYVDSQKENERWNVISKSQLKNIKKMWHREQMKSESREKKEAEDSLRREKNLEEAKKITIKNDPSLPEPKCIFPWKMHQPIG

SEQ ID NO: 913615 - protein, 476 aa, Homo sapiens
MADSKEGVLPLTAASTAPISFGFTRTSARRRLADSGDGAGPSPEEKDFLKTVEGRELQSVKPQEAPKELVIPLIQNGHRRQPPARPPGPSTDTGALADGVVSQAVKELIAESKKSLEERENAGVDPTLAIPMIQKGCTPSGEGADSEPRAETVPEEANYEAVPVEAYGLAMLRGMGWKPGEGIGRTFNQVVKPRVNSLRPKGLGLGANLTEAQALTPTGPSRMPRPDEEQEKDKEDQPQGLVPGGAVVVLSGPHRGLYGKVEGLDPDNVRAMVRLAVGSRVVTVSEYYLRPVSQQEFDKNTLDLRQQNGTASSRKTLWNQELYIQQDNSERKRKHLPDRQDGPAAKSEKAAPRSQHWLHRDLRVRFVDNMYKGGQYYNTKMIIEDVLSPDTCVCRTDEGRVLEGLREDMLETLVPKAEGDRVMVVLGPQTGRVGHLLSRDRARSRALVQLPRENQVVELHYDAICQYMGPSDTDDD

SEQ ID NO: 913616 - protein, 476 aa, Homo sapiens; identical to SEQ ID NO: 913615

SEQ ID NO: 913617 - protein, 227 aa, Homo sapiens
MADSKEGVLPLTAASTAPISFGFTRTSARRRLADSGDGAGPSPEEKDFLKTVEGRELQSVKPQEAPKELVIPLIQNGHRRQPPARPPGPSTDTGALADGVVSQAVKELIAESKKSLEERENAGVDPTLAIPMIQKGCTPSGEGADSEPRAETVPEEANYEAVPVEAYGLAMLRGMGWKPGEGIGRTFNQVVKPRVNSLRPKGLGLGANLTEAQALTPTGPSRMPRHR

SEQ ID NO: 913618 - protein, 476 aa, Homo sapiens; identical to SEQ ID NO: 913615

SEQ ID NO: 913619 - protein, 382 aa, Homo sapiens
MADSKEGVLPLTAASTAPISFGFTRTSARRRLADSGDGAGPSPEEKDFLKTVEGRELQSVKPQEAPKELVIPLIQNGHRRQPPARPPGPSTDTGALADGVVSQAVKELIAESKKSLEERENAGVDPTLAIPMIQKGCTPSGEGADSEPRAETVPEEANYEAVPVEAYGLAMLRGMGWKPGEGIGRTFNQVVKPRVNSLRPKGLGLGANLTEAQALTPTGPSRMPRPDEEQEKDKEDQPQGLVPGGAVVVLSGPHRGLYGKVEGLDPDNVRAMVRLAVGSRVVTVSEYYLRPVSQQEFDKNTLDLRQQNGTASSRKTLWNQELYIQQDNSERKRKHLPDRQDGPAAKSEKAAPRSQHWLHRDLRVRFVDNMYKGGQYLPKFRV

SEQ ID NO: 913620 - protein, 81 aa, Homo sapiens
RYPTFPRVSLREDMLETLVPKAEGDRVMVVLGPQTGRVGHLLSRDRARSRALVQLPRENQVVELHYDAICQYMGPSDTDDD

SEQ ID NO: 913621 - protein, 145 aa, Homo sapiens
VIHKIQSCWHASLVQDVVIQQVTIPDDDNERLSKVEKARQLREQVNDLFSRKFGEAIGMGFPVKVPYRKITINPGCVVVDGMPPGVSFKAPSYLEISSMRRILDSAEFIKFTVIRPFPGLVINNQLVDQSESEGPVIQNQLNQAS

SEQ ID NO: 913622 - protein, 708 aa, Homo sapiens
MLGIDQEVTVTVRWSSSNDHFLFQDDDYSPPSKRPKANELPQPPVPEPANAGKRKVREFNFEKWNARITDLRKQVEELFERKYAQAIKAKGPVTIPYPLFQSHVEDLYVEGLPEGIPFRRPSTYGIPRLERILLAKERIRFVIKKHELLNSTREDLQLDKPASGVKEEWYARITKLRKMVDQLFCKKFAEALGSTEAKAVPYQKFEAHPNDLYVEGLPENIPFRSPSWYGIPRLEKIIQVGNRIKFVIKRPELLTHSTTEVTQPRTNTPVKEDWNVRITKLRKQVEEIFNLKFAQALGLTEAVKVPYPVFESNPEFLYVEGLPEGIPFRSPTWFGIPRLERIVRGSNKIKFVVKKPELVISYLPPGMASKINTKALQSPKRPRSPGSNSKVPEIEVTVEGPNNNNPQTSAVRTPTQTNGSNVPFKPRGREFSFEAWNAKITDLKQKVENLFNEKCGEALGLKQAVKVPFALFESFPEDFYVEGLPEGVPFRRPSTFGIPRLEKILRNKAKIKFIIKKPEMFETAIKESTSSKSPPRKINSSPNVNTTASGVEDLNIIQVTIPDDDNERLSKVEKARQLREQVNDLFSRKFGEAIGMGFPVKVPYRKITINPGCVVVDGMPPGVSFKAPSYLEISSMRRILDSAEFIKFTVIRPFPGLVINNQLVDQSESEGPVIQESAEPSQLEVPATEEIKETDGSSQIKQEPDPTW

SEQ ID NO: 913623 - protein, 553 aa, Homo sapiens
LLPAEPASGVKEEWYARITKLRKMVDQLFCKKFAEALGSTEAKAVPYQKFEAHPNDLYVEGLPENIPFRSPSWYGIPRLEKIIQVGNRIKFVIKRPELLTHSTTEVTQPRTNTPVKEDWNVRITKLRKQVEEIFNLKFAQALGLTEAVKVPYPVFESNPEFLYVEGLPEGIPFRSPTWFGIPRLERIVRGSNKIKFVVKKPELVISYLPPGMASKINTKALQSPKRPRSPGSNSKVPEIEVTVEGPNNNNPQTSAVRTPTQTNGSNVPFKPRGREFSFEAWNAKITDLKQKVENLFNEKCGEALGLKQAVKVPFALFESFPEDFYVEGLPEGVPFRRPSTFGIPRLEKILRNKAKIKFIIKKPEMFETAIKESTSSKSPPRKINSSPNVNTTASGVEDLNIIQVTIPDDDNERLSKVEKARQLREQVNDLFSRKFGEAIGMGFPVKVPYRKITINPGCVVVDGMPPGVSFKAPSYLEISSMRRILDSAEFIKFTVIRPFPGLVINNQLVDQSESEGPVIQESAEPSQLEVPATEEIKETDGSSQIKQEPDPTW

SEQ ID NO: 913624 - protein, 652 aa, Homo sapiens
MLGIDQEVTVTVRWSSSNDHFLFQDDDYSPPSKRPKANELPQPPVPEPANAGKRKVREFNFEKWNARITDLRKQVEELFERKYAQAIKAKGPVTIPYPLFQSHVEDLYVEGLPEGIPFRRPSTYGIPRLERILLAKERIRFVIKKHELLNSTREDLQLDKPASGVKEEWYARITKLRKMVDQLFCKKFAEALGSTEAKAVPYQKFEAHPNDLYVEGLPENIPFRSPSWYGIPRLEKIIQVGNRIKFVIKRPELLTHSTTEVTQPRTNTPVKEDWNVRITKLRKQVEEIFNLKFAQALGLTEAVKVPYPVFESNPEFLYVEGLPEGIPFRSPTWFGIPRLERIVRGSNKIKFVVKKPELVISYLPPGMASKINTKALQSPKRPRSPGSNSKVPEIEVTVEGPNNNNPQTSAVRTPTQTNGSNVPFKPRGREFSFEAWNAKITDLKQKVENLFNEKCGEALGLKQAVKVPFALFESFPEDFYVEGLPEGVPFRRPSTFGIPRLEKILRNKAKIKFIIKKPEMFETAIKESTSSKSPPRKINSSPNVNTTASGVEDLNIIQVTIPDDDNERLSKVEKARQLREQVNDLFSRKFGEAIGMGFPVKVPYRKITINPGCVVVDGMPPGVSFKAPSYLEISSMRRILDSAEFIKFTVIR

SEQ ID NO: 913625 - protein, 342 aa, Homo sapiens
MASKINTKALQSPKRPRSPGSNSKVPEIEVTVEGPNNNNPQTSAVRTPTQTNGSNVPFKPRGREFSFEAWNAKITDLKQKVENLFNEKCGEALGLKQAVKVPFALFESFPEDFYVEGLPEGVPFRRPSTFGIPRLEKILRNKAKIKFIIKKPEMFETAIKESTSSKSPPRKINSSPNVNTTASGVEDLNIIQVTIPDDDNERLSKVEKARQLREQVNDLFSRKFGEAIGMGFPVKVPYRKITINPGCVVVDGMPPGVSFKAPSYLEISSMRRILDSAEFIKFTVIRPFPGLVINNQLVDQSESEGPVIQESAEPSQLEVPATEEIKETDGSSQIKQEPDPTW

SEQ ID NO: 913626 - protein, 306 aa, Homo sapiens
RGEPGAKPFVDDTQTNGSNVPFKPRGREFSFEAWNAKITDLKQKVENLFNEKCGEALGLKQAVKVPFALFESFPEDFYVEGLPEGVPFRRPSTFGIPRLEKILRNKAKIKFIIKKPEMFETAIKESTSSKSPPRKINSSPNVNTTASGVEDLNIIQVTIPDDDNERLSKVEKARQLREQVNDLFSRKFGEAIGMGFPVKVPYRKITINPGCVVVDGMPPGVSFKAPSYLEISSMRRILDSAEFIKFTVIRPFPGLVINNQLVDQSESEGPVIQESAEPSQLEVPATEEIKETDGSSQIKQEPDPTW

SEQ ID NO: 913627 - protein, 303 aa, Homo sapiens
DENNAKANDTQTNGSNVPFKPRGREFSFEAWNAKITDLKQKVENLFNEKCGEALGLKQAVKVPFALFESFPEDFYVEGLPEGVPFRRPSTFGIPRLEKILRNKAKIKFIIKKPEMFETAIKESTSSKSPPRKINSSPNVNTTASGVEDLNIIQVTIPDDDNERLSKVEKARQLREQVNDLFSRKFGEAIGMGFPVKVPYRKITINPGCVVVDGMPPGVSFKAPSYLEISSMRRILDSAEFIKFTVIRPFPGLVINNQLVDQSESEGPVIQESAEPSQLEVPATEEIKETDGSSQIKQEPDPTW

SEQ ID NO: 913628 - protein, 708 aa, Homo sapiens; identical to SEQ ID NO: 913622

SEQ ID NO: 913629 - protein, 68 aa, Homo sapiens
VASSIHSFTVIRPFPGLVINNQLVDQSESEGPVIQESAEPSQLEVPATEEIKETDGSSQIKQEPDPTW

SEQ ID NO: 913630 - protein, 708 aa, Homo sapiens; identical to SEQ ID NO: 913622

SEQ ID NO: 913631 - protein, 708 aa, Homo sapiens; identical to SEQ ID NO: 913622

SEQ ID NO: 913632 - protein, 652 aa, Homo sapiens; identical to SEQ ID NO: 913624

SEQ ID NO: 913633 - protein, 652 aa, Homo sapiens; identical to SEQ ID NO: 913624

SEQ ID NO: 913634 - protein, 652 aa, Homo sapiens; identical to SEQ ID NO: 913624

SEQ ID NO: 913635 - protein, 599 aa, Homo sapiens
MLGIDQEVTVTVRWSSSNDHFLFQDDDYSPPSKRPKANELPQPPVPEPANAGKRKVREFNFEKWNARITDLRKQVEELFERKYAQAIKAKGPVTIPYPLFQSHVEDLYVEGLPEGIPFRRPSTYGIPRLERILLAKERIRFVIKKHELLNSTREDLQLDKPASGVKEEWYARITKLRKMVDQLFCKKFAEALGSTEAKAVPYQKFEAHPNDLYVEGLPENIPFRSPSWYGIPRLEKIIQVGNRIKFVIKRPELLTHSTTEVTQPRTNTPVKEDWNVRITKLRKQVEEIFNLKFAQALGLTEAVKVPYPVFESNPEFLYVEGLPEGIPFRSPTWFGIPRLERIVRGSNKIKFVVKKPELVISYLPPGMASKINTKALQSPKRPRSPGSNSKVPEIEVTVEGPNNNNPQTSAVRTPTQTNGSNVPFKPRGREFSFEAWNAKITDLKQKVENLFNEKCGEALGLKQAVKVPFALFESFPEDFYVEGLPEGVPFRRPSTFGIPRLEKILRNKAKIKFIIKKPEMFETAIKESTSSKSPPRKINSSPNVNTTASGVEDLNIIQVTIPDDDNERLSKVEKARQLREQVNDLFSRKFAWDPLESPH

SEQ ID NO: 913636 - protein, 576 aa, Homo sapiens
MLGIDQEVTVTVRWSSSNDHFLFQDDDYSPPSKRPKANELPQPPVPEPANAGKRKVREFNFEKWNARITDLRKQVEELFERKYAQAIKAKGPVTIPYPLFQSHVEDLYVEGLPEGIPFRRPSTYGIPRLERILLAKERIRFVIKKHELLNSTREDLQLDKPASGVKEEWYARITKLRKMVDQLFCKKFAEALGSTEAKAVPYQKFEAHPNDLYVEGLPENIPFRSPSWYGIPRLEKIIQVGNRIKFVIKRPELLTHSTTEVTQPRTNTPVKEDWNVRITKLRKQVEEIFNLKFAQALGLTEAVKVPYPVFESNPEFLYVEGLPEGIPFRSPTWFGIPRLERIVRGSNKIKFVVKKPELVISYLPPGMASKINTKALQSPKRPRSPGSNSKVPEIEVTVEGPNNNNPQTSAVRTPTQTNGSNVPFKPRGREFSFEAWNAKITDLKQKVENLFNEKCGKSILKPSYCHAGCLHGSRREQSGILSVGVSLSLATCGFFGIEWRHFAHVLFRVRGCFAGEALGLKQAVKVPFALFESFPEDFYVEGLPEGVPFRRPSTFGIPRLEKILRNKAKIKFIIKK

SEQ ID NO: 913637 - protein, 530 aa, Homo sapiens
MVDQLFCKKFAEALGSTEAKAVPYQKFEAHPNDLYVEGLPENIPFRSPSWYGIPRLEKIIQVGNRIKFVIKRPELLTHSTTEVTQPRTNTPVKEDWNVRITKLRKQVEEIFNLKFAQALGLTEAVKVPYPVFESNPEFLYVEGLPEGIPFRSPTWFGIPRLERIVRGSNKIKFVVKKPELVISYLPPGMASKINTKALQSPKRPRSPGSNSKVPEIEVTVEGPNNNNPQTSAVRTPTQTNGSNVPFKPRGREFSFEAWNAKITDLKQKVENLFNEKCGEALGLKQAVKVPFALFESFPEDFYVEGLPEGVPFRRPSTFGIPRLEKILRNKAKIKFIIKKPEMFETAIKESTSSKSPPRKINSSPNVNTTASGVEDLNIIQVTIPDDDNERLSKVEKARQLREQVNDLFSRKFGEAIGMGFPVKVPYRKITINPGCVVVDGMPPGVSFKAPSYLEISSMRRILDSAEFIKFTVIRPFPGLVINNQLVDQSESEGPVIQESAEPSQLEVPATEEIKETDGSSQIKQEPDPTW

SEQ ID NO: 913638 - protein, 708 aa, Homo sapiens; identical to SEQ ID NO: 913622

SEQ ID NO: 913639 - protein, 342 aa, Homo sapiens; identical to SEQ ID NO: 913625

SEQ ID NO: 913640 - protein, 306 aa, Homo sapiens
LAGSRGSTKAKATQTNGSNVPFKPRGREFSFEAWNAKITDLKQKVENLFNEKCGEALGLKQAVKVPFALFESFPEDFYVEGLPEGVPFRRPSTFGIPRLEKILRNKAKIKFIIKKPEMFETAIKESTSSKSPPRKINSSPNVNTTASGVEDLNIIQVTIPDDDNERLSKVEKARQLREQVNDLFSRKFGEAIGMGFPVKVPYRKITINPGCVVVDGMPPGVSFKAPSYLEISSMRRILDSAEFIKFTVIRPFPGLVINNQLVDQSESEGPVIQESAEPSQLEVPATEEIKETDGSSQIKQEPDPTW

SEQ ID NO: 913641 - protein, 708 aa, Homo sapiens; identical to SEQ ID NO: 913622

SEQ ID NO: 913642 - protein, 708 aa, Homo sapiens; identical to SEQ ID NO: 913622

SEQ ID NO: 913643 - protein, 708 aa, Homo sapiens; identical to SEQ ID NO: 913622

SEQ ID NO: 913644 - protein, 110 aa, Homo sapiens
  misc_feature (40)..(40): Xaa can be any naturally occurring amino acid
GRSLQTGEWSMTVFEYRTRKVGRLPIRYAPYDMVVLIKNXVWTLALFAFYKPNSICNPNKKKFNSICVPLVLISVNQCGQCGERLNLFLSYLSWFLCFFIIIKSKTIWIT

SEQ ID NO: 913645 - protein, 652 aa, Homo sapiens; identical to SEQ ID NO: 913624

SEQ ID NO: 913646 - protein, 682 aa, Homo sapiens
MLGIDQEVTVTVRWSSSNDHFLFQDDDYSPPSKRPKANELPQPPVPEPANAGKRKVREFNFEKWNARITDLRKQVEELFERKYAQAIKAKGPVTIPYPLFQSHVEDLYVEGLPEGIPFRRPSTYGIPRLERILLAKERIRFVIKKHELLNSTREDLQLDKPASGVKEEWYARITKLRKMVDQLFCKKFAEALGSTEAKAVPYQKFEAHPNDLYVEGLPENIPFRSPSWYGIPRLEKIIQVGNRIKFVIKRPELLTHSTTEVTQPRTNTPVKEDWNVRITKLRKQVEEIFNLKFAQALGLTEAVKVPYPVFESNPEFLYVEGLPEGIPFRSPTWFGIPRLERIVRGSNKIKFVVKKPELVISYLPPGMASKINTKALQSPKRPRSPGSNSKVPEIEVTVEGPNNNNPQTSAVRTPTQTNGSNVPFKPRGREFSFEAWNAKITDLKQKVENLFNEKCGEALGLKQAVKVPFALFESFPEDFYVEGLPEGVPFRRPSTFGIPRLEKILRNKAKIKFIIKKPEMFETAIKESTSSKSPPRKINSSPNVNTTASGVEDLNIIQVTIPDDDNERLSKVEKARQLREQVNDLFSRKFGEAIGMGFPVKVPYRKITINPGCVVVDGMPPGVSFKAPSYLEISSMRRILDSAEFIKFTVIRPFPGLVINNQLVDQSESEGPVIQNQLNQAS

SEQ ID NO: 913647 - protein, 517 aa, Homo sapiens
MLGIDQEVTVTVRWSSSNDHFLFQDDDYSPPSKRPKANELPQPPVPEPANAGKRKVREFNFEKWNARITDLRKQVEELFERKYAQAIKAKGPVTIPYPLFQSHVEDLYVEGLPEGIPFRRPSTYGIPRLERILLAKERIRFVIKKHELLNSTREDLQLDKPASGVKEEWYARITKLRKMVDQLFCKKFAEALGSTEAKAVPYQKFEAHPNDLYVEGLPENIPFRSPSWYGIPRLEKIIQVGNRIKFVIKRPELLTHSTTEVTQPRTNTPVKEDWNVRITKLRKQVEEIFNLKFAQALGLTEAVKVPYPVFESNPEFLYVEGLPEGIPFRSPTWFGIPRLERIVRGSNKIKFVVKKPELVISYLPPGMASKINTKALQSPKRPRSPGSNSKVPEIEVTVEGPNNNNPQTSAVRTPTQTNGSNVPFKPRGREFSFEAWNAKITDLKQKVENLFNEKCGEALGLKQAVKVPFALFESFPEDFYVEGLPEGVPFRRPSTFGIPRLEKILRNKAKIKFIIKK

SEQ ID NO: 913648 - protein, 377 aa, Homo sapiens
MGTTEATLRMENVDVKEEWQDEDLPRPLPEETGVELLGSPVEDTSSPPNTLNFNGAHRKRKTLVAPEINISLDQSEGSLLSDDFLDTPDDLDINVDDIETPDETDSLEFLGNGNELEWEDDTPVATAKNMPGDSADLFGDGTTEDGSAANGRLWRTVIIGEQEHRIDLHMIRPYMKVVTHGGYYGEGLNAIIVFAACFLPDSSLPDYHYIMENLFLYVISSLELLVAEDYMIVYLNGATPRRRMPGIGWLKKCYQMIDRRLRKNLKSLIIVHPSWFIRTVLAISRPFISVKFINKIQYVHSLEDLEQLIPMEHVQIPDCVLQYEEERLKARRESARPQPEFVLPRSEEKPEVAPVENRSALVSEDQETSLQPLHRSS

SEQ ID NO: 913649 - protein, 371 aa, Homo sapiens
MGTTEATLRMENVDVKEEWQDEDLPRPLPEETGVELLGSPVEDTSSPPNTLNFNGAHRKRKTLVAPEINISLDQSEGSLLSDDFLDTPDDLDINVDDIETPDETDSLEFLGNGNELEWEDDTPVATAKNMPGDSADLFGDGTTEDGSAANGRLWRTVIIGEQEHRIDLHMIRPYMKVVTHGGYYGEGLNAIIVFAACFLPDSSLPDYHYIMENLFLYVISSLELLVAEDYMIVYLNGATPRRRMPGIGWLKKCYQMIDRRLRKNLKSLIIVHPSWFIRTVLAISRPFISVKFINKIQYVHSLEDLEQLIPMEHVQIPDCVLQYEEERLKARRESARPQPEFVLPRSEEKPEVAPVENRSALVSEDQETSMS

SEQ ID NO: 913650 - protein, 371 aa, Homo sapiens; identical to SEQ ID NO: 913649

SEQ ID NO: 913651 - protein, 371 aa, Homo sapiens; identical to SEQ ID NO: 913649

SEQ ID NO: 913652 - protein, 371 aa, Homo sapiens; identical to SEQ ID NO: 913649

SEQ ID NO: 913653 - protein, 358 aa, Homo sapiens
MGTTEATLRMENVDVKEEWQDEDLPRPLPEETGVELLGSPVEDTSSPPNTLNFNGAHRKRKTLVAPEINISLDQSEGSLLSDDFLDTPDDLDINVDDIETPDETDSLEFLGNGNELEWEDDTPVATAKNMPGDSADLFGDGTTEDGSAANGRLWRTVIIGEQEHRIDLHMIRPYMKVVTHGGYYGEGLNAIIVFAACFLPDSSLPDYHYIMENLFLYVISSLELLVAEDYMIVYLNGATPRRRMPGIGWLKKCYQMIDRRLRKNLKSLIIVHPSWFIRTVLAISRPFISVKFINKIQYVHSLEDLEQLIPMEHVQIPDCVLQYEEERLKARRESARPQPEFVLPRSEEKPEVAPVENR

SEQ ID NO: 913654 - protein, 114 aa, Homo sapiens [sequence omitted]

SEQ ID NO: 913655 - protein, 371 aa, Homo sapiens; identical to SEQ ID NO: 913649

SEQ ID NO: 913656 - protein, 125 aa, Homo sapiens
MAVADLALIPDVDIDSDGVFKYVLIRVHSAPRSGAPAAESKEIVRGYKWAEYHADIYDKVSGDMQKQGCDCECLGGGRISHQSQDKKIHVYGYSMAYGPAQHAISTEKIKAKYPDYEVTWANDGY

SEQ ID NO: 913657 - protein, 125 aa, Homo sapiens; identical to SEQ ID NO: 913656

SEQ ID NO: 913658 - protein, 125 aa, Homo sapiens; identical to SEQ ID NO: 913656

SEQ ID NO: 913659 - protein, 1082 aa, Homo sapiens
MAVGTHRGKEASTAALRSPTLREAASSCKLRLWYQRPLEVHPGPPRLVGGAQGEGGWAAGDKQGRSCPGTPDIADVAELRVELTHGAETLTLWQSTGPWGPGWQELAVTTGRIRGDFRVTFSATRNATHRGAVALDDLEFWDCGLPTPQANCPPGHHHCQNKVCVEPQQLCDGEDNCGDLSDENPLTCGRHIATDFETGLGPWNRSEGWSRNHRLVVLSAPPGHAVTTAGTVHRLVFYQYLSGSEAGCLQLFLQTLGPGAPRAPVLLRRRRGELGTAWVRDRVDIQSAYPFQILLAGQTGPGGVVGLDDLILSDHCRPVSEVSTLQPLPPGPRAPAPQPLPPSSRLQDSCKQGHLACGDLCVPPEQLCDFEEQCAGGEDEQACGTTDFESPEAGGWEDASVGRLQWRRVSAQESQGSSAAAAGHFLSLQRAWGQLGAEARVLTPLLGPSGPSCELHLAYYLQSQPRAEFVGLVDLDGPDQQGAGVDNVTLRDCSPTVTTERDRGSCCPSSLPPGCSPYTPPGTPELPPSQGSGGGGEKVCDSHLAPPPEVSCNFERDTCSWYPGHLSDTHWRWVESRGPDHDHTTGQGHFVLLDPTDPLAWGHSAHLLSRPQVPAAPTECLSFWYHLHGPQIGTLRLAMRREGEETHLWSRSGTQGNRWHEAWATLSHQPGSHAQYQLLFEGLRDGYHGTMALDDVAVRPGPCWAPNYCSFEDSDCGFSPGGQGLWRRQANASGHAAWGPPTDHTTETAQGHYMVVDTSPDALPRGQTASLTSKEHRPLAQPACLTFWYHGSLRSPGTLRVYLEERGRHQVLSLSAHGGLAWRLGSMDVQAELSLEGSCDFESGLCGWSHLAWPGLGGYSWDWGGGATPSRYPQPPVDHTLGTEAGHFAFFETGVLGPGGRAAWLRSEPLPATPASCLRFWYHMGFPEHFYKGELKVLLHSAQGQLAVWGAGGHRRHQWLEAQVEVASAKEFQIVFEATLGGQPALGPIALDDVEYLAGQHCQQPAPSPGNTAAPGSVPAVVGSALLLLMLLVLLGLGGRRWLQKKGSCPFQSNTEATAPGFDNILFNADGVTLPASVTSDP

SEQ ID NO: 913660 - protein, 1106 aa, Homo sapiens
MAVGTHRGKEASTAALRSPTLREAASSCKLRLWYQRPLEVHPGPPRLVGGAQGEGGWAAGDKQGRSCPGTPDIADVAELRVELTHGAETLTLWQSTGPWGPGWQELAVTTGRIRGDFRVTFSATRNATHRGAVALDDLEFWDCGLPTPQANCPPGHHHCQNKVCVEPQQLCDGEDNCGDLSDENPLTCGRHIATDFETGLGPWNRSEGWSRNHRLVVLSAPPGHAVTTAGTVHRLVFYQYLSGSEAGCLQLFLQTLGPGAPRAPVLLRRRRGELGTAWVRDRVDIQSAYPFQILLAGQTGPGGVVGLDDLILSDHCRPVSEVSTLQPLPPGPRAPAPQPLPPSSRLQDSCKQGHLACGDLCVPPEQLCDFEEQCAGGEDEQACGTTDFESPEAGGWEDASVGRLQWRRVSAQESQGSSAAAAGHFLSLQRAWGQLGAEARVLTPLLGPSGPSCELHLAYYLQSQPRAEFVGLVDLDGPDQQGAGVDNVTLRDCSPTVTTERDRGSCCPSSLPPGCSPYTPPGTPELPPSQGSGGGGEKVCDSHLAPPPEVSCNFERDTCSWYPGHLSDTHWRWVESRGPDHDHTTGQGHFVLLDPTDPLAWGHSAHLLSRPQVPAAPTECLSFWYHLHGPQIGTLRLAMRREGEETHLWSRSGTQGNRWHEAWATLSHQPGSHAQYQLLFEGLRDGYHGTMALDDVAVRPGPCWAPNYCSFEDSDCGFSPGGQGLWRRQANASGHAAWGPPTDHTTETAQGMGAWQGQGLRGWPGAGRLMLAPPGHYMVVDTSPDALPRGQTASLTSKEHRPLAQPACLTFWYHGSLRSPGTLRVYLEERGRHQVLSLSAHGGLAWRLGSMDVQAELSLEGSCDFESGLCGWSHLAWPGLGGYSWDWGGGATPSRYPQPPVDHTLGTEAGHFAFFETGVLGPGGRAAWLRSEPLPATPASCLRFWYHMGFPEHFYKGELKVLLHSAQGQLAVWGAGGHRRHQWLEAQVEVASAKEFQIVFEATLGGQPALGPIALDDVEYLAGQHCQQPAPSPGNTAAPGSVPAVVGSALLLLMLLVLLGLGGRRWLQKKGSCPFQSNTEATAPGFDNILFNADGVTLPASVTSDP

SEQ ID NO: 913661 - protein, 490 aa, Homo sapiens
MAVGTHRGKEASTAALRSPTLREAASSCKLRLWYQRPLEVHPGPPRLVGGAQGEGGWAAGDKQGRSCPGTPDIADVAELRVELTHGAETLTLWQSTGPWGPGWQELAVTTGRIRGDFRVTFSATRNATHRGAVALDDLEFWDCGLPTPQANCPPGHHHCQNKVCVEPQQLCDGEDNCGDLSDENPLTCGRHIATDFETGLGPWNRSEGWSRNHRLVVLSAPPGHAVTTAGTVHRLVFYQYLSGSEAGCLQLFLQTLGPGAPRAPVLLRRRRGELGTAWVRDRVDIQSAYPFQILLAGQTGPGGVVGLDDLILSDHCRPVSEVSTLQPLPPGPRAPAPQPLPPSSRLQDSCKQGHLACGDLCVPPEQLCDFEEQCAGGEDEQACGTTDFESPEAGGWEDASVGRLQWRRVSAQESQGSSAAAAGHFLSLQRAWGQLGAEARVLTPLLGPSGPSCELHLAYYLQSQPRGTATLRKFPGQPLGAPCTVGGVWG

SEQ ID NO: 913662 - protein, 1209 aa, Homo sapiens
MPLSSHLLPALVLFLGALARPCATSCVTAGTAQMRPSVVTTGPRPPWAPPSPVTSSRTPAAGGTLVPQATAGSETGQGPHWRVLGLTQTTHWAPTWVRPGQVSVRPCPNTLLAPAPSPDLSPAPGWYMAVGTHRGKEASTAALRSPTLREAASSCKLRLWYHAALEVHPGPPRLVGGAQGEGGWAAGDKQGRSCPGTPDIADVAELRVELTHGAETLTLWQSTGPWGPGWQELAVTTGRIRGDFRVTFSATRNATHRGAVALDDLEFWDCGLPTPQANCPPGHHHCQNKVCVEPQQLCDGEDNCGDLSDENPLTCGRHIATDFETGLGPWNRSEGWSRNHRLVVLSAPPGHAVTTAGTVHRLVFYQYLSGSEAGCLQLFLQTLGPGAPRAPVLLRRRRGELGTAWVRDRVDIQSAYPFQILLAGQTGPGGVVGLDDLILSDHCRPVSEVSTLQPLPPGPRAPAPQPLPPSSRLQDSCKQGHLACGDLCVPPEQLCDFEEQCAGGEDEQACGTTDFESPEAGGWEDASVGRLQWRRVSAQESQGSSAAAAGHFLSLQRAWGQLGAEARVLTPLLGPSGPSCELHLAYYLQSQPRVEFVGLVDLDGPDQQGAGVDNVTLRDCSPTVTTERDRGSCCPSSLPPGCSPYTPPGTPELPPSQGSGGGGEKVCDSHLAPPPEVSCNFERDTCSWYPGHLSDTHWRWVESRGPDHDHTTGQGHFVLLDPTDPLAWGHSAHLLSRPQVPAAPTECLSFWYHLHGPQIGTLRLAMRREGEETHLWSRSGTQGNRWHEAWATLSHQPGSHAQYQLLFEGLRDGYHGTMALDDVAVRPGPCWAPNYCSFEDSDCGFSPGGQGLWRRQANASGHAAWGPPTDHTTETAQGHYMVVDTSPDALPRGQTASLTSKEHRPLAQPACLTFWYHGSLRSPGTLRVYLEERGRHQVLSLSAHGGLAWRLGSMDVQAELSLEGSCDFESGLCGWSHLAWPGLGGYSWDWGGGATPSRYPQPPVDHTLGTEAGHFAFFETGVLGPGGRAAWLRSEPLPATPASCLRFWYHMGFPEHFYKGELKVLLHSAQGQLAVWGAGGHRRHQWLEAQVEVASAKEFQIVFEATLGGQPALGPIALDDVEYLAGQHCQQPAPSPGNTAAPGSVPAVVGSALLLLMLLVLLGLGGRRWLQKKGSCPFQSNTEATAPGFDNILFNADGVTLPASVTSDP

SEQ ID NO: 913663 - protein, 1209 aa, Homo sapiens
MPLSSHLLPALVLFLGALARPCATSCVTAGTAQMRPSVVTTGPRPPWAPPSPVTSSRTPAAGGTLVPQATAGSETGQGPHWRVLGLTQTTHWAPTWVRPGQVSVRPCPNTLLAPAPSPDLSPAPGWYMAVGTHRGKEASTAALRSPTLREAASSCKLRLWYQRPLEVHPGPPRLVGGAQGEGGWAAGDKQGRSCPGTPDIADVAELRVELTHGAETLTLWQSTGPWGPGWQELAVTTGRIRGDFRVTFSATRNATHRGAVALDDLEFWDCGLPTPQANCPPGHHHCQNKVCVEPQQLCDGEDNCGDLSDENPLTCGRHIATDFETGLGPWNRSEGWSRNHRLVVLSAPPGHAVTTAGTVHRLVFYQYLSGSEAGCLQLFLQTLGPGAPRAPVLLRRRRGELGTAWVRDRVDIQSAYPFQILLAGQTGPGGVVGLDDLILSDHCRPVSEVSTLQPLPPGPRAPAPQPLPPSSRLQDSCKQGHLACGDLCVPPEQLCDFEEQCAGGEDEQACGTTDFESPEAGGWEDASVGRLQWRRVSAQESQGSSAAAAGHFLSLQRAWGQLGAEARVLTPLLGPSGPSCELHLAYYLQSQPRAEFVGLVDLDGPDQQGAGVDNVTLRDCSPTVTTERDRGSCCPSSLPPGCSPYTPPGTPELPPSQGSGGGGEKVCDSHLAPPPEVSCNFERDTCSWYPGHLSDTHWRWVESRGPDHDHTTGQGHFVLLDPTDPLAWGHSAHLLSRPQVPAAPTECLSFWYHLHGPQIGTLRLAMRREGEETHLWSRSGTQGNRWHEAWATLSHQPGSHAQYQLLFEGLRDGYHGTMALDDVAVRPGPCWAPNYCSFEDSDCGFSPGGQGLWRRQANASGHAAWGPPTDHTTETAQGHYMVVDTSPDALPRGQTASLTSKEHRPLAQPACLTFWYHGSLRSPGTLRVYLEERGRHQVLSLSAHGGLAWRLGSMDVQAELSLEGSCDFESGLCGWSHLAWPGLGGYSWDWGGGATPSRYPQPPVDHTLGTEAGHFAFFETGVLGPGGRAAWLRSEPLPATPASCLRFWYHMGFPEHFYKGELKVLLHSAQGQLAVWGAGGHRRHQWLEAQVEVASAKEFQIVFEATLGGQPALGPIALDDVEYLAGQHCQQPAPSPGNTAAPGSVPAVVGSALLLLMLLVLLGLGGRRWLQKKGSCPFQSNTEATAPGFDNILFNADGVTLPASVTSDP

SEQ ID NO: 913664 - protein, 1209 aa, Homo sapiens; identical to SEQ ID NO: 913662

SEQ ID NO: 913665 - protein, 1209 aa, Homo sapiens
MPLSSHLLPALVLFLGALARPCATSCVTAGTAQMRPSVVTTGPRPPWAPPSPVTSSRTPAAGGTLVPQATAGSETGQGPHWRVLGLTQTTHWAPTWVRPGQVSVRPCPNTLLAPAPSPDLSPAPGWYMAVGTHRGKEASTAALRSPTLREAASSCKLRLWYHAASGGAPWTPKARGGSQGEGGWAAGDKQGRSCPGTPDIADVAELRVELTHGAETLTLWQSTGPWGPGWQELAVTTGRIRGDFRVTFSATRNATHRGAVALDDLEFWDCGLPTPQANCPPGHHHCQNKVCVEPQQLCDGEDNCGDLSDENPLTCGRHIATDFETGLGPWNRSEGWSRNHRLVVLSAPPGHAVTTAGTVHRLVFYQYLSGSEAGCLQLFLQTLGPGAPRAPVLLRRRRGELGTAWVRDRVDIQSAYPFQILLAGQTGPGGVVGLDDLILSDHCRPVSEVSTLQPLPPGPRAPAPQPLPPSSRLQDSCKQGHLACGDLCVPPEQLCDFEEQCAGGEDEQACGTTDFESPEAGGWEDASVGRLQWRRVSAQESQGSSAAAAGHFLSLQRAWGQLGAEARVLTPLLGPSGPSCELHLAYYLQSQPRAEFVGLVDLDGPDQQGAGVDNVTLRDCSPTVTTERDRGSCCPSSLPPGCSPYTPPGTPELPPSQGSGGGGEKVCDSHLAPPPEVSCNFERDTCSWYPGHLSDTHWRWVESRGPDHDHTTGQGHFVLLDPTDPLAWGHSAHLLSRPQVPAAPTECLSFWYHLHGPQIGTLRLAMRREGEETHLWSRSGTQGNRWHEAWATLSHQPGSHAQYQLLFEGLRDGYHGTMALDDVAVRPGPCWAPNYCSFEDSDCGFSPGGQGLWRRQANASGHAAWGPPTDHTTETAQGHYMVVDTSPDALPRGQTASLTSKEHRPLAQPACLTFWYHGSLRSPGTLRVYLEERGRHQVLSLSAHGGLAWRLGSMDVQAELSLEGSCDFESGLCGWSHLAWPGLGGYSWDWGGGATPSRYPQPPVDHTLGTEAGHFAFFETGVLGPGGRAAWLRSEPLPATPASCLRFWYHMGFPEHFYKGELKVLLHSAQGQLAVWGAGGHRRHQWLEAQVEVASAKEFQIVFEATLGGQPALGPIALDDVEYLAGQHCQQPAPSPGNTAAPGSVPAVVGSALLLLMLLVLLGLGGRRWLQKKGSCPFQSNTEATAPGFDNILFNADGVTLPASVTSDP

SEQ ID NO: 913666 - protein, 1209 aa, Homo sapiens; identical to SEQ ID NO: 913663

SEQ ID NO: 913667 - protein, 125 aa, Homo sapiens
MAVADLALIPDVDIDSDGVFKYVLIRVHSAPRSGAPAAESKEIVRGYKWAEYHADIYDKVSGDMQKQGCDCECLGGGRISHQSQDKKIHVYGYSMVSRSPVPPCRRPQYQLRGPPEPAALTRGPS

SEQ ID NO: 913668 - protein, 125 aa, Homo sapiens; identical to SEQ ID NO: 913667

SEQ ID NO: 913669 - protein, 70 aa, Homo sapiens
  misc_feature (64)..(64): Xaa can be any naturally occurring amino acid
MAVADLALIPDVDIDSDGVFKYVLIRVHSAPRSGAPAAESKEIVRGYKWAEYHADIYDHVLAKXWGDPSR

SEQ ID NO: 913670 - protein, 84 aa, Homo sapiens
LWRAHMSLWPTGNTAAPGSVPAVVGSALLLLMLLVLLGLGGRRWLQKKGSCPFQSNTEATAPGFDNILFNADGVTLPASVTSDP

SEQ ID NO: 913671 - protein, 125 aa, Homo sapiens; identical to SEQ ID NO: 913656

SEQ ID NO: 913672 - protein, 1106 aa, Homo sapiens; identical to SEQ ID NO: 913660

SEQ ID NO: 913673 - protein, 345 aa, Homo sapiens
MAVGTHRGKEASTAALRSPTLREAASSCKLRLWYQRPLEVHPGPPRLVGGAQGEGGWAAGDKQGRSCPGTPDIADVAELRVELTHGAETLTLWQSTGPWGPGWQELAVTTGRIRGDFRVTFSATRNATHRGAVALDDLEFWDCGLPTPQANCPPGHHHCQNKVCVEPQQLCDGEDNCGDLSDENPLTCGRHIATDFETGLGPWNRSEGWSRNHRLVVLSAPPGHAVTTAGTVHRLVFYQYLSGSEAGCLQLFLQTLGPGAPRAPVLLRRRRGELGTAWVRDRVDIQSAYPFQILLAGQTGPGGVVGLDDLILSDHCRPVSEVSTLQPLPPGPRAPAPQPPNRPYH

SEQ ID NO: 913674 - protein, 125 aa, Homo sapiens; identical to SEQ ID NO: 913656

SEQ ID NO: 913675 - protein, 1209 aa, Homo sapiens
MPLSSHLLPALVLFLGALARPCATSCVTAGTAQMRPSVVTTGPRPPWAPPSPVTSSRTPAAGGTLVPQATAGSETGQGPHWRVLGLTQTTHWAPTWVRPGQVSVRPCPNTLLAPAPSPDLSPAPGWYMAVGTHRGKEASTAALRSPTLREAASSCKLRLWYHAALEVHPGPPRLVGGAQGEGGWAAGDKQGRSCPGTPDIADVAELRVELTHGAETLTLWQSTGPWGPGWQELAVTTGRIRGDFRVTFSATRNATHRGAVALDDLEFWDCGLPTPQANCPPGHHHCQNKVCVEPQQLCDGEDNCGDLSDENPLTCGRHIATDFETGLGPWNRSEGWSRNHRLVVLSAPPGHAVTTAGTVHRLVFYQYLSGSEAGCLQLFLQTLGPGAPRAPVLLRRRRGELGTAWVRDRVDIQSAYPFQILLAGQTGPGGVVGLDDLILSDHCRPVSEVSTLQPLPPGPRAPAPQPLPPSSRLQDSCKQGHLACGDLCVPPEQLCDFEEQCAGGEDEQACGTTDFESPEAGGWEDASVGRLQWRRVSAQESQGSSAAAAGHFLSLQRAWGQLGAEARVLTPLLGPSGPSCELHLAYYLQSQPRAEFVGLVDLDGPDQQGAGVDNVTLRDCSPTVTTERDRGSCCPSSLPPGCSPYTPPGTPELPPSQGSGGGGEKVCDSHLAPPPEVSCNFERDTCSWYPGHLSDTHWRWVESRGPDHDHTTGQGHFVLLDPTDPLAWGHSAHLLSRPQVPAAPTECLSFWYHLHGPQIGTLRLAMRREGEETHLWSRSGTQGNRWHEAWATLSHQPGSHAQYQLLFEGLRDGYHGTMALDDVAVRPGPCWAPNYCSFEDSDCGFSPGGQGLWRRQANASGHAAWGPPTDHTTETAQGHYMVVDTSPDALPRGQTASLTSKEHRPLAQPACLTFWYHGSLRSPGTLRVYLEERGRHQVLSLSAHGGLAWRLGSMDVQAELSLEGSCDFESGLCGWSHLAWPGLGGYSWDWGGGATPSRYPQPPVDHTLGTEAGHFAFFETGVLGPGGRAAWLRSEPLPATPASCLRFWYHMGFPEHFYKGELKVLLHSAQGQLAVWGAGGHRRHQWLEAQVEVASAKEFQIVFEATLGGQPALGPIALDDVEYLAGQHCQQPAPSPGNTAAPGSVPAVVGSALLLLMLLVLLGLGGRRWLQKKGSCPFQSNTEATAPGFDNILFNADGVTLPASVTSDP

SEQ ID NO: 913676 - protein, 1209 aa, Homo sapiens; identical to SEQ ID NO: 913662

SEQ ID NO: 913677 - protein, 125 aa, Homo sapiens; identical to SEQ ID NO: 913656

SEQ ID NO: 913678 - protein, 181 aa, Homo sapiens
MAVADLALIPDVDIDSDGVFKYVLIRVHSAPRSGAPAAESKEIVRGYKWAEYHADIYDKVSGDMQKQGCDCECLGGGRISHQSQDKKIHVYGYSMDETHVRPSGRLRPQDPPSRPMVLPSTPFQLRKSKPSTPTTRSPGLTTATEHSQPGACCLQQPLQSPRLCLHSSCRAGPACSCGSLW

SEQ ID NO: 913679 - protein, 282 aa, Homo sapiens
LPCTRQVVFEAVAAGVAHSYVALDDLLLQDGPCPQPGSCDFESGLCGWSHLAWPGLGGYSWDWGGGATPSRYPQPPVDHTLGTEAGHFAFFETGVLGPGGRAAWLRSEPLPATPASCLRFWYHMGFPEHFYKGELKVLLHSAQGQLAVWGAGGHRRHQWLEAQVEVASAKEFQIVFEATLGGQPALGPIALDDVEYLAGQHCQQPAPSPGNTAAPGSVPAVVGSALLLLMLLVLLGLGGRRWLQKKGSCPFQSNTEATAPGFDNILFNADGVTLPASVTSDP

SEQ ID NO: 913680 - protein, 741 aa, Homo sapiens
MDIEDEENMSSSSTDVKENRNLDNVSPKDGSTPGPGEGSQLSNGGGGGPGRKRPLEEGSNGHSKYRLKKRRKTPGPVLPKNALMQLNEIKPGLQYTLLSQTGPVHAPLFVMSVEVNGQVFEGSGPTKKKAKLHAAEKALRSFVQFPNASEAHLAMGRTLSVNTDFTSDQADFPDTLFNGFETPDKAEPPFYVGSNGDDSFSSSGDLSLSASPVPASLAQPPLPVLPPFPPPSGKNPVMILNELRPGLKYDFLSESGESHAKSFVMSVVVDGQFFEGSGRNKKLAKARAAQSALAAIFNLHLDQTPSRQPIPSEGLQLHLPQVLADAVSRLVLGKFGDLTDNFSSPHARRKVLAGVVMTTGTDVKDAKVISVSTGTKCINGEYMSDRGLALNDCHAEIISRRSLLRFLYTQLELYLNNKDDQKRSIFQKSERGGFRLKENVQFHLYISTSPCGDARIFSPHEPILEGSRSYTQAGVQWCNHGSLQPRPPGLLSDPSTSTFQGAGTTEPADRHPNRKARGQLRTKIESGEGTIPVRSNASIQTWDGVLQGERLLTMSCSDKIARWNVVGIQGSLLSIFVEPIYFSSIILGSLYHGDHLSRAMYQRISNIEDLPPLYTLNKPLLSGISNAEARQPGKAPNFSVNWTVGDSAIEVINATTGKDELGRASRLCKHALYCRWMRVHGKVPSHLLRSKITKPNVYHESKLAAKEYQAAKARLFTAFIKAGLGAWVEKPTEQDQFSLTP

SEQ ID NO: 913681 - protein, 701 aa, Homo sapiens
MDIEDEENMSSSSTDVKENRNLDNVSPKDGSTPGPGEGSQLSNGGGGGPGRKRPLEEGSNGHSKYRLKKRRKTPGPVLPKNALMQLNEIKPGLQYTLLSQTGPVHAPLFVMSVEVNGQVFEGSGPTKKKAKLHAAEKALRSFVQFPNASEAHLAMGRTLSVNTDFTSDQADFPDTLFNGFETPDKAEPPFYVGSNGDDSFSSSGDLSLSASPVPASLAQPPLPVLPPFPPPSGKNPVMILNELRPGLKYDFLSESGESHAKSFVMSVVVDGQFFEGSGRNKKLAKARAAQSALAAIFNLHLDQTPSRQPIPSEGLQLHLPQVLADAVSRLVLGKFGDLTDNFSSPHARRKVLAGVVMTTGTDVKDAKVISVSTGTKCINGEYMSDRGLALNDCHAEIISRRSLLRFLYTQLELYLNNKDDQKRSIFQKSERGGFRLKENVQFHLYISTSPCGDARIFSPHEPILEEPADRHPNRKARGQLRTKIESGEGTIPVRSNASIQTWDGVLQGERLLTMSCSDKIARWNVVGIQGSLLSIFVEPIYFSSIILGSLYHGDHLSRAMYQRISNIEDLPPLYTLNKPLLSGISNAEARQPGKAPNFSVNWTVGDSAIEVINATTGKDELGRASRLCKHALYCRWMRVHGKVPSHLLRSKITKPNVYHESKLAAKEYQAAKARLFTAFIKAGLGAWVEKPTEQDQFSLTP

SEQ ID NO: 913682 - protein, 70 aa, Homo sapiens
EPWAGWLSGGTGFREPWAGAGGGCRKELVSGSPGRGGCGEEGDVQGTRGSALLLGQLICNQKKNKQNTER

SEQ ID NO: 913683 - protein, 359 aa, Homo sapiens
MSDRGLALNDCHAEIISRRSLLRFLYTQLELYLNNKDDQKRSIFQKSERGGFRLKENVQFHLYISTSPCGDARIFSPHEPILEGSRSYTQAGVQWCNHGSLQPRPPGLLSDPSTSTFQGAGTTEPADRHPNRKARGQLRTKIESGEGTIPVRSNASIQTWDGVLQGERLLTMSCSDKIARWNVVGIQGSLLSIFVEPIYFSSIILGSLYHGDHLSRAMYQRISNIEDLPPLYTLNKPLLSGISNAEARQPGKAPNFSVNWTVGDSAIEVINATTGKDELGRASRLCKHALYCRWMRVHGKVPSHLLRSKITKPNVYHESKLAAKEYQAAKARLFTAFIKAGLGAWVEKPTEQDQFSLTP

SEQ ID NO: 913684 - protein, 74 aa, Homo sapiens
GGGAEALRRPWRRRRRRRQRRPSGQVGGRGSGPREATATPRRCAQPTRQSAARRETAAEAWGARAEDQARRGCG

SEQ ID NO: 913685 - protein, 714 aa, Homo sapiens
MDIEDEENMSSSSTDVKENRNLDNVSPKDGSTPGPGEGSQLSNGGGGGPGRKRPLEEGSNGHSKYRLKKRRKTPGPVLPKNALMQLNEIKPGLQYTLLSQTGPVHAPLFVMSVEVNGQVFEGSGPTKKKAKLHAAEKALRSFVQFPNASEAHLAMGRTLSVNTDFTSDQADFPDTLFNGFETPDKAEPPFYVGSNGDDSFSSSGDLSLSASPVPASLAQPPLPVLPPFPPPSGKNPVMILNELRPGLKYDFLSESGESHAKSFVMSVVVDGQFFEGSGRNKKLAKARAAQSALAAIFNLHLDQTPSRQPIPSEGLQLHLPQVLADAVSRLVLGKFGDLTDNFSSPHARRKVLAGVVMTTGTDVKDAKVISVSTGTKCINGEYMSDRGLALNDCHAEIISRRSLLRFLYTQLELYLNNKDDQKRSIFQKSERGGFRLKENVQFHLYISTSPCGDARIFSPHEPILEGSRSYTQAGVQWCNHGSLQPRPPGLLSDPSTSTFQGAGTTEPADRHPNRKARGQLRTKIESGEGTIPVRSNASIQTWDGVLQGERLLTMSCSDKIARWNVVGIQGSLLSIFVEPIYFSSIILGSLYHGDHLSRAMYQRISNIEDLPPLYTLNKPLLSGISNAEARQPGKAPNFSVNWTVGDSAIEVINATTGKDELGRASRLCKHALYCRWMRVHGKVPSHLLRSKITKPNVYHESKLAAKEYQAAKVH

SEQ ID NO: 913686 - protein, 741 aa, Homo sapiens; identical to SEQ ID NO: 913680

SEQ ID NO: 913687 - protein, 682 aa, Homo sapiens
MDIEDEENMSSSSTDVKENRNLDNVSPKDGSTPGPGEGSQLSNGGGGGPGRKRPLEEGSNGHSKYRLKKRRKTPGPVLPKNALMQLNEIKPGLQYTLLSQTGPVHAPLFVMSVEVNGQVFEGSGPTKKKAKLHAAEKALRSFVQFPNASEAHLAMGRTLSVNTDFTSDQADFPDTLFNGFETPDKAEPPFYVGSNGDDSFSSSGDLSLSASPVPASLAQPPLPVLPPFPPPSGKNPVMILNELRPGLKYDFLSESGESHAKSFVMSVVVDGQFFEGSGRNKKLAKARAAQSALAAIFNLHLDQTPSRQPIPSEGLQLHLPQVLADAVSRLVLGKFGDLTDNFSSPHARRKVLAGVVMTTGTDVKDAKVISVSTGTKCINGEYMSDRGLALNDCHAEIISRRSLLRFLYTQLELYLNNKDDQKRSIFQKSERGGFRLKENVQFHLYISTSPCGDARIFSPHEPILEGSRSYTQAGVQWCNHGSLQPRPPGLLSDPSTSTFQGAGTTEPADRHPNRKARGQLRTKIESGEGTIPVRSNASIQTWDGVLQGERLLTMSCSDKIARWNVVGIQGSLLSIFVEPIYFSSIILGSLYHGDHLSRAMYQRISNIEDLPPLYTLNKPLLSGISNAEARQPGKAPNFSVNWTVGDSAIEVINATTGKDELGRASRLCKHALYCRWMRVHGK

SEQ ID NO: 913688 - protein, 484 aa, Homo sapiens
LGWSRPGCQRLGSRARSGRRAASAPAGPCVPRLAPLTPSRPGRAMISLPGPLVTNLLRFLFLGLSALAPPSRAQLQLHLPANRLQAVEGGEVVLPAWYTLHGEVSSSQPWEVPFVMWFFKQKEKEDQVLSYINGVTTSKPGVSLVYSMPSRNLSLRLEGLQEKDSGPYSCSVNVQDKQGKSRGHSIKTLELNVLVPPAPPSCRLQGVPHVGANVTLSCQSPRSKPAVQYQWDRQLPSFQTFFAPALDVIRGSLSLTNLSSSMAGVYVCKAHNEVGTAQCNVTLEVSTGPGAAVVAGAVVGTLVGLGLLAGLVLLYHRRGKALEEPANDIKEDALLPGPAWPKSSEKSPRLGPFSVTPHEPTGDHMASQAGVLNPTPRSQQALLHQQLATETMEANHQKKKPVLGGSPYTGPERNGITGPSDEADKNNRHTENRHPNHSTQEGEEQHKEPTKADSEGKDNARPKDAHTNEKATTMLQKHEQTDNT

SEQ ID NO: 913689 - protein, 434 aa, Homo sapiens
LGWSRPGCQRLGSRARSGRRAASAPAGPCVPRLAPLTPSRPGRAMISLPGPLVTNLLRFLFLGLSALAPPSRAQLQLHLPANRLQAVEGGEVVLPAWYTLHGEVSSSQPWEVPFVMWFFKQKEKEDQVLSYINGVTTSKPGVSLVYSMPSRNLSLRLEGLQEKDSGPYSCSVNVQDKQGKSRGHSIKTLELNVLVPPAPPSCRLQGVPHVGANVTLSCQSPRSKPAVQYQWDRQLPSFQTFFAPALDVIRGSLSLTNLSSSMAGVYVCKAHNEVGTAQCNVTLEVSTGPGAAVVAGAVVGTLVGLGLLAGLVLLYHRRGKALEEPANDIKEDAIAPRTLPWPKSSDTISKNGTLSSVTSARALRPPHGPPRPGALTPTPSLSSQALPSPRLPTTDGAHPQPISPIPGGVSSSGLSRMGAVPVMVPAQSQAGSLV

SEQ ID NO: 913690 - protein, 337 aa, Homo sapiens
LGWSRPGCQRLGSRARSGRRAASAPAGPCVPRLAPLTPSRPGRAMISLPGPLVTNLLRFLFLGLSALAPPSRAQLQLHLPANRLQAVEGGEVVLPAWYTLHGEVSSSQPWEVPFVMWFFKQKEKEDQVLSYINGVTTSKPGVSLVYSMPSRNLSLRLEGLQEKDSGPYSCSVNVQDKQGKSRGHSIKTLELNVLVPPAPPSCRLQGVPHVGANVTLSCQSPRSKPAVQYQWDRQLPSFQTFFAPALDVIRGSLSLTNLSSSMAGVYVCKAHNEVGTAQCNVTLEVSTGPGAAVVAGAVVGTLVGLGLLAGLVLLYPRQMGPTLNQYPPSLVGFLPLA

SEQ ID NO: 913691 - protein, 280 aa, Homo sapiens
MRLAGLQEKDSGPYSCSVNVQDKQGKSRGHSIKTLELNVLVPPAPPSCRLQGVPHVGANVTLSCQSPRSKPAVQYQWDRQLPSFQTFFAPALDVIRGSLSLTNLSSSMAGVYVCKAHNEVGTAQCNVTLEVSTGPGAAVVAGAVVGTLVGLGLLAGLVLLYHRRGKALEEPANDIKEDAIAPRTLPWPKSSDTISKNGTLSSVTSARALRPPHGPPRPGALTPTPSLSSQALPSPRLPTTDGAHPQPISPIPGGVSSSGLSRMGAVPVMVPAQSQAGSLV

SEQ ID NO: 913692 - protein, 366 aa, Homo sapiens
LGWSRPGCQRLGSRARSGRRAASAPAGPCVPRLAPLTPSRPGRAMISLPGPLVTNLLRFLFLGLSALAPPSRAQLQLHLPANRLQAVEGGEVVLPAWYTLHGEVSSSQPWEVPFVMWFFKQKEKEDQVLSYINGVTTSKPGVSLVYSMPSRNLSLRLEGLQEKDSGPYSCSVNVQDKQGKSRGHSIKTLELNVLVPPAPPSCRLQGVPHVGANVTLSCQSPRSKPAVQYQWDRQLPSFQTFFAPALDVIRGSLSLTNLSSSMAGVYVCKAHNEVGTAQCNVTLEVSTGPGAAVVAGAVVGTLVGLGLLAGLVLLYHRRGKALEEPANDIKEDAIAPRTLPWPKSSDTLLTLSTLPPPLFTVGKPSQ

SEQ ID NO: 913693 - protein, 349 aa, Homo sapiens
LGWSRPGCQRLGSRARSGRRAASAPAGPCVPRLAPLTPSRPGRAMISLPGPLVTNLLRFLFLGLSALAPPSRAQLQLHLPANRLQAVEGGEVVLPAWYTLHGEVSSSQPWEVPFVMWFFKQKEKEDQVLSYINGVTTSKPGVSLVYSMPSRNLSLRLEGLQEKDSGPYSCSVNVQDKQGKSRGHSIKTLELNVLVPPAPPSCRLQGVPHVGANVTLSCQSPRSKPAVQYQWDRQLPSFQTFFAPALDVIRGSLSLTNLSSSMAGVYVCKAHNEVGTAQCNVTLEVSTGPGAAVVAGAVVGTLVGLGLLAGLVLLYHRRGKALEEPANDIKEDAIAPRTLPWPKSSDTSY

SEQ ID NO: 913694 - protein, 434 aa, Homo sapiens; identical to SEQ ID NO: 913689

SEQ ID NO: 913695 - protein, 434 aa, Homo sapiens; identical to SEQ ID NO: 913689

SEQ ID NO: 913696 - protein, 307 aa, Homo sapiens
LGWSRPGCQRLGSRARSGRRAASAPAGPCVPRLAPLTPSRPGRAMISLPGPLVTNLLRFLFLGLSALVPPAPPSCRLQGVPHVGANVTLSCQSPRSKPAVQYQWDRQLPSFQTFFAPALDVIRGSLSLTNLSSSMAGVYVCKAHNEVGTAQCNVTLEVSTGPGAAVVAGAVVGTLVGLGLLAGLVLLYHRRGKALEEPANDIKEDAIAPRTLPWPKSSDTISKNGTLSSVTSARALRPPHGPPRPGALTPTPSLSSQALPSPRLPTTDGAHPQPISPIPGGVSSSGLSRMGAVPVMVPAQSQAGSLV

SEQ ID NO: 913697 - protein, 173 aa, Homo sapiens [sequence omitted]

SEQ ID NO: 913698 - protein, 836 aa, Homo sapiens
RAAARLPDLSPAQPSAGERKRNPFRGLLVTLLHASRRPPGRFGLAVVARTPPEPRPSPEGDPSPPPPPMSALVPDTPPDTPPAMKNATSSKQLPLEPESPSGQVGPRPAPPQEESPSSEAKSRGPTPPAMGPRDARPPRRSSQPSPTAVPASDSPPTKQEVKKAGERHKLAKERREERAKYLAAKKAVWLEKEEKAKALREKQLQERRRRLEEQRLKAEQRRAALEERQRQKLEKNKERYEAAIQRSVKKTWAEIRQQRWSWAGALHHSSPGHKTSGSRCSVSAVNLPKHVDSIINKRLSKSSATLWNSPSRNRSLQLSAWESSIVDRLMTPTLSFLARSRSAVTLPRNGRDHRAGVPALGLRQPPDAVQRHPKRAPLRPRGERGERRKPNAGGSPAPVRRRPEASPVQKKEKKDKERENEKEKSALARERSLKKRQSLPASPRARLSASTASELSPKSKARPSSPSTSWHRPASPCPSPGPGHTLPPKPPSPRGTTASPKGRVRRKEEAKESPSAAGPEDKSQSKRRASNEKESAAPASPAPSPAPSPTPAPPQKEQPPAETPTDAAVLTSPPAPAPPVTPSKPMAGTTDREEATRLLAEKRRQAREQREREEQERRLQAERDKRMREEQLAREAEARAEREAEARRREEQEAREKAQAEQEEQERLQKQKEEAEARSREEAERQRLEREKHFQQQEQERQERRKRLEEIMKRTRKSEVSETKKQDSKEANANGSSPEPVKAVEARSPGLQKEAVQKEEPIPQEPQWSLPSKELPASLVNGLQPLPAHQENGFSTNGPSGDKSLSRTPETLLPFAEAEAFLKKAVVQSPQVTEVL

SEQ ID NO: 913699 - protein, 832 aa, Homo sapiens
MESGPRAELGAGAPPAVVARTPPEPRPSPEGDPSPPPPPMSALVPDTPPDTPPAMKNATSSKQLPLEPESPSGQVGPRPAPPQEESPSSEAKSRGPTPPAMGPRDARPPRRSSQPSPTAVPASDSPPTKQEVKKAGERHKLAKERREERAKYLAAKKAVWLEKEEKAKALREKQLQERRRRLEEQRLKAEQRRAALEERQRQKLEKNKERYEAAIQRSVKKTWAEIRQQRWSWAGALHHSSPGHKTSGSRCSVSAVNLPKHVDSIINKRLSKSSATLWNSPSRNRSLQLSAWESSIVDRLMTPTLSFLARSRSAVTLPRNGRDQGPTWGRAGASLARGPQPDRTHPSAAVPVCPRSASASPLTPCSVTRSVHRCAPAGERGERRKPNAGGSPAPVRRRPEASPVQKKEKKDKERENEKEKSALARERSLKKRQSLPASPRARLSASTASELSPKSKARPSSPSTSWHRPASPCPSPGPGHTLPPKPPSPRGTTASPKGRVRRKEEAKESPSAAGPEDKSQSKRRASNEKESAAPASPAPSPAPSPTPAPPQKEQPPAETPTDAAVLTSPPAPAPPVTPSKPMAGTTDREEATRLLAEKRRQAREQREREEQERRLQAERDKRMREEQLAREAEARAEREAEARRREEQEAREKAQAEQEEQERLQKQKEEAEARSREEAERQRLEREKHFQQQEQERQERRKRLEEIMKRTRKSEVSETKKQDSKEANANGSSPEPVKAVEARSPGLQKEAVQKEEPIPQEPQWSLPSKELPASLVNGLQPLPAHQENGFSTNGPSGDKSLSRTPETLLPFAEAEAFLKKAVVQSPQVTEVL

SEQ ID NO: 913700 - protein, 770 aa, Homo sapiens
MESGPRAELGAGAPPAVVARTPPEPRPSPEGDPSPPPPPMSALVPDTPPDTPPAMKNATSSKQLPLEPESPSGQVGPRPAPPQEESPSSEAKSRGPTPPAMGPRDARPPRRSSQPSPTAVPASDSPPTKQEVKKAGERHKLAKERREERAKYLAAKKAVWLEKEEKAKALREKQLQERRRRLEEQRLKAEQRRAALEERQRQKLEKNKERYEAAIQRSVKKTWAEIRQQRWSWAGALHHSSPGHKTNRSLQLSAWESSIVDRLMTPTLSFLARSRSAVTLPRNGRDHRAGVPALGLRQPPDAVQRHPKRAPLRPRGERGERRKPNAGGSPAPVRRRPEASPVQKKEKKDKERENEKEKSALARERSLKKRQSLPASPRARLSASTASELSPKSKARPSSPSTSWHRPASPCPSPGPGHTLPPKPPSPRGTTASPKGRVRRKEEAKESPSAAGPEDKSQSKRRASNEKESAAPASPAPSPAPSPTPAPPQKEQPPAETPTDAAVLTSPPAPAPPVTPSKPMAGTTDREEATRLLAEKRRQAREQREREEQERRLQAERDKRMREEQLAREAEARAEREAEARRREEQEAREKAQAEQEEQERLQKQKEEAEARSREEAERQRLEREKHFQQQEQERQERRKRLEEIMKRTRKSEVSETKKQDSKEANANGSSPEPVKAVEARSPGLQKEAVQKEEPIPQEPQWSLPSKELPASLVNGLQPLPAHQENGFSTNGPSGDKSLSRTPETLLPFAEAEAFLKKAVVQSPQVTEVL

SEQ ID NO: 913701 - protein, 540 aa, Homo sapiens [sequence omitted]

SEQ ID NO: 913702 - protein, 831 aa, Homo sapiens
MESGPRAELGAGAPPAVVARTPPEPRPSPEGDPSPPPPPMSALVPDTPPDTPPAMKNATSSKQLPLEPESPSGQVGPRPAPPQEESPSSEAKSRGPTPPAMGPRDARPPRRSSQPSPTAVPASDSPPTKQEVKKAGERHKLAKERREERAKYLAAKKAVWLEKEEKAKALREKQLQERRRRLEEQRLKAEQRRAALEERQRQKLEKNKERYEAAIQRSVKKTWAEIRQQRWSWAGALHHSSPGHKTSGSRCSVSAVNLPKHVDSIINKRLSKSSATLWNSPSRNRSLQLSAWESSIVDRLMTPTLSFLARSRSAVTLPRNGRDQGRGCDPGRGPTWGRAGASLARGPQPDRTHPSAAVPVCPRSASASPLTPCSVTRSVHRCAPAGERGERRKPNAGGSPAPVRRRPEASPVQKKEKKDKERENEKEKSALARERSLKKRQSLPASPRARLSASTASELSPKSKARPSSPSTSWHRPASPCPSPGPGHTLPPKPPSPRGTTASPKGRVRRKEEAKESPSAAGPEDKSQSKRRASNEKESAAPASPAPSPAPSPTPAPPQKEQPPAETPTAPAPPVTPSKPMAGTTDREEATRLLAEKRRQAREQREREEQERRLQAERDKRMREEQLAREAEARAEREAEARRREEQEAREKAQAEQEEQERLQKQKEEAEARSREEAERQRLEREKHFQQQEQERQERRKRLEEIMKRTRKSEVSETKKQDSKEANANGSSPEPVKAVEARSPGLQKEAVQKEEPIPQEPQWSLPSKELPASLVNGLQPLPAHQENGFSTNGPSGDKSLSRTPETLLPFAEAEAFLKKAVVQSPQVTEVL

SEQ ID NO: 913703 - protein, 985 aa, Homo sapiens
MESGPRAELGAGAPPAVVARTPPEPRPSPEGDPSPPPPPMSALVPDTPPDTPPAMKNATSSKQLPLEPESPSGQVGPRPAPPQEESPSSEAKSRGPTPPAMGPRDARPPRRSSQPSPTAVPASDSPPTKQEVKKAGERHKLAKERREERAKYLAAKKAVWLEKEEKAKALREKQLQERRRRLEEQRLKAEQRRAALEERQRQKLEKNKERYEAAIQRSVKKTWAEIRQQRWSWAGALHHSSPGHKTSGSRCSVSAVNLPKHVDSIINKRLSKSSATLWNSPSRNRSLQLSAWESSIVDRLMTPTLSFLARSRSAVTLPRNGRDQGRGCDPGRGPTWGRAGASLARGPQPDRTHPSAAVPVCPRSASASPLTPCSVTRSVHRCAPAGERGERRKPNAGGSPAPVRRRPEASPVQKKEKKDKERENEKEKSALARERSLKKRQSLPASPRARLSASTASELSPKSKARPSSPSTSWHRPASPCPSPGPGHTLPPKPPSPRGTTASPKGRVRRKEEAKESPSAAGPEDKSQSKRRASNEKESAAPASPAPSPAPSPTPAPPQKEQPPAETPTDAAVLTSPPAPAPPVTPSKPMAGTTDREEATRLLAEKRRQAREQREREEQERRLQAERDKRMREEQLAREAEARAEREAEARRREEQEAREKAQAEQEEQERLQKQKEEAEARSREEAERQRLEREKHFQQQEQERQERRKVCGPGRGFVGGAWAGRARWAGPGLRADRTGKRWGKFQFLLLERAAMSWEALRLRGRVWLVGGLGLGAGLEPNCSAASKQRLEEIMKRTRKSEVSETKVRIPPKGSAGRGGQGVKRRLRKGILATESEAVREAAAARARGGPNSVRSGWGRLSLEPDCSSSSKQKQDSKEANANGSSPEPVKAVEARSPGLQKEAVQKEEPIPQEPQWSLPSKELPASLVNGLQPLPAHQENGFSTNGPSGDKSLSRTPETLLPFAEAEAFLKKAVVQSPQVTEVL

SEQ ID NO: 913704 - protein, 187 aa, Homo sapiens
GHLEDPHFAQAEQEEQERLQKQKEEAEARSREEAERQRLEREKHFQQQEQERQERRKRLEEIMKRTRKSEVSETKKQDSKEANANGSSPEPVKAVEARSPGLQKEAVQKEEPIPQEPQWSLPSKELPASLVNGLQPLPAHQENGFSTNGPSGDKSLSRTPETLLPFAEAEAFLKKAVVQSPQVTEVL

SEQ ID NO: 913705 - protein, 840 aa, Homo sapiens
MESGPRAELGAGAPPAVVARTPPEPRPSPEGDPSPPPPPMSALVPDTPPDTPPAMKNATSSKQLPLEPESPSGQVGPRPAPPQEESPSSEAKSRGPTPPAMGPRDARPPRRSSQPSPTAVPASDSPPTKQEVKKAGERHKLAKERREERAKYLAAKKAVWLEKEEKAKALREKQLQERRRRLEEQRLKAEQRRAALEERQRQKLEKNKERYEAAIQRSVKKTWAEIRQQRWSWAGALHHSSPGHKTSGSRCSVSAVNLPKHVDSIINKRLSKSSATLWNSPSRNRSLQLSAWESSIVDRLMTPTLSFLARSRSAVTLPRNGRDQGRGCDPGRGPTWGRAGASLARGPQPDRTHPSAAVPVCPRSASASPLTPCSVTRSVHRCAPAGERGERRKPNAGGSPAPVRRRPEASPVQKKEKKDKERENEKEKSALARERSLKKRQSLPASPRARLSASTASELSPKSKARPSSPSTSWHRPASPCPSPGPGHTLPPKPPSPRGTTASPKGRVRRKEEAKESPSAAGPEDKSQSKRRASNEKESAAPASPAPSPAPSPTPAPPQKEQPPAETPTDAAVLTSPPAPAPPVTPSKPMAGTTDREEATRLLAEKRRQAREQREREEQERRLQAERDKRMREEQLAREAEARAEREAEARRREEQEAREKAQAEQEEQERLQKQKEEAEARSREEAERQRLEREKHFQQQEQERQERRKRLEEIMKRTRKSEVSETKKQDSKEANANGSSPEPVKAVEARSPGLQKEAVQKEEPIPQEPQWSLPSKELPASLVNGLQPLPAHQENGFSTNGPSGDKSLSRTPETLLPFAEAEAFLKKAVVQSPQVTEVL

SEQ ID NO: 913706 - protein, 840 aa, Homo sapiens; identical to SEQ ID NO: 913705

SEQ ID NO: 913707 - protein, 840 aa, Homo sapiens; identical to SEQ ID NO: 913705

SEQ ID NO: 913708 - protein, 840 aa, Homo sapiens; identical to SEQ ID NO: 913705

SEQ ID NO: 913709 - protein, 155 aa, Homo sapiens
MESGPRAELGAGAPPAVVARTPPEPRPSPEGDPSPPPPPMSALVPDTPPDTPPAMKNATSSKQLPLEPESPSGQVGPRPAPPQEESPSSEAKSRGPTPPAMGPRDARPPRRSSQPSPTAVPASDSPPTKQEVKKAGERHKLAKERREERAKYLGE

SEQ ID NO: 913710 - protein, 807 aa, Homo sapiens
MESGPRAELGAGAPPAVVARTPPEPRPSPEGDPSPPPPPMSALVPDTPPDTPPAMKNATSSKQLPLEPESPSGQVGPRPAPPQEESPSSEAKSRGPTPPAMGPRDARPPRRSSQPSPTAVPASDSPPTKQEVKKAGERHKLAKERREERAKYLAAKKAVWLEKEEKAKALREKQLQERRRRLEEQRLKAEQRRAALEERQRQKLEKNKERYEAAIQRSVKKTWAEIRQQRWSWAGALHHSSPGHKTSGSRCSVSAVNLPKHVDSIINKRLSKSSATLWNSPSRNRSLQLSAWESSIVDRLMTPTLSFLARSRSAVTLPRNGRDHRAGVPALGLRQPPDAVQRHPKRAPLRPRGERGERRKPNAGGSPAPVRRRPEASPVQKKEKKDKERENEKEKSALARERSLKKRQSLPASPRARLSASTASELSPKSKARPSSPSTSWHRPASPCPSPGPGHTLPPKPPSPRGTTASPKGRVRRKEEAKESPSAAGPEDKSQSKRRASNEKESAAPASPAPSPAPSPTPAPPQKEQPPAETPTDAAVLTSPPAPAPPVTPSKPMAGTTDREEATRLLAEKRRQAREQREREEQERRLQAERDKRMREEQLAREAEARAEREAEARRREEQEAREKAQAEQEEQERLQKQKEEAEARSREEAERQRLEREKHFQQQEQERQERRKRLEEIMKRTRKSEVSETKKQDSKEANANGSSPEPVKAVEARSPGLQKEAVQKEEPIPQEPQWSLPSKELPASLVNGLQPLPAHQENGFSTNGPSGDKSLSRTPETLLPFAEAEAFLKKAVVQSPQVTEVL

SEQ ID NO: 913711 - protein, 840 aa, Homo sapiens; identical to SEQ ID NO: 913705

SEQ ID NO: 913712 - protein, 718 aa, Homo sapiens
MGSRAGHLEEMSLAQAFCRTLHTRHWAPLSTAAKKAVWLEKEEKAKALREKQLQERRRRLEEQRLKAEQRRAALEERQRQKLEKNKERYEAAIQRSVKKTWAEIRQQRWSWAGALHHSSPGHKTSGSRCSVSAVNLPKHVDSIINKRLSKSSATLWNSPSRNRSLQLSAWESSIVDRLMTPTLSFLARSRSAVTLPRNGRDQGRGCDPGRGPTWGRAGASLARGPQPDRTHPSAAVPVCPRSASASPLTPCSVTRSVHRCAPAGERGERRKPNAGGSPAPVRRRPEASPVQKKEKKDKERENEKEKSALARERSLKKRQSLPASPRARLSASTASELSPKSKARPSSPSTSWHRPASPCPSPGPGHTLPPKPPSPRGTTASPKGRVRRKEEAKESPSAAGPEDKSQSKRRASNEKESAAPASPAPSPAPSPTPAPPQKEQPPAETPTDAAVLTSPPAPAPPVTPSKPMAGTTDREEATRLLAEKRRQAREQREREEQERRLQAERDKRMREEQLAREAEARAEREAEARRREEQEAREKAQAEQEEQERLQKQKEEAEARSREEAERQRLEREKHFQQQEQERQERRKRLEEIMKRTRKSEVSETKKQDSKEANANGSSPEPVKAVEARSPGLQKEAVQKEEPIPQEPQWSLPSKELPASLVNGLQPLPAHQENGFSTNGPSGDKSLSRTPETLLPFAEAEAFLKKAVVQSPQVTEVL

SEQ ID NO: 913713 - protein, 810 aa, Homo sapiens
MESGPRAELGAGAPPAVVARTPPEPRPSPEGDPSPPPPPMSALVPDTPPDTPPAMKNATSSKQLPLEPESPSGQVGPRPAPPQEESPSSEAKSRGPTPPAMGPRDARPPRRSSQPSPTAVPASDSPPTKQEVKKAGERHKLAKERREERAKYLAAKKAVWLEKEEKAKALREKQLQERRRRLEEQRLKAEQRRAALEERQRQKLEKNKERYEAAIQRSVKKTWAEIRQQRWSWAGALHHSSPGHKTSGSRCSVSAVNLPKHVDSIINKRLSKSSATLWNSPSRNRSLQLSAWESSIVDRLMTPTLSFLARSRSAVTLPRNGRDQGRGCDPGRGPTWGRAGASLARGPQPDRTHPSAAVPVCPRSASASPLTPCSVTRSVHRCAPAGERGERRKPNAGGSPAPVRRRPEASPVQKKEKKDKERENEKEKSALARERSLKKRQSLPASPRARLSASTASELSPKSKARPSSPSTSWHRPASPCPSPGPGHTLPPKPPSPRGTTASPKGRVRRKEEAKESPSAAGPEDKSQSKRRASNEKESAAPASPAPSPAPSPTPAPPQKEQPPAETPTDAAVLTSPPAPAPPVTPSKPMAGTTDREEATRLLAEKRRQAREQREREAEARRREEQEAREKAQAEQEEQERLQKQKEEAEARSREEAERQRLEREKHFQQQEQERQERRKRLEEIMKRTRKSEVSETKKQDSKEANANGSSPEPVKAVEARSPGLQKEAVQKEEPIPQEPQWSLPSKELPASLVNGLQPLPAHQENGFSTNGPSGDKSLSRTPETLLPFAEAEAFLKKAVVQSPQVTEVL

SEQ ID NO: 913714 - protein, 919 aa, Homo sapiens
MESGPRAELGAGAPPAVVARTPPEPRPSPEGDPSPPPPPMSALVPDTPPDTPPAMKNATSSKQLPLEPESPSGQVGPRPAPPQEESPSSEAKSRGPTPPAMGPRDARPPRRSSQPSPTAVPASDSPPTKQEVKKAGERHKLAKERREERAKYLAAKKAVWLEKEEKAKALREKQLQERRRRLEEQRLKAEQRRAALEERQRQKLEKNKERYEAAIQRSVKKTWAEIRQQRWSWAGALHHSSPGHKTSGSRCSVSAVNLPKHVDSIINKRLSKSSATLWNSPSRNRSLQLSAWESSIVDRLMTPTLSFLARSRSAVTLPRNGRDQGRGCDPGRGPTWGRAGASLARGPQPDRTHPSAAVPVCPRSASASPLTPCSVTRSVHRCAPAGERGERRKPNAGGSPAPVRRRPEASPVQKKEKKDKERENEKEKSALARERSLKKRQSLPASPRARLSASTASELSPKSKARPSSPSTSWHRPASPCPSPGPGHTLPPKPPSPRGTTASPKGRVRRKEEAKESPSAAGPEDKSQSKRRASNEKESAAPASPAPSPAPSPTPAPPQKEQPPAETPTDAAVLTSPPAPAPPVTPSKPMAGTTDREEATRLLAEKRRQAREQREREEQERRLQAERDKRMREEQLAREAEARAEREAEARRREEQEAREKAQAEQEEQERLQKQKEEAEARSREEAERQRLEREKHFQQQEQERQERRKVCGPGRGFVGGAWAGRARWAGPGLRADRTGKRWGKFQFLLLERAAMSWEALRLRGRVWLVGGLGLGAGLEPNCSAASKQRLEEIMKRTRKSEVSETKKQDSKEANANGSSPEPVKAVEARSPGLQKEAVQKEEPIPQEPQWSLPSKELPASLVNGLQPLPAHQENGFSTNGPSGDKSLSRTPETLLPFAEAEAFLKKAVVQSPQVTEVL

SEQ ID NO: 913715 - protein, 840 aa, Homo sapiens; identical to SEQ ID NO: 913705

SEQ ID NO: 913716 - protein, 840 aa, Homo sapiens; identical to SEQ ID NO: 913705

SEQ ID NO: 913717 - protein, 124 aa, Homo sapiens
TLLSKETGLLRAQPAVSAPGGHQRVEQGHRTHSGRGLQEALLHDTADAGLGQQYLLHGARAPAGPLVRVQGPAGHRSPLRGFALDPGTVVRAPLHHLPGCLEEKKTEQRWKWPGPLGVGPLCCF

SEQ ID NO: 913718 - protein, 676 aa, Homo sapiens
MESGPRAELGAGAPPAVVARTPPEPRPSPEGDPSPPPPPMSALVPDTPPDTPPAMKNATSSKQLPLEPESPSGQVGPRPAPPQEESPSSEAKSRGPTPPAMGPRDARPPRRSSQPSPTAVPASDSPPTKQEVKKAGERHKLAKERREERAKYLAAKKAVWLEKEEKAKALREKQLQERRRRLEEQRLKAEQRRAALEERQRQKLEKNKERYEAAIQRSVKKTWAEIRQQRWSWAGALHHSSPGHKTSGSRCSVSAVNLPKHVDSIINKRLSKSSATLWNSPSRNRSLQLSAWESSIVDRLMTPTLSFLARSRSAVTLPRNGRDQGRGCDPGRGPTWGRAGASLARGPQPDRTHPSAAVPVCPRSASASPLTPCSVTRSVHRCAPAGERGERRKPNAGGSPAPVRRRPEASPVQKKEKKDKERENEKEKSALARERSLKKRQSLPASPRARLSASTASELSPKSKARPSSPSTSWHRPASPCPSPGPGHTLPPKPPSPRGTTASPKGRVRRKEEAKESPSAAGPEDKSQSKRRASNEKESAAPASPAPSPAPSPTPAPPQKEQPPAETPTDAAVLTSPPAPAPPVTPSKPMAGTTDREEATRLLAEKRRQAREQREREEQERRLQAERDKRMREEQLAREAEARAEREAEARRREEQEAREKAQAEQEEQERLQKQA

SEQ ID NO: 913719 - protein, 505 aa, Homo sapiens
MSSVQQQPPPPRRVTNVGSLLLTPQENESLFTFLGKKCVTMSSAVVQLYAADRNCMWSKKCSGVACLVKDNPQRSYFLRIFDIKDGKLLWEQELYNNFVYNSPRGYFHTFAGDTCQVALNFANEEEAKKFRKAVTDLLGRRQRKSEKRRDPPNGPNLPMATVDIKNPEITTNRFYGPQVNNISHTKEKKKGKAKKKRLTKADIGTPSNFQHIGHVGWDPNTGFDLNNLDPELKNLFDMCGISEAQLKDRETSKVIYDFIEKTGGVEAVKNELRRQAPPPPPPSRGGPPPPPPPPHSSGPPPPPARGRGAPPPPPSRAPTAAPPPPPPSRPSVEVPPPPPNRMYPPPPPALPSSAPSGPPPPPPSVLGVGPVAPPPPPPPPPPPGPPPPPGLPSDGDHQVPTTAGNKAALLDQIREGAQLKKVEQNSRPVSCSGRDALLDQIRQGIQLKSVADGQESTPPTPAPTSGIVGALMEVMQKRSKAIHSSDEDEDEDDEEDFEDDDEWED

SEQ ID NO: 913720 - protein, 505 aa, Homo sapiens; identical to SEQ ID NO: 913719

SEQ ID NO: 913721 - protein, 458 aa, Homo sapiens
MSSVQQQPPPPRRVTNVGSLLLTPQENESLFTFLGKKCVTMSSAVVQLYAADRNCMWSKKCSGVACLVKDNPQRSYFLRIFDIKDGKLLWEQELYNNFVYNSPRGYFHTFAGDTCQVALNFANEEEAKKFRKAVTDLLGRRQRKSEKRRDPPNGPNLPMATVDIKNPEITTNRFYGPQVNNISHTKEKKKGKAKKKRLTKADIGTPSNFQHIGHVGWDPNTGFDLNNLDPELKNLFDMCGISEAQLKDRETSKVIYDFIEKTGGVEAVKNELRRQAPPPPPPSRGGPPPPPPPPHSSGPPPPPARGRGAPPPPPSRAPTAAPPPPPPSRPSVEVPPPPPNRMYPPPPPALPSSAPSGPPPPPPSVLGVGPVAPPPPPPPPPPPGPPPPPGLPSDGDHQVPTTAGNKAALLDQIREGAQLKKVEQNSRPVSCSGRDALLDQIRQGIQLKSVSKLFFFSF

SEQ ID NO: 913722 - protein, 505 aa, Homo sapiens; identical to SEQ ID NO: 913719

SEQ ID NO: 913723 - protein, 505 aa, Homo sapiens; identical to SEQ ID NO: 913719

SEQ ID NO: 913724 - protein, 347 aa, Homo sapiens
MATVDIKNPEITTNRFYGPQVNNISHTKEKKKGKAKKKRLTKADIGTPSNFQHIGHVGWDPNTGFDLNNLDPELKNLFDMCGISEAQLKDRETSKVIYDFIEKTGGVEAVKNELRRQAPPPPPPSRGGPPPPPPPPHSSGPPPPPARGRGAPPPPPSRAPTAAPPPPPPSRPSVEVPPPPPNRMYPPPPPALPSSAPSGPPPPPPSVLGVGPVAPPPPPPPPPPPGPPPPPGLPSDGDHQVPTTAGNKAALLDQIREGAQLKKVEQNSRPVSCSGRDALLDQIRQGIQLKSVADGQESTPPTPAPTSGIVGALMEVMQKRSKAIHSSDEDEDEDDEEDFEDDDEWED

SEQ ID NO: 913725 - protein, 454 aa, Homo sapiens
MWPLTVPPPLLLLLCSGLAGQTLFQNPEEGWQLYTSAQAPDGKCICTAVIPAQSTCSRDGRSRELRQLMEKVQNVSQSMEVLELRTYRDLQYVRGMETLMRSLDARLRAADGSLSAKSFQELKDRMTELLPLSSVLEQYKADTRTIVRLREEVRNLSGSLAAIQEEMGAYGYEDLQQRVMALEARLHACAQKLGCGKLTGVSNPITVRAMGSRFGSWMTDTMAPSADSRVWYMDGYYKGRRVLEFRTLGDFIKGQNFIQHLLPQPWAGTGHVVYNGSLFYNKYQSNVVVKYHFRSRSVLVQRSLPGAGYNNTFPYSWGGFSDMDFMVDESGLWAVYTTNQNAGNIVVSRLDPHTLEVMRSWDTGYPKRSAGEAFMICGVLYVTNSHLAGAKVYFAYFTNTSSYEYTDVPFHNQYSHISMLDYNPRERALYTWNNGHQVLYNVTLFHVISTSGDP

SEQ ID NO: 913726 - protein, 478 aa, Homo sapiens
MSVPLLKIGAVLSTMAMVTNWMSQTLPSLVGLNGTVSRAGASEKITLFQNPEEGWQLYTSAQAPDGKCICTAVIPAQSTCSRDGRSRELRQLMEKVQNVSQSMEVLELRTYRDLQYVRGMETLMRSLDARLRAADGSLSAKSFQELKDRMTELLPLSSVLEQYKADTRTIVRLREEVRNLSGSLAAIQEEMGAYGYEDLQQRVMALEARLHACAQKLGCGKLTGVSNPITVRAMGSRFGSWMTDTMAPSADSRVWYMDGYYKGRRVLEFRTLGDFIKGQNFIQHLLPQPWAGTGHVVYNGSLFYNKYQSNVVVKYHFRSRSVLVQRSLPGAGYNNTFPYSWGGFSDMDFMVDESGLWAVYTTNQNAGNIVVSRLDPHTLEVMRSWDTGYPKRSAGEAFMICGVLYVTNSHLAGAKVYFAYFTNTSSYEYTDVPFHNQYSHISMLDYNPRERALYTWNNGHQVLYNVTLFHVISTSGDP

SEQ ID NO: 913727 - protein, 399 aa, Homo sapiens
IRHNSRTSMDWETFWTVQNVSQSMEVLELRTYRDLQYVRGMETLMRSLDARLRAADGSLSAKSFQELKDRMTELLPLSSVLEQYKADTRTIVRLREEVRNLSGSLAAIQEEMGAYGYEDLQQRVMALEARLHACAQKLGCGKLTGVSNPITVRAMGSRFGSWMTDTMAPSADSRVWYMDGYYKGRRVLEFRTLGDFIKGQNFIQHLLPQPWAGTGHVVYNGSLFYNKYQSNVVVKYHFRSRSVLVQRSLPGAGYNNTFPYSWGGFSDMDFMVDESGLWAVYTTNQNAGNIVVSRLDPHTLEVMRSWDTGYPKRSAGEAFMICGVLYVTNSHLAGAKVYFAYFTNTSSYEYTDVPFHNQYSHISMLDYNPRERALYTWNNGHQVLYNVTLFHVISTSGDP

SEQ ID NO: 913728 - protein, 84 aa, Homo sapiens
LPLPPPIYSFSKEISSSYSPHSPVPSLTNTSSYEYTDVPFHNQYSHISMLDYNPRERALYTWNNGHQVLYNVTLFHVISTSGDP

SEQ ID NO: 913729 - protein, 454 aa, Homo sapiens; identical to SEQ ID NO: 913725

SEQ ID NO: 913730 - protein, 376 aa, Homo sapiens
MEVLELRTYRDLQYVRGMETLMRSLDARLRAADGSLSAKSFQELKDRMTELLPLSSVLEQYKADTRTIVRLREEVRNLSGSLAAIQEEMGAYGYEDLQQRVMALEARLHACAQKLGCGKLTGVSNPITVRAMGSRFGSWMTDTMAPSADSRVWYMDGYYKGRRVLEFRTLGDFIKGQNFIQHLLPQPWAGTGHVVYNGSLFYNKYQSNVVVKYHFRSRSVLVQRSLPGAGYNNTFPYSWGGFSDMDFMVDESGLWAVYTTNQNAGNIVVSRLDPHTLEVMRSWDTGYPKRSAGEAFMICGVLYVTNSHLAGAKVYFAYFTNTSSYEYTDVPFHNQYSHISMLDYNPRERALYTWNNGHQVLYNVTLFHVISTSGDP

SEQ ID NO: 913731 - protein, 245 aa, Homo sapiens
MGSRFGSWMTDTMAPSADSRVWYMDGYYKGRRVLEFRTLGDFIKGQNFIQHLLPQPWAGTGHVVYNGSLFYNKYQSNVVVKYHFRSRSVLVQRSLPGAGYNNTFPYSWGGFSDMDFMVDESGLWAVYTTNQNAGNIVVSRLDPHTLEVMRSWDTGYPKRSAGEAFMICGVLYVTNSHLAGAKVYFAYFTNTSSYEYTDVPFHNQYSHISMLDYNPRERALYTWNNGHQVLYNVTLFHVISTSGDP

SEQ ID NO: 913732 - protein, 98 aa, Homo sapiens
PRPQQPQQEEVTSPVVPPSVKTPARELLFHPALFEVPSLKLLAAHCIVGHQHMIPENALEEITKNMDTSAVLAEIPAGPGREPVQTLPSLCGKEAHGH

SEQ ID NO: 913733 - protein, 581 aa, Homo sapiens
GPQFGCAAERSCEGVAVIRGPGTRAGAEAQAAGRGVGSAGLSVPSSMSEGESQTVLSSGSDPKVESSSSAPGLTSVSPPVTSTTSAASPEEEEESEDESEILEESPCGRWQKRREEVNQRNVPGIDSAYLAMDTEEGVEVVWNEVQFSERKNYKLQEEKVRAVFDNLIQLEHLNIVKFHKYWADIKENKARVIFITEYMSSGSLKQFLKKTKKNHKTMNEKAWKRWCTQILSALSYLHSCDPPIIHGNLTCDTIFIQHNGLIKIGSVAPDTINNHVKTCREEQKNLHFFAPEYGEVTNVTTAVDIYSFGMCALEMAVLEIQGNGESSYVPQEAISSAIQLLEDPLQREFIQKCLQSEPARRPTARELLFHPALFEVPSLKLLAAHCIVGHQHMIPENALEEITKNMDTSAVLAEIPAGPGREPVQTLYSQSPALELDKFLEDVRNGIYPLTAFGLPRPQQPQQEEVTSPVVPPSVKTPTPEPAEVETRKVVLMQCNIESVEEGVKHHLTLLLKLEDKLNRHLSCDLMPNENIPELAAELVQLGFISEADQSRLTSLLEETLNKFNFARNSTLNSAAVTVSS

SEQ ID NO: 913734 - protein, 581 aa, Homo sapiens; identical to SEQ ID NO: 913733

SEQ ID NO: 913735 - protein, 581 aa, Homo sapiens; identical to SEQ ID NO: 913733

SEQ ID NO: 913736 - protein, 581 aa, Homo sapiens; identical to SEQ ID NO: 913733

SEQ ID NO: 913737 - protein, 581 aa, Homo sapiens; identical to SEQ ID NO: 913733

SEQ ID NO: 913738 - protein, 508 aa, Homo sapiens
MSEGESQTVLSSGSDPKEEEESEDESEILEESPCGRWQKRREEVNQRNVPGIDSAYLAMDTEEGVEVVWNEVQFSERKNYKLQEEKVRAVFDNLIQLEHLNIVKFHKYWADIKENKARVIFITEYMSSGSLKQFLKKTKKNHKTMNEKAWKRWCTQILSALSYLHSCDPPIIHGNLTCDTIFIQHNGLIKIGSVAPDTINNHVKTCREEQKNLHFFAPEYGEVTNVTTAVDIYSFGMCALEMAVLEIQGNGESSYVPQEAISSAIQLLEDPLQREFIQKCLQSEPARRPTARELLFHPALFEVPSLKLLAAHCIVGHQHMIPENALEEITKNMDTSAVLAEIPAGPGREPVQTLYSQSPALELDKFLEDVRNGIYPLTAFGLPRPQQPQQEEVTSPVVPPSVKTPTPEPAEVETRKVVLMQCNIESVEEGVKHHLTLLLKLEDKLNRHLSCDLMPNENIPELAAELVQLGFISEADQSRLTSLLEETLNKFNFARNSTLNSAAVTVSS

SEQ ID NO: 913739 - protein, 576 aa, Homo sapiens
GPQFGCAAERSCEGVAVIRGPGTRAGAEAQAAGRGVGSAGLSVPSSMSEGESQTVLSSGSDPKVESSSSAPGLTSVSPPVTSTTSAASPEEEEESEDESEILEESPCGRWQKRREEVNQRNVPGIDSAYLAMDTEEGVEVVWNEVQFSERKNYKLQEEKVRAVFDNLIQLEHLNIVKFHKYWADIKENKARVIFITEYMSSGSLKQFLKKTKKNHKTMNEKAWKRWCTQILSALSYLHSCDPPIIHGNLTCDTIFIQHNGLIKIGSVAPDTINNHVKTCREEQKNLHFFAPEYGEVTNVTTAVDIYSFGMCALEMAVLEIQGNGESSYVPQEAISSAIQLLEDPLQREFIQKCLQSEPARRPTARELLFHPALFEVPSLKLLAAHCIVGHQHMIPENALEEITKNMDTSAVLAEIPAGPGREPVQTLYSQSPALELDKFLEDVRNGIYPLTAFGLPRPQQPQQEEVTSPVVPPSVKTPTPEPAEVETRKVVLMQCNIESVEEGVKHHLTLLLKLEDKLNRHLSCDLMPNENIPELAAELVQLGFISEVRFLPSSALAAPMPSLLSAPILLSSSPPG

SEQ ID NO: 913740 - protein, 272 aa, Homo sapiens
MCALEMAVLEIQGNGESSYVPQEAISSAIQLLEDPLQREFIQKCLQSEPARRPTARELLFHPALFEVPSLKLLAAHCIVGHQHMIPENALEEITKNMDTSAVLAEIPAGPGREPVQTLYSQSPALELDKFLEDVRNGIYPLTAFGLPRPQQPQQEEVTSPVVPPSVKTPTPEPAEVETRKVVLMQCNIESVEEGVKHHLTLLLKLEDKLNRHLSCDLMPNENIPELAAELVQLGFISEADQSRLTSLLEETLNKFNFARNSTLNSAAVTVSS

SEQ ID NO: 913741 - protein, 481 aa, Homo sapiens
GPQFGCAAERSCEGVAVIRGPGTRAGAEAQAAGRGVGSAGLSVPSSMSEGESQTVLSSGSDPKVESSSSAPGLTSVSPPVTSTTSAASPEEEEESEDESEILEESPCGRWQKRREEVNQRNVPGIDSAYLAMDTEEGVEVVWNEVQFSERKNYKLQEHNGLIKIGSVAPDTINNHVKTCREEQKNLHFFAPEYGEVTNVTTAVDIYSFGMCALEMAVLEIQGNGESSYVPQEAISSAIQLLEDPLQREFIQKCLQSEPARRPTARELLFHPALFEVPSLKLLAAHCIVGHQHMIPENALEEITKNMDTSAVLAEIPAGPGREPVQTLYSQSPALELDKFLEDVRNGIYPLTAFGLPRPQQPQQEEVTSPVVPPSVKTPTPEPAEVETRKVVLMQCNIESVEEGVKHHLTLLLKLEDKLNRHLSCDLMPNENIPELAAELVQLGFISEADQSRLTSLLEETLNKFNFARNSTLNSAAVTVSS

SEQ ID NO: 913742 - protein, 326 aa, Homo sapiens
MVRLWVSPLLPVAPDTINNHVKTCREEQKNLHFFAPEYGEVTNVTTAVDIYSFGMCALEMAVLEIQGNGESSYVPQEAISSAIQLLEDPLQREFIQKCLQSEPARRPTARELLFHPALFEVPSLKLLAAHCIVGHQHMIPENALEEITKNMDTSAVLAEIPAGPGREPVQTLYSQSPALELDKFLEDVRNGIYPLTAFGLPRPQQPQQEEVTSPVVPPSVKTPTPEPAEVETRKVVLMQCNIESVEEGVKHHLTLLLKLEDKLNRHLSCDLMPNENIPELAAELVQLGFISEADQSRLTSLLEETLNKFNFARNSTLNSAAVTVSS

SEQ ID NO: 913743 - protein, 189 aa, Homo sapiens
MIPENALEEITKNMDTSAVLAEIPAGPGREPVQTLYSQSPALELDKFLEDVRNGIYPLTAFGLPRPQQPQQEEVTSPVVPPSVKTPTPEPAEVETRKVVLMQCNIESVEEGVKHHLTLLLKLEDKLNRHLSCDLMPNENIPELAAELVQLGFISEADQSRLTSLLEETLNKFNFARNSTLNSAAVTVSS

SEQ ID NO: 913744 - protein, 197 aa, Homo sapiens
PTPSCPPDMIPENALEEITKNMDTSAVLAEIPAGPGREPVQTLYSQSPALELDKFLEDVRNGIYPLTAFGLPRPQQPQQEEVTSPVVPPSVKTPTPEPAEVETRKVVLMQCNIESVEEGVKHHLTLLLKLEDKLNRHLSCDLMPNENIPELAAELVQLGFISEADQSRLTSLLEETLNKFNFARNSTLNSAAVTVSS

SEQ ID NO: 913745 - protein, 331 aa, Homo sapiens
GPQFGCAAERSCEGVAVIRGPGTRAGAEAQAAGRGVGSAGLSVPSSMSEGESQTVLSSGSDPKVESSSSAPGLTSVSPPVTSTTSAASPEEEEESEDESEILEESPCGRWQKRREEVNQRNVPGIDSAYLAMDTEEGVEVVWNEVQFSERKNYKLQEEKVRAVFDNLIQLEHLNIVKFHKYWADIKENKARVIFITEYMSSGSLKQFLKKTKKNHKTMNEKAWKRWCTQILSALSYLHSCDPPIIHGNLTCDTIFIQHNGLIKIGSVAPDTINNHVKTCREEQKNLHFFAPEYGEVTNVTTAVDIYSFGMCALEMAVLMSSCAHMRKSSRL

SEQ ID NO: 913746 - protein, 89 aa, Homo sapiens
ISSVPHRSQEGVNTHLTLLLKLEDKLNRHLSCDLMPNENIPELAAELVQLGFISEADQSRLTSLLEETLNKFNFARNSTLNSAAVTVSS

SEQ ID NO: 913747 - protein, 85 aa, Homo sapiens
FVIQRSPAGLFLTLLLKLEDKLNRHLSCDLMPNENIPELAAELVQLGFISEADQSRLTSLLEETLNKFNFARNSTLNSAAVTVSS

SEQ ID NO: 913748 - protein, 201 aa, Homo sapiens
GPQFGCAAERSCEGVAVIRGPGTRAGAEAQAAGRGVGSAGLSVPSSMSEGESQTVLSSGSDPKVESSSSAPGLTSVSPPVTSTTSAASPEEEEESEDESEILEESPCGRWQKRREEVNQRNVPGIDSAYLAMDTEEGVEVVWNEVQFSERKNYKLQEEKVRAVFDNLIQLEHLNIVKFHKYWADISVNSCPLHNLSCFPKG

SEQ ID NO: 913749 - protein, 99 aa, Homo sapiens
SVQRIPSIICASGHLSFGMCALEMAVLEIQGNGESSYVPQEAISSAIQLLEDPLQRVRIFRITPSSTDLQMSSGFSSFVPTGYMLLRAREHNRKDTKNL

SEQ ID NO: 913750 - protein, 535 aa, Homo sapiens
MSEGESQTVLSSGSDPKVESSSSAPGLTSVSPPVTSTTSAASPEEEEESEDESEILEESPCGRWQKRREEVNQRNVPGIDSAYLAMDTEEGVEVVWNEVQFSERKNYKLQEEKVRAVFDNLIQLEHLNIVKFHKYWADIKENKARVIFITEYMSSGSLKQFLKKTKKNHKTMNEKAWKRWCTQILSALSYLHSCDPPIIHGNLTCDTIFIQHNGLIKIGSVAPDTINNHVKTCREEQKNLHFFAPEYGEVTNVTTAVDIYSFGMCALEMAVLEIQGNGESSYVPQEAISSAIQLLEDPLQREFIQKCLQSEPARRPTARELLFHPALFEVPSLKLLAAHCIVGHQHMIPENALEEITKNMDTSAVLAEIPAGPGREPVQTLYSQSPALELDKFLEDVRNGIYPLTAFGLPRPQQPQQEEVTSPVVPPSVKTPTPEPAEVETRKVVLMQCNIESVEEGVKHHLTLLLKLEDKLNRHLSCDLMPNENIPELAAELVQLGFISEADQSRLTSLLEETLNKFNFARNSTLNSAAVTVSS

SEQ ID NO: 913751 - protein, 576 aa, Homo sapiens; identical to SEQ ID NO: 913739

SEQ ID NO: 913752 - protein, 581 aa, Homo sapiens; identical to SEQ ID NO: 913733

SEQ ID NO: 913753 - protein, 484 aa, Homo sapiens
GPQFGCAAERSCEGVAVIRGPGTRAGAEAQAAGRGVGSAGLSVPSSMSEGESQTVLSSGSDPKVESSSSAPGLTSVSPPVTSTTSAASPEEEEESEDESEILEESPCGRWQKRREEVNQRNVPGIDSAYLAMDTEEGVEVVWNEVQFSERKNYKLQEEKVRAVFDNLIQLEHLNIVKFHKYWADIKENKARVIFITEYMSSGSLKQFLKKTKKNHKTMNEKAWKRWCTQILSALSYLHSCDPPIIHGNLTCDTIFIQHNGLIKIGSVAPDTINNHVKTCREEQKNLHFFAPEYGDMIPENALEEITKNMDTSAVLAEIPAGPGREPVQTLYSQSPALELDKFLEDVRNGIYPLTAFGLPRPQQPQQEEVTSPVVPPSVKTPTPEPAEVETRKVVLMQCNIESVEEGVKHHLTLLLKLEDKLNRHLSCDLMPNENIPELAAELVQLGFISEADQSRLTSLLEETLNKFNFARNSTLNSAAVTVSS

SEQ ID NO: 913754 - protein, 591 aa, Homo sapiens
GPQFGCAAERSCEGVAVIRGPGTRAGAEAQAAGRGVGSAGLSVPSSMSEGESQTVLSSGSDPKVESSSSAPGLTSVSPPVTSTTSAASPEEEEESEDESEILEESPCGRWQKRREEVNQRNVPGIDSAYLAMDTEEGVEVVWNEVQFSERKNYKLQEEKVRAVFDNLIQLEHLNIVKFHKYWADIKENKARVIFITEYMSSGSLKQFLKKTKKNHKTMNEKAWKRWCTQILSALSGPSNSPVPPSYLHSCDPPIIHGNLTCDTIFIQHNGLIKIGSVAPDTINNHVKTCREEQKNLHFFAPEYGEVTNVTTAVDIYSFGMCALEMAVLEIQGNGESSYVPQEAISSAIQLLEDPLQREFIQKCLQSEPARRPTARELLFHPALFEVPSLKLLAAHCIVGHQHMIPENALEEITKNMDTSAVLAEIPAGPGREPVQTLYSQSPALELDKFLEDVRNGIYPLTAFGLPRPQQPQQEEVTSPVVPPSVKTPTPEPAEVETRKVVLMQCNIESVEEGVKHHLTLLLKLEDKLNRHLSCDLMPNENIPELAAELVQLGFISEADQSRLTSLLEETLNKFNFARNSTLNSAAVTVSS

SEQ ID NO: 913755 - protein, 397 aa, Homo sapiens
IKENKAKVIFITEYMSSGSLKQFLKKTKKNHKTMNEKAWKRWCTQILSALSYLHSCDPPIIHGNLTCDTIFIQHNGLIKIGSVAPDTINNHVKTCREEQKNLHFFAPEYGEVTNVTTAVDIYSFGMCALEMAVLEIQGNGESSYVPQEAISSAIQLLEDPLQREFIQKCLQSEPARRPTARELLFHPALFEVPSLKLLAAHCIVGHQHMIPENALEEITKNMDTSAVLAEIPAGPGREPVQTLYSQSPALELDKFLEDVRNGIYPLTAFGLPRPQQPQQEEVTSPVVPPSVKTPTPEPAEVETRKVVLMQCNIESVEEGVKHHLTLLLKLEDKLNRHLSCDLMPNENIPELAAELVQLGFISEADQSRLTSLLEETLNKFNFARNSTLNSAAVTVSS

SEQ ID NO: 913756 - protein, 421 aa, Homo sapiens
EIHAFSGIPRNDQQLVSALRYPYFQVGHPLASYNLGPGTTWDVLVPGFLVRRRTTETMNEKAWKRWCTQILSALSYLHSCDPPIIHGNLTCDTIFIQHNGLIKIGSVAPDTINNHVKTCREEQKNLHFFAPEYGEVTNVTTAVDIYSFGMCALEMAVLEIQGNGESSYVPQEAISSAIQLLEDPLQREFIQKCLQSEPARRPTARELLFHPALFEVPSLKLLAAHCIVGHQHMIPENALEEITKNMDTSAVLAEIPAGPGREPVQTLYSQSPALELDKFLEDVRNGIYPLTAFGLPRPQQPQQEEVTSPVVPPSVKTPTPEPAEVETRKVVLMQCNIESVEEGVKHHLTLLLKLEDKLNRHLSCDLMPNENIPELAAELVQLGFISEADQSRLTSLLEETLNKFNFARNSTLNSAAVTVSS

SEQ ID NO: 913757 - protein, 225 aa, Homo sapiens
PVIIRRSARELLFHPALFEVPSLKLLAAHCIVGHQHMIPENALEEITKNMDTSAVLAEIPAGPGREPVQTLYSQSPALELDKFLEDVRNGIYPLTAFGLPRPQQPQQEEVTSPVVPPSVKTPTPEPAEVETRKVVLMQCNIESVEEGVKHHLTLLLKLEDKLNRHLSCDLMPNENIPELAAELVQLGFISEADQSRLTSLLEETLNKFNFARNSTLNSAAVTVSS

SEQ ID NO: 913758 - protein, 176 aa, Homo sapiens [sequence omitted]

SEQ ID NO: 913759 - protein, 259 aa, Homo sapiens
YYKDPSHEGSSIPLSRYELLTRKAQRLPMEALQVTCLDSAVGVIGPSHSPCRLMYHEDVSELCRKPQCSLPRIEQQGIGSLRLVLVARKSMTRVHVTHKTNSRLMYSQSPALELDKFLEDVRNGIYPLTAFGLPRPQQPQQEEVTSPVVPPSVKTPTPEPAEVETRKVVLMQCNIESVEEGVKHHLTLLLKLEDKLNRHLSCDLMPNENIPELAAELVQLGFISEADQSRLTSLLEETLNKFNFARNSTLNSAAVTVSS

SEQ ID NO: 913760 - protein, 289 aa, Homo sapiens
  misc_feature (224)..(224): Xaa can be any naturally occurring amino acid
  misc_feature (279)..(279): Xaa can be any naturally occurring amino acid
GPQFGCAAERSCEGVAVIRGPGTRAGAEAQAAGRGVGSAGLSVPSSMSEGESQTVLSSGSDPKVESSSSAPGLTSVSPPVTSTTSAASPEEEEESEDESEILEESPCGRWQKRREEVNQRNVPGIDSAYLAMDTEEGVEVVWNEVQFSERKNYKLQEEKVRAVFDNLIQLEHLNIVKFHKYWADIKENKARVIFITEYMSSGSLKQFLKKTKKNHKTMNEKAWXRWVHTNPLCPYSYLHSLWTPPSIQWGNLDPVDNQSSIQATNGTHQRIGVLLGSLXNQFKQINGVR

SEQ ID NO: 913761 - protein, 135 aa, Homo sapiens
TPPSASRLDASTLGSAAAAAAAGRCGRPAPAPAAARQSVSQSVSQSVSQSVTERAARELLAVAASLARERRAWGGGGGSGWRSASGGFLARGRGKADRLPRWSSYQMKKLIMVLKKTVTRKIRTWTKCLEPGLEN

SEQ ID NO: 913762 - protein, 556 aa, Homo sapiens
MEQLSDEEIDHGAEEDSDKEDQDLDKMFGAWLGELDKLTQSLDSDKPMEPVKRSPLRQETNMANFSYRFSIYNLNEALNQGETVDLDALMADLCSIEQELSSIGSGNSKRQITETKATQKLPVSRHTLKHGTLKGLSSSSNRIAKPSHASYSLDDVTAQLEQASLSMDEAAQQSVLEDTKPLVTNQHRRTASAGTVSDAEVHSISNSSHSSITSAASSMDSLDIDKVTRPQELDLTHQGQPITEEEQAAKLKAEKIRVALEKIKEAQVKKLVIRVHMSDDSSKTMMVDERQTVRQVLDNLMDKSHCGYSLDWSLVETVSELQMERIFEDHENLVENLLNWTRDSQNKLIFMERIEKYALFKNPQNYLLGKKETAEMADRNKEVLLEECFCGSSVTVPEIEGVLWLKDDGKKSWKKRYFLLRASGIYYVPKGKAKVSRDLVCFLQLDHVNVYYGQDYRNKYKAPTDYCLVLKHPQIQKKSQYIKYLCCDDVRTLHQWVNGIRIAKYGKQLYMNYQEALKRTESAYDWTSLSSSSIKSGSSSSSIPGSSKCFKALFCD

SEQ ID NO: 913763 - protein, 649 aa, Homo sapiens
MEQLSDEEIDHGAEEDSDKEDQDLDKMFGAWLGELDKLTQSLDSDKPMEPVKRSPLRQETNMANFSYRFSIYNLNEALNQGETVDLDALMADLCSIEQELSSIGSGNSKRQITETKATQKLPVSRHTLKHGTLKGLSSSSNRIAKPSHASYSLDDVTAQLEQASLSMDEAAQQSVLEDTKPLVTNQHRRTASAGTVSDAEVHSISNSSHSSITSAASSMDSLDIDKVTRPQELDLTHQGQPITEHAISLRCSSKQAKRHIDFTEEQAELTPHSYLDRETSLLLRNIAGKPSHLLTKEEQAAKLKAEKIRVALEKIKEAQVKKLVIRVHMSDDSSKTMMVDERQTVRQVLDNLMDKSHCGYSLDWSLVETVSELQMERIFEDHENLVENLLNWTRDSQNKLIFMERIEKYALFKNPQNYLLGKKETAEMADRNKEVLLEECFCGSSVTVPEIEGVLWLKDDGKKSWKKRYFLLRASGIYYVPKGKAKVSRDLVCFLQLDHVNVYYGQDYRNKYKAPTDYCLVLKHPQIQKKSQYIKYLCCDDVRTLHQWVNGIRIAKYGKQLYMNYQEALKRTESAYDWTSLSSSSIKSGSSSSSIPESQSNHSNQSDSGVSDTQPAGHVRSQSIVSSVFSEAWKRGTQLEESSKVTASF

SEQ ID NO: 913764 - protein, 592 aa, Homo sapiens
MEQLSDEEIDHGAEEDSDKEDQDLDKMFGAWLGELDKLTQSLDSDKPMEPVKRSPLRQETNMANFSYRFSIYNLNEALNQGETVDLDALMADLCSIEQELSSIGSGNSKRQITETKATQKLPVSRHTLKHGTLKGLSSSSNRIAKPSHASYSLDDVTAQLEQASLSMDEAAQQSVLEDTKPLVTNQHRRTASAGTVSDAEVHSISNSSHSSITSAASSMDSLDIDKVTRPQELDLTHQGQPITEEEQAAKLKAEKIRVALEKIKEAQVKKLVIRVHMSDDSSKTMMVDERQTVRQVLDNLMDKSHCGYSLDWSLVETVSELQMERIFEDHENLVENLLNWTRDSQNKLIFMERIEKYALFKNPQNYLLGKKETAEMADRNKEVLLEECFCGSSVTVPEIEGVLWLKDDGKKSWKKRYFLLRASGIYYVPKGKAKVSRDLVCFLQLDHVNVYYGQDYRNKYKAPTDYCLVLKHPQIQKKSQYIKYLCCDDVRTLHQWVNGIRIAKYGKQLYMNYQEALKRTESAYDWTSLSSSSIKSGSSSSSIPESQSNHSNQSDSGVSDTQPAGHVRSQSIVSSVFSEAWKRGTQLEESSK

SEQ ID NO: 913765 - protein, 375 aa, Homo sapiens
MSSHKGSVVAQGNGAPASNREADTVELAELGPLLEEKGKRVIANPPKAEEEQTCPVPQEEEEEVRVLTLPLQAHHAMEKMEEFVYKVWEGRWRVIPYDVLPDWLKDNDYLLHGHRPPMPSFRACFKSIFRIHTETGNIWTHLLGFVLFLFLGILTMLRPNMYFMAPLQEKVVFGMFFLGAVLCLSFSWLFHTVYCHSEKVSRTFSKLDYSGIALLIMGSFVPWLYYSFYCSPQPRLIYLSIVCVLGISAIIVAQWDRFATPKHRQTRAGVFLGLGLSGVVPTMHFTIAEGFVKATTVGQMGWFFLMAVMYITGAGLYAARIPERFFPGKFDIWFQSHQIFHVLVVAAAFVHFYGVSNLQEFRYGLEGGCTDDTLL

SEQ ID NO: 913766 - protein, 375 aa, Homo sapiens; identical to SEQ ID NO: 913765

SEQ ID NO: 913767 - protein, 375 aa, Homo sapiens; identical to SEQ ID NO: 913765

SEQ ID NO: 913768 - protein, 375 aa, Homo sapiens; identical to SEQ ID NO: 913765

SEQ ID NO: 913769 - protein, 375 aa, Homo sapiens; identical to SEQ ID NO: 913765

SEQ ID NO: 913770 - protein, 120 aa, Homo sapiens
PSTVPEIPRQTRAGVFLGLGLSGVVPTMHFTIAEGFVKATTVGQMGWFFLMAVMYITGAGLYAARIPERFFPGKFDIWFQSHQIFHVLVVAAAFVHFYGVSNLQEFRYGLEGGCTDDTLL

SEQ ID NO: 913771 - protein, 112 aa, Homo sapiens
HHCGAVHETRAGVFLGLGRATCYIAEGFVKATTVGQMGWFFLMAVMYITGAGLYAARIPERFFPGKFDIWFQSHQIFHVLVVAAAFVHFYGVSNLQEFRYGLEGGCTDDTLL

SEQ ID NO: 913772 - protein, 206 aa, Homo sapiens [sequence omitted]

SEQ ID NO: 913773 - protein, 375 aa, Homo sapiens; identical to SEQ ID NO: 913765

SEQ ID NO: 913774 - protein, 375 aa, Homo sapiens; identical to SEQ ID NO: 913765

SEQ ID NO: 913775 - protein, 375 aa, Homo sapiens; identical to SEQ ID NO: 913765

SEQ ID NO: 913776 - protein, 130 aa, Homo sapiens
MSSHKGSVVAQGNGAPASNREADTVELAELGPLLEEKGKRVIANPPKAEEEQTCPVPQEEEEEVRVLTLPLQAHHAMEKMEEFVYKGELCPLALLFLLLLPTATAHLPLHRLCPGHFCHHCGAVGPVCHS

SEQ ID NO: 913777 - protein, 134 aa, Homo sapiens
  misc_feature (5)..(5): Xaa can be any naturally occurring amino acid
RLVPXGVWISSTTRSGFATPKHRQTRAGVFLGLGLSGVVPTMHFTIAEGFVKATTVGQMGWFFLMAVMYITGAGLYAARIPERFFPGKFDIWFQSHQIFHVLVVAAAFVHFYGVSNLQEFRYGLEGGCTDDTLL

SEQ ID NO: 913778 - protein, 328 aa, Homo sapiens
MSSHKGSVVAQGNGAPASNREADTVELAELGPLLEEKGKRVIANPPKAEEEQTCPVPQEEEEEVRVLTLPLQAHHAMEKMEEFVYKVWEGRWRVIPYDVLPDWLKDNDYLLHGHRPPMPSFRACFKSIFRIHTETGNIWTHLLGFVLFLFLGILTMLRPNMYFMAPLQEKVVFGMFFLGAVLCLSFSWLFHTVYCHSEKVSRTFSKLDYSGIALLIMGSFVPWLYYSFYCSPQPRLIYLSIVCVLGISAIIVAQWDRFATPKHRQTRAGVFLGLGLSGKFVGWRPPKRYGIKYCLVARGQERLHGGDDKEEKPERWEYIGVVTKRVEM

SEQ ID NO: 913779 - protein, 217 aa, Homo sapiens
LSRGSLVLPQSMPTDIKKSSYKKLSKFLQQMQQEQIIQVKELSKGVESIVAVDWKHPRITSFVIPEPSPTSQTIQEGSREQPYHPPDIKPLYCVPASMTLLFQESGHKKGSFLEGSEVRTIVINYAKKNDLVDADNKNLVRLDPILCDCILEKNEQHTVMKLPWDSLLTRCLEKLQPAYQVTLPGQEPIVKKGRICPIDITLAQRASNKKVILERHN

SEQ ID NO: 913780 - protein, 584 aa, Homo sapiens
MFAKAFRVKSNTAIKGSDRRKLRADVTTAFPTLGTDQVSELVPGKEELNIVKLYAHKGDAVTVYVSGGNPILFELEKNLYPTVYTLWSYPDLLPTFTTWPLVLEKLVGGADLMLPGLVMPPAGLPQVQKGDLCAISLVGNRAPVAIGVAAMSTAEMLTSGLKGRGFSVLHTYQDHLWRSGNKSSPPSIAPLALDSADLSEEKGSVQMDSTLQGDMRHMTLEGEEENGEVHQAREDKSLSEAPEDTSTRGLNQDSTDSKTLQEQMDELLQQCFLHALKCRVKKADLPLLTSTFLGSHMFSCCPEGRQLDIKKSSYKKLSKFLQQMQQEQIIQVKELSKGVESIVAVDWKHPRITSFVIPEPSPTSQTIQEGSREQPYHPPDIKPLYCVPASMTLLFQESGHKKGSFLEGSEVRTIVINYAKKNDLVDADNKNLVRLDPILCDCILEKNEQHTVMKLPWDSLLTRCLEKLQPAYQVTLPGQEPIVKKGRICPIDITLAQRASNKKVTVVRNLEAYGLDPYSVAAILQQRCQASTTVNPAPGAKDSLQVQIQGNQVHHLGWLLLEEYQLPRKHIQGLEKALKPGKKK

SEQ ID NO: 913781 - protein, 434 aa, Homo sapiens
MSTAEMLTSGLKGRGFSVLHTYQDHLWRSGNKSSPPSIAPLALDSADLSEEKGSVQMDSTLQGDMRHMTLEGEEENGEVHQAREDKSLSEAPEDTSTRGLNQDSTDSKTLQEQMDELLQQCFLHALKCRVKKADLPLLTSTFLGSHMFSCCPEGRQLDIKKSSYKKLSKFLQQMQQEQIIQVKELSKGVESIVAVDWKHPRITSFVIPEPSPTSQTIQEGSREQPYHPPDIKPLYCVPASMTLLFQESGHKKGSFLEGSEVRTIVINYAKKNDLVDADNKNLVRLDPILCDCILEKNEQHTVMKLPWDSLLTRCLEKLQPAYQVTLPGQEPIVKKGRICPIDITLAQRASNKKVTVVRNLEAYGLDPYSVAAILQQRCQASTTVNPAPGAKDSLQVQIQGNQVHHLGWLLLEEYQLPRKHIQGLEKALKPGKKK

SEQ ID NO: 913782 - protein, 584 aa, Homo sapiens; identical to SEQ ID NO: 913780

SEQ ID NO: 913783 - protein, 519 aa, Homo sapiens
MFAKAFRVKSNTAIKGSDRRKLRADVTTAFPTLGTDQVSELVPGKEELNIVKLYAHKGDAVTVYVSGGNPILFELEKNLYPTVYTLWSYPDLLPTFTTWPLVLEKLVGGADLMLPGLVMPPAGLPQVQKGDLCAISLVGNRAPVAIGVAAMSTAEMLTSGLKGRGFSVLHTYQDHLWRSGNKSSPPSIAPLALDSADLSEEKGSVQMDSTLQGDMRHMTLEGEEENGEVHQAREDKSLSEAPEDTSTRGLNQDSTDSKTLQEQMDELLQQCFLHALKCRVKKADLPLLTSTFLGSHMFSCCPEGRQLDIKKSSYKKLSKFLQQMQQEQIIQVKELSKGVESIVAVDWKHPRITSFVIPEPSPTSQTIQEGSREQPYHPPDIKPLYCVPASMTLLFQESGHKKGSFLEGSEVRTIVINYAKKNDLVDADNKNLVRLDPILCDCILEKNEQHTVMKLPWDSLLTRCLEKLQPAYQVTLPGQEPIVKKGRICPIDITLAQRASNKKITKLRLSLRNMPVVPC

SEQ ID NO: 913784 - protein, 510 aa, Homo sapiens
MFAKAFRVKSNTAIKGSDRRKLRADVTTAFPTLGTDQVSELVPGKEELNIVKLYAHKGDAVTVYVSGGNPILFELEKNLYPTVYTLWSYPDLLPTFTTWPLVLEKLVGGADLMLPGLVMPPAGLPQVQKGDLCAISLVGNRAPVAIGVAAMSTAEMLTSGLKGRGFSVLHTYQDHLWRSGNKSSPPSIAPLALDSADLSEEKGSVQMDSTLQGDMRHMTLEGEEENGEVHQAREDKSLSEAPEDTSTRGLNQDSTDSKTLQEQMDELLQQCFLHALKCRVKKADLPLLTSTFLGSHMFSCCPEGRQLDIKKSSYKKLSKFLQQMQQEQIIQVKELSKGVESIVAVDWKHPRITSFVIPEPSPTSQTIQEGSREQPYHPPDIKPLYCVPASMTLLFQESGHKKGSFLEGSEVRTIVINYAKKNDLVDADNKNLVRLDPILCDCILEKNEQHTVMKLPWDSLLTRCLEKLQPAYQVTLPGQEPIVKKGRICPIDITLAQRASNKKVILERHN

SEQ ID NO: 913785 - protein, 401 aa, Homo sapiens
MFAKAFRVKSNTAIKGSDRRKLRADVTTAFPTLGTDQVSELVPGKEELNIVKLYAHKGDAVTVYVSGGNPILFELEKNLYPTVYTLWSYPDLLPTFTTWPLVLEKLVGGADLMLPGLVMPPAGLPQVQKGDLCAISLVGNRAPVAIGVAAMSTAEMLTSGLKGRGFSVLHTYQDHLWRSGNKSSPPSIAPLALDSADLSEEKGSVQMDSTLQGDMRHMTLEGEEENGEVHQAREDKSLSEAPEDTSTRGLNQDSTDSKTLQEQMDELLQQCFLHALKCRVKKADLPLLTSTFLGSHMFSCCPEGRQLDIKKSSYKKLSKFLQQMQQEQIIQVKELSKGVESIVAVDWKHPRITSFVIPEPSPTSQTIQEGSREQPYHPPDIKPLYCVPASMTLLFQESGHK

SEQ ID NO: 913786 - protein, 333 aa, Homo sapiens
MFAKAFRVKSNTAIKGSDRRKLRADVTTAFPTLGTDQVSELVPGKEELNIVKLYAHKGDAVTVYVSGGNPILFELEKNLYPTVYTLWSYPDLLPTFTTWPLVLEKLVGGADLMLPGLVMPPAGLPQVQKGDLCAISLVGNRAPVAIGVAAMSTAEMLTSGLKGRGFSVLHTYQDHLWRSGNKSSPPSIAPLALDSADLSEEKGSVQMDSTLQGDMRHMTLEGEEENGEVHQAREDKSLSEAPEDTSTRGLNQDSTDSKTLQEQMDELLQQCFLHALKCRVKKADLPLLTSTFLGSHMFSCCPEGRQTGHNRSHSYKKSLSPGSQLQTGARLYR

SEQ ID NO: 913787 - protein, 202 aa, Homo sapiens
MFAKAFRVKSNTAIKGSDRRKLRADVTTAFPTLGTDQVSELVPGKEELNIVKLYAHKGDAVTVYVSGGNPILFELEKNLYPTVYTLWSYPDLLPTFTTWPLVLEKLVGGADLMLPGLVMPPAGLPQVQKGDLCAISLVGNRAPVAIGVAAMSTAEMLTSGLKGRGFSVLHTYQDHLWEETRFILPISEMKKLRHGTFRGPEL

SEQ ID NO: 913788 - protein, 584 aa, Homo sapiens; identical to SEQ ID NO: 913780

SEQ ID NO: 913789 - protein, 556 aa, Homo sapiens
MFAKAFRVKSNTAIKGSDRRKLRADVTTAFPTLGTDQVSELVPGKEELNIVKLYAHKGDAVTVYVSGGNPILFELEKNLYPTDLMLPGLVMPPAGLPQVQKGDLCAISLVGNRAPVAIGVAAMSTAEMLTSGLKGRGFSVLHTYQDHLWRSGNKSSPPSIAPLALDSADLSEEKGSVQMDSTLQGDMRHMTLEGEEENGEVHQAREDKSLSEAPEDTSTRGLNQDSTDSKTLQEQMDELLQQCFLHALKCRVKKADLPLLTSTFLGSHMFSCCPEGRQLDIKKSSYKKLSKFLQQMQQEQIIQVKELSKGVESIVAVDWKHPRITSFVIPEPSPTSQTIQEGSREQPYHPPDIKPLYCVPASMTLLFQESGHKKGSFLEGSEVRTIVINYAKKNDLVDADNKNLVRLDPILCDCILEKNEQHTVMKLPWDSLLTRCLEKLQPAYQVTLPGQEPIVKKGRICPIDITLAQRASNKKVTVVRNLEAYGLDPYSVAAILQQRCQASTTVNPAPGAKDSLQVQIQGNQVHHLGWLLLEEYQLPRKHIQGLEKALKPGKKK

SEQ ID NO: 913790 - protein, 460 aa, Homo sapiens
MFAKAFRVKSNTAIKGSDRRKLRADVTTAFPTLGTDQVSELVPGKEELNIVKLYAHKGDAVTVYVSGGNPILFELEKNLYPTVYTLWSYPDLLPTFTTWPLVLEKLVGGADLMLPGLVMPPAGLPQVQKGDLCAISLVGNRAPVAIGVAAMSTAEMLTSGLKGRGFSVLHTYQDHLCPEGRQLDIKKSSYKKLSKFLQQMQQEQIIQVKELSKGVESIVAVDWKHPRITSFVIPEPSPTSQTIQEGSREQPYHPPDIKPLYCVPASMTLLFQESGHKKGSFLEGSEVRTIVINYAKKNDLVDADNKNLVRLDPILCDCILEKNEQHTVMKLPWDSLLTRCLEKLQPAYQVTLPGQEPIVKKGRICPIDITLAQRASNKKVTVVRNLEAYGLDPYSVAAILQQRCQASTTVNPAPGAKDSLQVQIQGNQVHHLGWLLLEEYQLPRKHIQGLEKALKPGKKK

SEQ ID NO: 913791 - protein, 455 aa, Homo sapiens
MFAKAFRVKSNTAIKGSDRRKLRADVTTAFPTLGTDQVSELVPGKEELNIVKLYAHKGDAVTVYVSGGNPILFELEKNLYPTVYTLWSYPDLLPTFTTWPLVLEKLVGGADLMLPGLVMPPAGLPQVQKGDLCAISLVGNRAPVAIGVAAMSTAEMLTSGLKGRGFSVLHTYQDHLWRSGNKSSPPSIAPLALDSADLSEEKGSVQMDSTLQGDMRHMTLEGEEENGEVHQAREDKSLSEAPEDTSTRGLNQDSTDSKTLQEQMDELLQQCFLHALKCRVKKADLPLLTSTFLGSHMFSCCPEGRQLDIKKSSYKKLSKFLQQMQQEQIIQVKELSKGVESIVAVDWKHPRITSFVIPEPSPTSQTIQEGSREQPYHPPDIKPLYCVPASMTLLFQESGHKKGSFLEGSEVRTIVINYAKKNDLVDADNKNLVRLDPILCDCMRVHFSLRCSQST

SEQ ID NO: 913792 - protein, 324 aa, Homo sapiens
MFAKAFRVKSNTAIKGSDRRKLRADVTTAFPTLGTDQVSELVPGKEELNIVKLYAHKGDAVTVYVSGGNPILFELEKNLYPTVYTLWSYPDLLPTFTTWPLVLEKLVGGADLMLPGLVMPPAGLPQVQKGDLCAISLVGNRAPVAIGVAAMSTAEMLTSGLKGRGFSVLHTYQDHLWRSGNKSSPPSIAPLALDSADLSEEKGSVQMDSTLQGDMRHMTLEGEEENGEVHQAREDKSLSEAPEDTSTRGLNQDSTDSKTLQEQMDELLQQCFLHALKCRVKKADLPLLTSTFLGSHMFSCCPEGRQLDIKKSSYKKEGELSGGQ

SEQ ID NO: 913793 - protein, 118 aa, Homo sapiens
EPSENTGAQKAAEALEGPLEGRECSHHRQSLSPLSPQVTVVRNLEAYGLDPYSVAAILQQRCQASTTVNPAPGAKDSLQVQIQGNQVHHLGWLLLEEYQLPRKHIQGLEKALKPGKKK

SEQ ID NO: 913794 - protein, 233 aa, Homo sapiens
MRRGAPQDQELVGPGPPGRGSRGAPPPLGPVVPVLVFPPDLVFRADQRSGPRQLLTLYNPTGTALRFRVLCTAPAKYTVFDAEGYVKPQSCIDIVIRHVAPIPSHYDVQDRFRIELSEEGAEGRVVGRKDITSILRAPAYPLELQGQPDPAPRPGPPAGTPPPTARHFQEHPRQQLATSSFLLFLLTGIVSVAFLLLPLPDELGSQLPQVLHVSLGQKLVAAYVLASHMVSSD

SEQ ID NO: 913795 - protein, 235 aa, Homo sapiens
MRRGAPQDQELVGPGPPGRGSRGAPPPLGPVVPVLVFPPDLVFRADQRSGPRQLLTLYNPTGTALRFRVLCTAPAKYTVFDAEGYVKPQSCIDIVIRHVAPIPSHYDVQDRFRIELSEEGAEGRVVGRKDITSILRAPAYPLELQGQPDPAPRPGPPAGTPPPTARHFQEHPRQQLATSSFLLFLLTGIVSVAFLLLPLPDELGSQLPQVLHVSLGQKLVAAYVLGLLTMVFLRT

SEQ ID NO: 913796 - protein, 225 aa, Homo sapiens
MRRGAPQDQELVGPGPPGRGSRGAPPPLGPVVPVLVFPPDLVFRADQRSGPRQLLTLYNPTGTALRFRVLCTAPAKYTVFDAEGYVKPQSCIDIHYDVQDRFRIELSEEGAEGRVVGRKDITSILRAPAYPLELQGQPDPAPRPGPPAGTPPPTARHFQEHPRQQLATSSFLLFLLTGIVSVAFLLLPLPDELGSQLPQVLHVSLGQKLVAAYVLGLLTMVFLRT

SEQ ID NO: 913797 - protein, 221 aa, Homo sapiens
MSDRPEPACAPPPLGPVVPVLVFPPDLVFRADQRSGPRQLLTLYNPTGTALRFRVLCTAPAKYTVFDAEGYVKPQSCIDIVIRHVAPIPSHYDVQDRFRIELSEEGAEGRVVGRKDITSILRAPAYPLELQGQPDPAPRPGPPAGTPPPTARHFQEHPRQQLATSSFLLFLLTGIVSVAFLLLPLPDELGSQLPQVLHVSLGQKLVAAYVLGLLTMVFLRT

SEQ ID NO: 913798 - protein, 235 aa, Homo sapiens; identical to SEQ ID NO: 913795

SEQ ID NO: 913799 - protein, 233 aa, Homo sapiens
MRRGAPQDQELVGPGPPGRGSRGAPPPLGPVVPVLVFPPDLVFRADQRSGPRQLLTLYNPTGTALRFRVLCTAPAKYTVFDAEGYVKPQSCIDIVIRHVAPIPSHYDVQDRFRIELSEEGAEGRVVGRKDITSILRAPAYPLELQGQPDPAPRPGPPAGTPPPTARHFQEHPRQQLATSSFLLFLLTGIVSVAFLLLPLPDELGSQLPQVLHVSLGQKLVAAYVLGRVLRQPL

SEQ ID NO: 913800 - protein, 193 aa, Homo sapiens [sequence omitted]

SEQ ID NO: 913801 - protein, 129 aa, Homo sapiens
MRRGAPQDQELVGPGPPGRGSRGAPPPLGPVVPVLVFPPDLVFRADQRSGPRQLLTLYNPTGTALRFRVLCTAPAKYTVFDAEGYVKPQSCIDIVMLIPYLASYPLLFPAYSPLLPDKKHPGICTHFPS

SEQ ID NO: 913802 - protein, 235 aa, Homo sapiens; identical to SEQ ID NO: 913795

SEQ ID NO: 913803 - protein, 235 aa, Homo sapiens; identical to SEQ ID NO: 913795

SEQ ID NO: 913804 - protein, 235 aa, Homo sapiens; identical to SEQ ID NO: 913795

SEQ ID NO: 913805 - protein, 182 aa, Homo sapiens
MTHMAGLVCVCLYPPVLCTAPAKYTVFDAEGYVKPQSCIDIVIRHVAPIPSHYDVQDRFRIELSEEGAEGRVVGRKDITSILRAPAYPLELQGQPDPAPRPGPPAGTPPPTARHFQEHPRQQLATSSFLLFLLTGIVSVAFLLLPLPDELGSQLPQVLHVSLGQKLVAAYVLGLLTMVFLRT

SEQ ID NO: 913806 - protein, 235 aa, Homo sapiens; identical to SEQ ID NO: 913795

SEQ ID NO: 913807 - protein, 233 aa, Homo sapiens
MRRGAPQDQELVGPGPPGRGSRGAPPPLGPVVPVLVFPPDLVFRADQRSGPRQLLTLYNPTGTALRFRVLCTAPAKYTVFDAEGYVKPQSCIDIVIRHVAPIPSHYDVQDRFRIELSEEGAEGRVVGRKDITSILRAPAYPLELQGQPPPATGHQLLPPLLADGDCVCGLPAAPTPGRTRQPAASSPARLPGTKVGGRLRLGPPHHGVPPDLSSVLNPQPTPPSLGRVLRQPL

SEQ ID NO: 913808 - protein, 124 aa, Homo sapiens
WGEAQISLDYCLIHPNGLLSYLGTSVIRHVAPIPSHYDVQDRFRIELSEEGAEGRVVGRKDITSILRAPAYPLELQGQPDPAPRPGPPAGTPPPTARHFQERELGDWDLEFCREGGTSISLEMR

SEQ ID NO: 913809 - protein, 137 aa, Homo sapiens
CSGLRVGVKSPLCFRFLAVGFICLTILSCCFLQQTKERVKLLIQLADGFCEKGHAHAAEIKKCVTAVDKRYRDFSLRMEKYRTSLEKALGISSDSNKSSKSLQLDIIPASIPGSEVKLRDAAHELNEEKRKSARRKE

SEQ ID NO: 913810 - protein, 2928 aa, Homo sapiens
AAAGAAAAMSGSSGGAAAPAASSGPAAAASAAGSGCGGGAGEGAEEAAKDLADIAAFFRSGFRKNDEMKAMDVLPILKEKVAYLSGGRDKRGGPILTFPARSNHDRIRQEDLRRLISYLACIPSEEVCKRGFTVIVDMRGSKWDSIKPLLKILQESFPCCIHVALIIKPDNFWQKQRTNFGSSKFEFETNMVSLEGLTKVVDPSQLTPEFDGCLEYNHEEWIEIRVAFEDYISNATHMLSRLEELQDILAKKELPQDLEGARNMIEEHSQLKKKVIKAPIEDLDLEGQKLLQRIQSSESFPKKNSGSGNADLQNLLPKVSTMLDRLHSTRQHLHQMWHVRKLKLDQCFQLRLFEQDAEKMFDWITHNKGLFLNSYTEIGTSHPHAMELQTQHNHFAMNCMNVYVNINRIMSVANRLVESGHYASQQIRQIASQLEQEWKAFAAALDERSTLLDMSSIFHQKAEKYMSNVDSWCKACGEVDLPSELQDLEDAIHHHQGIYEHITLAYSEVSQDGKSLLDKLQRPLTPGSSDSLTASANYSKAVHHVLDVIHEVLHHQRQRENIWQHRKVRLHQRLQLCVFQQDVQQVLDWIENHGEAFLSKHTGVGKSLHRARALQKRHEDFEEVAQNTYTNADKLLEAAEQLAQTGECDPEEIYQAAHQLEDRIQDFVRRVEQRKILLDMSVSFHTHVKELWTWLEELQKELLDDVYAESVEAVQDLIKRFGQQQQTTLQVTVNVIKEGEDLIQQLRDSAISSNKTPHNSSINHIETVLQQLDEAQSQMEELFQERKIKLELFLHVRIFERDAIDIISDLESWNDELSQQMNDFDTEDLTIAEQRLQHHADKALTMNNLTFDVIHQGQDLLQYVNEVQASGVELLCDRDVDMATRVQDLLEFLHEKQQELDLAAEQHRKHLEQCVQLRHLQAEVKQVLGWIRNGESMLNAGLITASSLQEAEQLQREHEQFQHAIEKTHQSALQVQQKAEAMLQANHYDMDMIRDCAEKVASHWQQLMLKMEDRLKLVNASVAFYKTSEQVCSVLESLEQEYKREEDWCGGADKLGPNSETDHVTPMISKHLEQKEAFLKACTLARRNADVFLKYLHRNSVNMPGMVTHIKAPEQQVKNILNELFQRENRVLHYWTMRKRRLDQCQQYVVFERSAKQALEWIHDNGEFYLSTHTSTGSSIQHTQELLKEHEEFQITAKQTKERVKLLIQLADGFCEKGHAHAAEIKKCVTAVDKRYRDFSLRMEKYRTSLEKALGISSDSNKSSKSLQLDIIPASIPGSEVKLRDAAHELNEEKRKSARRKEFIMAELIQTEKAYVRDLRECMDTYLWEMTSGVEEIPPGIVNKELIIFGNMQEIYEFHNNIFLKELEKYEQLPEDVGHCFVTWADKFQMYVTYCKNKPDSTQLILEHAGSYFDEIQQRHGLANSISSYLIKPVQRITKYQLLLKELLTCCEEGKGEIKDGLEVMLSVPKRANDAMHLSMLEGFDENIESQGELILQESFQVWDPKTLIRKGRERHLFLFEMSLVFSKEVKDSSGRSKYLYKSKLFTSELGVTEHVEGDPCKFALWVGRTPTSDNKIVLKASSIENKQDWIKHIREVIQERTIHLKGALKEPIHIPKTAPATRQKGRRDGEDLDSQGDGSSQPDTISIASRTSQNTLDSDKLSGGCELTVVIHDFTACNSNELTIRRGQTVEVLERPHDKPDWCLVRTTDRSPAAEGLVPCGSLCIAHSRSSMEMEGIFNHKDSLSVSSNDASPPASVASLQPHMIGAQSSPGPKRPGNTLRKWLTSPVRRLSSGKADGHVKKLAHKHKKSREVRKSADAGSQKDSDDSAATPQDETVEERGRNEGLSSGTLSKSSSSGMQSCGEEEGEEGADAVPLPPPMAIQQHSLLQPDSQDDKASSRLLVRPTSSETPSAAELVSAIEELVKSKMALEDRPSSLLVDQGDSSSPSFNPSDNSLLSSSSPIDEMEERKSSSLKRRHYVLQELVETERDYVRDLGYVVEGYMALMKEDGVPDDMKGKDKIVFGNIHQIYDWHRDFFLGELEKCLEDPEKLGSLFVKHERRLHMYIAYCQNKPKSEHIVSEYIDTFFEDLKQRLGHRLQLTDLLIKPVQRIMKYQLLLKDFLKYSKKASLDTSELERAVEVMCIVPRRCNDMMNVGRLQGFDGKIVAQGKLLLQDTFLVTDQDAGLLPRCRERRIFLFEQIVIFSEPLDKKKGFSMPGFLFKNSIKVSCLCLEENVENDPCKFALTSRTGDVVETFILHSSSPSVRQTWIHEINQILENQRNFLNALTSPIEYQRNHSGGGGGGGSGAAAGVGAAAAAGPPVAAAATVAAPAAAAAPPARAGAGPPGSPSLSDTTPPCWSPLQPRARQRQTRCQSESSSSSNISTMLVTHDYTAVKEDEINVYQGEVVQILASNQQNMFLVFRAATDQCPAAEGWIPGFVLGHTSAVIVENPDGTLKKSTSWHTALRLRKKSEKKDKDGKREGKLENGYRKSREGLSNKVSVKLLNPNYIYDVPPEFVIPLSEVTCETGETVVLRCRVCGRPKASITWKGPEHNTLNNDGHYSISYSDLGEATLKIVGVTTEDDGIYTCIAVNDMGSASSSASLRVLGPGMDGIMVTWKDNFDSFYSEVAELGRGRFSVVKKCDQKGTKRAVATKFVNKKLMKRDQVTHELGILQSLQHPLLVGLLDTFETPTSYILVLEMADQGRLLDCVVRWGSLTEGKIRAHLGEVLEAVRYLHNCRIAHLDLKPENILVDESLAKPTIKLADFGDAVQLNTTYYIHQLLGNPEFAAPEIILGNPVSLTSDTWSVGVLTYVLLSGVSPFLDDSVEETCLNICRLDFSFPDDYFKGVSQKAKEFVCFLLQEDPAKRPSAALALQEQWLQAGNGRSTGVLDTSRLTSFIERRKHQNDVRPIRSIKNFLQSRLLPRV

SEQ ID NO: 913811 - protein, 2928 aa, Homo sapiens; identical to SEQ ID NO: 913810

SEQ ID NO: 913812 - protein, 1009 aa, Homo sapiens
MLARILFEIIILFRAKNSKRKKKLNSINYKRKIHYSIGGNLKKTASDNLEGNVFFSPSFSPFISCFEGKIVAQGKLLLQDTFLVTDQDAGLLPRCRERRIFLFEQIVIFSEPLDKKKGFSMPGFLFKNSIKVSCLCLEENVENDPCKFALTSRTGDVVETFILHSSSPSVRQTWIHEINQILENQRNFLNALTSPIEYQRNHSGGGGGGGSGGSGGGGGSGGGGAPSGGSGHSGGPSSCGGAPSTSRSRPSRIPQPVRHHPPVLVSSAASSQAEADKMSGTSTPGPSLPPPGAAPEAGPSAPSRRPPGADAEGSEREAEPIPKMKVLESPRKGAANASGSSPDAPAKDARASLGTLPLGKPRAGAASPLNSPLSSAVPSLGKEPFPPSSPLQKGGSFWSSIPASPASRPGSFTFPGDSDSLQRQTPRHAAPGKDTDRMSTCSSASEQSVQSTQSNGSESSSSSNISTMLVTHDYTAVKEDEINVYQGEVVQILASNQQNMFLVFRAATDQCPAAEGWIPGFVLGHTSAVIVENPDGTLKKSTSWHTALRLRKKSEKKDKDGKREGKLENGYRKSREGLSNKVSVKLLNPNYIYDVPPEFVIPLSEVTCETGETVVLRCRVCGRPKASITWKGPEHNTLNNDGHYSISYSDLGEATLKIVGVTTEDDGIYTCIAVNDMGSASSSASLRVLGPGMDGIMVTWKDNFDSFYSEVAELGRGRFSVVKKCDQKGTKRAVATKFVNKKLMKRDQVTHELGILQSLQHPLLVGLLDTFETPTSYILVLEMADQGRLLDCVVRWGSLTEGKIRAHLGEVLEAVRYLHNCRIAHLDLKPENILVDESLAKPTIKLADFGDAVQLNTTYYIHQLLGNPEFAAPEIILGNPVSLTSDTWSVGVLTYVLLSGVSPFLDDSVEETCLNICRLDFSFPDDYFKGVSQKAKEFVCFLLQEDPAKRPSAALALQEQWLQAGNGRSTGVLDTSRLTSFIERRKHQNDVRPIRSIKNFLQSRLLPRV

SEQ ID NO: 913813 - protein, 889 aa, Homo sapiens
MPGFLFKNSIKVSCLCLEENVENDPCKFALTSRTGDVVETFILHSSSPSVRQTWIHEINQILENQRNFLNALTSPIEYQRNHSGGGGGGGSGGSGGGGGSGGGGAPSGGSGHSGGPSSCGGAPSTSRSRPSRIPQPVRHHPPVLVSSAASSQAEADKMSGTSTPGPSLPPPGAAPEAGPSAPSRRPPGADAEGSEREAEPIPKMKVLESPRKGAANASGSSPDAPAKDARASLGTLPLGKPRAGAASPLNSPLSSAVPSLGKEPFPPSSPLQKGGSFWSSIPASPASRPGSFTFPGDSDSLQRQTPRHAAPGKDTDRMSTCSSASEQSVQSTQSNGSESSSSSNISTMLVTHDYTAVKEDEINVYQGEVVQILASNQQNMFLVFRAATDQCPAAEGWIPGFVLGHTSAVIVENPDGTLKKSTSWHTALRLRKKSEKKDKDGKREGKLENGYRKSREGLSNKVSVKLLNPNYIYDVPPEFVIPLSEVTCETGETVVLRCRVCGRPKASITWKGPEHNTLNNDGHYSISYSDLGEATLKIVGVTTEDDGIYTCIAVNDMGSASSSASLRVLGPGMDGIMVTWKDNFDSFYSEVAELGRGRFSVVKKCDQKGTKRAVATKFVNKKLMKRDQVTHELGILQSLQHPLLVGLLDTFETPTSYILVLEMADQGRLLDCVVRWGSLTEGKIRAHLGEVLEAVRYLHNCRIAHLDLKPENILVDESLAKPTIKLADFGDAVQLNTTYYIHQLLGNPEFAAPEIILGNPVSLTSDTWSVGVLTYVLLSGVSPFLDDSVEETCLNICRLDFSFPDDYFKGVSQKAKEFVCFLLQEDPAKRPSAALALQEQWLQAGNGRSTGVLDTSRLTSFIERRKHQNDVRPIRSIKNFLQSRLLPRV

SEQ ID NO: 913814 - protein, 619 aa, Homo sapiens
MKKWGERICPLGTLYVTVLLWKTETALGTWRGGSAVQAGAGPCGLLGSGLVWPITHAAVSSTRVAVSESSSSSNISTMLVTHDYTAVKEDEINVYQGEVVQILASNQQNMFLVFRAATDQCPAAEGWIPGFVLGHTSAVIVENPDGTLKKSTSWHTALRLRKKSEKKDKDGKREGKLENGYRKSREGLSNKVSVKLLNPNYIYDVPPEFVIPLSEVTCETGETVVLRCRVCGRPKASITWKGPEHNTLNNDGHYSISYSDLGEATLKIVGVTTEDDGIYTCIAVNDMGSASSSASLRVLGPGMDGIMVTWKDNFDSFYSEVAELGRGRFSVVKKCDQKGTKRAVATKFVNKKLMKRDQVTHELGILQSLQHPLLVGLLDTFETPTSYILVLEMADQGRLLDCVVRWGSLTEGKIRAHLGEVLEAVRYLHNCRIAHLDLKPENILVDESLAKPTIKLADFGDAVQLNTTYYIHQLLGNPEFAAPEIILGNPVSLTSDTWSVGVLTYVLLSGVSPFLDDSVEETCLNICRLDFSFPDDYFKGVSQKAKEFVCFLLQEDPAKRPSAALALQEQWLQAGNGRSTGVLDTSRLTSFIERRKHQNDVRPIRSIKNFLQSRLLPRV

SEQ ID NO: 913815 - protein, 2132 aa, Homo sapiens
AAAGAAAAMSGSSGGAAAPAASSGPAAAASAAGSGCGGGAGEGAEEAAKDLADIAAFFRSGFRKNDEMKAMDVLPILKEKVAYLSGGRDKRGGPILTFPARSNHDRIRQEDLRRLISYLACIPSEEVCKRGFTVIVDMRGSKWDSIKPLLKILQESFPCCIHVALIIKPDNFWQKQRTNFGSSKFEFETNMVSLEGLTKVVDPSQLTPEFDGCLEYNHEEWIEIRVAFEDYISNATHMLSRLEELQDILAKKELPQDLEGARNMIEEHSQLKKKVIKAPIEDLDLEGQKLLQRIQSSESFPKKNSGSGNADLQNLLPKVSTMLDRLHSTRQHLHQMWHVRKLKLDQCFQLRLFEQDAEKMFDWITHNKGLFLNSYTEIGTSHPHAMELQTQHNHFAMNCMNVYVNINRIMSVANRLVESGHYASQQIRQIASQLEQEWKAFAAALDERSTLLDMSSIFHQKAEKYMSNVDSWCKACGEVDLPSELQDLEDAIHHHQGIYEHITLAYSEVSQDGKSLLDKLQRPLTPGSSDSLTASANYSKAVHHVLDVIHEVLHHQRQRENIWQHRKVRLHQRLQLCVFQQDVQQVLDWIENHGEAFLSKHTGVGKSLHRARALQKRHEDFEEVAQNTYTNADKLLEAAEQLAQTGECDPEEIYQAAHQLEDRIQDFVRRVEQRKILLDMSVSFHTHVKELWTWLEELQKELLDDVYAESVEAVQDLIKRFGQQQQTTLQVTVNVIKEGEDLIQQLRDSAISSNKTPHNSSINHIETVLQQLDEAQSQMEELFQERKIKLELFLHVRIFERDAIDIISDLESWNDELSQQMNDFDTEDLTIAEQRLQHHADKALTMNNLTFDVIHQGQDLLQYVNEVQASGVELLCDRDVDMATRVQDLLEFLHEKQQELDLAAEQHRKHLEQCVQLRHLQAEVKQVLGWIRNGESMLNAGLITASSLQEAEQLQREHEQFQHAIEKTHQSALQVQQKAEAMLQANHYDMDMIRDCAEKVASHWQQLMLKMEDRLKLVNASVAFYKTSEQVCSVLESLEQEYKREEDWCGGADKLGPNSETDHVTPMISKHLEQKEAFLKACTLARRNADVFLKYLHRNSVNMPGMVTHIKAPEQQVKNILNELFQRENRVLHYWTMRKRRLDQCQQYVVFERSAKQALEWIHDNGEFYLSTHTSTGSSIQHTQELLKEHEEFQITAKQTKERVKLLIQLADGFCEKGHAHAAEIKKCVTAVDKRYRDFSLRMEKYRTSLEKALGISSDSNKSSKSLQLDIIPASIPGSEVKLRDAAHELNEEKRKSARRKEFIMAELIQTEKAYVRDLRECMDTYLWEMTSGVEEIPPGIVNKELIIFGNMQEIYEFHNNIFLKELEKYEQLPEDVGHCFVTWADKFQMYVTYCKNKPDSTQLILEHAGSYFDEIQQRHGLANSISSYLIKPVQRITKYQLLLKELLTCCEEGKGEIKDGLEVMLSVPKRANDAMHLSMLEGFDENIESQGELILQESFQVWDPKTLIRKGRERHLFLFEMSLVFSKEVKDSSGRSKYLYKSKLFTSELGVTEHVEGDPCKFALWVGRTPTSDNKIVLKASSIENKQDWIKHIREVIQERTIHLKGALKEPIHIPKTAPATRQKGRRDGEDLDSQGDGSSQPDTISIASRTSQNTLDSDKLSGGCELTVVIHDFTACNSNELTIRRGQTVEVLERPHDKPDWCLVRTTDRSPAAEGLVPCGSLCIAHSRSSMEMEGIFNHKDSLSVSSNDASPPASVASLQPHMIGAQSSPGPKRPGNTLRKWLTSPVRRLSSGKADGHVKKLAHKHKKSREVRKSADAGSQKDSDDSAATPQDETVEERGRNEGLSSGTLSKSSSSGMQSCGEEEGEEGADAVPLPPPMAIQQHSLLQPDSQDDKASSRLLVRPTSSETPSAAELVSAIEELVKSKMALEDRPSSLLVDQGDSSSPSFNPSDNSLLSSSSPIDEMEERKSSSLKRRHYVLQELVETERDYVRDLGYVVEGYMALMKEDGVPDDMKGKDKIVFGNIHQIYDWHRDFFLGELEKCLEDPEKLGSLFVKHERRLHMYIAYCQNKPKSEHIVSEYIDTFFEDLKQRLGHRLQLTDLLIKPVQRIMKYQLLLKVRRWRDKLWCQE

SEQ ID NO: 913816 - protein, 2132 aa, Homo sapiens; identical to SEQ ID NO: 913815

SEQ ID NO: 913817 - protein, 1761 aa, Homo sapiens
AAAGAAAAMSGSSGGAAAPAASSGPAAAASAAGSGCGGGAGEGAEEAAKDLADIAAFFRSGFRKNDEMKAMDVLPILKEKVAYLSGGRDKRGGPILTFPARSNHDRIRQEDLRRLISYLACIPSEEVCKRGFTVIVDMRGSKWDSIKPLLKILQESFPCCIHVALIIKPDNFWQKQRTNFGSSKFEFETNMVSLEGLTKVVDPSQLTPEFDGCLEYNHEEWIEIRVAFEDYISNATHMLSRLEELQDILAKKELPQDLEGARNMIEEHSQLKKKVIKAPIEDLDLEGQKLLQRIQSSESFPKKNSGSGNADLQNLLPKVSTMLDRLHSTRQHLHQMWHVRKLKLDQCFQLRLFEQDAEKMFDWITHNKGLFLNSYTEIGTSHPHAMELQTQHNHFAMNCMNVYVNINRIMSVANRLVESGHYASQQIRQIASQLEQEWKAFAAALDERSTLLDMSSIFHQKAEKYMSNVDSWCKACGEVDLPSELQDLEDAIHHHQGIYEHITLAYSEVSQDGKSLLDKLQRPLTPGSSDSLTASANYSKAVHHVLDVIHEVLHHQRQRENIWQHRKVRLHQRLQLCVFQQDVQQVLDWIENHGEAFLSKHTGVGKSLHRARALQKRHEDFEEVAQNTYTNADKLLEAAEQLAQTGECDPEEIYQAAHQLEDRIQDFVRRVEQRKILLDMSVSFHTHVKELWTWLEELQKELLDDVYAESVEAVQDLIKRFGQQQQTTLQVTVNVIKEGEDLIQQLRDSAISSNKTPHNSSINHIETVLQQLDEAQSQMEELFQERKIKLELFLHVRIFERDAIDIISDLESWNDELSQQMNDFDTEDLTIAEQRLQHHADKALTMNNLTFDVIHQGQDLLQYVNEVQASGVELLCDRDVDMATRVQDLLEFLHEKQQELDLAAEQHRKHLEQCVQLRHLQAEVKQVLGWIRNGESMLNAGLITASSLQEAEQLQREHEQFQHAIEKTHQSALQVQQKAEAMLQANHYDMDMIRDCAEKVASHWQQLMLKMEDRLKLVNASVAFYKTSEQVCSVLESLEQEYKREEDWCGGADKLGPNSETDHVTPMISKHLEQKEAFLKACTLARRNADVFLKYLHRNSVNMPGMVTHIKAPEQQVKNILNELFQRENRVLHYWTMRKRRLDQCQQYVVFERSAKQALEWIHDNGEFYLSTHTSTGSSIQHTQELLKEHEEFQITAKQTKERVKLLIQLADGFCEKGHAHAAEIKKCVTAVDKRYRDFSLRMEKYRTSLEKALGISSDSNKSSKSLQLDIIPASIPGSEVKLRDAAHELNEEKRKSARRKEFIMAELIQTEKAYVRDLRECMDTYLWEMTSGVEEIPPGIVNKELIIFGNMQEIYEFHNNIFLKELEKYEQLPEDVGHCFVTWADKFQMYVTYCKNKPDSTQLILEHAGSYFDEIQQRHGLANSISSYLIKPVQRITKYQLLLKELLTCCEEGKGEIKDGLEVMLSVPKRANDAMHLSMLEGFDENIESQGELILQESFQVWDPKTLIRKGRERHLFLFEMSLVFSKEVKDSSGRSKYLYKSKLFTSELGVTEHVEGDPCKFALWVGRTPTSDNKIVLKASSIENKQDWIKHIREVIQERTIHLKGALKEPIHIPKTAPATRQKGRRDGEDLDSQGDGSSQPDTISIASRTSQNTLDSDKLSGGCELTVVIHDFTACNSNELTIRRGQTVEVLERPHDKPDWCLVRTTDRSPAAEGLVPCGSLCIAHSRSSMEMEGIFNHKGQAMFRISQDLNVSLLSLR

SEQ ID NO: 913818 - protein, 1565 aa, Homo sapiens
AAAGAAAAMSGSSGGAAAPAASSGPAAAASAAGSGCGGGAGEGAEEAAKDLADIAAFFRSGFRKNDEMKAMDVLPILKEKVAYLSGGRDKRGGPILTFPARSNHDRIRQEDLRRLISYLACIPSEEVCKRGFTVIVDMRGSKWDSIKPLLKILQESFPCCIHVALIIKPDNFWQKQRTNFGSSKFEFETNMVSLEGLTKVVDPSQLTPEFDGCLEYNHEEWIEIRVAFEDYISNATHMLSRLEELQDILAKKELPQDLEGARNMIEEHSQLKKKVIKAPIEDLDLEGQKLLQRIQSSESFPKKNSGSGNADLQNLLPKVSTMLDRLHSTRQHLHQMWHVRKLKLDQCFQLRLFEQDAEKMFDWITHNKGLFLNSYTEIGTSHPHAMELQTQHNHFAMNCMNVYVNINRIMSVANRLVESGHYASQQIRQIASQLEQEWKAFAAALDERSTLLDMSSIFHQKAEKYMSNVDSWCKACGEVDLPSELQDLEDAIHHHQGIYEHITLAYSEVSQDGKSLLDKLQRPLTPGSSDSLTASANYSKAVHHVLDVIHEVLHHQRQRENIWQHRKVRLHQRLQLCVFQQDVQQVLDWIENHGEAFLSKHTGVGKSLHRARALQKRHEDFEEVAQNTYTNADKLLEAAEQLAQTGECDPEEIYQAAHQLEDRIQDFVRRVEQRKILLDMSVSFHTHVKELWTWLEELQKELLDDVYAESVEAVQDLIKRFGQQQQTTLQVTVNVIKEGEDLIQQLRDSAISSNKTPHNSSINHIETVLQQLDEAQSQMEELFQERKIKLELFLHVRIFERDAIDIISDLESWNDELSQQMNDFDTEDLTIAEQRLQHHADKALTMNNLTFDVIHQGQDLLQYVNEVQASGVELLCDRDVDMATRVQDLLEFLHEKQQELDLAAEQHRKHLEQCVQLRHLQAEVKQVLGWIRNGESMLNAGLITASSLQEAEQLQREHEQFQHAIEKTHQSALQVQQKAEAMLQANHYDMDMIRDCAEKVASHWQQLMLKMEDRLKLVNASVAFYKTSEQVCSVLESLEQEYKREEDWCGGADKLGPNSETDHVTPMISKHLEQKEAFLKACTLARRNADVFLKYLHRNSVNMPGMVTHIKAPEQQVKNILNELFQRENRVLHYWTMRKRRLDQCQQYVVFERSAKQALEWIHDNGEFYLSTHTSTGSSIQHTQELLKEHEEFQITAKQTKERVKLLIQLADGFCEKGHAHAAEIKKCVTAVDKRYRDFSLRMEKYRTSLEKALGISSDSNKSSKSLQLDIIPASIPGSEVKLRDAAHELNEEKRKSARRKEFIMAELIQTEKAYVRDLRECMDTYLWEMTSGVEEIPPGIVNKELIIFGNMQEIYEFHNNIFLKELEKYEQLPEDVGHCFVTWADKFQMYVTYCKNKPDSTQLILEHAGSYFDEIQQRHGLANSISSYLIKPVQRITKYQLLLKELLTCCEEGKGEIKDGLEVMLSVPKRANDAMHLSMLEGFDENIESQGELILQESFQVWDPKTLIRKGRERHLFLFEMSLVFSKEVKDSSGRSKYLYKSKLFVSIGVQNCKSKGNTIAVFL

SEQ ID NO: 913819 - protein, 1302 aa, Homo sapiens
AAAGAAAAMSGSSGGAAAPAASSGPAAAASAAGSGCGGGAGEGAEEAAKDLADIAAFFRSGFRKNDEMKAMDVLPILKEKVAYLSGGRDKRGGPILTFPARSNHDRIRQEDLRRLISYLACIPSEEVCKRGFTVIVDMRGSKWDSIKPLLKILQESFPCCIHVALIIKPDNFWQKQRTNFGSSKFEFETNMVSLEGLTKVVDPSQLTPEFDGCLEYNHEEWIEIRVAFEDYISNATHMLSRLEELQDILAKKELPQDLEGARNMIEEHSQLKKKVIKAPIEDLDLEGQKLLQRIQSSESFPKKNSGSGNADLQNLLPKVSTMLDRLHSTRQHLHQMWHVRKLKLDQCFQLRLFEQDAEKMFDWITHNKGLFLNSYTEIGTSHPHAMELQTQHNHFAMNCMNVYVNINRIMSVANRLVESGHYASQQIRQIASQLEQEWKAFAAALDERSTLLDMSSIFHQKAEKYMSNVDSWCKACGEVDLPSELQDLEDAIHHHQGIYEHITLAYSEVSQDGKSLLDKLQRPLTPGSSDSLTASANYSKAVHHVLDVIHEVLHHQRQRENIWQHRKVRLHQRLQLCVFQQDVQQVLDWIENHGEAFLSKHTGVGKSLHRARALQKRHEDFEEVAQNTYTNADKLLEAAEQLAQTGECDPEEIYQAAHQLEDRIQDFVRRVEQRKILLDMSVSFHTHVKELWTWLEELQKELLDDVYAESVEAVQDLIKRFGQQQQTTLQVTVNVIKEGEDLIQQLRDSAISSNKTPHNSSINHIETVLQQLDEAQSQMEELFQERKIKLELFLHVRIFERDAIDIISDLESWNDELSQQMNDFDTEDLTIAEQRLQHHADKALTMNNLTFDVIHQGQDLLQYVNEVQASGVELLCDRDVDMATRVQDLLEFLHEKQQELDLAAEQHRKHLEQCVQLRHLQAEVKQVLGWIRNGESMLNAGLITASSLQEAEQLQREHEQFQHAIEKTHQSALQVQQKAEAMLQANHYDMDMIRDCAEKVASHWQQLMLKMEDRLKLVNASVAFYKTSEQVCSVLESLEQEYKREEDWCGGADKLGPNSETDHVTPMISKHLEQKEAFLKACTLARRNADVFLKYLHRNSVNMPGMVTHIKAPEQQVKNILNELFQRENRVLHYWTMRKRRLDQCQQYVVFERSAKQALEWIHDNGEFYLSTHTSTGSSIQHTQELLKEHEEFQITAKQTKERVKLLIQLADGFCEKGHAHAAEIKKCVTAVDKRYRDFSLRMEKYRTSLEKALGISSDSNKSSKSLQLDIIPASIPGSEVKLRDAAHELNEEKRKSARRKE

SEQ ID NO: 913820 - protein, 475 aa, Homo sapiens
AAAGAAAAMSGSSGGAAAPAASSGPAAAASAAGSGCGGGAGEGAEEAAKDLADIAAFFRSGFRKNDEMKAMDVLPILKEKVAYLSGGRDKRGGPILTFPARSNHDRIRQEDLRRLISYLACIPSEEVCKRGFTVIVDMRGSKWDSIKPLLKILQESFPCCIHVALIIKPDNFWQKQRTNFGSSKFEFETNMVSLEGLTKVVDPSQLTPEFDGCLEYNHEEWIEIRVAFEDYISNATHMLSRLEELQDILAKKELPQDLEGARNMIEEHSQLKKKVIKAPIEDLDLEGQKLLQRIQSSESFPKKNSGSGNADLQNLLPKVSTMLDRLHSTRQHLHQMWHVRKLKLDQCFQLRLFEQDAEKMFDWITHNKGLFLNSYTEIGTSHPHAMELQTQHNHFAMNCMNVYVNINRIMSVANRLVESGHYASQQIRQIASQLEQEWKAFAAALDERSTLLDMSSIFHQKAEKVSALNPQPTRW

SEQ ID NO: 913821 - protein, 405 aa, Homo sapiens
AAAGAAAAMSGSSGGAAAPAASSGPAAAASAAGSGCGGGAGEGAEEAAKDLADIAAFFRSGFRKNDEMKAMDVLPILKEKVAYLSGGRDKRGGPILTFPARSNHDRIRQEDLRRLISYLACIPSEEVCKRGFTVIVDMRGSKWDSIKPLLKILQESFPCCIHVALIIKPDNFWQKQRTNFGSSKFEFETNMVSLEGLTKVVDPSQLTPEFDGCLEYNHEEWIEIRVAFEDYISNATHMLSRLEELQDILAKKELPQDLEGARNMIEEHSQLKKKVIKAPIEDLDLEGQKLLQRIQSSESFPKKNSGSGNADLQNLLPKVSTMLDRLHSTRQHLHQMWHVRKLKLDQCFQLRLFEQDAEKMFDWITHNKGLFLNSYTEIGTSHPHAMELQTQHNHIGESKIHQLGS

SEQ ID NO: 913822 - protein, 600 aa, Homo sapiens
AAAGAAAAMSGSSGGAAAPAASSGPAAAASAAGSGCGGGAGEGAEEAAKDLADIAAFFRSGFRKNDEMKAMDVLPILKEKVAYLSGGRDKRGGPILTFPARSNHDRIRQEDLRRLISYLACIPSEEVCKRGFTVIVDMRGSKWDSIKPLLKILQESFPCCIHVALIIKPDNFWQKQRTNFGSSKFEFETNMVSLEGLTKVVDPSQLTPEFDGCLEYNHEEWIEIRVAFEDYISNATHMLSRLEELQDILAKKELPQDLEGARNMIEEHSQLKKKVIKAPIEDLDLEGQKLLQRIQSSESFPKKNSGSGNADLQNLLPKVSTMLDRLHSTRQHLHQMWHVRKLKLDQCFQLRLFEQDAEKMFDWITHNKGLFLNSYTEIGTSHPHAMELQTQHNHFAMNCMNVYVNINRIMSVANRLVESGHYASQQIRQIASQLEQEWKAFAAALDERSTLLDMSSIFHQKAEKYMSNVDSWCKACGEVDLPSELQDLEDAIHHHQGIYEHITLAYSEVSQDGKSLLDKLQRPLTPGSSDSLTASANYSKAVHHVLDVIHEVLHHQRQRENNLATPQGPAASEAAAVCFPAGRSAGQFRLMPFCMGNGLC

SEQ ID NO: 913823 - protein, 103 aa, Homo sapiens
FRSVISQIPTAQKIIPAELPQAQTKGAGADAALEAISHLCRSDLGEATLKIVGVTTEDDGIYTCIAVNDMGSASSSASLRVLGKHRATRILRDPVGHVFQESP

SEQ ID NO: 913824 - protein, 2928 aa, Homo sapiens; identical to SEQ ID NO: 913810

SEQ ID NO: 913825 - protein, 3105 aa, Homo sapiens
AAAGAAAAMSGSSGGAAAPAASSGPAAAASAAGSGCGGGAGEGAEEAAKDLADIAAFFRSGFRKNDEMKAMDVLPILKEKVAYLSGGRDKRGGPILTFPARSNHDRIRQEDLRRLISYLACIPSEEVCKRGFTVIVDMRGSKWDSIKPLLKILQESFPCCIHVALIIKPDNFWQKQRTNFGSSKFEFETNMVSLEGLTKVVDPSQLTPEFDGCLEYNHEEWIEIRVAFEDYISNATHMLSRLEELQDILAKKELPQDLEGARNMIEEHSQLKKKVIKAPIEDLDLEGQKLLQRIQSSESFPKKNSGSGNADLQNLLPKVSTMLDRLHSTRQHLHQMWHVRKLKLDQCFQLRLFEQDAEKMFDWITHNKGLFLNSYTEIGTSHPHAMELQTQHNHFAMNCMNVYVNINRIMSVANRLVESGHYASQQIRQIASQLEQEWKAFAAALDERSTLLDMSSIFHQKAEKYMSNVDSWCKACGEVDLPSELQDLEDAIHHHQGIYEHITLAYSEVSQDGKSLLDKLQRPLTPGSSDSLTASANYSKAVHHVLDVIHEVLHHQRQRENIWQHRKVRLHQRLQLCVFQQDVQQVLDWIENHGEAFLSKHTGVGKSLHRARALQKRHEDFEEVAQNTYTNADKLLEAAEQLAQTGECDPEEIYQAAHQLEDRIQDFVRRVEQRKILLDMSVSFHTHVKELWTWLEELQKELLDDVYAESVEAVQDLIKRFGQQQQTTLQVTVNVIKEGEDLIQQLRDSAISSNKTPHNSSINHIETVLQQLDEAQSQMEELFQERKIKLELFLHVRIFERDAIDIISDLESWNDELSQQMNDFDTEDLTIAEQRLQHHADKALTMNNLTFDVIHQGQDLLQYVNEVQASGVELLCDRDVDMATRVQDLLEFLHEKQQELDLAAEQHRKHLEQCVQLRHLQAEVKQVLGWIRNGESMLNAGLITASSLQEAEQLQREHEQFQHAIEKTHQSALQVQQKAEAMLQANHYDMDMIRDCAEKVASHWQQLMLKMEDRLKLVNASVAFYKTSEQVCSVLESLEQEYKREEDWCGGADKLGPNSETDHVTPMISKHLEQKEAFLKACTLARRNADVFLKYLHRNSVNMPGMVTHIKAPEQQVKNILNELFQRENRVLHYWTMRKRRLDQCQQYVVFERSAKQALEWIHDNGEFYLSTHTSTGSSIQHTQELLKEHEEFQITAKQTKERVKLLIQLADGFCEKGHAHAAEIKKCVTAVDKRYRDFSLRMEKYRTSLEKALGISSDSNKSSKSLQLDIIPASIPGSEVKLRDAAHELNEEKRKSARRKEFIMAELIQTEKAYVRDLRECMDTYLWEMTSGVEEIPPGIVNKELIIFGNMQEIYEFHNNIFLKELEKYEQLPEDVGHCFVTWADKFQMYVTYCKNKPDSTQLILEHAGSYFDEIQQRHGLANSISSYLIKPVQRITKYQLLLKELLTCCEEGKGEIKDGLEVMLSVPKRANDAMHLSMLEGFDENIESQGELILQESFQVWDPKTLIRKGRERHLFLFEMSLVFSKEVKDSSGRSKYLYKSKLFTSELGVTEHVEGDPCKFALWVGRTPTSDNKIVLKASSIENKQDWIKHIREVIQERTIHLKGALKEPIHIPKTAPATRQKGRRDGEDLDSQGDGSSQPDTISIASRTSQNTLDSDKLSGGCELTVVIHDFTACNSNELTIRRGQTVEVLERPHDKPDWCLVRTTDRSPAAEGLVPCGSLCIAHSRSSMEMEGIFNHKDSLSVSSNDASPPASVASLQPHMIGAQSSPGPKRPGNTLRKWLTSPVRRLSSGKADGHVKKLAHKHKKSREVRKSADAGSQKDSDDSAATPQDETVEERGRNEGLSSGTLSKSSSSGMQSCGEEEGEEGADAVPLPPPMAIQQHSLLQPDSQDDKASSRLLVRPTSSETPSAAELVSAIEELVKSKMALEDRPSSLLVDQGDSSSPSFNPSDNSLLSSSSPIDEMEERKSSSLKRRHYVLQELVETERDYVRDLGYVVEGYMALMKEDGVPDDMKGKDKIVFGNIHQIYDWHRDFFLGELEKCLEDPEKLGSLFVKHERRLHMYIAYCQNKPKSEHIVSEYIDTFFEDLKQRLGHRLQLTDLLIKPVQRIMKYQLLLKDFLKYSKKASLDTSELERAVEVMCIVPRRCNDMMNVGRLQGFDGKIVAQGKLLLQDTFLVTDQDAGLLPRCRERRIFLFEQIVIFSEPLDKKKGFSMPGFLFKNSIKVSCLCLEENVENDPCKFALTSRTGDVVETFILHSSSPSVRQTWIHEINQILENQRNFLNALTSPIEYQRNHSGGGGGGGSGGSGGGGGSGGGGAPSGGSGHSGGPSSCGGAPSTSRSRPSRIPQPVRHHPPVLVSSAASSQAEADKMSGTSTPGPSLPPPGAAPEAGPSAPSRRPPGADAEGSEREAEPIPKMKVLESPRKGAANASGSSPDAPAKDARASLGTLPLGKPRAGAASPLNSPLSSAVPSLGKEPFPPSSPLQKGGSFWSSIPASPASRPGSFTFPGDSDSLQRQTPRHAAPGKDTDRMSTCSSASEQSVQSTQSNGSESSSSSNISTMLVTHDYTAVKEDEINVYQGEVVQILASNQQNMFLVFRAATDQCPAAEGWIPGFVLGHTSAVIVENPDGTLKKSTSWHTALRLRKKSEKKDKDGKREGKLENGYRKSREGLSNKVSVKLLNPNYIYDVPPEFVIPLSEVTCETGETVVLRCRVCGRPKASITWKGPEHNTLNNDGHYSISYSDLGEATLKIVGVTTEDDGIYTCIAVNDMGSASSSASLRVLGPGMDGIMVTWKDNFDSFYSEVAELGRGRFSVVKKCDQKGTKRAVATKFVNKKLMKRDQVTHELGILQSLQHPLLVGLLDTFETPTSYILVLEMADQGRLLDCVVRWGSLTEGKIRAHLGEVLEAVRYLHNCRIAHLDLKPENILVDESLAKPTIKLADFGDAVQLNTTYYIHQLLGNPEFAAPEIILGNPVSLTSDTWSVGVLTYVLLSGVSPFLDDSVEETCLNICRLDFSFPDDYFKGVSQKAKEFVCFLLQEDPAKRPSAALALQEQWLQAGNGRSTGVLDTSRLTSFIERRKHQNDVRPIRSIKNFLQSRLLPRV

SEQ ID NO: 913826 - protein, 889 aa, Homo sapiens; identical to SEQ ID NO: 913813

SEQ ID NO: 913827 - protein, 542 aa, Homo sapiens [sequence omitted]

SEQ ID NO: 913828 - protein, 2095 aa, Homo sapiens
AAAGAAAAMSGSSGGAAAPAASSGPAAAASAAGSGCGGGAGEGAEEAAKDLADIAAFFRSGFRKNDEMKAMDVLPILKEKVAYLSGGRDKRGGPILTFPARSNHDRIRQEDLRRLISYLACIPSEEVCKRGFTVIVDMRGSKWDSIKPLLKILQESFPCCIHVALIIKPDNFWQKQRTNFGSSKFEFETNMVSLEGLTKVVDPSQLTPEFDGCLEYNHEEWIEIRVAFEDYISNATHMLSRLEELQDILAKKELPQDLEGARNMIEEHSQLKKKVIKAPIEDLDLEGQKLLQRIQSSESFPKKNSGSGNADLQNLLPKVSTMLDRLHSTRQHLHQMWHVRKLKLDQCFQLRLFEQDAEKMFDWITHNKGLFLNSYTEIGTSHPHAMELQTQHNHFAMNCMNVYVNINRIMSVANRLVESGHYASQQIRQIASQLEQEWKAFAAALDERSTLLDMSSIFHQKAEKYMSNVDSWCKACGEVDLPSELQDLEDAIHHHQGIYEHITLAYSEVSQDGKSLLDKLQRPLTPGSSDSLTASANYSKAVHHVLDVIHEVLHHQRQRENIWQHRKVRLHQRLQLCVFQQDVQQVLDWIENHGEAFLSKHTGVGKSLHRARALQKRHEDFEEVAQNTYTNADKLLEAAEQLAQTGECDPEEIYQAAHQLEDRIQDFVRRVEQRKILLDMSVSFHTHVKELWTWLEELQKELLDDVYAESVEAVQDLIKRFGQQQQTTLQVTVNVIKEGEDLIQQLRDSAISSNKTPHNSSINHIETVLQQLDEAQSQMEELFQERKIKLELFLHVRIFERDAIDIISDLESWNDELSQQMNDFDTEDLTIAEQRLQHHADKALTMNNLTFDVIHQGQDLLQYVNEVQASGVELLCDRDVDMATRVQDLLEFLHEKQQELDLAAEQHRKHLEQCVQLRHLQAEVKQVLGWIRNGESMLNAGLITASSLQEAEQLQREHEQFQHAIEKTHQSALQVQQKAEAMLQANHYDMDMIRDCAEKVASHWQQLMLKMEDRLKLVNASVAFYKTSEQVCSVLESLEQEYKREEDWCGGADKLGPNSETDHVTPMISKHLEQKEAFLKACTLARRNADVFLKYLHRNSVNMPGMVTHIKAPEQQVKNILNELFQRENRVLHYWTMRKRRLDQCQQYVVFERSAKQALEWIHDNGEFYLSTHTSTGSSIQHTQELLKEHEEFQITAKQTKERVKLLIQLADGFCEKGHAHAAEIKKCVTAVDKRYRDFSLRMEKYRTSLEKALGISSDSNKSSKSLQLDIIPASIPGSEVKLRDAAHELNEEKRKSARRKEFIMAELIQTEKAYVRDLRECMDTYLWEMTSGVEEIPPGIVNKELIIFGNMQEIYEFHNNIFLKELEKYEQLPEDVGHCFVTWADKFQMYVTYCKNKPDSTQLILEHAGSYFDEIQQRHGLANSISSYLIKPVQRITKYQLLLKELLTCCEEGKGEIKDGLEVMLSVPKRANDAMHLSMLEGFDENIESQGELILQESFQVWDPKTLIRKGRERHLFLFEMSLVFSKEVKDSSGRSKYLYKSKLFTSELGVTEHVEGDPCKFALWVGRTPTSDNKIVLKASSIENKQDWIKHIREVIQERTIHLKGALKEPIHIPKTAPATRQKGRRDGEDLDSQGDGSSQPDTISIASRTSQNTLDSDKLSGGCELTVVIHDFTACNSNELTIRRGQTVEVLERPHDKPDWCLVRTTDRSPAAEGLVPCGSLCIAHSRSSMEMEGIFNHKDSLSVSSNDASPPASVASLQPHMIGAQSSPGPKRPGNTLRKWLTSPVRRLSSGKADGHVKKLAHKHKKSREVRKSADAGSQKDSDDSAATPQDETVEERGRNEGLSSGTLSKSSSSGMQSCGEEEGEEGADAVPLPPPMAIQQHSLLQPDSQDDKASSRLLVRPTSSETPSAAELVSAIEELVKSKMALEDRPSSLLVDQGDSSSPSFNPSDNSLLSSSSPIDEMEERKSSSLKRRHYVLQELVETERDYVRDLGYVVEGYMALMKEDGVPDDMKGKDKIVFGNIHQIYDWHRDFFLGELEKCLEDPEKLGSLFVKHVSTIALLISCSDGVILSHWFVRLKENSLILYVSAYV

SEQ ID NO: 913829 - protein, 2008 aa, Homo sapiens
AAAGAAAAMSGSSGGAAAPAASSGPAAAASAAGSGCGGGAGEGAEEAAKDLADIAAFFRSGFRKNDEMKAMDVLPILKEKVAYLSGGRDKRGGPILTFPARSNHDRIRQEDLRRLISYLACIPSEEVCKRGFTVIVDMRGSKWDSIKPLLKILQESFPCCIHVALIIKPDNFWQKQRTNFGSSKFEFETNMVSLEGLTKVVDPSQLTPEFDGCLEYNHEEWIEIRVAFEDYISNATHMLSRLEELQDILAKKELPQDLEGARNMIEEHSQLKKKVIKAPIEDLDLEGQKLLQRIQSSESFPKKNSGSGNADLQNLLPKVSTMLDRLHSTRQHLHQMWHVRKLKLDQCFQLRLFEQDAEKMFDWITHNKGLFLNSYTEIGTSHPHAMELQTQHNHFAMNCMNVYVNINRIMSVANRLVESGHYASQQIRQIASQLEQEWKAFAAALDERSTLLDMSSIFHQKAEKYMSNVDSWCKACGEVDLPSELQDLEDAIHHHQGIYEHITLAYSEVSQDGKSLLDKLQRPLTPGSSDSLTASANYSKAVHHVLDVIHEVLHHQRQRENIWQHRKVRLHQRLQLCVFQQDVQQVLDWIENHGEAFLSKHTGVGKSLHRARALQKRHEDFEEVAQNTYTNADKLLEAAEQLAQTGECDPEEIYQAAHQLEDRIQDFVRRVEQRKILLDMSVSFHTHVKELWTWLEELQKELLDDVYAESVEAVQDLIKRFGQQQQTTLQVTVNVIKEGEDLIQQLRDSAISSNKTPHNSSINHIETVLQQLDEAQSQMEELFQERKIKLELFLHVRIFERDAIDIISDLESWNDELSQQMNDFDTEDLTIAEQRLQHHADKALTMNNLTFDVIHQGQDLLQYVNEVQASGVELLCDRDVDMATRVQDLLEFLHEKQQELDLAAEQHRKHLEQCVQLRHLQAEVKQVLGWIRNGESMLNAGLITASSLQEAEQLQREHEQFQHAIEKTHQSALQVQQKAEAMLQANHYDMDMIRDCAEKVASHWQQLMLKMEDRLKLVNASVAFYKTSEQVCSVLESLEQEYKREEDWCGGADKLGPNSETDHVTPMISKHLEQKEAFLKACTLARRNADVFLKYLHRNSVNMPGMVTHIKAPEQQVKNILNELFQRENRVLHYWTMRKRRLDQCQQYVVFERSAKQALEWIHDNGEFYLSTHTSTGSSIQHTQELLKEHEEFQITAKQTKERVKLLIQLADGFCEKGHAHAAEIKKCVTAVDKRYRDFSLRMEKYRTSLEKALGISSDSNKSSKSLQLDIIPASIPGSEVKLRDAAHELNEEKRKSARRKEFIMAELIQTEKAYVRDLRECMDTYLWEMTSGVEEIPPGIVNKELIIFGNMQEIYEFHNNIFLKELEKYEQLPEDVGHCFVTWADKFQMYVTYCKNKPDSTQLILEHAGSYFDEIQQRHGLANSISSYLIKPVQRITKYQLLLKELLTCCEEGKGEIKDGLEVMLSVPKRANDAMHLSMLEGFDENIESQGELILQESFQVWDPKTLIRKGRERHLFLFEMSLVFSKEVKDSSGRSKYLYKSKLFTSELGVTEHVEGDPCKFALWVGRTPTSDNKIVLKASSIENKQDWIKHIREVIQERTIHLKGALKEPIHIPKTAPATRQKGRRDGEDLDSQGDGSSQPDTISIASRTSQNTLDSDKLSGGCELTVVIHDFTACNSNELTIRRGQTVEVLERPHDKPDWCLVRTTDRSPAAEGLVPCGSLCIAHSRSSMEMEGIFNHKDSLSVSSNDASPPASVASLQPHMIGAQSSPGPKRPGNTLRKWLTSPVRRLSSGKADGHVKKLAHKHKKSREVRKSADAGSQKDSDDSAATPQDETVEERGRNEGLSSGTLSKSSSSGMQSCGEEEGEEGADAVPLPPPMAIQQHSLLQPDSQDDKASSRLLVRPTSSETPSAAELVSAIEELVKSKMVRPPRESLTFGSCSVLLLADGFALVFVLLWAAECGCGLWHISGVPMTTLGFTDLKDSENSGKPLFPHLQCIPMKGHRSK

SEQ ID NO: 913830 - protein, 1423 aa, Homo sapiens
AAAGAAAAMSGSSGGAAAPAASSGPAAAASAAGSGCGGGAGEGAEEAAKDLADIAAFFRSGFRKNDEMKAMDVLPILKEKVAYLSGGRDKRGGPILTFPARSNHDRIRQEDLRRLISYLACIPSEEVCKRGFTVIVDMRGSKWDSIKPLLKILQESFPCCIHVALIIKPDNFWQKQRTNFGSSKFEFETNMVSLEGLTKVVDPSQLTPEFDGCLEYNHEEWIEIRVAFEDYISNATHMLSRLEELQDILAKKELPQDLEGARNMIEEHSQLKKKVIKAPIEDLDLEGQKLLQRIQSSESFPKKNSGSGNADLQNLLPKVSTMLDRLHSTRQHLHQMWHVRKLKLDQCFQLRLFEQDAEKMFDWITHNKGLFLNSYTEIGTSHPHAMELQTQHNHFAMNCMNVYVNINRIMSVANRLVESGHYASQQIRQIASQLEQEWKAFAAALDERSTLLDMSSIFHQKAEKYMSNVDSWCKACGEVDLPSELQDLEDAIHHHQGIYEHITLAYSEVSQDGKSLLDKLQRPLTPGSSDSLTASANYSKAVHHVLDVIHEVLHHQRQRENIWQHRKVRLHQRLQLCVFQQDVQQVLDWIENHGEAFLSKHTGVGKSLHRARALQKRHEDFEEVAQNTYTNADKLLEAAEQLAQTGECDPEEIYQAAHQLEDRIQDFVRRVEQRKILLDMSVSFHTHVKELWTWLEELQKELLDDVYAESVEAVQDLIKRFGQQQQTTLQVTVNVIKEGEDLIQQLRDSAISSNKTPHNSSINHIETVLQQLDEAQSQMEELFQERKIKLELFLHVRIFERDAIDIISDLESWNDELSQQMNDFDTEDLTIAEQRLQHHADKALTMNNLTFDVIHQGQDLLQYVNEVQASGVELLCDRDVDMATRVQDLLEFLHEKQQELDLAAEQHRKHLEQCVQLRHLQAEVKQVLGWIRNGESMLNAGLITASSLQEAEQLQREHEQFQHAIEKTHQSALQVQQKAEAMLQANHYDMDMIRDCAEKVASHWQQLMLKMEDRLKLVNASVAFYKTSEQVCSVLESLEQEYKREEDWCGGADKLGPNSETDHVTPMISKHLEQKEAFLKACTLARRNADVFLKYLHRNSVNMPGMVTHIKAPEQQVKNILNELFQRENRVLHYWTMRKRRLDQCQQYVVFERSAKQALEWIHDNGEFYLSTHTSTGSSIQHTQELLKEHEEFQITAKQTKERVKLLIQLADGFCEKGHAHAAEIKKCVTAVDKRYRDFSLRMEKYRTSLEKALGISSDSNKSSKSLQLDIIPASIPGSEVKLRDAAHELNEEKRKSARRKEFIMAELIQTEKAYVRDLRECMDTYLWEMTSGVEEIPPGIVNKELIIFGNMQEIYEFHNNIFLKELEKYEQLPEDVGHCFVTWADKFQMYVTYCKNKPDSTQLILEHAGSYFDVSNRFLKRP

SEQ ID NO: 913831 - protein, 1110 aa, Homo sapiens
AAAGAAAAMSGSSGGAAAPAASSGPAAAASAAGSGCGGGAGEGAEEAAKDLADIAAFFRSGFRKNDEMKAMDVLPILKEKVAYLSGGRDKRGGPILTFPARSNHDRIRQEDLRRLISYLACIPSEEVCKRGFTVIVDMRGSKWDSIKPLLKILQESFPCCIHVALIIKPDNFWQKQRTNFGSSKFEFETNMVSLEGLTKVVDPSQLTPEFDGCLEYNHEEWIEIRVAFEDYISNATHMLSRLEELQDILAKKELPQDLEGARNMIEEHSQLKKKVIKAPIEDLDLEGQKLLQRIQSSESFPKKNSGSGNADLQNLLPKVSTMLDRLHSTRQHLHQMWHVRKLKLDQCFQLRLFEQDAEKMFDWITHNKGLFLNSYTEIGTSHPHAMELQTQHNHFAMNCMNVYVNINRIMSVANRLVESGHYASQQIRQIASQLEQEWKAFAAALDERSTLLDMSSIFHQKAEKYMSNVDSWCKACGEVDLPSELQDLEDAIHHHQGIYEHITLAYSEVSQDGKSLLDKLQRPLTPGSSDSLTASANYSKAVHHVLDVIHEVLHHQRQRENIWQHRKVRLHQRLQLCVFQQDVQQVLDWIENHGEAFLSKHTGVGKSLHRARALQKRHEDFEEVAQNTYTNADKLLEAAEQLAQTGECDPEEIYQAAHQLEDRIQDFVRRVEQRKILLDMSVSFHTHVKELWTWLEELQKELLDDVYAESVEAVQDLIKRFGQQQQTTLQVTVNVIKEGEDLIQQLRDSAISSNKTPHNSSINHIETVLQQLDEAQSQMEELFQERKIKLELFLHVRIFERDAIDIISDLESWNDELSQQMNDFDTEDLTIAEQRLQHHADKALTMNNLTFDVIHQGQDLLQYVNEVQASGVELLCDRDVDMATRVQDLLEFLHEKQQELDLAAEQHRKHLEQCVQLRHLQAEVKQVLGWIRNGESMLNAGLITASSLQEAEQLQREHEQFQHAIEKTHQSALQVQQKAEAMLQANHYDMDMIRDCAEKVASHWQQLMLKMEDRLKLVNASVAFYKTSEQVCSVLESLEQEYKREEDWCGGADKLGPNSETDHVTPMISKHLEQKEAFLKACTLARRNADVFLKYPAQDHTPAQEGSSRS

SEQ ID NO: 913832 - protein, 409 aa, Homo sapiens
AAAGAAAAMSGSSGGAAAPAASSGPAAAASAAGSGCGGGAGEGAEEAAKDLADIAAFFRSGFRKNDEMKAMDVLPILKEKVAYLSGGRDKRGGPILTFPARSNHDRIRQEDLRRLISYLACIPSEEVCKRGFTVIVDMRGSKWDSIKPLLKILQESFPCCIHVALIIKPDNFWQKQRTNFGSSKFEFETNMVSLEGLTKVVDPSQLTPEFDGCLEYNHEEWIEIRVAFEDYISNATHMLSRLEELQDILAKKELPQDLEGARNMIEEHSQLKKKVIKAPIEDLDLEGQKLLQRIQSSESFPKKNSGSGNADLQNLLPKVSTMLDRLHSTRQHLHQMWHVRKLKLDQCFQLRLFEQDAEKVKTGEANASVDMGEASAGGFGWKEREKVENGKAILTVCALNQRESFQKWH

SEQ ID NO: 913833 - protein, 199 aa, Homo sapiens
AAAGAAAAMSGSSGGAAAPAASSGPAAAASAAGSGCGGGAGEGAEEAAKDLADIAAFFRSGFRKNDEMKAMDVLPILKEKVAYLSGGRDKRGGPILTFPARSNHDRIRQEDLRRLISYLACIPSEEVCKRGFTVIVDMRGSKWDSIKPLLKILQESFPCCIHVALIIKPDNFWQKQRTNFGSSKFEFEVTSPVWLDPLN

SEQ ID NO: 913834 - protein, 206 aa, Homo sapiens
MAANKPKGQNSLALHKVIMVGSGGVGKSALTLQFMYDEFVEDYEPTKADSYRKKVVLDGEEVQIDILDTAGQEDYAAIRDNYFRSGEGFLCVFSITEMESFAATADFREQILRVKEDENVPFLLVGNKSDLEDKRQVSVEEAKNRAEQWNVNYVETSAKTRANVDKVFFDLMREIRARKMEDSKEKNGKKKRKSLAKRIRERCCIL

SEQ ID NO: 913835 - protein, 206 aa, Homo sapiens; identical to SEQ ID NO: 913834

SEQ ID NO: 913836 - protein, 170 aa, Homo sapiens [sequence omitted]

SEQ ID NO: 913837 - protein, 206 aa, Homo sapiens; identical to SEQ ID NO: 913834

SEQ ID NO: 913838 - protein, 138 aa, Homo sapiens
  misc_feature (110)..(110): Xaa can be any naturally occurring amino acid
  misc_feature (117)..(117): Xaa can be any naturally occurring amino acid
MAANKPKGQNSLALHKVIMVGSGGVGKSALTLQFMYDEFVEDYEPTKADSYRKKVVLDGEEVQIDILDTAGQEDYAAIRDNYFRSGEGFLCVFSITEMESFAATADFRGXKNFKEIXKKDEELFPFSYWVWVTKIQEF

SEQ ID NO: 913839 - protein, 188 aa, Homo sapiens
MVGSGGVGKSALTLQFMYDEFVEDYEPTKADSYRKKVVLDGEEVQIDILDTAGQEDYAAIRDNYFRSGEGFLCVFSITEMESFAATADFREQILRVKEDENVPFLLVGNKSDLEDKRQVSVEEAKNRAEQWNVNYVETSAKTRANVDKVFFDLMREIRARKMEDSKEKNGKKKRKSLAKRIRERCCIL

SEQ ID NO: 913840 - protein, 126 aa, Homo sapiens
PRPAPQRPGSDLWRLLQSRQEEGGSPQSKASESSSSFSSSSSSSSSRPGSPATRQTPPSTAPGAGPSRRQGPSTLRPEPRSRGFRSPRGGGLARGAGVFLLTPGVRCPMCPGEKIYAWHSFCIENS

SEQ ID NO: 913841 - protein, 745 aa, Homo sapiens [sequence omitted]

SEQ ID NO: 913842 - protein, 739 aa, Homo sapiens
GRTRLVPRGGAPPGEEEEEKVERKRRPLCPRPLKALTSGARALTGQESQVPPLGLPEEAATLEGPEPTAPGPQHHPGGLKRQSQGPSQGFQLPRQQAQGQSNNPSSHLPQLLARCIVRKDPRAFGWQLLQWLLIALPATFVNSAIRYLEGQLALSFRSRLVAHAYRLYFSQQTYYRVSNMDGRLRNPDQSLTEDVVAFAASVAHLYSNLTKPLLDVAVTSYTLLRAARSRGAGTAWPSAIAGLVVFLTANVLRAFSPKFGELVAEEARRKGELRYMHSRVVANSEEIAFYGGHEVELALLQRSYQDLASQINLILLERLWYVMLEQFLMKYVWSASGLLMVAVPIITATGYSESDAEAVKKAALEKKEEELVSERTEAFTIARNLLTAAADAIERIMSSYKEVTELAGYTARVHEMFQVFEDVQRCHFKRPRELEDAQAGSGTIGRSGVRVEGPLKIRGQVVDVEQGIICENIPIVTPSGEVVVASLNIRVEEGMHLLITGPNGCGKSSLFRILGGLWPTYGGVLYKPPPQRMFYIPQRPYMSVGSLRDQVIYPDSVEDMQRKGYSEQDLEAILDVVHLHHILQREGGWEAMCDWKDVLSGGEKQRIGMARMFYHRPKYALLDECTSAVSIDVEGKIFQAAKDAGIALLSITHRPSLWKYHTHLLQFDGEGGWKFEKLDSAARLSLTEEKQRLEQQLAGIPKMQRRLQELCQILGEAVAPAHVPAPSPQGPGGLQGAST

SEQ ID NO: 913843 - protein, 490 aa, Homo sapiens
MPVLSRPRPWRGNTLKRTAVLLALAAYGAHKVYPLVRQCLAPARGLQAPAGEPTQEASGVAAAKAGMNRVFLQRLLWLLRLLFPRVLCRETGLLALHSAALVSRTFLSVYVARLDGRLARCIVRKDPRAFGWQLLQWLLIALPATFVNSAIRYLEGQLALSFRSRLVAHAYRLYFSQQTYYRVSNMDGRLRNPDQSLTEDVVAFAASVAHLYSNLTKPLLDVAVTSYTLLRAARSRGAGTAWPSAIAGLVVFLTANVLRAFSPKFGELVAEEARRKGELRYMHSRVVANSEEIAFYGGHEVELALLQRSYQDLASQINLILLERLWYVMLEQFLMKYVWSASGLLMVAVPIITATGYSESGETQGSKRIQARGLSPIPLGAELTRAQLSQPAATSAAGATEALLPALMLSEVELALPLLVAFCPARTSRPLLPLRQAQDCKSGTLHVTSPGTDTLTHLSLSSTQLRLRGGRMCGVPGVSPFITPALVSSP

SEQ ID NO: 913844 - protein, 745 aa, Homo sapiens [sequence omitted]

SEQ ID NO: 913845 - protein, 745 aa, Homo sapiens [sequence omitted]

SEQ ID NO: 913846 - protein, 745 aa, Homo sapiens [sequence omitted]

SEQ ID NO: 913847 - protein, 412 aa, Homo sapiens
LFSTVAAPFYLPASSVGGFHLFIVASTDAEAVKKAALEKKEEELVSERTEAFTIARNLLTAAADAIERIMSSYKEVTELAGYTARVHEMFQVFEDVQRCHFKRPRELEDAQAGSGTIGRSGVRVEGPLKIRGQVVDVEQGIICENIPIVTPSGEVVVASLNIRVEEGMHLLITGPNGCGKSSLFRILGGLWPTYGGVLYKPPPQRMFYIPQRPYMSVGSLRDQVIYPDSVEDMQRKGYSEQDLEAILDVVHLHHILQREGGWEAMCDWKDVLSGGEKQRIGMARMFYHRPKYALLDECTSAVSIDVEGKIFQAAKDAGIALLSITHRPSLWKYHTHLLQFDGEGGWKFEKLDSAARLSLTEEKQRLEQQLAGIPKMQRRLQELCQILGEAVAPAHVPAPSPQGPGGLQGAST

SEQ ID NO: 913848 - protein, 214 aa, Homo sapiens
MGCDGGTIPKRHELVKGPKKVEKVDKDAELVAQWNYCTLSQEILRRPIVACELGRLYNKDAVIEFLLDKSAEKALGKAASHIKSIKNVTELKLSDNPAWEGDKGNTKGDKHDDLQRARFICPVVGLEMNGRHRFCFLRCCGCVFSERALKEIKAEVCHTCGAAFQEDDVIVLNGTKEDVDVLKTRMEERRLRAKLGKENKETQGSRVCFKTRCQ

SEQ ID NO: 913849 - protein, 214 aa, Homo sapiens; identical to SEQ ID NO: 913848

SEQ ID NO: 913850 - protein, 214 aa, Homo sapiens; identical to SEQ ID NO: 913848

SEQ ID NO: 913851 - protein, 214 aa, Homo sapiens; identical to SEQ ID NO: 913848

SEQ ID NO: 913852 - protein, 263 aa, Homo sapiens
KQNMSQGTRLGVGSDSRPAMGCDGGTIPKRHELVKGPKKVEKIWHLKNGKEWCSLHSEGKNKNGKEWDMEYDVDKDAELVAQWNYCTLSQEILRRPIVACELGRLYNKDAVIEFLLDKSAEKALGKAASHIKSIKNVTELKLSDNPAWEGDKGNTKGDKHDDLQRARFICPVVGLEMNGRHRFCFLRCCGCVFSERALKEIKAEVCHTCGAAFQEDDVIVLNGTKEDVDVLKTRMEERRLRAKLGKENKETQGSRVCFKTRCQ

SEQ ID NO: 913853 - protein, 195 aa, Homo sapiens
MEYDVDKDAELVAQWNYCTLSQEILRRPIVACELGRLYNKDAVIEFLLDKSAEKALGKAASHIKSIKNVTELKLSDNPAWEGDKGNTKGDKHDDLQRARFICPVVGLEMNGRHRFCFLRCCGCVFSERALKEIKAEVCHTCGAAFQEDDVIVLNGTKEDVDVLKTRMEERRLRAKLGKENKETQGSRVCFKTRCQ

SEQ ID NO: 913854 - protein, 195 aa, Homo sapiens; identical to SEQ ID NO: 913853

SEQ ID NO: 913855 - protein, 121 aa, Homo sapiens
SRGAYFFMVRRKTRIYMHDDLQRARFICPVVGLEMNGRHRFCFLRCCGCVFSERALKEIKAEVCHTCGAAFQEDDVIVLNGTKEDVDVLKTRMEERRLRAKLGKENKETQGSRVCFKTRCQ

SEQ ID NO: 913856 - protein, 104 aa, Homo sapiens
MGCDGGTIPKRHELVKGPKKVEKVDKDAELVAQWNYCTLSQEILRRPIVACELGRLYNKDAVIEFKEDVDVLKTRMEERRLRAKLGKENKETQGSRVCFKTRCQ

SEQ ID NO: 913857 - protein, 214 aa, Homo sapiens; identical to SEQ ID NO: 913848

SEQ ID NO: 913858 - protein, 214 aa, Homo sapiens
MGCDGGTIPKRHELVKGPKKVEKVDKDAELVAQWNYCTLSQEILRRPIVACELGRLYNKDAVIEFLLDKSAEKALGKAASHIKSIKNVTELKLSDNPAWEGDKGNTKGDKHDDLQRARFICPVVGLEMNGRHRFCFLRCCGCVFSERALKEIKAEVCHTCGAAFQEDDVIVLNGTKEDVDVLKTRMTSLRLLTKPVHLPLCSLLFVSSCCSPLL

SEQ ID NO: 913859 - protein, 214 aa, Homo sapiens; identical to SEQ ID NO: 913848

SEQ ID NO: 913860 - protein, 214 aa, Homo sapiens; identical to SEQ ID NO: 913848

SEQ ID NO: 913861 - protein, 195 aa, Homo sapiens; identical to SEQ ID NO: 913853

SEQ ID NO: 913862 - protein, 214 aa, Homo sapiens; identical to SEQ ID NO: 913848

SEQ ID NO: 913863 - protein, 288 aa, Homo sapiens
MGCDGGTIPKRHELVKGPKKVEKVDKDAELVAQWNYCTLSQEILRRPIVACELGRLYNKDAVIEFLLDKSAEKALGKAASHIKSIKNVTELKLSDNPAWEGDKGNTKGDKHDDLQRARFICPVVGLEMNGRHRFCFLRCCGCVFSERALKEIKAEVCHTCGAAFQEDDVIVLNGTKEDVDVLKTRMEERRLRAKLGKEAPGPSKVKTGKPEEASLDSREKKTNLAPKSTAMNESSSGKAGKPPCGATKRSIADSEESEAYKSLFTTHSSAKRSKEESAHWVTHTSYCF

SEQ ID NO: 913864 - protein, 135 aa, Homo sapiens
PGTDCVTVPDTTDWMDDERLSATLEKKTKKPKAAESVSKPDVSEEAPGPSKVKTGKPEEASLDSREKKTNLAPKSTAMNESSSGKAGKPPCGATKRSIADSEESEAYKSLFTTHSSAKRSKEESAHWVTHTSYCF

SEQ ID NO: 913865 - protein, 105 aa, Homo sapiens
MGPGHQKHQAKIRSLELSAPPHPHPSGRRRGIGHGVNNPSCLRGGVSIKIPEVEGLEIFWVADNIHKEDVDVLKTRMEERRLRAKLGKENKETQGSRVCFKTRCQ

SEQ ID NO: 913866 - protein, 631 aa, Homo sapiens
MTPALTALLCLGLSLGPRTRVQAGPFPKPTLWAEPGSVISWGSPVTIWCQGSLEAQEYQLDKEGSPEPWDRNNPLEPKNKARFSIPSMTQHHAGRYRCHYYSSAGWSEPSDPLELVMTGFYNKPTLSALPSPVVASGGNMTLRCGSQKGYHHFVLMKEGEHQLPRTLDSQQLHSGGFQALFPVGPVTPSHRWRFTCYYYYTNTPWVWSHPSDPLEILPSGVSRKPSLLTLQGPVLAPGQSLTLQCGSDVGYDRFVLYKEGERDFLQRPGQQPQAGLSQANFTLGPVSPSYGGQYRCYGAHNLSSEWSAPSDPLNILMAGQIYDTVSLSAQPGPTVASGENVTLLCQSWWQFDTFLLTKEGAAHPPLRLRSMYGAHKYQAEFPMSPVTSAHAGTYRCYGSRSSNPHLLSLPSEPLELMVSGHSGGSSLPPTGPPSTPGLGRYLEVLIGVSVAFVLLLFLLLFLLLRRQRHSKHRTSDQRKTDFQRPAGAAETEPKDRGLLRRSSPAADVQEENLYAAVKDTQSEDRVELDSQSPHDEDPQAVTYAPVKHSSPRREMASPPSSLSGEFLDTKDRQVEEDRQMDTEAAASEASQDVTYAQLHSLTLRRKATEPPPSQEGEPPAEPSIYATLAIH

SEQ ID NO: 913867 - protein, 631 aa, Homo sapiens
MTPALTALLCLGLSLGPRTRVQAGPFPKPTLWAEPGSVISWGSPVTIWCQGSLEAQEYQLDKEGSPEPWDRNNPLEPKNKARFSIPSMTQHHAGRYRCHYYSSAGWSEPSDPLELVMTGAYSKPTLSALPSPVVASGGNMTLRCGSQKRYHHFVLMKEGEHQLPRTLDSQQLHSGGFQALFPVGPVNPSHRWRFTCYYYYMNTPRVWSHPSDPLEILPSGVSRKPSLLTLQGPVLAPGQSLTLQCGSDVGYDRFVLYKEGERDFLQRPGQQPQAGLSQANFTLGPVSPSNGGQYRCYGAHNLSSEWSAPSDPLNILMAGQIYDTVSLSAQPGPTVASGENVTLLCQSWWQFDTFLLTKEGAAHPPLRLRSMYGAHKYQAEFPMSPVTSAHAGTYRCYGSRSSNPHLLSLPSEPLELMVSGHSGGSSLPPTGPPSTPGLGRYLEVLIGVSVAFVLLLFLLLFLLLRRQRHSKHRTSDQRKTDFQRPAGAAETEPKDRGLLRRSSPAADVQEENLYAAVKDTQSEDRVELDSQSPHDEDPQAVTYAPVKHSSPRREMASPPSSLSGEFLDTKDRQVEEDRQMDTEAAASEASQDVTYAQLHSLTLRRKATEPPPSQEGEPPAEPSIYATLAIH

SEQ ID NO: 913868 - protein, 315 aa, Homo sapiens
MAGQIYDTVSLSAQPGPTVASGENVTLLCQSWWQFDTFLLTKEGAAHPPLRLRSMYGAHKYQAEFPMSPVTSAHAGTYRCYGSRSSNPHLLSLPSEPLELMVSGHSGGSSLPPTGPPSTPGLGRYLEVLIGVSVAFVLLLFLLLFLLLRRQRHSKHRTSDQRKTDFQRPAGAAETEPKDRGLLRRSSPAADVQEENLYAAVKDTQSEDRVELDSQSPHDEDPQAVTYAPVKHSSPRREMASPPSSLSGEFLDTKDRQVEEDRQMDTEAAASEASQDVTYAQLHSLTLRRKATEPPPSQEGEPPAEPSIYATLAIH

SEQ ID NO: 913869 - protein, 194 aa, Homo sapiens
MTPALTALLCLGLSLGPRTRVQAGPFPKPTLWAEPGSVISWGSPVTIWCQGSLEAQEYQLDKEGSPEPWDRNNPLEPKNKARFSIPSMTQHHAGRYRCHYYSSAGWSEPSDPLELVMTGFYNKPTLSALPSPVVASGGNMTLRCGSQKGYHHFVLMKEGEHQLPRTLDSQQLHSGGFQALFPVGPVTPSHRWRV

SEQ ID NO: 913870 - protein, 106 aa, Homo sapiens
MTSFPLLTSSCQGLGRYLEVLIGVSVAFVLLLFLLLFLLLRRQRHSKHRTSDQRKTDFQRPAGAAETEPKDRGLLRRSSPAADVQEENLCKRKRGDKWGCWRDRSP

SEQ ID NO: 913871 - protein, 461 aa, Homo sapiens
MQAGPFPKPTLWAEPGSVISWGSPVTIWCQGSLEAQEYQLDKEGSPEPWDRNNPLEPKNKARFSIPSMTQHHAGRYRCHYYSSAGWSEPSDPLELVMTGFYNKPTLSALPSPVVASGGNMTLRCGSQKGYHHFVLMKEGEHQLPRTLDSQQLHSGGFQALFPVGPVTPSHRWRFTCYYYYTNTPWVWSHPSDPLEILPSGVSRKPSLLTLQGPVLAPGQSLTLQCGSDVGYDRFVLYKEGERDFLQRPGQQPQAGLSQANFTLGPVSPSYGGQYRCYGAHNLSSEWSAPSDPLNILMAGQIYDTVSLSAQPGPTVASGENVTLLCQSWWQFDTFLLTKEGAAHPPLRLRSMYGAHKYQAEFPMSPVTSAHAGTYRCYGSYSSNPHLLSFPSEPLELMVSGHSGGSSLPPTGPPSTPASHAKDYTVENLIRMGMAGLVLVFLGILLFEAQHSQRNPQDAARR

SEQ ID NO: 913872 - protein, 489 aa, Homo sapiens
MTPALTALLCLGLSLGPRTRVQAGPFPKPTLWAEPGSVISWGSPVTIWCQGSLEAQEYQLDKEGSPEPWDRNNPLEPKNKARFSIPSMTQHHAGRYRCHYYSSAGWSEPSDPLELVMTGFYNKPTLSALPSPVVASGGNMTLRCGSQKGYHHFVLMKEGEHQLPRTLDSQQLHSGGFQALFPVGPVTPSHRWRFTCYYYYTNTPWVWSHPSDPLEILPSGVSRKPSLLTLQGPVLAPGQSLTLQCGSDVGYDRFVLYKEGERDFLQRPGQQPQAGLSQANFTLGPVSPSYGGQYRCYGAHNLSSEWSAPSDPLNILMAGQIYDTVSLSAQPGPTVASGENVTLLCQSWWQFDTFLLTKEGAAHPPLRLRSMYGAHKYQAEFPMSPVTSAHAGTYRCYGSRSSNPHLLSLPSEPLELMVSGHSGGSSLPPTGPPSTPGLGRYLEVLIGVSVAFVLLLFLLLFLLLRRQRHSKHRTSGLRLCPSSPRPEKD

SEQ ID NO: 913873 - protein, 648 aa, Homo sapiens
MTPALTALLCLGLSLGPRTRVQAGPFPKPTLWAEPGSVISWGSPVTIWCQGSLEAQEYQLDKEGSPEPWDRNNPLEPKNKARFSIPSMTQHHAGRYRCHYYSSAGWSEPSDPLELVMTGAYSKPTLSALPSPVVASGGNMTLRCGSQKRYHHFVLMKEGEHQLPRTLDSQQLHSGGFQALFPVGPVNPSHRWRFTCYYYYMNTPRVWSHPSDPLEILPSGVSRKPSLLTLQGPVLAPGQSLTLQCGSDVGYDRFVLYKEGERDFLQRPGQQPQAGLSQANFTLGPVSPSNGGQYRCYGAHNLSSEWSAPSDPLNILMAGQIYDTVSLSAQPGPTVASGENVTLLCQSWWQFDTFLLTKEGAAHPPLRLRSMYGAHKYQAEFPMSPVTSAHAGTYRCYGSRSSNPHLLSLPSEPLELMVSGHSGGSSLPPTGPPSTPGGPEDQPLNPPGSGPQNGLGRYLEVLIGVSVAFVLLLFLLLFLLLRRQRHSKHRTSDQRKTDFQRPAGAAETEPKDRGLLRRSSPAADVQEENLYAAVKDTQSEDRVELDSQSPHDEDPQAVTYAPVKHSSPRREMASPPSSLSGEFLDTKDRQVEEDRQMDTEAAASEASQDVTYAQLHSLTLRRKATEPPPSQEGEPPAEPSIYATLAIH

SEQ ID NO: 913874 - protein, 464 aa, Homo sapiens
MTPILTVLICLGLSLGPRTHVQAGPFPKPTLWAEPGSVISWGSPVTIWCQGSLEAQEYQLDKEGSPEPWDRNNPLEPKNKARFSIPSMTQHHAGRYRCHYYSSAGWSEPSDPLELVMTGFYNKPTLSALPSPVVASGGNMTLRCGSQKGYHHFVLMKEGEHQLPRTLDSQQLHSGGFQALFPVGPVTPSHRWRFTCYYYYTNTPWVWSHPSDPLEILPSGVSRKPSLLTLQGPVLAPGQSLTLQCGSDVGYDRFVLYKEGERDFLQRPGQQPQAGLSQANFTLGPVSPSYGGQYRCYGAHNLSSEWSAPSDPLNILMAGQIYDTVSLSAQPGPTVASGENVTLLCQSWWQFDTFLLTKEGAAHPPLRLRSMYGAHKYQAEFPMSPVTSAHAGTYRCYGSYSSNPHLLSFPSEPLELMVSASHAKDYTVENLIRMGMAGLVLVFLGILLFEAQHSQRNPQDAARR

SEQ ID NO: 913875 - protein, 611 aa, Homo sapiens
MQAGPFPKPTLWAEPGSVISWGSPVTIWCQGSLEAQEYQLDKEGSPEPWDRNNPLEPKNKARFSIPSMTQHHAGRYRCHYYSSAGWSEPSDPLELVMTGFYNKPTLSALPSPVVASGGNMTLRCGSQKGYHHFVLMKEGEHQLPRTLDSQQLHSGGFQALFPVGPVTPSHRWRFTCYYYYTNTPWVWSHPSDPLEILPSGVSRKPSLLTLQGPVLAPGQSLTLQCGSDVGYDRFVLYKEGERDFLQRPGQQPQAGLSQANFTLGPVSPSYGGQYRCYGAHNLSSEWSAPSDPLNILMAGQIYDTVSLSAQPGPTVASGENVTLLCQSWWQFDTFLLTKEGAAHPPLRLRSMYGAHKYQAEFPMSPVTSAHAGTYRCYGSRSSNPHLLSLPSEPLELMVSGHSGGSSLPPTGPPSTPGLGRYLEVLIGVSVAFVLLLFLLLFLLLRRQRHSKHRTSDQRKTDFQRPAGAAETEPKDRGLLRRSSPAADVQEENLYAAVKDTQSEDRVELDSQSPHDEDPQAVTYAPVKHSSPRREMASPPSSLSGEFLDTKDRQVEEDRQMDTEAAASEASQDVTYAQLHSLTLRRKATEPPPSQEGEPPAEPSIYATLAIH

SEQ ID NO: 913876 - protein, 103 aa, Homo sapiens
MASPPSSLSGEFLDTKDRQVEEDRQMDTEVSPFLSRPPASPTPTTFLTSHSPPLQAAASEASQDVTYAQLHSLTLRRKATEPPPSQEGEPPAEPSIYATLAIH

SEQ ID NO: 913877 - protein, 51 aa, Homo sapiens
MPSLHSSIPDDFKNVFDQKTDNLPRKSKLVVGGKVFAEVCMVSQPRPCFQR

SEQ ID NO: 913878 - protein, 51 aa, Homo sapiens; identical to SEQ ID NO: 913877

SEQ ID NO: 913879 - protein, 108 aa, Homo sapiens
MTSRMFLTRKPTTFPESPSSWWVEKCSPRGLLLTCLMSAFLLLLLAITRCRCGRLFLYSCVNLPRHGFLCSALEYPGSCLGHSSESREKHPSTPSLSRLAEDALHLTS

SEQ ID NO: 913880 - protein, 109 aa, Homo sapiens
TRLQAGSHCRSDKLWVVNAEKATMYSTYPGSVHLGFMLEPILLPPPLHIEGECIFARASHCPSCTSALGQESANYSPEGMSGPRLVFVNKVLLEPGAVAHNCNPHTLGS

SEQ ID NO: 913881 - protein, 108 aa, Homo sapiens; identical to SEQ ID NO: 913879

SEQ ID NO: 913882 - protein, 51 aa, Homo sapiens; identical to SEQ ID NO: 913877

SEQ ID NO: 913883 - protein, 51 aa, Homo sapiens; identical to SEQ ID NO: 913877

SEQ ID NO: 913884 - protein, 109 aa, Homo sapiens
ETTAWRDARAGETSGIHLLGDADKGRDSVTERPWRHTEGMSAEVPGEGRLERHTSTHKVMSARGSGRWDTGSCRQVTAFHHPVTLEQGLLVSGEMEARFRKIRNGKVCL

SEQ ID NO: 913885 - protein, 174 aa, Homo sapiens
AAASPEPARAPPEPAPPAEATGAPAPSRPCAPEPAASPAGPEEPGEPAGLGELGEPAGPGEPEGPGDPAAAPAEAEEQAVEARQEEEQDLDGEKGPSSEGPEEEDGEGFSFKYSPGKLRGNQYKKMMTKEELEEEQRVQKEQLAAIFKLMKDNKETFGEMSDGDVQEQLRLYDM

SEQ ID NO: 913886 - protein, 100 aa, Homo sapiens
ACVRPNQLRCSKWVLFSFSSCSEKQPQSHKREESPNSAGCTQAPSLPSGLGAPSSSLSFLLDRVQKEQLAAIFKLMKDNKETFGEMSDGDVQEQLRLYDM

SEQ ID NO: 913887 - protein, 140 aa, Homo sapiens
AAASPEPARAPPEPAPPAEATGAPAPSRPCAPEPAASPAGPEEPGEPAGLGELGEPAGPGEPEGPGDPAAAPAEAEEQAVEARQEEEQDLDGEKGPSSEGPEEEDGEGFSFKYSPGKLRGNQYKKMMTKEELEEEQRTEE

SEQ ID NO: 913888 - protein, 140 aa, Homo sapiens; identical to SEQ ID NO: 913887

SEQ ID NO: 913889 - protein, 147 aa, Homo sapiens
AAASPEPARAPPEPAPPAEATGAPAPSRPCAPEPAASPAGPEEPGEPAGLGELGEPAGPGEPEGPGDPAAAPAEAEEQAVEARQEEEQDLDGEKGPSSEGPEEEDGEGFSFKYSPGKLRGNQYKKMMTKEELEEEQRIELTSDLTSL

SEQ ID NO: 913890 - protein, 169 aa, Homo sapiens
AAASPEPARAPPEPAPPAEATGAPAPSRPCAPEPAASPAGPEEPGEPAGLGELGEPAGPGEPEGPGDPAAAPAEAEEQAVEARQVRTGALAAPSPPPGLRLPLPFPAEPGSGAAASSPGCPQEAQNPRPAGNAGPAMLSRSPANSPPSPRKCGEGRARRSLFGGVLLSP

SEQ ID NO: 913891 - protein, 147 aa, Homo sapiens; identical to SEQ ID NO: 913889

SEQ ID NO: 913892 - protein, 140 aa, Homo sapiens; identical to SEQ ID NO: 913887

SEQ ID NO: 913893 - protein, 140 aa, Homo sapiens; identical to SEQ ID NO: 913887

SEQ ID NO: 913894 - protein, 140 aa, Homo sapiens; identical to SEQ ID NO: 913887

SEQ ID NO: 913895 - protein, 293 aa, Homo sapiens
PRDSEGVNGGAAGRARTGAREAPARKPGAARWGAQGRAGAGMEDGVAGPQLGAAAEAAEAAEARARPGVTLRPFAPLSGAAEADEGGGDWSFIDCEMEEVDLQDLPSATIACHLDPRVFVDGLCRAKFESLFRTYDKDITFQYFKSFKRVRINFSNPFSAADARLQLHKTEFLGKEMKLYFAQTLHIGSSHLAPPNPDKQFLISPPASPPVGWKQVEDATPVINYDLLYAISKLGPGEKYELHAATDTTPSVVVHVCESDQEKEEEEEMERMRRPKPKIIQTRRPEYTPIHLS

SEQ ID NO: 913896 - protein, 224 aa, Homo sapiens
PCALAIAPHLLAGGGGHLIPREEETDIERRRDSVFINEDDVPAFPICTIGRKANVWAKFESLFRTYDKDITFQYFKSFKRVRINFSNPFSAADARLQLHKTEFLGKEMKLYFAQTLHIGSSHLAPPNPDKQFLISPPASPPVGWKQVEDATPVINYDLLYAISKLGPGEKYELHAATDTTPSVVVHVCESDQEKEEEEEMERMRRPKPKIIQTRRPEYTPIHLS

SEQ ID NO: 913897 - protein, 197 aa, Homo sapiens
MHFRNFNYSFSSLIACVANSDIFSESETRAKFESLFRTYDKDITFQYFKSFKRVRINFSNPFSAADARLQLHKTEFLGKEMKLYFAQTLHIGSSHLAPPNPDKQFLISPPASPPVGWKQVEDATPVINYDLLYAISKLGPGEKYELHAATDTTPSVVVHVCESDQEKEEEEEMERMRRPKPKIIQTRRPEYTPIHLS

SEQ ID NO: 913898 - protein, 317 aa, Homo sapiens
MEDGVAGPQLGAAAEAAEAAEARARPGVTLRPFAPLSGAAEADEGGGDWSFIDCEMEEVDLQDLPSATIACHLDPRVFVDGLCRLKKAVVAAYVIGFIVELYLKLHSSELILEHISHCPEQTGLFLQKDSCAVNQSQIVLNFPTYSICQAKFESLFRTYDKDITFQYFKSFKRVRINFSNPFSAADARLQLHKTEFLGKEMKLYFAQTLHIGSSHLAPPNPDKQFLISPPASPPVGWKQVEDATPVINYDLLYAISKLGPGEKYELHAATDTTPSVVVHVCESDQEKEEEEEMERMRRPKPKIIQTRRPEYTPIHLS

SEQ ID NO: 913899 - protein, 197 aa, Homo sapiens; identical to SEQ ID NO: 913897

SEQ ID NO: 913900 - protein, 104 aa, Homo sapiens
MQCGNCSVSFLPSCSHVCACILLIYKTNLCSYIKLHRCCFTSFGKPGKRLENVSPFPDSRILDSLQQHLLAELFLECIHSASPTVQRVTCAFAKEVDLKFLCRI

SEQ ID NO: 913901 - protein, 104 aa, Homo sapiens; identical to SEQ ID NO: 913900

SEQ ID NO: 913902 - protein, 99 aa, Homo sapiens
WRWLVTTSSEVAAEIGVGWKQVEDATPVINYDLLYAISKLGPGEKYELHAATDTTPSVVVHVCESDQEKEEEEEMERMRRPKPKIIQTRRPEYTPIHLS

SEQ ID NO: 913903 - protein, 154 aa, Homo sapiens
MHFRNFNYSFSSLIACVANSDIFSESETRAKFESLFRTYDKDITFQYFKSFKRVRINFSNPFSAADARLQLHKTEFLGKEMKLYFAQTLHIGSSHLAPPNPDKQFLISPPASPPVGWKQVEDATPVINYDLLYAISKLGPDDWLEGAAQRNLSG

SEQ ID NO: 913904 - protein, 197 aa, Homo sapiens; identical to SEQ ID NO: 913897

SEQ ID NO: 913905 - protein, 171 aa, Homo sapiens
MVYAKFESLFRTYDKDITFQYFKSFKRVRINFSNPFSAADARLQLHKTEFLGKEMKLYFAQTLHIGSSHLAPPNPDKQFLISPPASPPVGWKQVEDATPVINYDLLYAISKLGPGEKYELHAATDTTPSVVVHVCESDQEKEEEEEMERMRRPKPKIIQTRRPEYTPIHLS

SEQ ID NO: 913906 - protein, 293 aa, Homo sapiens; identical to SEQ ID NO: 913895

SEQ ID NO: 913907 - protein, 117 aa, Homo sapiens
MKLYFAQTLHIGSSHLAPPNPDKQFLISPPASPPVGWKQVEDATPVINYDLLYAISKLGPGEKYELHAATDTTPSVVVHVCESDQEKEEEEEMERMRRPKPKIIQTRRPEYTPIHLS

SEQ ID NO: 913908 - protein, 197 aa, Homo sapiens; identical to SEQ ID NO: 913897

SEQ ID NO: 913909 - protein, 197 aa, Homo sapiens; identical to SEQ ID NO: 913897

SEQ ID NO: 913910 - protein, 197 aa, Homo sapiens; identical to SEQ ID NO: 913897

SEQ ID NO: 913911 - protein, 257 aa, Homo sapiens
MSPLDQAVIRAVCLSGGSCWGGVRCLVRGGPNIGPAAQLLGGIPLCWPPAVTAGEVKLLLSSETPIEGKNMSFVNDLTVTQDGRKIYFTDSSSKWQRRDYLLLVMEGTDDGRLLEYDTVTREVKVLLDQLRFPNGVQLSPAEDFVLVAETTMARIRRVYVSGLMKGGADLFVENMPGFPDNIRPSSSGGYWVGMSTIRPNPGFSMLDFLSERPWIKRMIFKLFVQETGDEVGAAVTASFQNSGQGGIGEGRMIRRVV

SEQ ID NO: 913912 - protein, 445 aa, Homo sapiens
  misc_feature (2)..(2): Xaa can be any naturally occurring amino acid
EXKKLGLGTRLGVNRPREVVSAGEAGARTMSEADGLRQRRPLRPQVVTDDDGQAPEAKDGSSFSGRVFRVTFLMLAVSLTVPLLGAMMLLESPIDPQPLSFKEPPLLLGVLHPNTKLRQAERLFENQLVGPESIAHIGDVMFTGTADGRVVKLENGEIETIARFGSGPCKTRDDEPVCGRPLGIRAGPNGTLFVADAYKGLFEVNPWKREVKLLLSSETPIEGKNMSFVNDLTVTQDGRKIYFTDSSSKWQRRDYLLLVMEGTDDGRLLEYDTVTREVKVLLDQLRFPNGVQLSPAEDFVLVAETTMARIRRVYVSGLMKGGADLFVENMPGFPDNIRPSSSGGYWVGMSTIRPNPGFSMLDFLSERPWIKRMIFKLFSQETVMKFVPRYSLVLELSDSGAFRRSLHDPDGLVATYISEVHEHDGHLYLGSFRSPFLCRLSLQAV

SEQ ID NO: 913913 - protein, 363 aa, Homo sapiens
  misc_feature (2)..(2): Xaa can be any naturally occurring amino acid
EXKKLGLGTRLGVNRPRDFKEPPLLLGVLHPNTKLRQAERLFENQLVGPESIAHIGDVMFTGTADGRVVKLENGEIETIARFGSGPCKTRDDEPVCGRPLGIRAGPNGTLFVADAYKGLFEVNPWKREVKLLLSSETPIEGKNMSFVNDLTVTQDGRKIYFTDSSSKWQRRDYLLLVMEGTDDGRLLEYDTVTREVKVLLDQLRFPNGVQLSPAEDFVLVAETTMARIRRVYVSGLMKGGADLFVENMPGFPDNIRPSSSGGYWVGMSTIRPNPGFSMLDFLSERPWIKRMIFKLFSQETVMKFVPRYSLVLELSDSGAFRRSLHDPDGLVATYISEVHEHDGHLYLGSFRSPFLCRLSLQAV

SEQ ID NO: 913914 - protein, 442 aa, Homo sapiens
  misc_feature (7)..(7): Xaa can be any naturally occurring amino acid
  misc_feature (83)..(83): Xaa can be any naturally occurring amino acid
MKGPLRXWSRPRRGFIYYRRKTSSVSGGWRATASVGSRSGRHDERRLEGRLASRTTMMHPELGRALREFRVTLMLLFLTVPVXHDAVDLLIQALVEDFKEPPLLLGVLHPNTKLRQAERLFENQLVGPESIAHIGDVMFTGTADGRVVKLENGEIETIARFGSGPCKTRDDEPVCGRPLGIRAGPNGTLFVADAYKGLFEVNPWKREVKLLLSSETPIEGKNMSFVNDLTVTQDGRKIYFTDSSSKWQRRDYLLLVMEGTDDGRLLEYDTVTREVKVLLDQLRFPNGVQLSPAEDFVLVAETTMARIRRVYVSGLMKGGADLFVENMPGFPDNIRPSSSGGYWVGMSTIRPNPGFSMLDFLSERPWIKRMIFKLFSQETVMKFVPRYSLVLELSDSGAFRRSLHDPDGLVATYISEVHEHDGHLYLGSFRSPFLCRLSLQAV

SEQ ID NO: 913915 - protein, 397 aa, Homo sapiens
MSEADGLRQRRPLRPQVVTDDDGQAPEAKDGSSFSGRVFRVTFLMLAVSLTVPLLGAMMLLESPIDPQPLSFKEPPLLLGVLHPNTKLRQAERLFENQLVGPESIAHIGDVMFTGTADGRVVKLENGEIETIARFGSGPCKTRDDEPVCGRPLGIRAGPNGTLFVADAYKGLFEVNPWKREVKLLLSSETPIEGKNMSFVNDLTVTQDGRKIYFTDSSSKWQRRDYLLLVMEGTDDGRLLEYDTVTREVKVLLDQLRFPNGVQLSPAEDFVLVAETTMARIRRVYVSGLMKGGADLFVENMPGFPDNIRPSSSGGYWVGMSTIRPNPGFSMLDFLSERPWIKRMIFKASLRICTPRFEESSGILLFVLEAMLCGLWTCLLFLNVSCSQISIICTLPI

SEQ ID NO: 913916 - protein, 416 aa, Homo sapiens
MSEADGLRQRRPLRPQVVTDDDGQAPEAKDGSSFSGRVFRVTFLMLAVSLTVPLLGAMMLLESPIDPQPLSFKEPPLLLGVLHPNTKLRQAERLFENQLVGPESIAHIGDVMFTGTADGRVVKLENGEIETIARFGSGPCKTRDDEPVCGRPLGIRAGPNGTLFVADAYKGLFEVNPWKREVKLLLSSETPIEGKNMSFVNDLTVTQDGRKIYFTDSSSKWQRRDYLLLVMEGTDDGRLLEYDTVTREVKVLLDQLRFPNGVQLSPAEDFVLVAETTMARIRRVYVSGLMKGGADLFVENMPGFPDNIRPSSSGGYWVGMSTIRPNPGFSMLDFLSERPWIKRMIFKLFSQETVMKFVPRYSLVLELSDSGAFRRSLHDPDGLVATYISEVHEHDGHLYLGSFRSPFLCRLSLQAV

SEQ ID NO: 913917 - protein, 416 aa, Homo sapiens; identical to SEQ ID NO: 913916

SEQ ID NO: 913918 - protein, 416 aa, Homo sapiens; identical to SEQ ID NO: 913916

SEQ ID NO: 913919 - protein, 290 aa, Homo sapiens
MSPLDQAVIRAVCLSGGSCWGGVRCLVRGGPNIGPAAQLLGGIPLCWPPAVTAGEVKLLLSSETPIEGKNMSFVNDLTVTQDGRKIYFTDSSSKWQRRDYLLLVMEGTDDGRLLEYDTVTREVKVLLDQLRFPNGVQLSPAEDFVLVAETTMARIRRVYVSGLMKGGADLFVENMPGFPDNIRPSSSGGYWVGMSTIRPNPGFSMLDFLSERPWIKRMIFKLFSQETVMKFVPRYSLVLELSDSGAFRRSLHDPDGLVATYISEVHEHDGHLYLGSFRSPFLCRLSLQAV

SEQ ID NO: 913920 - protein, 416 aa, Homo sapiens; identical to SEQ ID NO: 913916

SEQ ID NO: 913921 - protein, 416 aa, Homo sapiens; identical to SEQ ID NO: 913916

SEQ ID NO: 913922 - protein, 354 aa, Homo sapiens
MSEADGLRQRRPLRPQVVTDDDGQAPEAKDGSSFSGRVFRVTFLMLAVSLTVPLLGAMMLLESPIDPQPLSFKEPPLLLGVLHPNTKLRQAERLFENQLVGPESIAHIGDVMFTGTADGRVVKLENGEIETIARFGSGPCKTRDDEPVCGRPLGIRAGPNGTLFVADAYKGLFEVNPWKREVKLLLSSETPIEGKNMSFVNDLTVTQDGRKIYFTDSSSKWQRRDYLLLVMEGTDDGRLLEYDTVTREVKVLLDQLRFPNGVQLSPAEDFVLVAETTMARIRRVYVSGLMKGGADLFVENMPGFPDNIRPSSSGGYWVGMSTIRPNPGFSMLDFLSERPWIKRMIFKPGKLRWL

SEQ ID NO: 913923 - protein, 363 aa, Homo sapiens
PWGESAEAGIPIDPQPLSFKEPPLLLGVLHPNTKLRQAERLFENQLVGPESIAHIGDVMFTGTADGRVVKLENGEIETIARFGSGPCKTRDDEPVCGRPLGIRAGPNGTLFVADAYKGLFEVNPWKREVKLLLSSETPIEGKNMSFVNDLTVTQDGRKIYFTDSSSKWQRRDYLLLVMEGTDDGRLLEYDTVTREVKVLLDQLRFPNGVQLSPAEDFVLVAETTMARIRRVYVSGLMKGGADLFVENMPGFPDNIRPSSSGGYWVGMSTIRPNPGFSMLDFLSERPWIKRMIFKLFSQETVMKFVPRYSLVLELSDSGAFRRSLHDPDGLVATYISEVHEHDGHLYLGSFRSPFLCRLSLQAV

SEQ ID NO: 913924 - protein, 354 aa, Homo sapiens; identical to SEQ ID NO: 913922

SEQ ID NO: 913925 - protein, 487 aa, Homo sapiens
MSEADGLRQRRPLRPQVVTDDDGQAPEAKDGSSFSGRVFRVTFLMLAVSLTVPLLGAMMLLESPIDPQPLSFKEPPLLLGVLHPNTKLRQAERLFENQLVGPESIAHIGDVMFTGTADGRVVKLENGEIETIARFGSGPCKTRDDEPVCGRPLGIRAGPNGTLFVADAYKGLFEVNPWKREVKLLLSSETPIEGKNMSFVNDLTVTQDGRKIYFTDSSSKWQRRDYLLLVMEGTDDGRLLEYDTVTREVKVLLDQLRFPNGVQLSPAEDFVLVAETTMARIRRVYVSGLMKGGADLFVENMPGFPDNIRPSSSGGYWVGMSTIRPNPGFSMLDFLSERPWIKRMIFKASLRICTPRFEESSGILLFVLEAMLCGLWTCLLFLNVSCSQISIICTFYLKCFKSKQKTCVFQGSCAGCDLLFSQETVMKFVPRYSLVLELSDSGAFRRSLHDPDGLVATYISEVHEHDGHLYLGSFRSPFLCRLSLQAV

SEQ ID NO: 913926 - protein, 289 aa, Homo sapiens
MSEADGLRQRRPLRPQVVTDDDGQAPEAKDGSSFSGRVFRVTFLMLAVSLTVPLLGAMMLLESPIDPQPLSFKEPPLLLGVLHPNTKLRQAERLFENQLVGPESIAHIGDVMFTGTADGRVVKLENGEIETIARFGSGPCKTRDDEPVCGRPLGIRAGPNGTLFVADAYKGLFEVNPWKREVKLLLSSETPIEGKNMSFVNDLTVTQDGRKIYFTDSSSKWQRRDYLLLVMEGTDDGRLLEYDTVTREVKVLLDQLRFPNGVQLSPAEDFVLVAETTMARIRSSLVKRR

SEQ ID NO: 913927 - protein, 220 aa, Homo sapiens
MSFVNDLTVTQDGRKIYFTDSSSKWQRRDYLLLVMEGTDDGRLLEYDTVTREVKVLLDQLRFPNGVQLSPAEDFVLVAETTMARIRRVYVSGLMKGGADLFVENMPGFPDNIRPSSSGGYWVGMSTIRPNPGFSMLDFLSERPWIKRMIFKLFSQETVMKFVPRYSLVLELSDSGAFRRSLHDPDGLVATYISEVHEHDGHLYLGSFRSPFLCRLSLQAV

SEQ ID NO: 913928 - protein, 153 aa, Homo sapiens
CGDSRRSRYHPPSSWPGYVRVYVSGLMKGGADLFVENMPGFPDNIRPSSSGGYWVGMSTIRPNPGFSMLDFLSERPWIKRMIFKLFSQETVMKFVPRYSLVLELSDSGAFRRSLHDPDGLVATYISEVHEHDGHLYLGSFRSPFLCRLSLQAV

SEQ ID NO: 913929 - protein, 160 aa, Homo sapiens
MSEADGLRQRRPLRPQVVTDDDGQAPEAKDGSSFSGRVFRVTFLMLAVSLTVPLLGAMMLLESPIDPQPLSFKEPPLLLGVLHPNTKLRQAERLFENQLVGPEPAVRAVLAKTWNCVLKGYVGRGLSIVCMKSLLTLAAQRGLCWVSFCEYLRADHAGIG

SEQ ID NO: 913930 - protein, 259 aa, Homo sapiens
MATATGVAEERLLAALAYLQCAVGCAVFARNRQTNSVYGRHALPSHRLRVPARAAWVVQELPSLALPLYQYASESAPRLRSAPNCILLAMFLVHYGHRCLIYPFLMRGGKPMPLLACTMAIMFCTCNGYLQSRYLSHCAVYADDWVTDPRFLIGFGLWLTGMLINIHSDHILRNLRKPGDTGYKIPRGGLFEYVTAANYFGEIMEWCGYALASWSVQGAAFAFFTFCFLSGRAKEHHEWYLRKFEEYPKFRKIIIPFLF

SEQ ID NO: 913931 - protein, 259 aa, Homo sapiens; identical to SEQ ID NO: 913930

SEQ ID NO: 913932 - protein, 258 aa, Homo sapiens
MATATGVAEERLLAALAYLQCAVGCAVFARNRQTNSVYGRHALPSHRLRVPARAAWVVQELPSLALPLYQYASESAPRLRSAPNCILLAMFLVHYGHRCLIYPFLMRGGKPMPLLACTMAIMFCTCNGYLQSRYLSHCAVYADDWVTDPRFLIGFGLWLTGMLINIHSDHILRNLRKPGDTGYKIPRGGLFEYVTAANYFGEIMEWCGYALASWSVQGAAFAFFTFCFLSGRAKEHHEWYLRKFEEYPKFRKIIIPFF

SEQ ID NO: 913933 - protein, 259 aa, Homo sapiens; identical to SEQ ID NO: 913930

SEQ ID NO: 913934 - protein, 111 aa, Homo sapiens
NFFPLGFGLWLTGMLINIHSDHILRNLRKPGDTGYKIPRGGLFEYVTAANYFGEIMEWCGYALASWSVQGAAFAFFTFCFLSGRAKEHHEWYLRKFEEYPKFRKIIIPFLF

SEQ ID NO: 913935 - protein, 259 aa, Homo sapiens; identical to SEQ ID NO: 913930

SEQ ID NO: 913936 - protein, 211 aa, Homo sapiens
MATATGVAEERLLAALAYLQCAVGCAVFPRLRSAPNCILLAMFLVHYGHRCLIYPFLMRGGKPMPLLACTMAIMFCTCNGYLQSRYLSHCAVYADDWVTDPRFLIGFGLWLTGMLINIHSDHILRNLRKPGDTGYKIPRGGLFEYVTAANYFGEIMEWCGYALASWSVQGAAFAFFTFCFLSGRAKEHHEWYLRKFEEYPKFRKIIIPFLF

SEQ ID NO: 913937 - protein, 211 aa, Homo sapiens; identical to SEQ ID NO: 913936

SEQ ID NO: 913938 - protein, 72 aa, Homo sapiens
APTAPATPEKPDLRTLSAESRQCGTPVAAPPVAAPPAPAPPPYMLPASPQRAQLHPPGHVPRPLRASVLACG

SEQ ID NO: 913939 - protein, 180 aa, Homo sapiens
MATATGVAEERLLAALAYLQCAVGCAVFARNRQTNSVYGRHALPSHRLRVPARAAWVVQELPSLALPLYQYASESAPRLRSAPNCILLAMFLVHYGHRCLIYPFLMRGGKPMPLLACTMAIMFCTCNGYLQSRYLSHCAVYADDWVTDPRFLIEEEQAFEFLCRSHDLCLPMFSEAERMS

SEQ ID NO: 913940 - protein, 117 aa, Homo sapiens
MAAAAAGAGSGPWAAQEKQFPPALLSFFIYNPRFGPREGQEENKILFYHPNEVEKNEKIRNVGLCEAIVQFTRTFSPSKPAKSLHTQKNRQFFNEPEENFWMVMVFTHTVYLSEIVW

SEQ ID NO: 913941 - protein, 233 aa, Homo sapiens
MAAAAAGAGSGPWAAQEKQFPPALLSFFIYNPRFGPREGQEENKILFYHPNEVEKNEKIRNVGLCEAIVQFTRTFSPSKPAKSLHTQKNRQFFNEPEENFWMVMVVRNPIIEKQSKDGKPVIEYQEEELLDKVYSSVLRQCYSMYKLFNGTFLKAMEDGGVKLLKERLEKFFHRYLQTLHLQSCDLLDIFGGISFFPLDKMTYLKIQSFINRMEESLNIVKYTAFLYNDQLIW

SEQ ID NO: 913942 - protein, 102 aa, Homo sapiens
IVVSRCSPFDGVLPGTETKYSFLFMSTTPIGNYGLSGKHLVLMRSGSYGRQEESEQLGKERRDLELCVLITAPQECPVSAGMLSSAGENDTTHRFAPEGEET

SEQ ID NO: 913943 - protein, 482 aa, Homo sapiens
MAAAAAGAGSGPWAAQEKQFPPALLSFFIYNPRFGPREGQEENKILFYHPNEVEKNEKIRNVGLCEAIVQFTRTFSPSKPAKSLHTQKNRQFFNEPEENFWMVMVVRNPIIEKQSKDGKPVIEYQEEELLDKVYSSVLRQCYSMYKLFNGTFLKAMEDGGVKLLKERLEKFFHRYLQTLHLQSCDLLDIFGGISFFPLDKMTYLKIQSFINRMEESLNIVKYTAFLYNDQLIWSGLEQDDMRILYKYLTTSLFPRHIEPELAGRDSPIRAEMPGNLQHYGRFLTGPLNLNDPDAKCRFPKIFVNTDDTYEELHLIVYKAMSAAVCFMIDASVHPTLDFCRRLDSIVGPQLTVLASDICEQFNINKRMSGSEKEPQFKFIYFNHMNLAEKSTVHMRKTPSVSLTSVHPDLMKILGDINSDFTRVDEDEEIIVKAMSDYWVVGKKSDRRELYVILNQKNANLIEVNEEVKKLCATQFNNIFFLD

SEQ ID NO: 913944 - protein, 482 aa, Homo sapiens; identical to SEQ ID NO: 913943

SEQ ID NO: 913945 - protein, 339 aa, Homo sapiens
MYKLFNGTFLKAMEDGGVKLLKERLEKFFHRYLQTLHLQSCDLLDIFGGISFFPLDKMTYLKIQSFINRMEESLNIVKYTAFLYNDQLIWSGLEQDDMRILYKYLTTSLFPRHIEPELAGRDSPIRAEMPGNLQHYGRFLTGPLNLNDPDAKCRFPKIFVNTDDTYEELHLIVYKAMSAAVCFMIDASVHPTLDFCRRLDSIVGPQLTVLASDICEQFNINKRMSGSEKEPQFKFIYFNHMNLAEKSTVHMRKTPSVSLTSVHPDLMKILGDINSDFTRVDEDEEIIVKAMSDYWVVGKKSDRRELYVILNQKNANLIEVNEEVKKLCATQFNNIFFLD

SEQ ID NO: 913946 - protein, 339 aa, Homo sapiens; identical to SEQ ID NO: 913945

SEQ ID NO: 913947 - protein, 226 aa, Homo sapiens [sequence omitted]

SEQ ID NO: 913948 - protein, 137 aa, Homo sapiens
KKILKEESSCIRPECTVFVTCFHRSEKEPQFKFIYFNHMNLAEKSTVHMRKTPSVSLTSVHPDLMKILGDINSDFTRVDEDEEIIVKAMSDYWVVGKKSDRRELYVILNQKNANLIEVNEEVKKLCATQFNNIFFLD

SEQ ID NO: 913949 - protein, 79 aa, Homo sapiens
AAAYYYYIAAASTNSDFTRVDEDEEIIVKAMSDYWVVGKKSDRRELYVILNQKNANLIEVNEEVKKLCATQFNNIFFLD

SEQ ID NO: 913950 - protein, 120 aa, Homo sapiens
WNFRGELYVILNQKNANLIEVNGSEKEPQFKFIYFNHMNLAEKSTVHMRKTPSVSLTSVHPDLMKILGDINSDFTRVDEDEEIIVKAMSDYWVVGKKSDRRELYVILNQKNANLIEVNGK

SEQ ID NO: 913951 - protein, 123 aa, Homo sapiens
  misc_feature (65)..(65): Xaa can be any naturally occurring amino acid
  misc_feature (117)..(117): Xaa can be any naturally occurring amino acid
MAAAAAGAGSGPWAAQEKQFPPALLSFFIYNPRFGPREGQEHGEVIDCVQELSHSVNKLFGLASXAVDRCVRFTNGLGTCGLLSALKSLFAKYVSDFTSTLQSIRKKCKLDHISPNXLLQEDW

SEQ ID NO: 913952 - protein, 482 aa, Homo sapiens; identical to SEQ ID NO: 913943

SEQ ID NO: 913953 - protein, 339 aa, Homo sapiens; identical to SEQ ID NO: 913945

SEQ ID NO: 913954 - protein, 466 aa, Homo sapiens
MAAAAAGAGSGPWAAQEKQFPPALLSFFIYNPRFGPREGQEENKILFYHPNEVEKNEKIRNVGLCEAIVQFTRTFSPSKPAKSLHTQKNRQFFNEPEENFWMVMVVRNPIIEKQSKDGKPVIEYQEEELLDKVYSSVLRQCYSMYKLFNGTFLKAMEDGGVKLLKERLEKFFHRYLQTLHLQSCDLLDIFGGISFFPLDKMTYLKIQSFINRMEESLNIVKYTAFLYNDQLIWSGLEQDDMRILYKYLTTSLFPRHIEPELAGRDSPIRAEMPGNLQHYGRFLTGPLNLNDPDAKCRFPKIFVNTDDTYEELHLIVYKAMSAAVCFMIDASVHPTLDFCRRLDSIVGPQLTVLASDICEQFNINKRMSGSEKEPQFKFIYFNHMNLAEKSTVHMRKTPSVSLTSVHPDLMKILGDINSDFTRVDEDEEIIVKAMSDYWVVGKKSDRRELYVILNQKNANLIEVNGK

SEQ ID NO: 913955 - protein, 345 aa, Homo sapiens
DGVSLCRSGWSVEYSGTISAHCSLHLLGSSNSPASASLVAGIAGAHHQNQLIFVVLVEMRFCHVGQAALELLTSGDPPSSASQSAGITGMSHHAQPAYSDMVFAKEQLASKATGVYEVGVCSVSRFLILLHLVESSHVLFLLLRFLTGPLNLNDPDAKCRFPKIFVNTDDTYEELHLIVYKAMSAAVCFMIDASVHPTLDFCRRLDSIVGPQLTVLASDICEQFNINKRMSGSEKEPQFKFIYFNHMNLAEKSTVHMRKTPSVSLTSVHPDLMKILGDINSDFTRVDEDEEIIVKAMSDYWVVGKKSDRRELYVILNQKNANLIEVNEEVKKLCATQFNNIFFLD

SEQ ID NO: 913956 - protein, 325 aa, Homo sapiens
SCQSEQGWRREWERHTVPNPRLQLPTPGSRLPAPGAQSRAAAMNGEEQYYAATQLYKDPCAFQRGPAPEFSASPPACLYMGRQPPPPPPHPFPGALGALEQGSPPDISPYEVPPLADDPAVAHLHHHLPAQLALPHPPAGPFPEGAEPGVLEEPNRVQLPFPWMKSTKAHAWKGQWAGGAYAAEPEENKRTRTAYTRAQLLELEKEFLFNKYISRPRRVELAVMLNLTERHIKIWFQNRRMKWKKEEDKKRGGGTAVGGGGVAEPEQDCAVTSGEELLALPPPPPPGGAVPPAAPVAAREGRLPPGLSASPQPSSVAPRRPQEPR

SEQ ID NO: 913957 - protein, 520 aa, Homo sapiens
MASDPIFTLAPPLHCHYGAFPPNASGWEQPPNASGVSVASAALAASAASRVATSTDPSCSGFAPPDFNHCLKDWDYNGLPVLTTNAIGQWDLVCDLGWQVILEQILFILGFASGYLFLGYPADRFGRRGIVLLTLGLVGPCGVGGAAAGSSTGVMALRFLLGFLLAGVDLGVYLMRLELCDPTQRLRVALAGELVGVGGHFLFLGLALVSKDWRFLQRMITAPCILFLFYGWPGLFLESARWLIVKRQIEEAQSVLRILAERNRPHGQMLGEEAQEALQDLENTCPLPATSSFSFASLLNYRNIWKNLLILGFTNFIAHAIRHCYQPVGGGGSPSDFYLCSLLASGTAALACVFLGVTVDRFGRRGILLLSMTLTGIASLVLLGLWDYLNEAAITTFSVLGLFSSQAAAILSTLLAAEVIPTTVRGRGLGLIMALGALGGLSGPAQRLHMGHGAFLQHVVLAACALLCILSIMLLPETKRKLLPEVLRDGELCRRPSLLRQPPPTRCDHVPLLATPNPAL

SEQ ID NO: 913958 - protein, 520 aa, Homo sapiens; identical to SEQ ID NO: 913957

SEQ ID NO: 913959 - protein, 538 aa, Homo sapiens
MASDPIFTLAPPLHCHYGAFPPNASGWEQPPNASGVSVASAALAASAASRVATSTDPSCSGFAPPDFNHCLKDWDYNGLPVLTTNAIGQWDLVCDLGWQVILEQILFILGFASGYLFLGYPADRFGRRGIVLLTLGLVGPCGVGGAAAGSSTGVMALRFLLGFLLAGVDLGVYLMRLELCDPTQRLRVALAGELVGVGGHFLFLGLALVSKDWRFLQRMITAPCILFLFYGWPGLFLESARWLIVKRQIEEAQSVLRILAERNRPHGQMLGEEAQEALQDLENTCPLPATSSFSFASLLNYRNIWKNLLILGFTNFIAHAIRHCYQPVGGGGSPSDFYLCSLLASGTAALACVFLGVTVDRFGRRGILLLSMTLTGIASLVLLGLWDCEHPIFPTVWAQQGNPNRDLNEAAITTFSVLGLFSSQAAAILSTLLAAEVIPTTVRGRGLGLIMALGALGGLSGPAQRLHMGHGAFLQHVVLAACALLCILSIMLLPETKRKLLPEVLRDGELCRRPSLLRQPPPTRCDHVPLLATPNPAL

SEQ ID NO: 913960 - protein, 336 aa, Homo sapiens
MASDPIFTLAPPLHCHYGAFPPNASGWEQPPNASGVSVASAALAASAASRVATSTDPSCSGFAPPDFNHCLKDWDYNGLPVLTTNAIGQWDLVCDLGWQVILEQILFILGFASGYLFLGYPADRFGRRGIVLLTLGLVGPCGVGGAAAGSSTGVMALRFLLGFLLAGVDLGVYLMRLELCDPTQRLRVALAGELVGVGGHFLFLGLALVSKDWRFLQRMITAPCILFLFYGWPGLFLESARWLIVKRQIEEAQSVLRILAERNRPHGQMLGEEAQEALQASLPMPFATATSLWEEEGAHRTSTCALCWPAAPQPWPVSSWGSPWTDLAAGASFFSP

SEQ ID NO: 913961 - protein, 520 aa, Homo sapiens; identical to SEQ ID NO: 913957

SEQ ID NO: 913962 - protein, 520 aa, Homo sapiens; identical to SEQ ID NO: 913957

SEQ ID NO: 913963 - protein, 520 aa, Homo sapiens
MASDPIFTLAPPLHCHYGAFPPNASGWEQPPNASGVSVASAALAASAASRVATSTDPSCSGFAPPDFNHCLKDWDYNGLPVLTTNAIGQWDLVCDLGWQVILEQILFILGFASGYLFLGYPADRFGRRGIVLLTLGLVGPCGVGGAAAGSSTGVMALRFLLGFLLAGVDLGVYLMRLELCDPTQRLRVALAGELVGVGGHFLFLGLALVSKDWRFLQRMITAPCILFLFYGWPGLFLESARWLIVKRQIEEAQSVLRILAERNRPHGQMLGEEAQEALQDLENTCPLPATSSFSFASLLNYRNIWKNLLILGFTNFIAHAIRHCYQPVGGGGSPSDFYLCSLLASGTAALACVFLGVTVDRFGRRGILLLSMTLTGIASLVLLGLWDYLNEAAITTFSVLGLFSSQAAAILSTLLAAEVIPTTVRGRGLGLIMALGALGGLSGPAQRLHMGHGAFLQHVVLAACALLCILSIMLLPETKRKLLPEVLRDGELCRRPSPPPCCFAFTSLARVRGQGESSTL

SEQ ID NO: 913964 - protein, 387 aa, Homo sapiens
MASDPIFTLAPPLHCHYGAFPPNASGWEQPPNASGVSVASAALAASAASRVATSTDPSCSGFAPPDFNHCLKDWDYNGLPVLTTNAIGQWDLVCDLGWQVILEQILFILGFASGYLFLGYPADRFGRRGIVLLTLGLVGPCGVGGAAAGSSTGVMALRFLLGFLLAGVDLGVYLMRLELCDPTQRLRVALAGELVGVGGHFLFLGLALVSKDWRFLQRMITAPCILFLFYGWPGLFLESARWLIVKRQIEEAQSVLRILAERNRPHGQMLGEEAQEALQDLENTCPLPATSSFSFASLLNYRNIWKNLLILGFTNFIAHAIRHCYQPVGGGGSPSDFYLCSLLASGTAALACVFLGVTVDRFGRRGILLLSMTLTGIASLVLLGLWD

SEQ ID NO: 913965 - protein, 132 aa, Homo sapiens
MASDPIFTLAPPLHCHYGAFPPNASGWEQPPNASGVSVASAALAASAASRVATSTDPSCSGFAPPDFNHCLKDWDYNGLPVLTTNAIGQWDLVCDLGWQVILEQILFILGFASGYLFLGYPQTDLAVAGLCC

SEQ ID NO: 913966 - protein, 101 aa, Homo sapiens
RPRLQSCRAGSLRAVCVRAAGAQLSQRTAHPFGAGRQGPCGRQAGSPGGHRDPRAQWRGRRQNRQHCRDHPHLQRSKCPSPRWRRHPLPAPPPPRSVWHFP

SEQ ID NO: 913967 - protein, 409 aa, Homo sapiens
MAFLCSPPTPSARFGRRGIVLLTLGLVGPCGVGGAAAGSSTGVMALRFLLGFLLAGVDLGVYLMRLELCDPTQRLRVALAGELVGVGGHFLFLGLALVSKDWRFLQRMITAPCILFLFYGWPGLFLESARWLIVKRQIEEAQSVLRILAERNRPHGQMLGEEAQEALQDLENTCPLPATSSFSFASLLNYRNIWKNLLILGFTNFIAHAIRHCYQPVGGGGSPSDFYLCSLLASGTAALACVFLGVTVDRFGRRGILLLSMTLTGIASLVLLGLWDYLNEAAITTFSVLGLFSSQAAAILSTLLAAEVIPTTVRGRGLGLIMALGALGGLSGPAQRLHMGHGAFLQHVVLAACALLCILSIMLLPETKRKLLPEVLRDGELCRRPSLLRQPPPTRCDHVPLLATPNPAL

SEQ ID NO: 913968 - protein, 609 aa, Homo sapiens
EGKAAQRSQRPRRRPRLQSCRAGSLRAVCVRAAGAQLSQRTAHPFGAGRQGPCGRQAGSPGGHRDPRAQWRGRRQNRQHCRDHPHLQRTGRDPRRCGAHGAVHCHYGAFPPNASGWEQPPNASGVSVASAALAASAASRVATSTDPSCSGFAPPDFNHCLKDWDYNGLPVLTTNAIGQWDLVCDLGWQVILEQILFILGFASGYLFLGYPADRFGRRGIVLLTLGLVGPCGVGGAAAGSSTGVMALRFLLGFLLAGVDLGVYLMRLELCDPTQRLRVALAGELVGVGGHFLFLGLALVSKDWRFLQRMITAPCILFLFYGWPGLFLESARWLIVKRQIEEAQSVLRILAERNRPHGQMLGEEAQEALQDLENTCPLPATSSFSFASLLNYRNIWKNLLILGFTNFIAHAIRHCYQPVGGGGSPSDFYLCSLLASGTAALACVFLGVTVDRFGRRGILLLSMTLTGIASLVLLGLWDYLNEAAITTFSVLGLFSSQAAAILSTLLAAEVIPTTVRGRGLGLIMALGALGGLSGPAQRLHMGHGAFLQHVVLAACALLCILSIMLLPETKRKLLPEVLRDGELCRRPSLLRQPPPTRCDHVPLLATPNPAL

SEQ ID NO: 913969 - protein, 520 aa, Homo sapiens; identical to SEQ ID NO: 913957

SEQ ID NO: 913970 - protein, 520 aa, Homo sapiens; identical to SEQ ID NO: 913957

SEQ ID NO: 913971 - protein, 499 aa, Homo sapiens
MASDPIFTLAPPLHCHYGAFPPNASGWEQPPNASGVSVASAALAASAASRVATSTDPSCSGFAPPDFNHCLKDWDYNGLPVLTTNAIGQWDLVCDLGWQVILEQILFILGFASGYLFLGYPADRFGRRGIVLLTLGLVGPCGVGGAAAGSSTGVMALRFLLGFLLAGVDLGVYLMRLELCDPTQRLRVALAGELVGVGGHFLFLGLALVSKDWRFLQRMITAPCILFLFYGWPGLFLESARWLIVKRQIEEAQSVLRILAERNRPHGQMLGEEAQEALQDLENTCPLPATSSFSFASLLNYRNIWKNLLILGFTNFIAHAIRHCYQPVGGGGSPSDFYLCSLLASGTAALACVFLGVTVDRFGRRGILLLSMTLTGIASLVLLGLWDYLNEAAITTFSVLGLFSSQAAAILSTLLAAEVIPTTVRGRGLGLIMALGALGGLSGPAQRLHMGHGAFLRPPLHSQHYAAAGDQAQAPARGAPGRGAVSPAFPAAAATPYPL

SEQ ID NO: 913972 - protein, 433 aa, Homo sapiens
MASDPIFTLAPPLHCHYGAFPPNASGWEQPPNASGVSVASAALAASAASRVATSTDPSCSGFAPPDFNHCLKDWDYNGLPVLTTNAIGQWDLVCDLGWQVILEQILFILGFASGYLFLGYPADRFGRRGIVLLTLGLVGPCGVGGAAAGSSTGVMALRFLLGFLLAGVDLGVYLMRLELCDPTQRLRVALAGELVGVGGHFLFLGLALVSKDWRFLQRMITAPCILFLFYGWPGLFLESARWLIVKRQIEEAQSVLRILAERNRPHGQMLGEEAQEALQDLENTCPLPATSSFSFASLLNYRNIWKNLLILGFTNFIAHAIRHCYQPVGGGGSPSDFYLCSLLASGTAALACVFLGVTVDRFGRRGILLLSMTLTGIASLVLLGLWDYLNEAAITTFSVLGLFSSQAAAILSTVRTPGTNQASHKTGRGCRAL

SEQ ID NO: 913973 - protein, 319 aa, Homo sapiens
MMVLKVEELVTGKKNGNGEAGEFLPEDFRDGEYEAAVTLEKQEDLKTLLAHPVTLGEQQWKSEKQREAELKKKKLEQRSKLENLEDLEIIIQLKKRKKYRKTKVPVVKEPEPEIITEPVDVPTFLKAALENKLPVVEKFLSDKNNPDVCDEYKRTALHRACLEGHLAIVEKLMEAGAQIEFRDMLESTAIHWASRGGNLDVLKLLLNKGAKISARDKLLSTALHVAVRTGHYECAEHLIACEADLNAKDREGDTPLHDAVRLNRYKMIRLLIMYGADLNIKNCAGKTPMDLVLHWQNGTKAIFDSLRENSYKTSRIATF

SEQ ID NO: 913974 - protein, 283 aa, Homo sapiens
MMVLKVEELVTGKKNGNGEAGEFLPEDFRDGEYEAAVTLEKQEDLKTLLAHPVTLGEQQWKSEKQREAELKKKKLEQRSKLENLEDLEIIIQLKKRKKYRKTKVPVVKEPEPEIIYKRTALHRACLEGHLAIVEKLMEAGAQIEFRDMLESTAIHWASRGGNLDVLKLLLNKGAKISARDKLLSTALHVAVRTGHYECAEHLIACEADLNAKDREGDTPLHDAVRLNRYKMIRLLIMYGADLNIKNCAGKTPMDLVLHWQNGTKAIFDSLRENSYKTSRIATF

SEQ ID NO: 913975 - protein, 118 aa, Homo sapiens
MMVLKVEELVTGKKNGNGEAGEFLPEDFRDGEYEAAVTLEKQEDLKTLLAHPVTLGEQQWKSEKQREAELKKKKLEQRSKLENLEDLEITWEDADNKEFKKKAGYKSINTYSMSSTVA

SEQ ID NO: 913976 - protein, 319 aa, Homo sapiens; identical to SEQ ID NO: 913973

SEQ ID NO: 913977 - protein, 190 aa, Homo sapiens
MMVLKVEELVTGKKNGNGEAGEFLPEDFRDGEYEAAVTLEKQEDLKTLLAHPVTLGEQQWKSEKQREAELKKKKLEQRSKLENLEDLEIIIQLKKRKKYRKTKVPVVKEPEPEIITEPVDVPTFLKAALENKLPVVEKFLSDKNNPDVCDEYKRTALHRACLEGHLDCSNCFYFLGIHCASVCQYSSKYE

SEQ ID NO: 913978 - protein, 92 aa, Homo sapiens [sequence omitted]

SEQ ID NO: 913979 - protein, 94 aa, Homo sapiens
MAAGPSGCLVPAFGLRLLLATVLQAVSAFGAEFSSEACRELGFSSNLLCSSCDLLGQFNLLQLDPDCRGCCQEEAQFETKKYSSIVSKQECHHS

SEQ ID NO: 913980 - protein, 92 aa, Homo sapiens [sequence omitted]

SEQ ID NO: 913981 - protein, 92 aa, Homo sapiens [sequence omitted]

SEQ ID NO: 913982 - protein, 1335 aa, Homo sapiens
MIRFELGPSGILDLGTNMKKLKMRAGGMSDSSKWKKQKRSPRPPRHMTKVTPGSELPTPNGTTLSSNLTGGMPFIDVPTPISSASSEAASAVVSPSTDSGLEFSSQTTSKEDLTDLEQPGSPGYSTATEPGSSELGVPEQPDLQEGTHVEKSQSASVESIPEVLEECTSPADHSDSASVHDMDYVNPRGVRFTQSSQKEGTALVPYGLPCIRELFRFLISLTNPHDRHNSEVMIHMGLHLLTVALESAPVAQCQTLLGLIKDEMCRHLFQLLSIERLNLYAASLRVCFLLFESMREHLKFQMEMYIKKLMEIITVENPKMPYEMKEMALEAIVQLWRIPSFVTELYINYDCDYYCSNLFEELTKLLSKNAFPVSGQLYTTHLLSLDALLTVIDSTEAHCQAKVLNSLTQQEKKETARPSCEIVDGTREASNTERTASDGKAVGMASDIPGLHLPGGGRLPPEHGKSGCSDLEEAVDSGADKKFARKPPRFSCLLPDPRELIEIKNKKKLLITGTEQFNQKPKKGIQFLQEKGLLTIPMDNTEVAQWLRENPRLDKKMIGEFVSDRKNIDLLESFVSTFSFQGLRLDEALRLYLEAFRLPGEAPVIQRLLEAFTERWMNCNGSPFANSDACFSLAYAVIMLNTDQHNHNVRKQNAPMTLEEFRKNLKGVNGGKDFEQDILEDMYHAIKNEEIVMPEEQTGLVRENYVWNVLLHRGATPEGIFLRVPTASYDLDLFTMTWGPTIAALSYVFDKSLEETIIQKAISGFRKCAMISAHYGLSDVFDNLIISLCKFTALSSESIENLPSVFGSNPKAHIAAKTVFHLAHRHGDILREGWKNIMEAMLQLFRAQLLPKAMIEVEDFVDPNGKISLQREETPSNRGESTVLSFVSWLTLSGPEQSSVRGPSTENQEAKRVALECIKQCDPEKMITESKFLQLESLQELMKALVSVTPDEETYDEEDAAFCLEMLLRIVLENRDRVGCVWQTVRDHLYHLCVQAQDFCFLVERAVVGLLRLAIRLLRREEISAQVLLSLRILLLMKPSVLSRVSHQVAYGLHELLKTNAANIHSGDDWATLFTLLECIGSGVKPPAALQATARADAPDAGAQSDSELPSYHQNDVSLDRGYTSDSEVYTDHGRPGKIHRSATDADVVNSGWLVVGKDDVDNSKPGPSRPGPSPLINQYSLTVGLDLGPHDTKSLLKCVESLSFIVRDAAHITPDNFELCVKTLRIFVEASLNGGCKSQEKRGKSHKYDSKGNRFKKKSKEGSMLRRPRTSSQHASRGGQSDDDEDEGVPASYHTVSLQYQVARPDAHPAHAGSLYLQLMGGGATPPGDRWPED

SEQ ID NO: 913983 - protein, 1516 aa, Homo sapiens
MVDKNIYIIQGEINIVVGAIKRNARWSTHTPLDEERDPLLHSFGHLKEVLNSITELSEIEPNVFLRPFLEVIRSEDTTGPITGLALTSVNKFLSYALIDPTHEGTAEGMENMADAVTHARFVGTDPASDEVVLMKILQVLRTLLLTPVGAHLTNESVCEIMQSCFRICFEMRLSELLRKSAEHTLVDMVQLLFTRLPQFKEEPKNYVGTNMKKLKMRAGGMSDSSKWKKQKRSPRPPRHMTKVTPGSELPTPNGTTLSSNLTGGMPFIDVPTPISSASSEAASAVVSPSTDSGLEFSSQTTSKEDLTDLEQPGSPGYSTATEPGSSELGVPEQPDLQEGTHVEKSQSASVESIPEVLEECTSPADHSDSASVHDMDYVNPRGVRFTQSSQKEGTALVPYGLPCIRELFRFLISLTNPHDRHNSEVMIHMGLHLLTVALESAPVAQCQTLLGLIKDEMCRHLFQLLSIERLNLYAASLRVCFLLFESMREHLKFQMEMYIKKLMEIITVENPKMPYEMKEMALEAIVQLWRIPSFVTELYINYDCDYYCSNLFEELTKLLSKNAFPVSGQLYTTHLLSLDALLTVIDSTEAHCQAKVLNSLTQQEKKETARPSSERTASDGKAVGMASDIPGLHLPGGGRLPPEHGKSGCSDLEEAVDSGADKKFARKPPRFSCLLPDPRELIEIKNKKKLLITGTEQFNQKPKKGIQFLQEKGLLTIPMDNTEVAQWLRENPRLDKKMIGEFVSDRKNIDLLESFVSTFSFQGLRLDEALRLYLEAFRLPGEAPVIQRLLEAFTERWMNCNGSPFANSDACFSLAYAVIMLNTDQHNHNVRKQNAPMTLEEFRKNLKGVNGGKDFEQDILEDMYHAIKNEEIVMPEEQTGLVRENYVWNVLLHRGATPEGIFLRVPTASYDLDLFTMTWGPTIAALSYVFDKSLEETIIQKAISGFRKCAMISAHYGLSDVFDNLIISLCKFTALSSESIENLPSVFGSNPKAHIAAKTVFHLAHRHGDILREGWKNIMEAMLQLFRAQLLPKAMIEVEDFVDPNGKISLQREETPSNRGESTVLSFVSWLTLSGPEQSSVRGPSTENQEAKRVALECIKQCDPEKMITESKFLQLESLQELMKALVSVTPDEETYDEEDAAFCLEMLLRIVLENRDRVGCVWQTVRDHLYHLCVQAQDFCFLVERAVVGLLRLAIRLLRREEISAQVLLSLRILLLMKPSVLSRVSHQVAYGLHELLKTNAANIHSGDDWATLFTLLECIGSGVKPPAALQATARADAPDAGAQSDSELPSYHQNDVSLDRGYTSDSEVYTDHGRPGKIHRSATDADVVNSGWLVVGKDDVDNSKPGPSRPGPSPLINQYSLTVGLDLGPHDTKSLLKCVESLSFIVRDAAHITPDNFELCVKTLRIFVEASLNGGCKSQEKRGKSHKYDSKGNRFKKKSKEGSMLRRPRTSSQHASRGGQSDDDEDEGVPASYHTVSLQYQVARPDAHPAHAGSLYLQLMGGGATPPGDRWPED

SEQ ID NO: 913984 - protein, 641 aa, Homo sapiens
LFAEDDVRFESNFSIVWALSGNLDMFRKDSVLNILIQSLDWETFEQYCAWQLSLAHNIPLETIIQKAISGFRKCAMISAHYGLSDVFDNLIISLCKFTALSSESIENLPSVFGSNPKAHIAAKTVFHLAHRHGDILREGWKNIMEAMLQLFRAQLLPKAMIEVEDFVDPNGKISLQREETPSNRGESTVLSFVSWLTLSGPEQSSVRGPSTENQEAKRVALECIKQCDPEKMITESKFLQLESLQELMKALVSVTPDEETYDEEDAAFCLEMLLRIVLENRDRVGCVWQTVRDHLYHLCVQAQDFCFLVERAVVGLLRLAIRLLRREEISAQVLLSLRILLLMKPSVLSRVSHQVAYGLHELLKTNAANIHSGDDWATLFTLLECIGSGVKPPAALQATARADAPDAGAQSDSELPSYHQNDVSLDRGYTSDSEVYTDHGRPGKIHRSATDADVVNSGWLVVGKDDVDNSKPGPSRPGPSPLINQYSLTVGLDLGPHDTKSLLKCVESLSFIVRDAAHITPDNFELCVKTLRIFVEASLNGGCKSQEKRGKSHKYDSKGNRFKKKSKEGSMLRRPRTSSQHASRGGQSDDDEDEGVPASYHTVSLQYQVARPDAHPAHAGSLYLQLMGGGATPPGDRWPED

SEQ ID NO: 913985 - protein, 1570 aa, Homo sapiens
MVDKNIYIIQGEINIVVGAIKRNARWSTHTPLDEERDPLLHSFGHLKEVLNSITELSEIEPNVFLRPFLEVIRSEDTTGPITGLALTSVNKFLSYALIDPTHEGTAEGMENMADAVTHARFVGTDPASDEVVLMKILQVLRTLLLTPVGAHLTNESVCEIMQSCFRICFEMRLSELLRKSAEHTLVDMVQLLFTRLPQFKEEPKNYVGTNMKKLKMRAGGMSDSSKWKKQKRSPRPPRHMTKVTPGSELPTPNGTTLSSNLTGGMPFIDVPTPISSASSEAASAVVSPSTDSGLEFSSQTTSKEDLTDLEQPGSPGYSTATEPGSSELGVPEQPDLQEGTHVEKSQSASVESIPEVLEECTSPADHSDSASVHDMDYVNPRGVRFTQSSQKEGTALVPYGLPCIRELFRFLISLTNPHDRHNSEVMIHMGLHLLTVALESAPVAQCQTLLGLIKDEMCRHLFQLLSIERLNLYAASLRVCFLLFESMREHLKFQMEMYIKKLMEIITVENPKMPYEMKEMALEAIVQLWRIPSFVTELYINYDCDYYCSNLFEELTKLLSKNAFPVSGQLYTTHLLSLDALLTVIDSTEAHCQAKVLNSLTQQEKKETARPSCEIVDGTREASNTERTASDGKAVGMASDIPGLHLPGGGRLPPEHGKSGCSDLEEAVDSGADKKFARKPPRFSCLLPDPRELIEIKNKKKLLITGTEQFNQKPKKGIQFLQEKGLLTIPMDNTEVAQWLRENPRLDKKMIGEFVSDRKNIDLLESFVSTFSFQGLRLDEALRLYLEAFRLPGEAPVIQRLLEAFTERWMNCNGSPFANSDACFSLAYAVIMLNTDQHNHNVRKQNAPMTLEEFRKNLKGVNGGKDFEQDILEDMYHAIKNEEIVMPEEQTGLVRENYVWNVLLHRGATPEGIFLRVPTASYDLDLFTMTWGPTIAALSYVFDKSLEETIIQKAISGFRKCAMISAHYGLSDVFDNLIISLCKFTALSSESIENLPSVFGSNPKAHIAAKTVFHLAHRHGDILREGWKNIMEAMLQLFRAQLLPKAMIEVEDFVDPNGKISLQREETPSNRGESTVLSFVSWLTLSGPEQSSVRGPSTENQEAKRVALECIKQCDPEKMITESKFLQLESLQELMKALVSVTPDEETYDEEDAAFCLEMLLRIVLENRDRVGCVWQTVRDHLYHLCVQAQDFCFLVERAVVGLLRLAIRLLRREEISAQVLLSLRILLLMKPSVLSRVSHQVAYGLHELLKTNAANIHSGDDWATLFTLLECIGSGVKPPAALQATARADAPDAGAQSDSELPSYHQNDVSLDRGYTSDSEVYTDHGRPGKIHRSATDADVVNSGWLVVSDNMGSNESLLLDLWEEFLVLCKDIHTGAKPVSPAPLCTLQVGKDDVDNSKPGPSRPGPSPLINQYSLTVGLDLGPHDTKSLLKCVESLSFIVRDAAHITPDNFELCVKTLRIFVEASLNGGCKSQEKRGKSHKYDSKGNRFKKKSKEGSMLRRPRTSSQHASRGGQSDDDEDEGVPASYHTVSLQYQVARPDAHPAHAGSLYLQLMGGGATPPGDRWPED

SEQ ID NO: 913986 - protein, 1528 aa, Homo sapiens
MVDKNIYIIQGEINIVVGAIKRNARWSTHTPLDEERDPLLHSFGHLKEVLNSITELSEIEPNVFLRPFLEVIRSEDTTGPITGLALTSVNKFLSYALIDPTHEGTAEGMENMADAVTHARFVGTDPASDEVVLMKILQVLRTLLLTPVGAHLTNESVCEIMQSCFRICFEMRLSELLRKSAEHTLVDMVQLLFTRLPQFKEEPKNYVGTNMKKLKMRAGGMSDSSKWKKQKRSPRPPRHMTKVTPGSELPTPNGTTLSSNLTGGMPFIDVPTPISSASSEAASAVVSPSTDSGLEFSSQTTSKEDLTDLEQPGSPGYSTATEPGSSELGVPEQPDLQEGTHVEKSQSASVESIPEVLEECTSPADHSDSASVHDMDYVNPRGVRFTQSSQKEGTALVPYGLPCIRELFRFLISLTNPHDRHNSEVMIHMGLHLLTVALESAPVAQCQTLLGLIKDEMCRHLFQLLSIERLNLYAASLRVCFLLFESMREHLKFQMEMYIKKLMEIITVENPKMPYEMKEMALEAIVQLWRIPSFVTELYINYDCDYYCSNLFEELTKLLSKNAFPVSGQLYTTHLLSLDALLTVIDSTEAHCQAKVLNSLTQQEKKETARPSCEIVDGTREASNTERTASDGKAVGMASDIPGLHLPGGGRLPPEHGKSGCSDLEEAVDSGADKKFARKPPRFSCLLPDPRELIEIKNKKKLLITGTEQFNQKPKKGIQFLQEKGLLTIPMDNTEVAQWLRENPRLDKKMIGEFVSDRKNIDLLESFVSTFSFQGLRLDEALRLYLEAFRLPGEAPVIQRLLEAFTERWMNCNGSPFANSDACFSLAYAVIMLNTDQHNHNVRKQNAPMTLEEFRKNLKGVNGGKDFEQDILEDMYHAIKNEEIVMPEEQTGLVRENYVWNVLLHRGATPEGIFLRVPTASYDLDLFTMTWGPTIAALSYVFDKSLEETIIQKAISGFRKCAMISAHYGLSDVFDNLIISLCKFTALSSESIENLPSVFGSNPKAHIAAKTVFHLAHRHGDILREGWKNIMEAMLQLFRAQLLPKAMIEVEDFVDPNGKISLQREETPSNRGESTVLSFVSWLTLSGPEQSSVRGPSTENQEAKRVALECIKQCDPEKMITESKFLQLESLQELMKALVSVTPDEETYDEEDAAFCLEMLLRIVLENRDRVGCVWQTVRDHLYHLCVQAQDFCFLVERAVVGLLRLAIRLLRREEISAQVLLSLRILLLMKPSVLSRVSHQVAYGLHELLKTNAANIHSGDDWATLFTLLECIGSGVKPPAALQATARADAPDAGAQSDSELPSYHQNDVSLDRGYTSDSEVYTDHGRPGKIHRSATDADVVNSGWLVVGKDDVDNSKPGPSRPGPSPLINQYSLTVGLDLGPHDTKSLLKCVESLSFIVRDAAHITPDNFELCVKTLRIFVEASLNGGCKSQEKRGKSHKYDSKGNRFKKKSKEGSMLRRPRTSSQHASRGGQSDDDEDEGVPASYHTVSLQYQVARPDAHPAHAGSLYLQLMGGGATPPGDRWPED

SEQ ID NO: 913987 - protein, 1528 aa, Homo sapiens; identical to SEQ ID NO: 913986

SEQ ID NO: 913988 - protein, 431 aa, Homo sapiens
MADASPRRNVARVTNMTAKGTASRRNPKRDQCFAGLEPPANMPLGAGRVMMMRTKACLPATIRCLYSIRLLDLMHTLHTRAASIYSSWAEEQRHLETGGQKIEADSRTLWAHCWCPLLQGIACLCCDARRQVRMQALTYLQRALLVHDLQKLDALEWESCFNKVLFPLLTKLLENISPADVGGMEETRMRASTLLSKVFLQHLSPLLSLSTFAALWLTILDFMDKYMHAGSSDLLSEAIPESLKNMLLVMDTAEIFHSADARGGGPSALWEITWERIDCFLPHLRDELFKQTVIQDPMPMEPQGQKPLASAHLTSAAGDTRTPGHPPPPEIPSELGACDFEKPESPRAASSSSPGSPVASSPSRLSPTPDGPPPLAQPPLILQPLASPLQVGVPPMTLPIILNPALIEATSPVPLLATPRPTDPIPTSEVN

SEQ ID NO: 913989 - protein, 340 aa, Homo sapiens
ILDSGHSGLGAILGLSHPLGPLLVPFTAGIACLCCDARRQVRMQALTYLQRALLVHDLQKLDALEWESCFNKVLFPLLTKLLENISPADVGGMEETRMRASTLLSKVFLQHLSPLLSLSTFAALWLTILDFMDKYMHAGSSDLLSEAIPESLKNMLLVMDTAEIFHSADARGGGPSALWEITWERIDCFLPHLRDELFKQTVIQDPMPMEPQGQKPLASAHLTSAAGDTRTPGHPPPPEIPSELGACDFEKPESPRAASSSSPGSPVASSPSRLSPTPDGPPPLAQPPLILQPLASPLQVGVPPMTLPIILNPALIEATSPVPLLATPRPTDPIPTSEVN

SEQ ID NO: 913990 - protein, 1528 aa, Homo sapiens; identical to SEQ ID NO: 913986

SEQ ID NO: 913991 - protein, 1528 aa, Homo sapiens; identical to SEQ ID NO: 913986

SEQ ID NO: 913992 - protein, 1287 aa, Homo sapiens
MVDKNIYIIQGEINIVVGAIKRNARWSTHTPLDEERDPLLHSFGHLKEVLNSITELSEIEPNVFLRPFLEVIRSEDTTGPITGLALTSVNKFLSYALIDPTHEGTAEGMENMADAVTHARFVGTDPASDEVVLMKILQVLRTLLLTPVGAHLTNESVCEIMQSCFRICFEMRLSELLRKSAEHTLVDMVQLLFTRLPQFKEEPKNYVGTNMKKLKMRAGGMSDSSKWKKQKRSPRPPRHMTKVTPGSELPTPNGTTLSSNLTGGMPFIDVPTPISSASSEAASAVVSPSTDSGLEFSSQTTSKEDLTDLEQPGSPGYSTATEPGSSELGVPEQPDLQEGTHVEKSQSASVESIPEVLEECTSPADHSDSASVHDMDYVNPRGVRFTQSSQKEGTALVPYGLPCIRELFRFLISLTNPHDRHNSEVMIHMGLHLLTVALESAPVAQCQTLLGLIKDEMCRHLFQLLSIERLNLYAASLRVCFLLFESMREHLKFQMEMYIKKLMEIITVENPKMPYEMKEMALEAIVQLWRIPSFVTELYINYDCDYYCSNLFEELTKLLSKNAFPVSGQLYTTHLLSLDALLTVIDSTEAHCQAKVLNSLTQQEKKETARPSCEIVDGTREASNTERTASDGKAVGMASDIPGLHLPGGGRLPPEHGKSGCSDLEEAVDSGADKKFARKPPRFSCLLPDPRELIEIKNKKKLLITGTEQFNQKPKKGIQFLQEKGLLTIPMDNTEVAQWLRENPRLDKKMIGEFVSDRKNIDLLESFVSTFSFQGLRLDEALRLYLEAFRLPGEAPVIQRLLEAFTERWMNCNGSPFANSDACFSLAYAVIMLNTDQHNHNVRKQNAPMTLEEFRKNLKGVNGGKDFEQDILEDMYHAIKNEEIVMPEEQTGLVRENYVWNVLLHRGATPEGIFLRVPTASYDLDLFTMTWGPTIAALSYVFDKSLEETIIQKAISGFRKCAMISAHYGLSDVFDNLIISLCKFTALSSESIENLPSVFGSNPKAHIAAKTVFHLAHRHGDILREGWKNIMEAMLQLFRAQLLPKAMIEVEDFVDPNGKISLQREETPSNRGESTVLSFVSWLTLSGPEQSSVRGPSTENQEAKRVALECIKQCDPEKMITESKFLQLESLQELMKALVSVTPDEETYDEEDAAFCLEMLLRIVLENRDRVGCVWQTVRDHLYHLCVQAQDFCFLVERAVVGLLRLAIRLLRREEISAQVLPLPAAFWATGLKPQSLTYSRGVQADQGVSRLFGASPLTPPLEKNPKFAKAQTIPTSKGLDLNLGGP

SEQ ID NO: 913993 - protein, 83 aa, Homo sapiens
LSTSLNLSFFAGADPTHEGTAEGMENMADAVTHARFVGTDPASDEVVLMKILQVSEREIAIRLMARGWCRRLYLLCPQHETVF

SEQ ID NO: 913994 - protein, 1528 aa, Homo sapiens; identical to SEQ ID NO: 913986

SEQ ID NO: 913995 - protein, 1311 aa, Homo sapiens
MAVVWMVREMRKRKRSPRPPRHMTKVTPGSELPTPNGTTLSSNLTGGMPFIDVPTPISSASSEAASAVVSPSTDSGLEFSSQTTSKEDLTDLEQPGSPGYSTATEPGSSELGVPEQPDLQEGTHVEKSQSASVESIPEVLEECTSPADHSDSASVHDMDYVNPRGVRFTQSSQKEGTALVPYGLPCIRELFRFLISLTNPHDRHNSEVMIHMGLHLLTVALESAPVAQCQTLLGLIKDEMCRHLFQLLSIERLNLYAASLRVCFLLFESMREHLKFQMEMYIKKLMEIITVENPKMPYEMKEMALEAIVQLWRIPSFVTELYINYDCDYYCSNLFEELTKLLSKNAFPVSGQLYTTHLLSLDALLTVIDSTEAHCQAKVLNSLTQQEKKETARPSCEIVDGTREASNTERTASDGKAVGMASDIPGLHLPGGGRLPPEHGKSGCSDLEEAVDSGADKKFARKPPRFSCLLPDPRELIEIKNKKKLLITGTEQFNQKPKKGIQFLQEKGLLTIPMDNTEVAQWLRENPRLDKKMIGEFVSDRKNIDLLESFVSTFSFQGLRLDEALRLYLEAFRLPGEAPVIQRLLEAFTERWMNCNGSPFANSDACFSLAYAVIMLNTDQHNHNVRKQNAPMTLEEFRKNLKGVNGGKDFEQDILEDMYHAIKNEEIVMPEEQTGLVRENYVWNVLLHRGATPEGIFLRVPTASYDLDLFTMTWGPTIAALSYVFDKSLEETIIQKAISGFRKCAMISAHYGLSDVFDNLIISLCKFTALSSESIENLPSVFGSNPKAHIAAKTVFHLAHRHGDILREGWKNIMEAMLQLFRAQLLPKAMIEVEDFVDPNGKISLQREETPSNRGESTVLSFVSWLTLSGPEQSSVRGPSTENQEAKRVALECIKQCDPEKMITESKFLQLESLQELMKALVSVTPDEETYDEEDAAFCLEMLLRIVLENRDRVGCVWQTVRDHLYHLCVQAQDFCFLVERAVVGLLRLAIRLLRREEISAQVLLSLRILLLMKPSVLSRVSHQVAYGLHELLKTNAANIHSGDDWATLFTLLECIGSGVKPPAALQATARADAPDAGAQSDSELPSYHQNDVSLDRGYTSDSEVYTDHGRPGKIHRSATDADVVNSGWLVVGKDDVDNSKPGPSRPGPSPLINQYSLTVGLDLGPHDTKSLLKCVESLSFIVRDAAHITPDNFELCVKTLRIFVEASLNGGCKSQEKRGKSHKYDSKGNRFKKKSKEGSMLRRPRTSSQHASRGGQSDDDEDEGVPASYHTVSLQYQVARPDAHPAHAGSLYLQLMGGGATPPGDRWPED

SEQ ID NO: 913996 - protein, 1153 aa, Homo sapiens
FFVLEEKFSKSPPIQKEGTALVPYGLPCIRELFRFLISLTNPHDRHNSEVMIHMGLHLLTVALESAPVAQCQTLLGLIKDEMCRHLFQLLSIERLNLYAASLRVCFLLFESMREHLKFQMEMYIKKLMEIITVENPKMPYEMKEMALEAIVQLWRIPSFVTELYINYDCDYYCSNLFEELTKLLSKNAFPVSGQLYTTHLLSLDALLTVIDSTEAHCQAKVLNSLTQQEKKETARPSCEIVDGTREASNTERTASDGKAVGMASDIPGLHLPGGGRLPPEHGKSGCSDLEEAVDSGADKKFARKPPRFSCLLPDPRELIEIKNKKKLLITGTEQFNQKPKKGIQFLQEKGLLTIPMDNTEVAQWLRENPRLDKKMIGEFVSDRKNIDLLESFVSTFSFQGLRLDEALRLYLEAFRLPGEAPVIQRLLEAFTERWMNCNGSPFANSDACFSLAYAVIMLNTDQHNHNVRKQNAPMTLEEFRKNLKGVNGGKDFEQDILEDMYHAIKNEEIVMPEEQTGLVRENYVWNVLLHRGATPEGIFLRVPTASYDLDLFTMTWGPTIAALSYVFDKSLEETIIQKAISGFRKCAMISAHYGLSDVFDNLIISLCKFTALSSESIENLPSVFGSNPKAHIAAKTVFHLAHRHGDILREGWKNIMEAMLQLFRAQLLPKAMIEVEDFVDPNGKISLQREETPSNRGESTVLSFVSWLTLSGPEQSSVRGPSTENQEAKRVALECIKQCDPEKMITESKFLQLESLQELMKALVSVTPDEETYDEEDAAFCLEMLLRIVLENRDRVGCVWQTVRDHLYHLCVQAQDFCFLVERAVVGLLRLAIRLLRREEISAQVLLSLRILLLMKPSVLSRVSHQVAYGLHELLKTNAANIHSGDDWATLFTLLECIGSGVKPPAALQATARADAPDAGAQSDSELPSYHQNDVSLDRGYTSDSEVYTDHGRPGKIHRSATDADVVNSGWLVVGKDDVDNSKPGPSRPGPSPLINQYSLTVGLDLGPHDTKSLLKCVESLSFIVRDAAHITPDNFELCVKTLRIFVEASLNGGCKSQEKRGKSHKYDSKGNRFKKKSKEGSMLRRPRTSSQHASRGGQSDDDEDEGVPASYHTVSLQYQVARPDAHPAHAGSLYLQLMGGGATPPGDRWPED

SEQ ID NO: 913997 - protein, 437 aa, Homo sapiens
SRGSWEAGTENKMGESGLECIQCDPEKMITESKFLQLESLQELMKALVSVTPDEETYDEEDAAFCLEMLLRIVLENRDRVGCVWQTVRDHLYHLCVQAQDFCFLVERAVVGLLRLAIRLLRREEISAQVLLSLRILLLMKPSVLSRVSHQVAYGLHELLKTNAANIHSGDDWATLFTLLECIGSGVKPPAALQATARADAPDAGAQSDSELPSYHQNDVSLDRGYTSDSEVYTDHGRPGKIHRSATDADVVNSGWLVVGKDDVDNSKPGPSRPGPSPLINQYSLTVGLDLGPHDTKSLLKCVESLSFIVRDAAHITPDNFELCVKTLRIFVEASLNGGCKSQEKRGKSHKYDSKGNRFKKKSKEGSMLRRPRTSSQHASRGGQSDDDEDEGVPASYHTVSLQYQVARPDAHPAHAGSLYLQLMGGGATPPGDRWPED

SEQ ID NO: 913998 - protein, 1528 aa, Homo sapiens; identical to SEQ ID NO: 913986

SEQ ID NO: 913999 - protein, 1528 aa, Homo sapiens; identical to SEQ ID NO: 913986

SEQ ID NO: 914000 - protein, 431 aa, Homo sapiens; identical to SEQ ID NO: 913988

SEQ ID NO: 914001 - protein, 1528 aa, Homo sapiens; identical to SEQ ID NO: 913986

SEQ ID NO: 914002 - protein, 1528 aa, Homo sapiens; identical to SEQ ID NO: 913986

SEQ ID NO: 914003 - protein, 1528 aa, Homo sapiens; identical to SEQ ID NO: 913986

SEQ ID NO: 914004 - protein, 631 aa, Homo sapiens [sequence omitted]

SEQ ID NO: 914005 - protein, 570 aa, Homo sapiens
EPVAQVSGSSSAQPGSMIVDKLLDDSRGGEGLRDAAGGCGLMTSPLNLSYFYGASPPAAAPGACDASCSVLGPSAPGSPGSDSSDFSSASSVSSCGAVESRSRGGARAERQPVEPHMGVGRQQRGPFQGVRVKNSVKELLLHIRSHKQKASGQAVDDFKTQGVNIEQFRELKNTVSYSGKRKGPDSLSDGPACKRPALLHSQFLTPPQTPTPGESMEDVHLNEPKQESSADLLQNIINIKNECSPVSLNTVQVSWLNPVVVPQSSPAEQCQDFHGGQVFSPPQKCQPFQVRGSQQMIDQASLYQYSPQNQHVEQQPHYTHKPTLEYSPFPIPPQSPAYEPNLFDGPESQFCPNQSLVSLLGDQRESENIANPMQTSSSVQQQNDAHLHSFSMMPSSACEAMVGHEMASDSSNTSLPFSNMGNPMNTTQLGKSLFQWQVEQEESKLANISQDQFLSKDADGDTFLHIAVAQGRRALSYVLARKMNALHMLDIKEHNGQSAFQVAVAANQHLIVQDLVNIGAQVNTTDCWGRTPLHVCAEKGHSQVLQVRGSKPGFHHCKAREIELDIRSRI

SEQ ID NO: 914006 - protein, 734 aa, Homo sapiens
EPVAQVSGSSSAQPGSMIVDKLLDDSRGGEGLRDAAGGCGLMTSPLNLSYFYGASPPAAAPGACDASCSVLGPSAPGSPGSDSSDFSSASSVSSCGAVESRSRGGARAERQPVEPHMGVGRQQRGPFQGVRVKNSVKELLLHIRSHKQKASGQAVDDFKTQGVNIEQFRELKNTVSYSGKRKGPDSLSDGPACKRPALLHSQFLTPPQTPTPGESMEDVHLNEPKQESSADLLQNIINIKNECSPVSLNTVQVSWLNPVVVPQSSPAEQCQDFHGGQVFSPPQKCQPFQVRGSQQMIDQASLYQYSPQNQHVEQQPHYTHKPTLEYSPFPIPPQSPAYEPNLFDGPESQFCPNQSLVSLLGDQRESENIANPMQTSSSVQQQNDAHLHSFSMMPSSACEAMVGHEMASDSSNTSLPFSNMGNPMNTTQLGKSLFQWQVEQEESKLANISQDQFLSKDADGDTFLHIAVAQGRRALSYVLARKMNALHMLDIKEHNGQSAFQVAVAANQHLIVQDLVNIGAQVNTTDCWGRTPLHVCAEKGHSQVLQAIQKGAVGSNQFVDLEATNYDGLTPLHCAVIAHNAVVHELQRNQQPHSPEVQELLLKNKSLVDTIKCLIQMGAAVEAKDRKSGRTALHLAAEEANLELIRLFLELPSCLSFVNAKAYNGNTALHVAASLQYRLTQLDAVRLLMRKGADPSTRNLENEQPVHLVPDGPVGEQIRRILKGKSIQQRAPPY

SEQ ID NO: 914007 - protein, 697 aa, Homo sapiens
EPVAQVSGSSSAQPGSMIVDKLLDDSRGGEGLRDAAGGCGLMTSPLNLSYFYGASPPAAAPGACDASCSVLGPSAPGSPGSDSSDFSSASSVSSCGAVESRSRGGARAERQPVEPHMGVGRQQRGPFQGVRVKNSVKELLLHIRSHKQKASGQAVDDFKTQGVNIEQFRELKNTVSYSGKRKGPDSLSDGPACKRPALLHSQFLTPPQTPTPGESMEDVHLNEPKQESSADLLQNIINIKNECSPVSLNTVQVSWLNPVVVPQSSPAEQCQDFHGGQVFSPPQKCQPFQVRGSQQMIDQASLYQYSPQNQHVEQQPHYTHKPTLEYSPFPIPPQSPAYEPNLFDGPESQFCPNQSLVSLLGDQRESENIANPMQTSSSVQQQNDAHLHSFSMMPSSACEAMVGHEMASDSSNTSLPFSNMGNPMNTTQLGKSLFQWQVEQEESKLANISQDQFLSKDADGDTFLHIAVAQGRRALSYVLARKMNALHMLDIKEHNGQSAFQVAVAANQHLIVQDLVNIGAQVNTTDCWGRTPLHVCAEKGHSQVLQAIQKGAVGSNQFVDLEATNYDGLTPLHCAVIAHNAVVHELQRNQQPHSPEVQELLLKNKSLVDTIKCLIQMGAAVEAKAYNGNTALHVAASLQYRLTQLDAVRLLMRKGADPSTRNLENEQPVHLVPDGPVGEQIRRILKGKSIQQRAPPY

SEQ ID NO: 914008 - protein, 734 aa, Homo sapiens; identical to SEQ ID NO: 914006

SEQ ID NO: 914009 - protein, 734 aa, Homo sapiens; identical to SEQ ID NO: 914006

SEQ ID NO: 914010 - protein, 570 aa, Homo sapiens; identical to SEQ ID NO: 914005

SEQ ID NO: 914011 - protein, 734 aa, Homo sapiens; identical to SEQ ID NO: 914006

SEQ ID NO: 914012 - protein, 618 aa, Homo sapiens
MGVGRQQRGPFQGVRVKNSVKELLLHIRSHKQKASGQAVDDFKTQGVNIEQFRELKNTVSYSGKRKGPDSLSDGPACKRPALLHSQFLTPPQTPTPGESMEDVHLNEPKQESSADLLQNIINIKNECSPVSLNTVQVSWLNPVVVPQSSPAEQCQDFHGGQVFSPPQKCQPFQVRGSQQMIDQASLYQYSPQNQHVEQQPHYTHKPTLEYSPFPIPPQSPAYEPNLFDGPESQFCPNQSLVSLLGDQRESENIANPMQTSSSVQQQNDAHLHSFSMMPSSACEAMVGHEMASDSSNTSLPFSNMGNPMNTTQLGKSLFQWQVEQEESKLANISQDQFLSKDADGDTFLHIAVAQGRRALSYVLARKMNALHMLDIKEHNGQSAFQVAVAANQHLIVQDLVNIGAQVNTTDCWGRTPLHVCAEKGHSQVLQAIQKGAVGSNQFVDLEATNYDGLTPLHCAVIAHNAVVHELQRNQQPHSPEVQELLLKNKSLVDTIKCLIQMGAAVEAKDRKSGRTALHLAAEEANLELIRLFLELPSCLSFVNAKAYNGNTALHVAASLQYRLTQLDAVRLLMRKGADPSTRNLENEQPVHLVPDGPVGEQIRRILKGKSIQQRAPPY

SEQ ID NO: 914013 - protein, 734 aa, Homo sapiens; identical to SEQ ID NO: 914006

SEQ ID NO: 914014 - protein, 734 aa, Homo sapiens; identical to SEQ ID NO: 914006

SEQ ID NO: 914015 - protein, 103 aa, Homo sapiens
GLLYTLSKFLSSFHEISPFLMSDNSFLCLQAYNGNTALHVAASLQYRLTQLDAVRLLMRKGADPSTRNLENEQPVHLVPDGPVGEQIRRILKGKSIQQRAPPY

SEQ ID NO: 914016 - protein, 462 aa, Homo sapiens
EPVAQVSGSSSAQPGSMIVDKLLDDSRGGEGLRDAAGGCGLMTSPLNLSYFYGASPPAAAPGACDASCSVLGPSAPGSPGSDSSDFSSASSVSSCGAVESRSRGGARAERQPVEPHMGVGRQQRGPFQGVRVKNSVKELLLHIRSHKQKASGQAVDDFKTQGVNIEQFRELKNTVSYSGKRKGPDSLSDGPACKRPALLHSQFLTPPQTPTPGESMEDVHLNEPKQESSADLLQNIINIKNECSPVSLNTVQVSWLNPVVVPQSSPAEQCQDFHGGQVFSPPQKCQPFQVRGSQQMIDQASLYQYSPQNQHVEQQPHYTHKPTLEYSPFPIPPQSPAYEPNLFDGPESQFCPNQSLVSLLGDQRESENIANPMQTSSSVQQQNDAHLHSFSMMPSSACEAMVGHEMASDSSNTSLPFSNMGNPMNTTQLGKSLFQWQVEQEESKLANISQDQFLSKDADGDT

SEQ ID NO: 914017 - protein, 524 aa, Homo sapiens
MFVNSNGYNLGVREDEVVVNDVDLPPWAKKPEDFVRINRMALESEFVSCQLHQWIDLIFGYKQRGPEAVRALNVFHYLTYEGSVNLDSITDPVLREIPEAYFIRDPHTFLLTKDFIKAMEAQIQNFGQTPSQLLIEPHPPRSSAMHLCFLPQSPLMFKDQMQQDVIMVLKFPSNSPVTHVAANTLPHLTIPAVVTVTCSRLFAVNRWHNTVGLRGAPGYSLDQAHHLPIEMDPLIANNSGVNKRQITDLVDQSIQINAHCFVVTADNRYILICGFWDKSFRVYSTETGKLTQIVFGHWDVVTCLARSESYIGGDCYIVSGSRDATLLLWYWSGRHHIIGDNPNSSDYPAPRAVLTGHDHEVVCVSVCAELGLVISGAKEGPCLVHTITGDLLRALEGPENCLFPRLISVSSEGHCIIYYERGRFSNFSINGKLLAQMEINDSTRAILLSSDGQNLVTGGDNGVVEVWQACDFKQLYIYPGCDAGIRAMDLSHDQRTLITGMASGSIVAFNIDFNRWHYEHQNRY

SEQ ID NO: 914018 - protein, 1027 aa, Homo sapiens
NTFFVVGLVCMKSSTSVVELVMLLCSQEWQNSIQKNAGLAFIELINEGRLLCHAMKDHIVRVANEAEFILNRQRAEDVHKHAEFESQCAQYAADRREEEKMCDHLISAAKHRDHVTANQLKQKILNILTNKHGAWGAVSHSQLHDFWRLDYWEDDLRRRRRFVRNAFGSTHAEALLKAAIEYGTEEDVVKSKKTFRSQAIVNQNAETELMLEGDDDAVSLLQEKEIDNLAGPVVLSTPAQLIAPVVVAKGTLSITTTEIYFEVDEDDSAFKKIDTKVLAYTEGLHGKWMFSEIRAVFSRRYLLQNTALEVFMANRTSVMFNFPDQATVKKVVYSLPRVGVGTSYGLPQARRISLATPRQLYKSSNMTQRWQRREISNFEYLMFLNTIAGRTYNDLNQYPVFPWVLTNYESEELDLTLPGNFRDLSKPIGALNPKRAVFYAERYETWEDDQSPPYHYNTHYSTATSTLSWLVRIEPFTTFFLNANDGKFDHPDRTFSSVARSWRTSQRDTSDVKELIPEFYYLPEMFVNSNGYNLGVREDEVVVNDVDLPPWAKKPEDFVRINRMALESEFVSCQLHQWIDLIFGYKQRGPEAVRALNVFHYLTYEGSVNLDSITDPVLREAMEAQIQNFGQTPSQLLIEPHPPRSSAMHLCFLPQSPLMFKDQMQQDVIMVLKFPSNSPVTHVAANTLPHLTIPAVVTVTCSRLFAVNRWHNTVGLRGAPGYSLDQAHHLPIEMDPLIANNSGVNKRQITDLVDQSIQINAHCFVVTADNRYILICGFWDKSFRVYSTETGKLTQIVFGHWDVVTCLARSESYIGGDCYIVSGSRDATLLLWYWSGRHHIIGDNPNSSDYPAPRAVLTGHDHEVVCVSVCAELGLVISGAKEGPCLVHTITGDLLRALEGPENCLFPRLISVSSEGHCIIYYERGRFSNFSINGKLLAQMEINDSTRAILLSSDGQNLVTGGDNGVVEVWQACDFKQLYIYPGCDAGIRAMDLSHDQRTLITGMASGSIVAFNIDFNRWHYEHQNRY

SEQ ID NO: 914019 - protein, 1027 aa, Homo sapiens; identical to SEQ ID NO: 914018

SEQ ID NO: 914020 - protein, 269 aa, Homo sapiens
LCLEVKEECRLLNAPPVPPRGGNGSGRLSSSPPVPPRFPKLQPVHSPSSSLSYYSSGLQDGAGSRSGSGSPSPDTYSLYCYPCTWGDCKEPVLEPFDPFELGQGSSPEPELLRSQEPRAVGTPGPGPRLSPLGPSKAFEPEGLVLHQVPTPLSPAALQGPEAGGALFLTQGRLEGPPASPRDGATGFGVRDASSWQPPADLSALSLEEVSRSLRFIGLSEDVVSFFARERIDGSIFVQLSEDILADDFHLTKLQVKKIMQFIKGWRPKI

SEQ ID NO: 914021 - protein, 269 aa, Homo sapiens; identical to SEQ ID NO: 914020

SEQ ID NO: 914022 - protein, 402 aa, Homo sapiens
LCLEVKEECRLLNAPPVPPRGGNGSGRLSSSPPVPPRFPKLQPVHSPSSSLSYYSSGLQDGAGSRSGSGSPSPDTYSLYCYPCTWGDCKVGESSSRPAPGPLPSTTQPSQASRALTEPLSGRAASLLGADTPVKTYHSCPPLFKPSHPQKRFAPFGALNPFSGPAYPSGPSAALSSGPRTTSGPVATSGPAYSPGPASPGQAYSAAPPSSCAPSSSSSSEWQEPVLEPFDPFELGQGSSPEPELLRSQEPRAVGTPGPGPRLSPLGPSKAFEPEGLVLHQVPTPLSPAALQGPEAGGALFLTQGRLEGPPASPRDGATGFGVRDASSWQPPADLSALSLEEVSRSLRFIGLSEDVVSFFARERIDGSIFVQLSEDILADDFHLTKLQVKKIMQFIKGWRPKI

SEQ ID NO: 914023 - protein, 269 aa, Homo sapiens; identical to SEQ ID NO: 914020

SEQ ID NO: 914024 - protein, 55 aa, Homo sapiens
DEEVVIPVIGWVILELVCEENCFIQKSDDKVTPGKNGWTRPVSQEWTMVSGWWVG

SEQ ID NO: 914025 - protein, 347 aa, Homo sapiens
TEKGSTCGGHDKQAKIAVTVEFDLKVTINQHRQTELRPLLNKFLTTAKDKNRWEDPGKQLYNVEATSYALLALLQLKDFDFVPPVVRWLNEQRYYGGGYGSTQATFMVFQALAQYQKDAPDHQELNLDVSLQLPSRSSKITHRIHWESASLLRSEETKENEGFTVTAEGKGQGTLSVVTMYHAKAKDQLTCNKFDLKVTIKPAPETEKRPQDAKNTMILEICTRYRGDQDATMSILDISMMTGFAPDTDDLKQLANGVDRYISKYELDKAFSDRNTLIIYLDKVSHSEDDCLAFKVHQYFNVELIQPGAVKVYAYYNLEESCTRFYHPEKEDGKLNKLCRDELCRVC

SEQ ID NO: 914026 - protein, 360 aa, Homo sapiens
TEKGSTCGGHDKQAKIAVTVEFDLKVTINQHRQTELRPLLNKFLTTAKDKNRWEDPGKQLYNVEATSYALLALLQLKDFDFVPPVVRWLNEQRYYGGGYGSTQATFMVFQALAQYQKDAPDHQELNLDVSLQLPSRSSKITHRIHWESASLLRSEETKENEGFTVTAEGKGQGTLSVVTMYHAKAKDQLTCNKFDLKVTIKPAPETGIPSPIFLSSVFLEKRPQDAKNTMILEICTRYRGDQDATMSILDISMMTGFAPDTDDLKQLANGVDRYISKYELDKAFSDRNTLIIYLDKVSHSEDDCLAFKVHQYFNVELIQPGAVKVYAYYNLEESCTRFYHPEKEDGKLNKLCRDELCRVC

SEQ ID NO: 914027 - protein, 222 aa, Homo sapiens
TEKGSTCGGHDKQAKIAVTVEFDLKVTINQHRQTELRPLLNKFLTTAKDKNRWEDPGKQLYNVEATSYALLALLQLKDFDFVPPVVRWLNEQRYYGGGYGSTQATFMVFQALAQYQKDAPDHQELNLDVSLQLPSRSSKITHRIHWESASLLRSEETKENEGFTVTAEGKGQGTLSVVTMYHAKAKDQLTCNKFDLKVTIKPAPETGTGETRMPLCLYWTYP

SEQ ID NO: 914028 - protein, 347 aa, Homo sapiens; identical to SEQ ID NO: 914025

SEQ ID NO: 914029 - protein, 347 aa, Homo sapiens; identical to SEQ ID NO: 914025

SEQ ID NO: 914030 - protein, 347 aa, Homo sapiens; identical to SEQ ID NO: 914025

SEQ ID NO: 914031 - protein, 347 aa, Homo sapiens; identical to SEQ ID NO: 914025

SEQ ID NO: 914032 - protein, 319 aa, Homo sapiens
TEKGSTCGGHDKQAKIAVTVEFDLKVTINQHRQTELRPLLNKFLTTAKDKNRWEDPGKQLYNVEATSYALLALLQLKDFDFVPPVVRWLNEQRYYGGGYGSTQATFMVFQALAQYQKDAPDHQELNLDVSLQLPSRSSKITHRIHWESASLLRSEETKENEGFTVTAEGKGQGTLSVVTMYHAKAKDQLTCNKFDLKVTIKPAPETEKRPQDAKNTMILEICTRYRGDQDATMSILDISMMTGFAPDTDDLKQLANGVDRYISKYELDKAFSDRNTLIIYLDKVSHSEDDCLAFKVHQYFNVELIQPGAVKVYAYYNLG

SEQ ID NO: 914033 - protein, 347 aa, Homo sapiens; identical to SEQ ID NO: 914025

SEQ ID NO: 914034 - protein, 319 aa, Homo sapiens; identical to SEQ ID NO: 914032

SEQ ID NO: 914035 - protein, 347 aa, Homo sapiens; identical to SEQ ID NO: 914025

SEQ ID NO: 914036 - protein, 347 aa, Homo sapiens; identical to SEQ ID NO: 914025

SEQ ID NO: 914037 - protein, 347 aa, Homo sapiens
TEKGSTCGGHDKQAKIAVTVEFDLKVTINQHRQTELRPLLNKFLTTAKDKNRWEDPGKQLYNVEATSYALLALLQLKDFDFVPPVVRWLNEQRYYGGGYGSTQATFMVFQALAQYQKDAPDHQELNLDVSLQLPSRSSKITHRIHWESASLLRSEETKENEGFTVTAEGKGQGTLSVVTMYHAKAKDQLTCNKFDLKVTIKPAPETEKRPQDAKNTMILEICTRYRGDQDATMSILDISMMTGFAPDTDDLKQLANGVDRYISKYELDKAFSDRNTLIIYLDKVSHSEDDCLAFKVHQYFNVELIQPGAVKVYAYYNLAGKNGWTRPVSQEWTMCTRPDWSRFSCPQ

SEQ ID NO: 914038 - protein, 347 aa, Homo sapiens; identical to SEQ ID NO: 914025

SEQ ID NO: 914039 - protein, 347 aa, Homo sapiens; identical to SEQ ID NO: 914025

SEQ ID NO: 914040 - protein, 347 aa, Homo sapiens; identical to SEQ ID NO: 914037

SEQ ID NO: 914041 - protein, 333 aa, Homo sapiens
TEKGSTCGGHDKQAKIAVTVEFDLKVTINQHRQTELRPLLNKFLTTAKDKNRWEDPGKQLYNVEATSYALLALLQLKDFDFVPPVVRWLNEQRYYGGGYGSTQATFMVFQALAQYQKDAPDHQELNLDVSLQLPSRSSKITHRIHWESASLLRSEETKENEGFTVTAEGKGQGTLSVVTMYHAKAKDQLTCNKFDLKVTIKPAPETEKRPQDAKNTMILEICTRYRGDQDATMSILDISMMTGFAPDTDDLKQLANGVDRYISKYELDKAFSDRNTLIIYLDKVSHSEDDCLAFKVHQYFNVELIQPGAVKVYAYYNLDTRVATCRQSGPPRS

SEQ ID NO: 914042 - protein, 269 aa, Homo sapiens
TEKGSTCGGHDKQAKIAVTVEFDLKVTINQHRQTELRPLLNKFLTTAKDKNRWEDPGKQLYNVEATSYALLALLQLKDFDFVPPVVRWLNEQRYYGGGYGSTQATFMVFQALAQYQKDAPDHQELNLDVSLQLPSRSSKITHRIHWESASLLRSEETKENEGFTVTAEGKGQGTLSVVTMYHAKAKDQLTCNKFDLKVTIKPAPETEKRPQDAKNTMILEICTRYRGDQDATMSILDISMMTGFAPDTDDLKQLANGVMNSLQDRYGSY

SEQ ID NO: 914043 - protein, 349 aa, Homo sapiens
TEKGSTCGGHDKQAKIAVTVEFDLKVTINQHRQTELRPLLNKFLTTAKDKNRWEDPGKQLYNVEATSYALLALLQLKDFDFVPPVVRWLNEQRYYGGGYGSTQATFMVFQALAQYQKDAPDHQELNLDVSLQLPSRSSKITHRIHWESASLLRSEETKENEGFTVTAEGKGQGTLSVVTMYHAKAKDQLTCNKFDLNASQVQDRKSKSSWAMSAAWDFPLERNRRVLGFPSMNGEDMGLLFLCSEWERSSEGWLCTEKGEVDIIDPLLYLLHLTHRSLAFSLLAGVSCTCASSCKCKECKCTSCKKSECGAISRNLGLWLRLGGNPRLSLSACFWGTGLLCPCRLSLPV

SEQ ID NO: 914044 - protein, 142 aa, Homo sapiens
TEKGSTCGGHDKQAKIAVTVEFDLKVTINQHRQTELRPLLNKFLTTAKDKNRWEDPGKQLYNVEATSYALLALLQLKDFDFVPPVVRWLNEQRYYGGGYGSTQASGPTAPRHMHPCLLRLPTGLLEKTLRPSEAVLHSHEPV

SEQ ID NO: 914045 - protein, 127 aa, Homo sapiens
LSPPLPSQIEDGSGEVVLSRKVLLDGVQNPRAEDLVGKSLYVSATVILHSGSDMVQAERSGIPIVTSPYQIHFTKTPKYFKPGMPFDLMVFVTNPDGSPAYRVPVAVQGEDSYYNCRPAANLVVVVD

SEQ ID NO: 914046 - protein, 184 aa, Homo sapiens
  misc_feature (1)..(1): Xaa can be any naturally occurring amino acid
XSGTRGKGQGTLSVVTMYHAKAKDQLTCNKFDLKVTIKPAPETEKRPQDAKNTMILEICTRYRGDQDATMSILDISMMTGFAPDTDDLKQLANGVDRYISKYELDKAFSDRNTLIIYLDKVSHSEDDCLAFKVHQYFNVELIQPGAVKVYAYYNLEESCTRFYHPEKEDGKLNKLCRDELCRVC

SEQ ID NO: 914047 - protein, 175 aa, Homo sapiens
TEKGSTCGGHDKQAKIAVTVEFDLKVTINQHRQTEKRPQDAKNTMILEICTRYRGDQDATMSILDISMMTGFAPDTDDLKQLANGVDRYISKYELDKAFSDRNTLIIYLDKVSHSEDDCLAFKVHQYFNVELIQPGAVKVYAYYNLEESCTRFYHPEKEDGKLNKLCRDELCRVC

SEQ ID NO: 914048 - protein, 347 aa, Homo sapiens; identical to SEQ ID NO: 914025

SEQ ID NO: 914049 - protein, 347 aa, Homo sapiens; identical to SEQ ID NO: 914025

SEQ ID NO: 914050 - protein, 347 aa, Homo sapiens; identical to SEQ ID NO: 914025

SEQ ID NO: 914051 - protein, 330 aa, Homo sapiens
TEKGSTCGGHDKQAKIAVTVEFDLKVTINQHRQTELRPLLNKFLTTAKDKNRWEDPGKQLYNVEATSYALLALLQLKDFDFVPPVVRWLNEQRYYGGGYGSTQATFMVFQALAQYQKDAPDHQELNLDVSLQLPSRSSKITHRIHWESASLLRSEETKENEGFTVTAEGKGQGTLSVVTMYHAKAKDQLTCNKFDLKVTIKPAPETEKRPQDAKNTMILEICTRYRGDQDATMSILDISMMTGFAPDTDDLKQLANGVDRYISKYEVSHSEDDCLAFKVHQYFNVELIQPGAVKVYAYYNLEESCTRFYHPEKEDGKLNKLCRDELCRVC

SEQ ID NO: 914052 - protein, 349 aa, Homo sapiens
TEKGSTCGGHDKQAKIAVTVEFDLKVTINQHRQTELRPLLNKFLTTAKDKNRWEDPGKQLYNVEATSYALLALLQLKDFDFVPPVVRWLNEQRYYGGGYGSTQATFMVFQALAQYQKDAPDHQELNLDVSLQLPSRSSKITHRIHWESASLLRSEETKENEGFTVTAEGKGQGTLSVVTMYHAKAKDQLTCNKFDLKVTIKPAPETEKRPQDAKNTMILEICTRYRGDQDATMSILDISMMTGFAPDTDDLKQLANGVDRYISKYELDKAFSDRNTLIIYLDKVSHSEDDCLAFKVHQYFNVELIQPGAVKVYAYYNLEESCTRFYHRIASYKSRMTRSPLERTAGQGL

SEQ ID NO: 914053 - protein, 347 aa, Homo sapiens; identical to SEQ ID NO: 914025

SEQ ID NO: 914054 - protein, 347 aa, Homo sapiens; identical to SEQ ID NO: 914025

SEQ ID NO: 914055 - protein, 347 aa, Homo sapiens; identical to SEQ ID NO: 914025

SEQ ID NO: 914056 - protein, 347 aa, Homo sapiens; identical to SEQ ID NO: 914025

SEQ ID NO: 914057 - protein, 347 aa, Homo sapiens; identical to SEQ ID NO: 914025

SEQ ID NO: 914058 - protein, 184 aa, Homo sapiens; identical to SEQ ID NO: 914046
  misc_feature (1)..(1): Xaa can be any naturally occurring amino acid

SEQ ID NO: 914059 - protein, 224 aa, Homo sapiens
TEKGSTCGGHDKQAKIAVTVEFDLKVTINQHRQTELRPLLNKFLTTAKDKNRWEDPGKQLYNVEATSYALLALLQLKDFDFVPPVVRWLNEQRYYGGGYGSTQATFMVFQALAQYQKDAPDHQELNLDVSLQLPSRSSKITHRIHWESASLLRSEETKENEGFTVTAEGKGQGTLSVVTMYHAKAKDQLTCNKFDLKVTIKPAPETEKRPQDAKNTMILEICTR

SEQ ID NO: 914060 - protein, 190 aa, Homo sapiens
TEKGSTCGGHDKQAKIAVTVEFDLKVTINQHRQTELRPLLNKFLTTAKDKNRWEDPGKQLYNVEATSYALLALLQLKDFDFVPPVVRWLNEQRYYGGGYGSTQATFMVFQALAQYQKDAPDHQELNLDVSLQLPSRSSKITHRIHWESASLLRSEETKENEGFTVTAEGKGQGTLSVRNRNPHLPGPCPS

SEQ ID NO: 914061 - protein, 655 aa, Homo sapiens
MSALLQDPMIAGQVSKPLLSVRSEMNAELRGEDKAATSDSELNEPLLAPVESNDSEDTPSKLFGARGNPALSDPGTPDQHQASQTHPPFPVGPQPLLTAQQLASAVAGVMPGGPPALNQPILIPFNMAGQLGGQQGLVLTLPTANLTNIQGLVAAAAAGGIMTLPLQNLQATSSLNSQLQQLQLQLQQQQQQQQQQPPPSTNQHPQPAPQAPSQSQQQPLQPTPPQQPPPASQQPPAPTSQLQQAPQPQQHQPHSHSHNQNQPSPTQQSSSPPQKPSQSPGHGLPSPLTPPNPLQLVNNPLASQAAAAAAAMSSIASSQAFGNALSSLQGVTGQLVTNAQGQIIGTIPLMPNPGPSSQAASGTQGLQVQPITPQLLTNAQGQIIATVIGNQILPVINTQGITLSPIKPGQQLHQPSQTSVGQAASQGNLLHLAHSQASMSQSPVRQASSSSSSSSSSSALSVGQLVSNPQTAAGEVDGVNLEEIREFAKAFKIRRLSLGLTQTQVGQALSATEGPAYSQSAICRFEKLDITPKSAQKIKPVLERWMAEAEARHRAGMQNLTEFIGSEPSKKRKRRTSFTPQALEILNAHFEKNTHPSGQEMTEIAEKLNYDREVVRVWFCNKRQALKNTIKRLKQHEPATAVPLEPLTDSLEENS

SEQ ID NO: 914062 - protein, 443 aa, Homo sapiens
MSALLQDPMIAGQVSKPLLSVRSEMNAELRGEDKAATSDSELNEPLLAPVESNDSEDTPSKLFGARGNPALSDPGTPDQHQASQTHPPFPVGPQPLLTAQQLASAVAGVMPGGPPALNQPILIPFNMAGQLGGQQGLVLTLPTANLTNIQGLVAAAAAGGIMTLPLQNLQATSSLNSQLQQLQLQLQQQQQQQQQQPPPSTNQHPQPAPQAPSQSQQQPLQPTPPQQPPPASQQPPAPTSQLQQAPQPQQHQPHSHSHNQNQPSPTQQSSSPPQKPSQSPGHGLPSPLTPPNPLQLVNNPLASQAAAAAAAMSSIASSQAFGNALSSLQGVTGQLVTNAQGQIIGTIPLMPNPGPSSQAASGTQGLQVQPITPQLLTNAQGQIIATVIGNQILPVINTQGITLSPIKPGQQILKRQRVRWMGLIWRRSENLPKLLKSGACPLA

SEQ ID NO: 914063 - protein, 197 aa, Homo sapiens [sequence omitted]

SEQ ID NO: 914064 - protein, 186 aa, Homo sapiens
MPAPSMDCDVSTLVACVVDVEVFTNQEVKEKFEGLFRTYDDCVTFQLFKSFRRVRINFSNPKSAARARIELHETQFRGKKLKLYFAQVQTPETDGDKLHLAPPQPAKQFLISPPSSPPVGWQPINDATPVLNYDLLYAVAKLGPGEKYELHAGTESTPSVVVHVCDSDIEEEEDPKTSPKPKIIQR

SEQ ID NO: 914065 - protein, 243 aa, Homo sapiens
MRGESYFIGMRSPGQQGHVPEDGGLFLLCCIDRDWAVTRCFAEEAFQAITDFNDLPNSLFACNVHQSVFEGEESKEKFEGLFRTYDDCVTFQLFKSFRRVRINFSNPKSAARARIELHETQFRGKKLKLYFAQVQTPETDGDKLHLAPPQPAKQFLISPPSSPPVGWQPINDATPVLNYDLLYAVAKLGPGEKYELHAGTESTPSVVVHVCDSDIEEEEDPKTSPKPKIIQTRRPGLPPSVSN

SEQ ID NO: 914066 - protein, 483 aa, Homo sapiens
MATIEEIAHQIIEQQMGEIVTEQQTGQKIQIVTALDHNTQGKQFILTNHDGSTPSKVILARQDSTPGKVFLTTPDAAGVNQLFFTTPDLSAQHLQLLTDNSPDQGPNKVFDLCVVCGDKASGRHYGAVTCEGCKGFFKRSIRKNLVYSCRGSKDCIINKHHRNRCQYCRLQRCIAFGMKQDSVQCERKPIEVSREKSSNCAASTEKIYIRKDLRSPLTATPTFVTDSESTRSTGLLDSGMFMNIHPSGVKTESAVLMTSDKAESCQGDLSTLANVVTSLANLGKTKDLSQNSNEMSMIESLSNDDTSLCEFQEMQTNGDVSRAFDTLAKALNPGESTACQSSVAGMEGSVHLITGDSSINYTEKEGPLLSDSHVAFRLTMPSPMPEYLNVHYIGESASRLLFLSMHWALSIPSFQALGQENSISLVKAYWNELFTLGLAQCWQVMNVATILATFVNCLHNSLQQDAKVIAALIHFTRRAITDL

SEQ ID NO: 914067 - protein, 269 aa, Homo sapiens
MATIEEIAHQIIEQQMGEIVTEQQTGQKIQIVTALDHNTQGKQFILTNHDGSTPSKVILARQDSTPGKVFLTTPDAAGVNQLFFTTPDLSAQHLQLLTDNSPDQGPNKVFDLCVVCGDKASGRHYGAVTCEGCKGFFKRSIRKNLVYSCRGSKDCIINKHHRNRCQYCRLQRCIAFGMKQDSVQCERKPIEVSREKSSNCAASTEKIYIRKDLRSPLTATPTFVTDSESTRSTGLLDSGMFMNIHPSGVKTESAVLMTSDKVCLVQFKA

SEQ ID NO: 914068 - protein, 364 aa, Homo sapiens
MFMNIHPSGVKTESAVLMTSDKAESCQGDLSTLANVVTSLANLGKTKDLSQNSNEMSMIESLSNDDTSLCEFQEMQTNGDVSRAFDTLAKALNPGESTACQSSVAGMEGSVHLITGDSSINYTEKEGPLLSDSHVAFRLTMPSPMPEYLNVHYIGESASRLLFLSMHWALSIPSFQALGQENSISLVKAYWNELFTLGLAQCWQVMNVATILATFVNCLHNSLQQDKMSTERRKLLMEHIFKLQEFCNSMVKLCIDGYEYAYLKAIVLFSPDHPSLENMEQIEKFQEKAYVEFQDYITKTYPDDTYRLSRLLLRLPALRLMNATITEELFFKGLIGNIRIDSVIPHILKMEPADYNSQIIGHSI

SEQ ID NO: 914069 - protein, 603 aa, Homo sapiens
MATIEEIAHQIIEQQMGEIVTEQQTGQKIQIVTALDHNTQGKQFILTNHDGSTPSKVILARQDSTPGKVFLTTPDAAGVNQLFFTTPDLSAQHLQLLTDNSPDQGPNKVFDLCVVCGDKASGRHYGAVTCEGCKGFFKRSIRKNLVYSCRGSKDCIINKHHRNRCQYCRLQRCIAFGMKQDSVQCERKPIEVSREKSSNCAASTEKIYIRKDLRSPLTATPTFVTDSESTRSTGLLDSGMFMNIHPSGVKTESAVLMTSDKAESCQGDLSTLANVVTSLANLGKTKDLSQNSNEMSMIESLSNDDTSLCEFQEMQTNGDVSRAFDTLAKALNPGESTACQSSVAGMEGSVHLITGDSSINYTEKEGPLLSDSHVAFRLTMPSPMPEYLNVHYIGESASRLLFLSMHWALSIPSFQALGQENSISLVKAYWNELFTLGLAQCWQVMNVATILATFVNCLHNSLQQDKMSTERRKLLMEHIFKLQEFCNSMVKLCIDGYEYAYLKAIVLFSPDHPSLENMEQIEKFQEKAYVEFQDYITKTYPDDTYRLSRLLLRLPALRLMNATITEELFFKGLIGNIRIDSVIPHILKMEPADYNSQIIGHSI

SEQ ID NO: 914070 - protein, 364 aa, Homo sapiens; identical to SEQ ID NO: 914068

SEQ ID NO: 914071 - protein, 159 aa, Homo sapiens [sequence omitted]

SEQ ID NO: 914072 - protein, 603 aa, Homo sapiens; identical to SEQ ID NO: 914069

SEQ ID NO: 914073 - protein, 467 aa, Homo sapiens
MATIEEIAHQIIEQQMGEIVTEQQTGQKIQIVTALDHNTQGKQFILTNHDGSTPSKVILARQDSTPGKVFLTTPDAAGVNQLFFTTPDLSAQHLQLLTDNSPDQGPNKVFDLCVVCGDKASGRHYGAVTCEGCKGFFKRSIRKNLVYSCRGSKDCIINKHHRNRCQYCRLQRCIAFGMKQDSVQCERKPIEVSREKSSNCAASTEKIYIRKDLRSPLTATPTFVTDSESTRSTGLLDSGMFMNIHPSGVKTESAVLMTSDKAESCQGDLSTLANVVTSLANLGKTKDLSQNSNEMSMIESLSNDDTSLCEFQEMQTNGDVSRAFDTLAKALNPGESTACQSSVAGMEGSVHLITGDSSINYTEKEGPLLSDSHVAFRLTMPSPMPEYLNVHYIGESASRLLFLSMHWALSIPSFQALGQENSISLVKAYWNELFTLGLAQCWQVMNVATILATFVNCLHNSLQQAEG

SEQ ID NO: 914074 - protein, 184 aa, Homo sapiens
MATIEEIAHQIIEQQMGEIVTEQQTGQKIQIVTALDHNTQGKQFILTNHDGSTPSKVILARQDSTPGKVFLTTPDAAGVNQLFFTTPDLSAQHLQLLTDNSPDQGPNKVFDLCVVCGDKASGRHYGAVTCEGCKGFFKRSIRKNLVYSCRGSKDCIINKHHRNRCQYCRLQRCIAFGMKQDCMY

SEQ ID NO: 914075 - protein, 426 aa, Homo sapiens
MKQDSVQCERKPIEVSREKSSNCAASTEKIYIRKDLRSPLTATPTFVTDSESTRSTGLLDSGMFMNIHPSGVKTESAVLMTSDKAESCQGDLSTLANVVTSLANLGKTKDLSQNSNEMSMIESLSNDDTSLCEFQEMQTNGDVSRAFDTLAKALNPGESTACQSSVAGMEGSVHLITGDSSINYTEKEGPLLSDSHVAFRLTMPSPMPEYLNVHYIGESASRLLFLSMHWALSIPSFQALGQENSISLVKAYWNELFTLGLAQCWQVMNVATILATFVNCLHNSLQQDKMSTERRKLLMEHIFKLQEFCNSMVKLCIDGYEYAYLKAIVLFSPDHPSLENMEQIEKFQEKAYVEFQDYITKTYPDDTYRLSRLLLRLPALRLMNATITEELFFKGLIGNIRIDSVIPHILKMEPADYNSQIIGHSI

SEQ ID NO: 914076 - protein, 364 aa, Homo sapiens; identical to SEQ ID NO: 914068

SEQ ID NO: 914077 - protein, 1063 aa, Homo sapiens
METTQYMNEGELRVLADTYDSVYLHPNSYSCACLASGSVLRLVDAVLGAEIRNGMAIIRPPGHHAQHSLMDGYCMFNHVAVAARYAQQKHRIRRVLIVDWDVHHGQGTQFTFDQDPSVLYFSIHRYEQGRFWPHLKASNWSTTGFGQGQGYTINVPWNQVGMRDADYIAAFLHVLLPVALEFQPQLVLVAAGFDALQGDPKGEMAATPAGFAQLTHLLMGLAGGKLILSLEGGYNLRALAEGVSASLHTLLGDPCPMLESPGAPCRSAQASVSCALEALEPFWEVLVRSTETVERDNMEEDNVEESEEEGPWEPPVLPILTWPVLQSRTGLVYDQNMMNHCNLWDSHHPEVPQRILRIMCRLEELGLAGRCLTLTPRPATEAELLTCHSAEYVGHLRATEKMKTRELHRESSNFDSIYICPSTFACAQLATGAACRLVEAVLSGEVLNGAAVVRPPGHHAEQDAACGFCFFNSVAVAARHAQTISGHALRILIVDWDVHHGNGTQHMFEDDPSVLYVSLHRYDHGTFFPMGDEGASSQIGRAAGTGFTVNVAWNGPRMGDADYLAAWHRLVLPIAYEFNPELVLVSAGFDAARGDPLGGCQVSPEGYAHLTHLLMGLASGRIILILEGGYNLTSISESMAACTRSLLGDPPPLLTLPRPPLSGALASITETIQVHRRYWRSLRVMKVEDREGPSSSKLVTKKAPQPAKPRLAERMTTREKKVLEAGMGKVTSASFGEESTPGQTNSETAVVALTQDQPSEAATGGATLAQTISEAAIGGAMLGQTTSEEAVGGATPDQTTSEETVGGAILDQTTSEDAVGGATLGQTTSEEAVGGATLAQTTSEAAMEGATLDQTTSEEAPGGTELIQTPLASSTDHQTPPTSPVQGTTPQISPSTLIGSLRTLELGSESQGASESQAPGEENLLGEAAGGQDMADSMLMQGSRGLTDQAIFYAVTPLPWCPHLVAVCPIPAAGLDVTQPCGDCGTIQENWVCLSCYQVYCGRYINGHMLQHHGNSGHPLVLSYIDLSAWCYYCQAYVHHQALLDVKNIAHQNKFGEDMPHPH

SEQ ID NO: 914078 - protein, 146 aa, Homo sapiens
MTSTGQDSTTTRQRRSRQNPQSPPQDSSVTSKRNIKKGAVPRSIPNLAEVKKKGKMKKLGQAMEEDLIVGLQGMDLNLEAEALAGTGLVLDEQLNEFHCLWDDSFPEGPERLHAIKEQLIQEGLLDRCVSFQARFAEKEELMLVHR

SEQ ID NO: 914079 - protein, 144 aa, Homo sapiens
VCTLLLSSLLLFPGHVWSFPDPPSQLLAPGWLRELSLLHTPPTRHTLGTLTTRNTHHTPCLPLIQISSQCQVALRFDRNEEEEEAIYFSAEKQWEVPDTASECDSLNSSIGRKQSPPLSLEIYQTLSPRKISRDEVSLEDSSRG

SEQ ID NO: 914080 - protein, 1235 aa, Homo sapiens
PKAARDWLKRNRGRGQASSTMTSTGQDSTTTRQRRSRQNPQSPPQDSSVTSKRNIKKGAVPRSIPNLAEVKKKGKMKKLGQAMEEDLIVGLQGMDLNLEAEALAGTGLVLDEQLNEFHCLWDDSFPEGPERLHAIKEQLIQEGLLDRCVSFQARFAEKEELMLVHSLEYIDLMETTQYMNEGELRVLADTYDSVYLHPNSYSCACLASGSVLRLVDAVLGAEIRNGMAIIRPPGHHAQHSLMDGYCMFNHVAVAARYAQQKHRIRRVLIVDWDVHHGQGTQFTFDQDPSVLYFSIHRYEQGRFWPHLKASNWSTTGFGQGQGYTINVPWNQVGMRDADYIAAFLHVLLPVALEFQPQLVLVAAGFDALQGDPKGEMAATPAGFAQLTHLLMGLAGGKLILSLEGGYNLRALAEGVSASLHTLLGDPCPMLESPGAPCRSAQASVSCALEALEPFWEVLVRSTETVERDNMEEDNVEESEEEGPWEPPVLPILTWPVLQSRTGLVYDQNMMNHCNLWDSHHPEVPQRILRIMCRLEELGLAGRCLTLTPRPATEAELLTCHSAEYVGHLRATEKMKTRELHRESSNFDSIYICPSTFACAQLATGAACRLVEAVLSGEVLNGAAVVRPPGHHAEQDAACGFCFFNSVAVAARHAQTISGHALRILIVDWDVHHGNGTQHMFEDDPSVLYVSLHRYDHGTFFPMGDEGASSQIGRAAGTGFTVNVAWNGPRMGDADYLAAWHRLVLPIAYEFNPELVLVSAGFDAARGDPLGGCQVSPEGYAHLTHLLMGLASGRIILILEGGYNLTSISESMAACTRSLLGDPPPLLTLPRPPLSGALASITETIQVHRRYWRSLRVMKVEDREGPSSSKLVTKKAPQPAKPRLAERMTTREKKVLEAGMGKVTSASFGEESTPGQTNSETAVVALTQDQPSEAATGGATLAQTISEAAIGGAMLGQTTSEEAVGGATPDQTTSEETVGGAILDQTTSEDAVGGATLGQTTSEEAVGGATLAQTTSEAAMEGATLDQTTSEEAPGGTELIQTPLASSTDHQTPPTSPVQGTTPQISPSTLIGSLRTLELGSESQGASESQAPGEENLLGEAAGGQDMADSMLMQGSRGLTDQAIFYAVTPLPWCPHLVAVCPIPAAGLDVTQPCGDCGTIQENWVCLSCYQVYCGRYINGHMLQHHGNSGHPLVLSYIDLSAWCYYCQAYVHHQALLDVKNIAHQNKFGEDMPHPH

SEQ ID NO: 914081 - protein, 1253 aa, Homo sapiens
RVPTGRQKLGGASQGRSLRKGLRPMSGANRGRGQASSTMTSTGQDSTTTRQRRSRQNPQSPPQDSSVTSKRNIKKGAVPRSIPNLAEVKKKGKMKKLGQAMEEDLIVGLQGMDLNLEAEALAGTGLVLDEQLNEFHCLWDDSFPEGPERLHAIKEQLIQEGLLDRCVSFQARFAEKEELMLVHSLEYIDLMETTQYMNEGELRVLADTYDSVYLHPNSYSCACLASGSVLRLVDAVLGAEIRNGMAIIRPPGHHAQHSLMDGYCMFNHVAVAARYAQQKHRIRRVLIVDWDVHHGQGTQFTFDQDPSVLYFSIHRYEQGRFWPHLKASNWSTTGFGQGQGYTINVPWNQVGMRDADYIAAFLHVLLPVALEFQPQLVLVAAGFDALQGDPKGEMAATPAGFAQLTHLLMGLAGGKLILSLEGGYNLRALAEGVSASLHTLLGDPCPMLESPGAPCRSAQASVSCALEALEPFWEVLVRSTETVERDNMEEDNVEESEEEGPWEPPVLPILTWPVLQSRTGLVYDQNMMNHCNLWDSHHPEVPQRILRIMCRLEELGLAGRCLTLTPRPATEAELLTCHSAEYVGHLRATEKMKTRELHRESSNFDSIYICPSTFACAQLATGAACRLVEAVLSGEVLNGAAVVRPPGHHAEQDAACGFCFFNSVAVAARHAQTISGHALRILIVDWDVHHGNGTQHMFEDDPSVLYVSLHRYDHGTFFPMGDEGASSQIGRAAGTGFTVNVAWNGPRMGDADYLAAWHRLVLPIAYEFNPELVLVSAGFDAARGDPLGGCQVSPEGYAHLTHLLMGLASGRIILILEGGYNLTSISESMAACTRSLLGDPPPLLTLPRPPLSGALASITETIQVHRRYWRSLRVMKVEDREGPSSSKLVTKKAPQPAKPRLAERMTTREKKVLEAGMGKVTSASFGEESTPGQTNSETAVVALTQDQPSEAATGGATLAQTISEAAIGGAMLGQTTSEEAVGGATPDQTTSEETVGGAILDQTTSEDAVGGATLGQTTSEEAVGGATLAQTTSEAAMEGATLDQTTSEEAPGGTELIQTPLASSTDHQTPPTSPVQGTTPQISPSTLIGSLRTLELGSESQGASESQAPGEENLLGEAAGGQDMADSMLMQGSRGLTDQAIFYAVTPLPWCPHLVAVCPIPAAGLDVTQPCGDCGTIQENWVCLSCYQVYCGRYINGHMLQHHGNSGHPLVLSYIDLSAWCYYCQAYVHHQALLDVKNIAHQNKFGEDMPHPH

SEQ ID NO: 914082 - protein, 1160 aa, Homo sapiens
MKKLGQAMEEDLIVGLQGMDLNLEAEALAGTGLVLDEQLNEFHCLWDDSFPEGPERLHAIKEQLIQEGLLDRCVSFQARFAEKEELMLVHSLEYIDLMETTQYMNEGELRVLADTYDSVYLHPNSYSCACLASGSVLRLVDAVLGAEIRNGMAIIRPPGHHAQHSLMDGYCMFNHVAVAARYAQQKHRIRRVLIVDWDVHHGQGTQFTFDQDPSVLYFSIHRYEQGRFWPHLKASNWSTTGFGQGQGYTINVPWNQVGMRDADYIAAFLHVLLPVALEFQPQLVLVAAGFDALQGDPKGEMAATPAGFAQLTHLLMGLAGGKLILSLEGGYNLRALAEGVSASLHTLLGDPCPMLESPGAPCRSAQASVSCALEALEPFWEVLVRSTETVERDNMEEDNVEESEEEGPWEPPVLPILTWPVLQSRTGLVYDQNMMNHCNLWDSHHPEVPQRILRIMCRLEELGLAGRCLTLTPRPATEAELLTCHSAEYVGHLRATEKMKTRELHRESSNFDSIYICPSTFACAQLATGAACRLVEAVLSGEVLNGAAVVRPPGHHAEQDAACGFCFFNSVAVAARHAQTISGHALRILIVDWDVHHGNGTQHMFEDDPSVLYVSLHRYDHGTFFPMGDEGASSQIGRAAGTGFTVNVAWNGPRMGDADYLAAWHRLVLPIAYEFNPELVLVSAGFDAARGDPLGGCQVSPEGYAHLTHLLMGLASGRIILILEGGYNLTSISESMAACTRSLLGDPPPLLTLPRPPLSGALASITETIQVHRRYWRSLRVMKVEDREGPSSSKLVTKKAPQPAKPRLAERMTTREKKVLEAGMGKVTSASFGEESTPGQTNSETAVVALTQDQPSEAATGGATLAQTISEAAIGGAMLGQTTSEEAVGGATPDQTTSEETVGGAILDQTTSEDAVGGATLGQTTSEEAVGGATLAQTTSEAAMEGATLDQTTSEEAPGGTELIQTPLASSTDHQTPPTSPVQGTTPQISPSTLIGSLRTLELGSESQGASESQAPGEENLLGEAAGGQDMADSMLMQGSRGLTDQAIFYAVTPLPWCPHLVAVCPIPAAGLDVTQPCGDCGTIQENWVCLSCYQVYCGRYINGHMLQHHGNSGHPLVLSYIDLSAWCYYCQAYVHHQALLDVKNIAHQNKFGEDMPHPH

SEQ ID NO: 914083 - protein, 1063 aa, Homo sapiens; identical to SEQ ID NO: 914077

SEQ ID NO: 914084 - protein, 1215 aa, Homo sapiens
MTSTGQDSTTTRQRRSRQNPQSPPQDSSVTSKRNIKKGAVPRSIPNLAEVKKKGKMKKLGQAMEEDLIVGLQGMDLNLEAEALAGTGLVLDEQLNEFHCLWDDSFPEGPERLHAIKEQLIQEGLLDRCVSFQARFAEKEELMLVHSLEYIDLMETTQYMNEGELRVLADTYDSVYLHPNSYSCACLASGSVLRLVDAVLGAEIRNGMAIIRPPGHHAQHSLMDGYCMFNHVAVAARYAQQKHRIRRVLIVDWDVHHGQGTQFTFDQDPSVLYFSIHRYEQGRFWPHLKASNWSTTGFGQGQGYTINVPWNQVGMRDADYIAAFLHVLLPVALEFQPQLVLVAAGFDALQGDPKGEMAATPAGFAQLTHLLMGLAGGKLILSLEGGYNLRALAEGVSASLHTLLGDPCPMLESPGAPCRSAQASVSCALEALEPFWEVLVRSTETVERDNMEEDNVEESEEEGPWEPPVLPILTWPVLQSRTGLVYDQNMMNHCNLWDSHHPEVPQRILRIMCRLEELGLAGRCLTLTPRPATEAELLTCHSAEYVGHLRATEKMKTRELHRESSNFDSIYICPSTFACAQLATGAACRLVEAVLSGEVLNGAAVVRPPGHHAEQDAACGFCFFNSVAVAARHAQTISGHALRILIVDWDVHHGNGTQHMFEDDPSVLYVSLHRYDHGTFFPMGDEGASSQIGRAAGTGFTVNVAWNGPRMGDADYLAAWHRLVLPIAYEFNPELVLVSAGFDAARGDPLGGCQVSPEGYAHLTHLLMGLASGRIILILEGGYNLTSISESMAACTRSLLGDPPPLLTLPRPPLSGALASITETIQVHRRYWRSLRVMKVEDREGPSSSKLVTKKAPQPAKPRLAERMTTREKKVLEAGMGKVTSASFGEESTPGQTNSETAVVALTQDQPSEAATGGATLAQTISEAAIGGAMLGQTTSEEAVGGATPDQTTSEETVGGAILDQTTSEDAVGGATLGQTTSEEAVGGATLAQTTSEAAMEGATLDQTTSEEAPGGTELIQTPLASSTDHQTPPTSPVQGTTPQISPSTLIGSLRTLELGSESQGASESQAPGEENLLGEAAGGQDMADSMLMQGSRGLTDQAIFYAVTPLPWCPHLVAVCPIPAAGLDVTQPCGDCGTIQENWVCLSCYQVYCGRYINGHMLQHHGNSGHPLVLSYIDLSAWCYYCQAYVHHQALLDVKNIAHQNKFGEDMPHPH

SEQ ID NO: 914085 - protein, 1215 aa, Homo sapiens; identical to SEQ ID NO: 914084

SEQ ID NO: 914086 - protein, 659 aa, Homo sapiens
MTSTGQDSTTTRQRRSRQNPQSPPQDSSVTSKRNIKKGAVPRSIPNLAEVKKKGKMKKLGQAMEEDLIVGLQGMDLNLEAEALAGTGLVLDEQLNEFHCLWDDSFPEGPERLHAIKEQLIQEGLLDRCVSFQARFAEKEELMLVHSLEYIDLMETTQYMNEGELRVLADTYDSVYLHPNSYSCACLASGSVLRLVDAVLGAEIRNGMAIIRPPGHHAQHSLMDGYCMFNHVAVAARYAQQKHRIRRVLIVDWDVHHGQGTQFTFDQDPSVLYFSIHRYEQGRFWPHLKASNWSTTGFGQGQGYTINVPWNQVGMRDADYIAAFLHVLLPVALEFQPQLVLVAAGFDALQGDPKGEMAATPAGFAQLTHLLMGLAGGKLILSLEGGYNLRALAEGVSASLHTLLGDPCPMLESPGAPCRSAQASVSCALEALEPFWEVLVRSTETVERDNMEEDNVEESEEEGPWEPPVLPILTWPVLQSRTGLVYDQNMMNHCNLWDSHHPEVPQRILRIMCRLEELGLAGRCLTLTPRPATEAELLTCHSAEYVGHLRATEKMKTRELHRESSNFDSIYICPSTFACAQLATGAACRLVEAVLSGEVLNGAAVVRPPGHHAEQDAACGFCFFNSVAVAARHAQTISGHALREPHWTRLRQRRLQGAPS

SEQ ID NO: 914087 - protein, 146 aa, Homo sapiens; identical to SEQ ID NO: 914078

SEQ ID NO: 914088 - protein, 211 aa, Homo sapiens
MTSTGQDSTTTRQRRSRQNPQSPPQDSSVTSKRNIKKGAVPRSIPNLAEVKKKGKMKKLGQAMEEDLIVGLQGMDLNLEAEALAGTGLVLDEQLNEFHCLWDDSFPEGPERLHAIKEQLIQEGLLDRCVSFQARFAEKEELMLVHSLEYIDLMETTQYMNEGELRVLADTYDSVYLHPNSYSCACLASGSVLRLVDAVLGAEIRNGMAIIR

SEQ ID NO: 914089 - protein, 118 aa, Homo sapiens
HLFLLPLSLYFFSSLLHFQSLLLCLLVSRFCVSISLTCISMSSFVLFSMSLGRHHLLPTKSPYPHAYTSLLSLPQFNPELVLVSAGFDAARGDPLGGCQVSPEGYAHLTHLLMGLASG

SEQ ID NO: 914090 - protein, 1215 aa, Homo sapiens; identical to SEQ ID NO: 914084

SEQ ID NO: 914091 - protein, 146 aa, Homo sapiens; identical to SEQ ID NO: 914078

SEQ ID NO: 914092 - protein, 1215 aa, Homo sapiens; identical to SEQ ID NO: 914084

SEQ ID NO: 914093 - protein, 1215 aa, Homo sapiens; identical to SEQ ID NO: 914084

SEQ ID NO: 914094 - protein, 1063 aa, Homo sapiens; identical to SEQ ID NO: 914077

SEQ ID NO: 914095 - protein, 669 aa, Homo sapiens
MTSTGQDSTTTRQRRSRQNPQSPPQDSSVTSKRNIKKGAVPRSIPNLAEVKKKGKMKKLGQAMEEDLIVGLQGMDLNLEAEALAGTGLVLDEQLNEFHCLWDDSFPEGPERLHAIKEQLIQEGLLDRCVSFQARFAEKEELMLVHSLEYIDLMETTQYMNEGELRVLADTYDSVYLHPNSYSCACLASGSVLRLVDAVLGAEIRNGMAIIRPPGHHAQHSLMDGYCMFNHVAVAARYAQQKHRIRRVLIVDWDVHHGQGTQFTFDQDPSVLYFSIHRYEQGRFWPHLKASNWSTTGFGQGQGYTINVPWNQVGMRDADYIAAFLHVLLPVALEFQPQLVLVAAGFDALQGDPKGEMAATPAGFAQLTHLLMGLAGGKLILSLEGGYNLRALAEGVSASLHTLLGDPCPMLESPGAPCRSAQASVSCALEALEPFWEVLVRSTETVERDNMEEDNVEESEEEGPWEPPVLPILTWPVLQSRTGLVYDQNMMNHCNLWDSHHPEVPQRILRIMCRLEELGLAGRCLTLTPRPATEAELLTCHSAEYVGHLRATEKMKTRELHRESSNFDSIYICPSTFACAQLATGAACRLVEAVLSGEVLNGAAVVRPPGHHAEQDAACGFCFFNSVAVAARHAQTISGHALRILIVDWDVHHGNGTQHMFEDDPRVAIT

SEQ ID NO: 914096 - protein, 1215 aa, Homo sapiens; identical to SEQ ID NO: 914084

SEQ ID NO: 914097 - protein, 1165 aa, Homo sapiens
MTSTGQDSTTTRQRRSRQNPQSPPQDSSVTSKRNIKKGAVPRSIPNLAEVKKKGKMKKLGQAMEEDLIVGLQGMDLNLEAEALAGTGLVLDEQLNEFHCLWDDSFPEGPERLHAIKEQLIQEGLLDRCVSFQARFAEKEELMLVHSLEYIDLMETTQYMNEGELRVLADTYDSVYLHPNSYSCACLASGSVLRLVDAVLGAEIRNGMAIIRPPGHHAQHSLMDGYCMFNHVAVAARYAQQKHRIRRVLIVDWDVHHGQGTQFTFDQDPSVLYFSIHRYEQGRFWPHLKASNWSTTGFGQGQGYTINVPWNQVGMRDADYIAAFLHVLLPVALEFQPQLVLVAAGFDALQGDPKGEMAATPAGFAQLTHLLMGLAGGKLILSLEGGYNLRALAEGVSASLHTLLGDPCPMLESPGAPCRSAQASVSCALEALEPFWEVLVRSTETVERDNMEEDNVEESEEEGPWEPPVLPILTWPVLQSRTGLVYDQNMMNHCNLWDSHHPEVPQRILRIMCRLEELGLAGRCLTLTPRPATEAELLTCHSAEYVGHLRATEKMKTRELHRESSNFDSIYICPSTFACAQLATGAACRLVEAVLSGEVLNGAAVVRPPGHHAEQDAACGFCFFNSVAVAARHAQTISGHALRILIVDWDVHHGNGTQHMFEDDPSVLYVSLHRYDHGTFFPMGDEGASSQIGRAAGTGFTVNVAWNGPRMGDADYLAAWHRLVLPIAYEFNPELVLVSAGFDAARGDPLGGCQVSPEGYAHLTHLLMGLASGRIILILEGGYNLTSISESMAACTRSLLGDPPPLLTLPRPPLSGALASITETIQVHRRYWRSLRVMKVEDREGPSSSKLVTKKAPQPAKPRLAERMTTREKKVLEAGMGKVTSASFGEESTPGQTNSETAVVALTQDQPSEAATGGATLAQTISEAAIGGAMLGQTTSEEAVGGATPDQTTSEETVGGAILDQTTSEDAVGGATLGQTTSEEAVGGATLAQTTSEAAMEGATLDQTTSEEAPGGTELIQTPLASSTDHQTPPTSPVQGTTPQISPSTLIGSLRTLELGSESQGASESQAPGEENLLGEAAGGQDMADSMLMQGSRGLTDQAIFYAVTPLPWCPHLVAVCPIPAAGLDVTQPCGDCGTIQENWVCLSCYQSTVSVTNGKCSHMEF

SEQ ID NO: 914098 - protein, 623 aa, Homo sapiens
MTSTGQDSTTTRQRRSRQNPQSPPQDSSVTSKRNIKKGAVPRSIPNLAEVKKKGKMKKLGQAMEEDLIVGLQGMDLNLEAEALAGTGLVLDEQLNEFHCLWDDSFPEGPERLHAIKEQLIQEGLLDRCVSFQARFAEKEELMLVHSLEYIDLMETTQYMNEGELRVLADTYDSVYLHPNSYSCACLASGSVLRLVDAVLGAEIRNGMAIIRPPGHHAQHSLMDGYCMFNHVAVAARYAQQKHRIRRVLIVDWDVHHGQGTQFTFDQDPSVLYFSIHRYEQGRFWPHLKASNWSTTGFGQGQGYTINVPWNQVGMRDADYIAAFLHVLLPVALEFQPQLVLVAAGFDALQGDPKGEMAATPAGFAQLTHLLMGLAGGKLILSLEGGYNLRALAEGVSASLHTLLGDPCPMLESPGAPCRSAQASVSCALEALEPFWEVLVRSTETVERDNMEEDNVEESEEEGPWEPPVLPILTWPVLQSRTGLVYDQNMMNHCNLWDSHHPEVPQRILRIMCRLEELGLAGRCLTLTPRPATEAELLTCHSAEYVGHLRATEKMKTRELHRESSNFDSIYICPSTFACAQLATGAACRLVEAVLSGEVCPLWAGERRTWGEWKKRAICCFWRL

SEQ ID NO: 914099 - protein, 104 aa, Homo sapiens
MTSTGQDSTTTRQRRSRQNPQSPPQDSSVTSKRNIKKGAVPRSIPNLAEVKKKGKMKKLGQAMEEDLIVGLQGMDLNLEAEALAGTGLVLDEQLNEFHCLWDDR

SEQ ID NO: 914100 - protein, 828 aa, Homo sapiens
IPRQGRPFFLYYASHHTHYPQFSGQSFTKRSGRGPFGDSLMELDGAVGALMTTVGDLGLLEETLVIFTADNGPELMRMSNGGCSGLLRCGKGTTFEGGVREPALVYWPGHITPGVTHELASSLDLLPTLAALTGVLLPNVTLDGVDISPLLLGTGKSPRKSVFFYPPYPDEIHGVFAVRNGKYKAHFFTQGSAHSDTTSDPACHAANRLTAHEPPLLYDLSQDPGENYNVLENQQREEMGKWLSRSFRNSGNRLLLQLLGSPGRRYYSLPPHQKVPLPSLSPTMQAGTIARWEKKEGDKINEGDLIAEVETDKATVGFESLEECYMAKILVAEGTRDVPIGAIICITVGKPEDIEAFKNYTLDSSAAPTPQAAPAPTPAATASPPTPSAQAPGSSYPPHMQVLLPALSPTMTMGTVQRWEKKVGEKLSEGDLLAEIETDKATIGFEVQEEGYLAKILVPEGTRDVPLGTPLCIIVEKEADISAFADYRPTEVTDLKPQVPPPTPPPVAAVPPTPQPLAPTPSAPCPATPAGPKGRVFVSPLAKKLAVEKGIDLTQVKGTGPDGRITKKDIDSFVPSKVAPAPAAVVPPTGPGMAPVPTGVFTDIPISNIRRVIAQRLMQSKQTIPHYYLSIDVNMGEVLLVRKELNKILEGRSKISVNDFIIKASALACLKVPEANSSWMDTVIRQNHVVDVSVAVSTPAGLITPIVFNAHIKGVETIANDVVSLATKAREGKLQPHEFQGGTFTISNLGMFGIKNFSAIINPPQACILAIGASEDKLVPADNEKGFDVASMMSVTLSCDHRVVDGAVGAQWLAEFRKYLEKPITMLL

SEQ ID NO: 914101 - protein, 662 aa, Homo sapiens
SGDGVGFGVWGVGGTMWRVCARRAQNVAPWAGLEARWTALQEVPGTPRVTSRSGPAPARRNSVTTGYGGVRALCGWTPSSGATPRNRLLLQLLGSPGRRYYSLPPHQKVPLPSLSPTMQAGTIARWEKKEGDKINEGDLIAEVETDKATVGFESLEECYMAKILVAEGTRDVPIGAIICITVGKPEDIEAFKNYTLDSSAAPTPQAAPAPTPAATASPPTPSAQAPGSSYPPHMQVLLPALSPTMTMGTVQRWEKKVGEKLSEGDLLAEIETDKATIGFEVQEEGYLAKILVPEGTRDVPLGTPLCIIVEKEADISAFADYRPTEVTDLKPQVPPPTPPPVAAVPPTPQPLAPTPSAPCPATPAGPKGRVFVSPLAKKLAVEKGIDLTQVKGTGPDGRITKKDIDSFVPSKVAPAPAAVVPPTGPGMAPVPTGVFTDIPISNIRRVIAQRLMQSKQTIPHYYLSIDVNMGEVLLVRKELNKILEGRSKISVNDFIIKASALACLKVPEANSSWMDTVIRQNHVVDVSVAVSTPAGLITPIVFNAHIKGVETIANDVVSLATKAREGKLQPHEFQGGTFTISNLGMFGIKNFSAIINPPQACILAIGASEDKLVPADNEKGFDVASMMSVTLSCDHRVVDGAVGAQWLAEFRKYLEKPITMLL

SEQ ID NO: 914102 - protein, 590 aa, Homo sapiens
GRGWQHSRFSLRQNRLLLQLLGSPGRRYYSLPPHQKVPLPSLSPTMQAGTIARWEKKEGDKINEGDLIAEVETDKATVGFESLEECYMAKILVAEGTRDVPIGAIICITVGKPEDIEAFKNYTLDSSAAPTPQAAPAPTPAATASPPTPSAQAPGSSYPPHMQVLLPALSPTMTMGTVQRWEKKVGEKLSEGDLLAEIETDKATIGFEVQEEGYLAKILVPEGTRDVPLGTPLCIIVEKEADISAFADYRPTEVTDLKPQVPPPTPPPVAAVPPTPQPLAPTPSAPCPATPAGPKGRVFVSPLAKKLAVEKGIDLTQVKGTGPDGRITKKDIDSFVPSKVAPAPAAVVPPTGPGMAPVPTGVFTDIPISNIRRVIAQRLMQSKQTIPHYYLSIDVNMGEVLLVRKELNKILEGRSKISVNDFIIKASALACLKVPEANSSWMDTVIRQNHVVDVSVAVSTPAGLITPIVFNAHIKGVETIANDVVSLATKAREGKLQPHEFQGGTFTISNLGMFGIKNFSAIINPPQACILAIGASEDKLVPADNEKGFDVASMMSVTLSCDHRVVDGAVGAQWLAEFRKYLEKPITMLL

SEQ ID NO: 914103 - protein, 828 aa, Homo sapiens; identical to SEQ ID NO: 914100

SEQ ID NO: 914104 - protein, 828 aa, Homo sapiens; identical to SEQ ID NO: 914100

SEQ ID NO: 914105 - protein, 592 aa, Homo sapiens
  misc_feature (581)..(581): Xaa can be any naturally occurring amino acid
  misc_feature (584)..(584): Xaa can be any naturally occurring amino acid
  misc_feature (590)..(590): Xaa can be any naturally occurring amino acid
SGDGVGFGVWGVGGTMWRVCARRAQNVAPWAGLEARWTALQEVPGTPRVTSRSGPAPARRNSVTTGYGGVRALCGWTPSSGATPRNRLLLQLLGSPGRRYYSLPPHQKVPLPSLSPTMQAGTIARWEKKEGDKINEGDLIAEVETDKATVGFESLEECYMAKILVAEGTRDVPIGAIICITVGKPEDIEAFKNYTLDSSAAPTPQAAPAPTPAATASPPTPSAQAPGSSYPPHMQVLLPALSPTMTMGTVQRWEKKVGEKLSEGDLLAEIETDKATIGFEVQEEGYLAKILVPEGTRDVPLGTPLCIIVEKEADISAFADYRPTEVTDLKPQVPPPTPPPVAAVPPTPQPLAPTPSAPCPATPAGPKGRVFVSPLAKKLAVEKGIDLTQVKGTGPDGRITKKDIDSFVPSKVAPAPAAVVPPTGPGMAPVPTGVFTDIPISNIRRVIAQRLMQSKQTIPHYYLSIDVNMGEVLLVRKELNKILEGRSKISVNDFIIKASALACLKVPEANSSWMDTVIRQNHVVDVSVAVSTPAGLITPIVFNAHIKGVETIANDVVSLATKAREGKLQPHEFQRVGHFFXQSXNFEGKXFG

SEQ ID NO: 914106 - protein, 828 aa, Homo sapiens; identical to SEQ ID NO: 914100

SEQ ID NO: 914107 - protein, 708 aa, Homo sapiens
  misc_feature (5)..(5): Xaa can be any naturally occurring amino acid
  misc_feature (7)..(7): Xaa can be any naturally occurring amino acid
  misc_feature (25)..(26): Xaa can be any naturally occurring amino acid
KTAIXLXVGVLPGDGKRNPGNNREXXRKAYVEAWKDGKKQPWRSLGNCLPVQRGVWGVGGTMWRVCARRAQNVAPWAGLEARWTALQEVPGTPRVTSRSGPAPARRNSVTTGYGGVRALCGWTPSSGATPRNRLLLQLLGSPGRRYYSLPPHQKVPLPSLSPTMQAGTIARWEKKEGDKINEGDLIAEVETDKATVGFESLEECYMAKILVAEGTRDVPIGAIICITVGKPEDIEAFKNYTLDSSAAPTPQAAPAPTPAATASPPTPSAQAPGSSYPPHMQVLLPALSPTMTMGTVQRWEKKVGEKLSEGDLLAEIETDKATIGFEVQEEGYLAKILVPEGTRDVPLGTPLCIIVEKEADISAFADYRPTEVTDLKPQVPPPTPPPVAAVPPTPQPLAPTPSAPCPATPAGPKGRVFVSPLAKKLAVEKGIDLTQVKGTGPDGRITKKDIDSFVPSKVAPAPAAVVPPTGPGMAPVPTGVFTDIPISNIRRVIAQRLMQSKQTIPHYYLSIDVNMGEVLLVRKELNKILEGRSKISVNDFIIKASALACLKVPEANSSWMDTVIRQNHVVDVSVAVSTPAGLITPIVFNAHIKGVETIANDVVSLATKAREGKLQPHEFQGGTFTISNLGMFGIKNFSAIINPPQACILAIGASEDKLVPADNEKGFDVASMMSVTLSCDHRVVDGAVGAQWLAEFRKYLEKPITMLL

SEQ ID NO: 914108 - protein, 828 aa, Homo sapiens; identical to SEQ ID NO: 914100

SEQ ID NO: 914109 - protein, 557 aa, Homo sapiens
SGDGVGFGVWGVGGTMWRVCARRAQNVAPWAGLEARWTALQEVPGTPRVTSRSGPAPARRNSVTTGYGGVRALCGWTPSSGATPRNRLLLQLLGSPGRRYYSLPPHQKVPLPSLSPTMQAGTIARWEKKEGDKINEGDLIAEVETDKATVGFESLEECYMAKILVAEGTRDVPIGAIICITVGKPEDIEAFKNYTLDSSAAPTPQAAPAPTPAATASPPTPSAQAPGSSYPPHMQVAAVPPTPQPLAPTPSAPCPATPAGPKGRVFVSPLAKKLAVEKGIDLTQVKGTGPDGRITKKDIDSFVPSKVAPAPAAVVPPTGPGMAPVPTGVFTDIPISNIRRVIAQRLMQSKQTIPHYYLSIDVNMGEVLLVRKELNKILEGRSKISVNDFIIKASALACLKVPEANSSWMDTVIRQNHVVDVSVAVSTPAGLITPIVFNAHIKGVETIANDVVSLATKAREGKLQPHEFQGGTFTISNLGMFGIKNFSAIINPPQACILAIGASEDKLVPADNEKGFDVASMMSVTLSCDHRVVDGAVGAQWLAEFRKYLEKPITMLL

SEQ ID NO: 914110 - protein, 116 aa, Homo sapiens
PVSPFRMPPLEPYHFPPLSVCYFSQTCARTGPSGTLLPRSAPRPRSVEKERACRAFLAWGAGGVNLREPFYDNVRLCGVADGNAAALGEVTPETALVLGCGGLVALCGASVRDGLR

SEQ ID NO: 914111 - protein, 284 aa, Homo sapiens
AERAQHSGRQRRSPSSRTTKLPFPKRKETARGFWGSQARACEGGREPSRHAQNPEPAPAPPSPAPPPRLRTRRPLQAPLLRPIWSFGGQAAGGETCAAEGEAEPAPAAQRSRSRRRHLGWEPTRLPHPALGTMGLGARGAWAALLLGTLQVLALLGAAHESAAMAASANIENSGLPHNSSANSTETLQHVPSDHTNETSNSTVKPPTSVASDSSNTTVTTMKPTAASNTTTPGMVSTNMTSTTLKSTPKTTSVSQNTSQISTSTMTVTHNSSVTSAASSVTSMY

SEQ ID NO: 914112 - protein, 340 aa, Homo sapiens
AERAQHSGRQRRSPSSRTTKLPFPKRKETARGFWGSQARACEGGREPSRHAQNPEPAPAPPSPAPPPRLRTRRPLQAPLLRPIWSFGGQAAGGETCAAEGEAEPAPAAQRSRSRRRHLGWEPTRLPHPALGTMGLGARGAWAALLLGTLQVLALLGAAHESAAMAASANIENSGLPHNSSANSTETLQHVPSDHTNETSNSTVKPPTSVASDSSNTTVTTMKPTAASNTTTPGMVSTNMTSTTLKSTPKTTSVSQNTSQISTSTMTVTHNSSVTSAASSVTITTTMHSEAKKGSKFDTGSFVGGIVLTLGVLSILYIGCKMYYSRRGIRYRTIDEHDAII

SEQ ID NO: 914113 - protein, 321 aa, Homo sapiens
AERAQHSGRQRRSPSSRTTKLPFPKRKETARGFWGSQARACEGGREPSRHAQNPEPAPAPPSPAPPPRLRTRRPLQAPLLRPIWSFGGQAAGGETCAAEGEAEPAPAAQRSRSRRRHLGWEPTRLPHPALGTMGLGARGAWAALLLGTLQVLALLGAAHESAAMAETLQHVPSDHTNETSNSTVKPPTSVASDSSNTTVTTMKPTAASNTTTPGMVSTNMTSTTLKSTPKTTSVSQNTSQISTSTMTVTHNSSVTSAASSVTITTTMHSEAKKGSKFDTGSFVGGIVLTLGVLSILYIGCKMYYSRRGIRYRTIDEHDAII

SEQ ID NO: 914114 - protein, 320 aa, Homo sapiens
AERAQHSGRQRRSPSSRTTKLPFPKRKETARGFWGSQARACEGGREPSRHAQNPEPAPAPPSPAPPPRLRTRRPLQAPLLRPIWSFGGQAAGGETCAAEGEAEPAPAAQRSRSRRRHLGWEPTRLPHPALGTMGLGARGAWAALLLGTLQVLALLGAAHESAAMAASANIENSGLPHNSSANSTETLQHVPSDHTNETSNSTVKPPTSVASDSSNTTVTTMKPTAASNTTTPGMVSTNMTSTTLKSTPKTTSVSQNTSQISTSTMTVTHNSSVTSAASSVTITTTMHSEAKKGSKFDTGSFVGGIVLTLGVLSILYIGCR

SEQ ID NO: 914115 - protein, 340 aa, Homo sapiens; identical to SEQ ID NO: 914112

SEQ ID NO: 914116 - protein, 340 aa, Homo sapiens; identical to SEQ ID NO: 914112

SEQ ID NO: 914117 - protein, 340 aa, Homo sapiens; identical to SEQ ID NO: 914112

SEQ ID NO: 914118 - protein, 340 aa, Homo sapiens; identical to SEQ ID NO: 914112

SEQ ID NO: 914119 - protein, 340 aa, Homo sapiens; identical to SEQ ID NO: 914112

SEQ ID NO: 914120 - protein, 163 aa, Homo sapiens [sequence omitted]

SEQ ID NO: 914121 - protein, 340 aa, Homo sapiens; identical to SEQ ID NO: 914112

SEQ ID NO: 914122 - protein, 340 aa, Homo sapiens; identical to SEQ ID NO: 914112

SEQ ID NO: 914123 - protein, 449 aa, Homo sapiens
MMLSTEGREGFVVKVRGLPWSCSADEVMRFFSDCKIQNGTSGIRFIYTREGRPSGEAFVELESEEEVKLALKKDRETMGHRYVEVFKSNSVEMDWVLKHTGPNSPDTANDGFVRLRGLPFGCSKEEIVQFFSGLEIVPNGMTLPVDFQGRSTGEAFVQFASQEIAEKALKKHKERIGHRYIEIFKSSRAEVRTHYDPPRKLMAMQRPGPYDRPGAGRGYNSIGRGAGFERMRRGAYGGGYGGYDDYGGYNDGYGFGSDRFGRDLNYCFSGMSDHRYGDGGSSFQSTTGHCVHMRGLPYRATENDIYNFFSPLNPMRVHIEIGPDGRVTGEADVEFATHEDAVAAMAKDKANMQHRYVELFLNSTAGTSGGAYDHSYVELFLNSTAGASGGAYGSQMMGGMGLSNQSSYGGPASQQLSGGYGGGYGGQSSMSGYDQVLQENSSDYQSNLA

SEQ ID NO: 914124 - protein, 449 aa, Homo sapiens; identical to SEQ ID NO: 914123

SEQ ID NO: 914125 - protein, 449 aa, Homo sapiens; identical to SEQ ID NO: 914123

SEQ ID NO: 914126 - protein, 472 aa, Homo sapiens
MLTKIPYNASMNCCCYLEGRGTWVRRLDKVQVPILSLVPSSDLMHIFSRFAWIHYVLISVFVCILSTRRDAHDPSVVDLVKKRVESEEEVKLALKKDRETMGHRYVEVFKSNSVEMDWVLKHTGPNSPDTANDGFVRLRGLPFGCSKEEIVQFFSGLEIVPNGMTLPVDFQGRSTGEAFVQFASQEIAEKALKKHKERIGHRYIEIFKSSRAEVRTHYDPPRKLMAMQRPGPYDRPGAGRGYNSIGRGAGFERMRRGAYGGGYGGYDDYGGYNDGYGFGSDRFGRDLNYCFSGMSDHRYGDGGSSFQSTTGHCVHMRGLPYRATENDIYNFFSPLNPMRVHIEIGPDGRVTGEADVEFATHEDAVAAMAKDKANMQHRYVELFLNSTAGTSGGAYDHSYVELFLNSTAGASGGAYGSQMMGGMGLSNQSSYGGPASQQLSGGYGGGYGGQSSMSGYDQVLQENSSDYQSNLA

SEQ ID NO: 914127 - protein, 449 aa, Homo sapiens; identical to SEQ ID NO: 914123

SEQ ID NO: 914128 - protein, 449 aa, Homo sapiens; identical to SEQ ID NO: 914123

SEQ ID NO: 914129 - protein, 135 aa, Homo sapiens
MRVHIEIGPDGRVTGEADVEFATHEDAVAAMAKDKANMQHRYVELFLNSTAGTSGGAYDHSYVELFLNSTAGASGGAYGSQMMGGMGLSNQSSYGGPASQQLSGGYGGGYGGQSSMSGYDQVLQENSSDYQSNLA

SEQ ID NO: 914130 - protein, 449 aa, Homo sapiens; identical to SEQ ID NO: 914123

SEQ ID NO: 914131 - protein, 449 aa, Homo sapiens; identical to SEQ ID NO: 914123

SEQ ID NO: 914132 - protein, 431 aa, Homo sapiens
MMLSTEGREGFVVKVRGLPWSCSADEVMRFFSDCKIREAFVELESEEEVKLALKKDRETMGHRYVEVFKSNSVEMDWVLKHTGPNSPDTANDGFVRLRGLPFGCSKEEIVQFFSGLEIVPNGMTLPVDFQGRSTGEAFVQFASQEIAEKALKKHKERIGHRYIEIFKSSRAEVRTHYDPPRKLMAMQRPGPYDRPGAGRGYNSIGRGAGFERMRRGAYGGGYGGYDDYGGYNDGYGFGSDRFGRDLNYCFSGMSDHRYGDGGSSFQSTTGHCVHMRGLPYRATENDIYNFFSPLNPMRVHIEIGPDGRVTGEADVEFATHEDAVAAMAKDKANMQHRYVELFLNSTAGTSGGAYDHSYVELFLNSTAGASGGAYGSQMMGGMGLSNQSSYGGPASQQLSGGYGGGYGGQSSMSGYDQVLQENSSDYQSNLA

SEQ ID NO: 914133 - protein, 449 aa, Homo sapiens; identical to SEQ ID NO: 914123

SEQ ID NO: 914134 - protein, 449 aa, Homo sapiens; identical to SEQ ID NO: 914123

SEQ ID NO: 914135 - protein, 193 aa, Homo sapiens
ASPRGTEASPPQNNSGSSSPVFTFRHPLLSSGGPQSPLRGSTGSLKSSPSMSHMEALGKAWNRQLSRPLSQAVSFSTPFGLDSDVDVVMGDPVLLRSVSSDSLGAGEGRAGGERHEKGPDMGHGRGSTAGSRGSTEWGTRGPPDDRSGWRQVQTSPHYRKTPVQSRRGRSSRLREIKEQRTPDTTRQNHDNSN

SEQ ID NO: 914136 - protein, 917 aa, Homo sapiens
ASPRGTEASPPQNNSGSSSPVFTFRHPLLSSGGPQSPLRGSTGSLKSSPSMSHMEALGKAWNRQLSRPLSQAVSFSTPFGLDSDVDVVMGDPVLLRSVSSDSLGPPRPAPARTPTQPPPEPGDLPTIEEALQIIHSAEPRLLPDGAADGSFYLHSPEGPSKPSLASPYLPEGTSKPLSDRPTKAPVYMPHPETPSKPSPCLVGEASKPPAPSEGSPKAVASSPAATNSEVKMTSFAERKKQLVKAEAEAGAGSPTSTPAPPEALSSEMSELSARLEEKRRAIEAQKRRIEAIFAKHRQRLGKSAFLQVQPREASGEAEAEAEEADSGPVPGGERPAGEGQGEPTSRPKAVTFSPDLGPVPHEGLGEYNRAVSKLSAALSSLQRDMQRLTDQQQRLLAPPEAPGSAPPPAAWVIPGPTTGPKAASPSPARRVPATRRSPGPGPSQSPRSPKHTRPAELRLAPLTRVLTPPHDVDSLPHLRKFSPSQVPVQTRSSILLAEETPPEEPAARPGLIEIPLGSLADPAAEDEGDGSPAGAEDSLEEEASSEGEPRVGLGFFYKDEDKPEDEMAQKRASLLERQQRRAEEARRRKQWQEVEKEQRREEAARLAQEEAPGPAPLVSAVPMATPAPAARAPAEEEVGPRKGDFTRQEYERRAQLKLMDDLDKVLRPRAAGSGGPGRGGRRATRPRSGCCDDSALARSPARGLLGSRLSKIYSQSTLSLSTVANEAHNNLGVKRPTSRAPSPSGLMSPSRLPGSRERDWENGSNASSPASVPEYTGPRLYKEPSAKSNKFIIHNALSHCCLAGKVNEPQKNRILEEIEKSKANHFLILFRDSSCQFRALYTLSGETEELSRLAGYGPRTVTPAMVEGIYKYNSDRKRFTQIPAKTMSMSVDAFTIQGHLWQGKKPTTPKKGGGTPK

SEQ ID NO: 914137 - protein, 340 aa, Homo sapiens
MGLQPCWGRGWLAGLGVCPQDEDKPEDEMAQKRASLLERQQRRAEEARRRKQWQEVEKEQRREEAASALLRLALMSDGSRVPMPRLVSVVPDLLTSHAPVRAAVCSQPDVEECVAPGKGGRSQRQWVRGSRLSKIYSQSTLSLSTVANEAHNNLGVKRPTSRAPSPSGLMSPSRLPGSRERDWENGSNASSPASVPEYTGPRLYKEPSAKSNKFIIHNALSHCCLAGKVNEPQKNRILEEIEKSKANHFLILFRDSSCQFRALYTLSGETEELSRLAGYGPRTVTPAMVEGIYKYNSDRKRFTQIPAKTMSMSVDAFTIQGHLWQGKKPTTPKKGGGTPK

SEQ ID NO: 914138 - protein, 364 aa, Homo sapiens
MGLQPCWGRGWLAGLGVCPQDEDKPEDEMAQKRASLLERQQRRAEEARRRKQWQEVEKEQRREEAARLAQEEAPGPAPLVSAVPMATPAPAARAPAEEEVGPRKGDFTRQEYERRAQLKLMDDLDKVLRPRAAGSGGPGRGGRRATRPRSGCCDDSALARSPARGLLGSRLSKIYSQSTLSLSTVANEAHNNLGVKRPTSRAPSPSGLMSPSRLPGSRERDWENGSNASSPAAKSNKFIIHNALSHCCLAGKVNEPQKNRILEEIEKSKANHFLILFRDSSCQFRALYTLSGETEELSRLAGYGPRTVTPAMVEGIYKYNSDRKRFTQIPAKTMSMSVDAFTIQGHLWQGKKPTTPKKGGGTPK

SEQ ID NO: 914139 - protein, 158 aa, Homo sapiens
  misc_feature (3)..(3): Xaa can be any naturally occurring amino acid
  misc_feature (49)..(49): Xaa can be any naturally occurring amino acid
SSXASVPSTQATVYKEPSAKSTSSSSQCLHTAAGGGPGGGAQKKGVERXPQKNRILEEIEKSKANHFLILFRDSSCQFRALYTLSGETEELSRLAGYGPRTVTPAMVEGIYKYNSDRKRFTQIPAKTMSMSVDAFTIQGHLWQGKKPTTPKKGGGTPK

SEQ ID NO: 914140 - protein, 917 aa, Homo sapiens; identical to SEQ ID NO: 914136

SEQ ID NO: 914141 - protein, 379 aa, Homo sapiens [sequence omitted]

SEQ ID NO: 914142 - protein, 256 aa, Homo sapiens
AAEGRGVLGRTDSSCVPPTACWTGCCGGQGLLVGTDLQSLSPGSRSRLSKIYSQSTLSLSTVANEAHNNLGVKRPTSRAPSPSGLMSPSRLPGSRERDWENGSNASSPASVPEYTGPRLYKEPSAKSNKFIIHNALSHCCLAGKVNEPQKNRILEEIEKSKANHFLILFRDSSCQFRALYTLSGETEELSRLAGYGPRTVTPAMVEGIYKYNSDRKRFTQIPAKTMSMSVDAFTIQGHLWQGKKPTTPKKGGGTPK

SEQ ID NO: 914143 - protein, 203 aa, Homo sapiens [sequence omitted]

SEQ ID NO: 914144 - protein, 203 aa, Homo sapiens [sequence omitted]

SEQ ID NO: 914145 - protein, 121 aa, Homo sapiens
MVLATRQPLWAIFCADYPAQEGLLSCPHGLRCGSWILPPSHHNPLSVFPQLLPFSRVPLEPNSRSNLELKSQCSLPRSGAPTLPRYQHSSSPPKTSYPHPLPKALRGRKHLLQPVPTPSSA

SEQ ID NO: 914146 - protein, 121 aa, Homo sapiens; identical to SEQ ID NO: 914145

SEQ ID NO: 914147 - protein, 203 aa, Homo sapiens [sequence omitted]

SEQ ID NO: 914148 - protein, 203 aa, Homo sapiens [sequence omitted]

SEQ ID NO: 914149 - protein, 203 aa, Homo sapiens [sequence omitted]

SEQ ID NO: 914150 - protein, 203 aa, Homo sapiens [sequence omitted]

SEQ ID NO: 914151 - protein, 203 aa, Homo sapiens [sequence omitted]

SEQ ID NO: 914152 - protein, 106 aa, Homo sapiens
MLRLTEVRSDNQALGTCRLAGTALCVAAGVLLAICLFWAMIGWLSQDTKAEPLDPEADSHVEVFGDEPEQQLSPIFRNASGQSWFSPPASPFGQSSVQTIQPKRDS

SEQ ID NO: 914153 - protein, 130 aa, Homo sapiens
MSTRKRRGGAINSRQAQKRTREATSTPEISLEAEPIELVETAGDEIVDLTCESLEPVVVDLTHNDSVVIVDERRRPRRNARRLPQDHADSCVVSSDDEELSRDRDVYVTTHTPRNARDEGATGLRYQRAP

SEQ ID NO: 914154 - protein, 75 aa, Homo sapiens
EPRPPKRKWVAVEAAASFSRSSPGRLKKELLLRSAPAVAPADLTSSRLGRALRESSGLENTGNLSGSKLFCKPDE

SEQ ID NO: 914155 - protein, 190 aa, Homo sapiens
MSTRKRRGGAINSRQAQKRTREATSTPEISLEAEPIELVETAGDEIVDLTCESLEPVVVDLTHNDSVVIVDERRRPRRNARRLPQDHADSCVVSSDDEELSRDRDVYVTTHTPRNARDEGATGLRPSGTVSCPICMDGYSEIVQNGRLIVSTECGHVFCSQCLRDSLKNANTCPTCRKKINHKRYHPIYI

SEQ ID NO: 914156 - protein, 190 aa, Homo sapiens; identical to SEQ ID NO: 914155

SEQ ID NO: 914157 - protein, 116 aa, Homo sapiens [sequence omitted]

SEQ ID NO: 914158 - protein, 158 aa, Homo sapiens
MLVEILSFEAGDEIVDLTCESLEPVVVDLTHNDSVVIVDERRRPRRNARRLPQDHADSCVVSSDDEELSRDRDVYVTTHTPRNARDEGATGLRPSGTVSCPICMDGYSEIVQNGRLIVSTECGHVFCSQCLRDSLKNANTCPTCRKKINHKRYHPIYI

SEQ ID NO: 914159 - protein, 141 aa, Homo sapiens
MGVVRTVRVESLQPENVTSYVDERRRPRRNARRLPQDHADSCVVSSDDEELSRDRDVYVTTHTPRNARDEGATGLRPSGTVSCPICMDGYSEIVQNGRLIVSTECGHVFCSQCLRDSLKNANTCPTCRKKINHKRYHPIYI

SEQ ID NO: 914160 - protein, 77 aa, Homo sapiens
EPRPPKRKWVAVEAAASFSRSSPGRLKKELLLRSAPAVAPADLTSSRLGRALRESSALEALERPITGLLPLRVRGHP

SEQ ID NO: 914161 - protein, 190 aa, Homo sapiens; identical to SEQ ID NO: 914155

SEQ ID NO: 914162 - protein, 75 aa, Homo sapiens; identical to SEQ ID NO: 914154

SEQ ID NO: 914163 - protein, 190 aa, Homo sapiens; identical to SEQ ID NO: 914155

SEQ ID NO: 914164 - protein, 191 aa, Homo sapiens
MLKKRKRRGGAINSRQAQKRTREATSTPEISLEAEPIELVETAGDEIVDLTCESLEPVVVDLTHNDSVVIVDERRRPRRNARRLPQDHADSCVVSSDDEELSRDRDVYVTTHTPRNARDEGATGLRPSGTVSCPICMDGYSEIVQNGRLIVSTECGHVFCSQCLRDSLKNANTCPTCRKKINHKRYHPIYI

SEQ ID NO: 914165 - protein, 284 aa, Homo sapiens
EPRPPKRKWVAVEAAASFSRSSPGRLKKELLLRSAPAVAPADLTSSRLGRALRESSGGISLCHPGCSALACSRSHCNLCHLGSSDSPASASGVAGIQRKRRGGAINSRQAQKRTREATSTPEISLEAEPIELVETAGDEIVDLTCESLEPVVVDLTHNDSVVIVDERRRPRRNARRLPQDHADSCVVSSDDEELSRDRDVYVTTHTPRNARDEGATGLRPSGTVSCPICMDGYSEIVQNGRLIVSTECGHVFCSQCLRDSLKNANTCPTCRKKINHKRYHPIYI

SEQ ID NO: 914166 - protein, 75 aa, Homo sapiens; identical to SEQ ID NO: 914154

SEQ ID NO: 914167 - protein, 411 aa, Homo sapiens
LMAAAAGPGAALSPRPCDSDPATPGAQSPKDDNEDNSNDGTQPSKRRRMGSGDSSRSCETSSQDLGFSYYPAENLIEYKWPPDETGEYYMLQEQVSEYLGVTSFKRKYPDLERRDLSHKEKLYLRELNVITETQCTLGLTALRSDEVIDLMIKEYPAKHAEYSVILQEKERQRITDHYKEYSQMQQQNTQKVEASKVPEYIKKAAKKAAEFNSNLNRERMEERRAYFDLQTHVIQVPQGKYKVLPTERTKVSSYPVALIPGQFQEYYKRYSPDELRYLPLNTALYEPPLDPELPALDSDGDSDDGEDGRGDEKRKNKGTSDSSSGNVSEGESPPDSQEDSFQGRQKSKDKAATPRKDGPKRSVLSKSVPGYKPKVIPNAICGICLKGKESNKKGKAESLIHCSQCENSGKY

SEQ ID NO: 914168 - protein, 474 aa, Homo sapiens
LMAAAAGPGAALSPRPCDSDPATPGAQSPKDDNEDNSNDGTQPSKRRRMGSGDSSRSCETSSQDLGFSYYPAENLIEYKWPPDETGEYYMLQEQVSEYLGVTSFKRKYPDLERRDLSHKEKLYLRELNVITETQCTLGLTALRSDEVIDLMIKEYPAKHAEYSVILQEKERQRITDHYKEYSQMQQQNTQKVEASKVPEYIKKAAKKAAEFNSNLNRERMEERRAYFDLQTHVIQVPQGKYKVLPTERTKVSSYPVALIPGQFQEYYKRYSPDELRYLPLNTALYEPPLDPELPALDSDGDSDDGEDGRGDEKRKNKGTSDSSSGNVSEGESPPDSQEDSFQGRQKSKDKAATPRKDGPKRSVLSKSVPGYKPKVIPNAICGICLKGKESNKKGKAESLIHCSQCENSGHPSCLDMTMELVSMIKTYPWQCMECKTCIICGQPHHEEEMMFCDMCDRGYHTFCVGLGAIPSGKD

SEQ ID NO: 914169 - protein, 476 aa, Homo sapiens
LMAAAAGPGAALSPRPCDSDPATPGAQSPKDDNEDNSNDGTQPSKRRRMGSGDSSRSCETSSQDLGFSYYPAENLIEYKWPPDETGEYYMLQEQVSEYLGVTSFKRKYPDLERRDLSHKEKLYLRELNVITETQCTLGLTALRSDEVIDLMIKEYPAKHAEYSVILQEKERQRITDHYKEYSQMQQQNTQKVEASKVPEYIKKAAKKAAEFNSNLNRERMEERRAYFDLQTHVIQVPQGKYKVLPTERTKVSSYPVALIPGQFQEYYKRYSPDELRYLPLNTALYEPPLDPELPALDSDGDSDDGEDGRGDEKRKNKGTSDSSSGNVSEGESPPDSQEDSFQGRQKSKDKAATPRKDGPKRSVLSKSVPGYKPKVIPNAICGICLKGKESNKKGKAESLIHCSQCENSGHPSCLDMTMELVSMIKTYPWQCMECKTCIICGQPHHEEEMMFCDMCDRGYHTFCVGLGAIPSGSLDL

SEQ ID NO: 914170 - protein, 378 aa, Homo sapiens
LMAAAAGPGAALSPRPCDSDPATPGAQSPKDDNEDNSNDGTQPSKRRRMGSGDSSRSCETSSQDLGFSYYPAENLIEYKWPPDETGEYYMLQEQVSEYLGVTSFKRKYPDLERRDLSHKEKLYLRELNVITETQCTLGLTALRSDEVIDLMIKEYPAKHAEYSVILQEKERQRITDHYKEYSQMQQQNTQKVEASKVPEYIKKAAKKAAEFNSNLNRERMEERRAYFDLQTHVIQVPQGKYKVLPTERTKVSSYPVALIPGQFQEYYKRYSPDELRYLPLNTALYEPPLDPELPALDSDGDSDDGEDGRGDEKRKNKGTSDSSSGNVSEGESPPDSQEDSFQGRQKSKDKAATPRKDGPKRSVLSKSVPGYKVEEKSP

SEQ ID NO: 914171 - protein, 73 aa, Homo sapiens
LMAAAAGPGAALSPRPCDSDPATPGAQSPKDDNEDNSNDGTQPSKRRRMGSGDSSRSCETSSQDLGYCHFIGY

SEQ ID NO: 914172 - protein, 185 aa, Homo sapiens
LMAAAAGPGAALSPRPCDSDPATPGAQSPKDDNEDNSNDGTQPSKRRRMGSGDSSRSCETSSQDLGFSYYPAENLIEYKWPPDETGEYYMLQEQVSEYLGVTSFKRKYPDLERRDLSHKEKLYLRELNVITETQCTLGLTALRSDEVIDLMIKEYPAKHAEYSVILQEKERQRITDHYKEYSVSN

SEQ ID NO: 914173 - protein, 436 aa, Homo sapiens
LMAAAAGPGAALSPRPCDSDPATPGAQSPKDDNEDNSNDGTQPSKRRRMGSGDSSRSCETSSQDLGFSYYPAENLIEYKWPPDETGEYYMLQEQVSEYLGVTSFKRKYPDLERRDLSHKEKLYLRELNVITETQCTLGLTALRSDEVIDLMIKEYPAKHAEYSVILQEKERQRITDHYKEYSQMQQQNTQKVEASKVPEYIKKAAKKAAEFNSNLNRERMEERRAYFDLQTHVIQVPQGKYKVLPTERTKVSSYPVALIPGQFQEYYKRYSPDELRYLPLNTALYEPPLDPELPALDSDGDSDDGEDGRGDEKRKNKGTSDSSSGNVSEGESPPDSQEDSFQGRQKSKDKAATPRKDGPKRSVLSKSVPGYKPKVIPNAICGICLKGKESNKKGKAESLIHCSQCENSGRWICDCCQRAPPTPRKVGRRGKNSKEG

SEQ ID NO: 914174 - protein, 415 aa, Homo sapiens
LMAAAAGPGAALSPRPCDSDPATPGAQSPKDDNEDNSNDGTQPSKRRRMGSGDSSRSCETSSQDLGFSYYPAENLIEYKWPPDETGEYYMLQEQVSEYLGVTSFKRKYPDLERRDLSHKEKLYLRELNVITETQCTLGLTALRSDEVIDLMIKEYPAKHAEYSVILQEKERQRITDHYKEYSQMQQQNTQKVEASKVPEYIKKAAKKAAEFNSNLNRERMEERRAYFDLQTHVIQVPQGKYKVLPTERTKVSSYPVALIPGQFQEYYKRYSPDELRYLPLNTALYEPPLDPELPALDSDGDSDDGEDGRGDEKRKNKGTSDSSSGNVSEGESPPDSQEDSFQGRQKSKDKAATPRKDGPKRSVLSKSVPGYKPKVIPNAICGICLKGKESNKKGKAESLIHCSQCENSAILLAWI

SEQ ID NO: 914175 - protein, 149 aa, Homo sapiens
EFGTREREITGPDNKGIYKGDRESSGKYTFAAHMDGTYKFCFSNRMSTMTPKIVMFTIDIGEAPKGQDMETEAHQNKLEEMINELAVAMTAVKHEQEYMEVRERIHRAINDNTNSRVVLWSFFEALVLVAMTLGQIYYLKRFFEVRRVV

SEQ ID NO: 914176 - protein, 104 aa, Homo sapiens
MSTMTPKIVMFTIDIGEAPKGQDMETEAHQNKLEEMINELAVAMTAVKHEQEYMEVRERIHRAINDNTNSRVVLWSFFEALVLVAMTLGQIYYLKRFFEVRRVV

SEQ ID NO: 914177 - protein, 246 aa, Homo sapiens
LVGPTGKKKKKKKGRRWLRRQRGGGGGGGGCGGRSPGPGFGLSPTMVTLAELLVLLAALLATVSGYFVSIDAHAEECFFERVTSGTKMGLIFEVAEGGFLDIDVEITGPDNKGIYKGDRESSGKYTFAAHMDGTYKFCFSNRMSTMTPKIVMFTIDIGEAPKGQDMETEAHQNKLEEMINELAVAMTAVKHEQEYMEVRERIHRAINDNTNSRVVLWSFFEALVLVAMTLGQIYYLKRFFEVRRVV

SEQ ID NO: 914178 - protein, 246 aa, Homo sapiens; identical to SEQ ID NO: 914177

SEQ ID NO: 914179 - protein, 228 aa, Homo sapiens
LVGPTGKKKKKKKGRRWLRRQRGGGGGGGGCGGRSPGPGFGLSPTMVTLAELLVLLAALLATVSGYFVSIDAHAEECFFERVTSGTKMGLIFEVAEGGFLDIDVEITGPDNKGIYKGDRESSGKYTFAAHMDGTYKFCFSNRMSTMTPKIVMFTIDIGEAPNELAVAMTAVKHEQEYMEVRERIHRAINDNTNSRVVLWSFFEALVLVAMTLGQIYYLKRFFEVRRVV

SEQ ID NO: 914180 - protein, 207 aa, Homo sapiens
LVGPTGKKKKKKKGRRWLRRQRGGGGGGGGCGGRSPGPGFGLSPTMVTLAELLVLLAALLATVSGYFVSIDAHAEECFFERVTSGTKMGLIFEVAEGGFLDIDVEITGPDNKGIYKGDRESSGKYTFAAHMDGTYKFCFSNRMSTMTPKIVMFTIDIGEAPKGQDMETEAHQNKLEEMINELAVAMTAVKHEQEYMEVRERIHRASQ

SEQ ID NO: 914181 - protein, 246 aa, Homo sapiens; identical to SEQ ID NO: 914177

SEQ ID NO: 914182 - protein, 246 aa, Homo sapiens; identical to SEQ ID NO: 914177

SEQ ID NO: 914183 - protein, 224 aa, Homo sapiens
LVGPTGKKKKKKKGRRWLRRQRGGGGGGGGCGGRSPGPGFGLSPTMVTLAELLVLLAALLATVSGYFVSIDAHAEECFFERVTSGTKMGLIFEVAEGGFLDIDVEITGPDNKGIYKGDRESSGKYTFAAHMDGTYKFCFSNRMSTMTPKIVMFTIDIGEAPKGQDMETEAHQNKLEEMINELAVAMTAVKHEQEYMEVRERIHRAINDTQQQRVFGPLELCSSA

SEQ ID NO: 914184 - protein, 217 aa, Homo sapiens
LVGPTGKKKKKKKGRRWLRRQRGGGGGGGGCGGRSPGPGFGLSPTMVTLAELLVLLAALLATVSGYFVSIDAHAEECFFERVTSGTKMGLIFEVAEGGFLDIDVEITGPDNKGIYKGDRESSGKYTFAAHMDGTYKFCFSNRMSTMTPKIVMFTIDIGEAPKGQDMETEAHQNKLEEMINELAVAMTAVKHEQEYMEVRERIHRAKKKKKNEEKKRE

SEQ ID NO: 914185 - protein, 246 aa, Homo sapiens; identical to SEQ ID NO: 914177

SEQ ID NO: 914186 - protein, 246 aa, Homo sapiens; identical to SEQ ID NO: 914177

SEQ ID NO: 914187 - protein, 246 aa, Homo sapiens; identical to SEQ ID NO: 914177

SEQ ID NO: 914188 - protein, 246 aa, Homo sapiens; identical to SEQ ID NO: 914177

SEQ ID NO: 914189 - protein, 216 aa, Homo sapiens
LVGPTGKKKKKKKGRRWLRRQRGGGGGGGGCGGRSPGPGFGLSPTMVTLAELLVLLAALLATVSGYFVSIDAHAEECFFERVTSGTKMGLIFEVAEGGFLDIDVEITGPDNKGIYKGDRESSGKYTFAAHMDGTYKFCFSNRMSTMTPKIVMFTIDIGEAPKGQDMETEAHQNKLEEMINELAVAMTAVKHEQEYMESTTTQTAEWSFGPSLKLLF

SEQ ID NO: 914190 - protein, 246 aa, Homo sapiens; identical to SEQ ID NO: 914177

SEQ ID NO: 914191 - protein, 246 aa, Homo sapiens; identical to SEQ ID NO: 914177

SEQ ID NO: 914192 - protein, 126 aa, Homo sapiens
LVGPTGKKKKKKKGRRWLRRQRGGGGGGGGCGGRSPGPGFGLSPTMVTLAELLVLLAALLATVSGYFVSIDAHAEECFFERVTSGTKMGLIFEVAEGGFLDIDVEVRASCPQLRLGRVATRGLVAP

SEQ ID NO: 914193 - protein, 145 aa, Homo sapiens
KEGNHNTELASKSTLPHPRGQKSKRIERNIRKPSYSYCQHWPGVQTLPRPPHHIQGGGPGSTSTVGGPEAPTLGSLPLSRDAWSMLCCSKSQCINHPASLCKEPTRVGCRPVGKAAGPDLRPAVCAPSRVAVLATRRGPREPHGL

SEQ ID NO: 914194 - protein, 195 aa, Homo sapiens
MNPVYSPGSSGVPYANAKGIGYPAGFPMGYAAAAPAYSPNMYPGANPTFQTGYTPGTPYKVSCSPTSGAVPPYSSSPNPYQTAVYPVRSAYPQQSPYAQQGTYYTQPLYAAPPHVIHHTTVVQPNGMPATVYPAPIPPPRGNGVTMGMVAGTTMAMSAGTLLTAHSPTPVAPHPVTVPTYRAPGTPTYSYVPPQW

SEQ ID NO: 914195 - protein, 168 aa, Homo sapiens
MGYAAAAPAYSPNMYPGANPTFQTGYTPGTPYKVSCSPTSGAVPPYSSSPNPYQTAVYPVRSAYPQQSPYAQQGTYYTQPLYAAPPHVIHHTTVVQPNGMPATVYPAPIPPPRGNGVTMGMVAGTTMAMSAGTLLTAHSPTPVAPHPVTVPTYRAPGTPTYSYVPPQW

SEQ ID NO: 914196 - protein, 195 aa, Homo sapiens; identical to SEQ ID NO: 914194

SEQ ID NO: 914197 - protein, 195 aa, Homo sapiens; identical to SEQ ID NO: 914194

SEQ ID NO: 914198 - protein, 195 aa, Homo sapiens; identical to SEQ ID NO: 914194

SEQ ID NO: 914199 - protein, 195 aa, Homo sapiens; identical to SEQ ID NO: 914194

SEQ ID NO: 914200 - protein, 195 aa, Homo sapiens; identical to SEQ ID NO: 914194

SEQ ID NO: 914201 - protein, 123 aa, Homo sapiens
MNPVYSPGSSGVPYANAKGIGYPAGFPMGYAAAAPAYSPNMYPGANPTFQTGYTPGTPYKVSCSPTSGAVPPYSSSPQAVPMSPCADQWARQLGQISGQPFVLLAGLLCWPHGEALESLMDCN

SEQ ID NO: 914202 - protein, 76 aa, Homo sapiens
RGLRRGGPGQAEPSERERGVREAAETRGSEGQPLIVAGLLGTPPLFRPTAKPAAGRRALVTEAQVAAAARDEVSPC

SEQ ID NO: 914203 - protein, 195 aa, Homo sapiens; identical to SEQ ID NO: 914194

SEQ ID NO: 914204 - protein, 195 aa, Homo sapiens; identical to SEQ ID NO: 914194

SEQ ID NO: 914205 - protein, 195 aa, Homo sapiens; identical to SEQ ID NO: 914194

SEQ ID NO: 914206 - protein, 195 aa, Homo sapiens; identical to SEQ ID NO: 914194

SEQ ID NO: 914207 - protein, 116 aa, Homo sapiens
TPLPHSSDRKCFNVQLSVGLLGDISGGSGARGIPVLGFTSAGKCGDGFPGVKMCPLSPVWLLPGQDRTSIGRSSRWQGCGLRWVAASGPPLWCFLRGSLKQSVVGLGEGRARISPL

SEQ ID NO: 914208 - protein, 122 aa, Homo sapiens
MLVGDGYRGKTSPHTPNEKFEGATVLKALKSGYEGRVPLKSARLFYDISEKARRIVESYFMLNSTLYFSYTHMVCRTALSGQQDRRNDLSHPIHADNCLLDPEANECWKEPPAYTFRDYRYS

SEQ ID NO: 914209 - protein, 381 aa, Homo sapiens
CAKAYLLCHPDDEDVLDNVDYYESLLDDSIDPASIEAREDLTMFVKRHKLESELIKSAAEGLGFSYTEPNYWIRYGGRQDENRVPSGVNVEGAEVHGFSMGKKLSPKIDRDLREGGPLLYENITFVYNSEQLNGTQRVLLDNVLSEEQCRELHSVASGIMLVGDGYRGKTSPHTPNEKFEGATVLKALKSGYEGRVPLKSARLFYDISEKARRIVESYFMLNSTLYFSYTHMVCRTALSGQQDRRNDLSHPIHADNCLLDPEANECWKEPPAYTFRDYSALLYMNDDFEGGEFIFTEMDAKTVTASIKPKCGRMISFSSGGENPHGVKAVTKGKRCAVALWFTLDPLYRELERIQADEVIAILDQEQQGKHELNINPKDEL

SEQ ID NO: 914210 - protein, 326 aa, Homo sapiens
CAKAYLLCHPDDEDVLDNVDYYESLLDDSIDPASIEAREDLTMFVKRHKLESELIKSAAEGLGFSYTEPNYWIRYGGRQDENRVPSGVNVEGAEVHGFSMGKKLSPKIDRDLREGGPLLYENITFVYNSEQLNGTQRVLLDNVLSEEQCRELHSVASGIMLVGDGYRGKTSPHTPNEKFEGATVLKALKSGYEGRVPLKSARLFYDISEKARRIVESYFMLNSTLYFSYTHMVCRTALSGQQDRRNDLSHPIHADNCLLDPEANECWKEPPAYTFRDYSALLYMNDDFEGGEFIFTEMDAKTVTASIKPKCGRMISFSSGGENPHG

SEQ ID NO: 914211 - protein, 361 aa, Homo sapiens
CAKAYLLCHPDDEDVLDNVDYYESLLDDSIDPASIEAREDLTMFVKRHKLESELIKSAAEGLGFSYTEPNYWIRYGGRQDENRVPSGVNVEGAEVHGFSMGKKLSPKIDRDLREGGPLLYENITFVYNSEQLNGTQRVLLDNVLSEEQCRELHSVASGIMLVGDGYRGKTSPHTPNEKFEGATVLKALKSGYEGRVPLKSARLFYDISEKARRIVESYFMLNSTLYFSYTHMVCRTALSGQQDRRNDLSHPIHADNCLLDPEANECWKEPPAYTFRDYSALLYMNDDFEGGEFIFTEMDAKTVTASIKPKCGRMISFSSGGENPHGVKAVTKGKRCAVALWFTLDPLYRELVSFSPAQKAN

SEQ ID NO: 914212 - protein, 381 aa, Homo sapiens; identical to SEQ ID NO: 914209

SEQ ID NO: 914213 - protein, 381 aa, Homo sapiens; identical to SEQ ID NO: 914209

SEQ ID NO: 914214 - protein, 343 aa, Homo sapiens
DGVSLHRPGWIAVAGSRLTASSASQVQAILVSASRVAGTTGTCHHARLIFAFLVETGFHLVGKTGLEPLTSGDPPASASQSAGMTGVSDCPWPICSNILGYNALRCNLSTVYSLKTISPYHPRLLCVRGARRFGPCSLGQTPEAHGAVRRVVAPARCERRAAQTARLFCSAEGRAVGRGLRYAASVRDATAATRLAAFLGATPPGDPTRRASSAAPIPLGLLGAALSSVTLYTRKLAGTMGKKQNKKKVEEVLEEEEEEYVVEKVLDRRVVKGKVEYLLKWKGFSDEDNTWEPEENLDCPDLIAEFLQSQKTAHETDKSEGGKRKADSDSEDKGEESTSPGPQ

SEQ ID NO: 914215 - protein, 185 aa, Homo sapiens
MGKKQNKKKVEEVLEEEEEEYVVEKVLDRRVVKGKVEYLLKWKGFSDEDNTWEPEENLDCPDLIAEFLQSQKTAHETDKSEGGKRKADSDSEDKGEESKPKKKKEESEKPRGFARGLEPERIIGATDSSGELMFLMKWKNSDEADLVPAKEANVKCPQVVISFYEERLTWHSYPSEDDDKKDDKN

SEQ ID NO: 914216 - protein, 424 aa, Homo sapiens
DGVSLHRPGWIAVAGSRLTASSASQVQAILVSASRVAGTTGTCHHARLIFAFLVETGFHLVGKTGLEPLTSGDPPASASQSAGMTGVSDCPWPICSNILGYNALRCNLSTVYSLKTISPYHPRLLCVRGARRFGPCSLGQTPEAHGAVRRVVAPARCERRAAQTARLFCSAEGRAVGRGLRYAASVRDATAATRLAAFLGATPPGDPTRRASSAAPIPLGLLGAALSSVTLYTRKLAGTMGKKQNKKKVEEVLEEEEEEYVVEKVLDRRVVKGKVEYLLKWKGFSDEDNTWEPEENLDCPDLIAEFLQSQKTAHETDKSEGGKRKADSDSEDKGEESKPKKKKEESEKPRGFARGLEPERIIGATDSSGELMFLMKWKNSDEADLVPAKEANVKCPQVVISFYEERLTWHSYPSEDDDKKDDKN

SEQ ID NO: 914217 - protein, 424 aa, Homo sapiens; identical to SEQ ID NO: 914216

SEQ ID NO: 914218 - protein, 424 aa, Homo sapiens; identical to SEQ ID NO: 914216

SEQ ID NO: 914219 - protein, 185 aa, Homo sapiens; identical to SEQ ID NO: 914215

SEQ ID NO: 914220 - protein, 424 aa, Homo sapiens; identical to SEQ ID NO: 914216

SEQ ID NO: 914221 - protein, 234 aa, Homo sapiens
MAALRYAGLDDTDSEDELPPGWEERTTKDGWVYYANHTEEKTQWEHPKTGKRKRVAGDLPYGWEQETDENGQVFFVDHINKRTTYLDPRLAFTVDDNPTKPTTRQRYDGSTTAMEILQGRDFTGKVVVVTGANSGIGFETAKSFALHGAHVILACRNMARASEAVSRILEEWQQGAATTVYCAAVPELEGLGGMYFNNCCRCMPSPEAQSEETARTLWALSERLIQERLGSQSG

SEQ ID NO: 914222 - protein, 363 aa, Homo sapiens
MAALRYAGLDDTDSEDELPPGWEERTTKDGWVYYANHTEEKTQWEHPKTGKRKRVAGDLPYGWEQETDENGQVFFVDHINKRTTYLDPRLAFTVDDNPTKPTTRQRYDGSTTAMEILQGRDFTGKVVVVTGANSGIGFETAKSFALHGAHVILACRNMARASEAVSRILEEWHKAKVETMTLDLALLRSVQHFAEAFKAKNVPLHVLVCNAATFALPWSLTKDGLETTFQVNHLGHFYLVQLLQDVLCRSAPARVIVVSSESHRFTDINDSLGKLDFSRLSPTKNDYWAMLAYNRSKLCNILFSNELHRRLSPRGVTSNAVHPGNMMYSNIHRSWWVYTLLFTLARPFTKSMVSDCLVEGGHF

SEQ ID NO: 914223 - protein, 189 aa, Homo sapiens
MAALRYAGLDDTDSEDELPPGWEERTTKDGWVYYANHTEEKTQWEHPKTGKRKRVAGDLPYGWEQETDENGQVFFVDHINKRTTYLDPRLAFTVDDNPTKPTTRQRYDGSTTAMEILQGRDFTGKVVVVTGANSGIGFETAKSFALHGAHVILACRNMARASEAVSRILEEWKTKYHPPPEKCRIKIFH

SEQ ID NO: 914224 - protein, 168 aa, Homo sapiens
MSRFKQQQREKEKFLQIIRERCELNFGMDTVLLSAESTNHFHHVYEIPLAALQRGDKQELIMTEHPPNFLTHSSTGRVYTCGMAAMFVDNPYIHKTGAWELVCCLLPCEDTARKHIQEVEMEPSLDARSAGAMILDFPASRTMWELRCRAVEELAQGCRALSQGQSMG

SEQ ID NO: 914225 - protein, 68 aa, Homo sapiens
FYVLLRLITAFYVSSLPSTSFYVSSLPSTSHHCSRGLAFSYLGKKKQVFTAPCCIDPGDNCFIHPDQD

SEQ ID NO: 914226 - protein, 414 aa, Homo sapiens [sequence omitted]

SEQ ID NO: 914227 - protein, 311 aa, Homo sapiens
MAALRYAGLDDTDSEDELPPGWEERTTKDGWVYYANHTEEKTQWEHPKTGKRKRVAGDLPYGWEQETDENGQVFFVDHINKRTTYLDPRLAFTVDDNPTKPTTRQRYDGSTTAMEILQGRDFTGKVVVVTGANSGIATGSCHHRVLCCCPRTGGSGRDVLQQLLPLHALTRSSERRDGPDPVGAQREADPRTAWQPVRLSGAQSGWAHTPALCVSPHASARAGPLPNVPPTQIRKSKGNKSSHNRVKNLKYQWEAGNSWGKVSLFWGWARHRSLCFLVVACLKVKTCLVCRFRISLEKHQQFSFFYCYRIA

SEQ ID NO: 914228 - protein, 173 aa, Homo sapiens
MAALRYAGLDDTDSEDELPPGWEERTTKDGWVYYANHTEEKTQWEHPKTGKRKRVAGDLPYGWEQETDENGQVFFVDHINKRTTYLDPRLAFTVDDNPTKPTTRQRYDGSTTAMEILQGRDFTGKVVVVTGANSGIGFETAKSFALHGAHVILACRNMARASEAVSRILEEWN

SEQ ID NO: 914229 - protein, 391 aa, Homo sapiens
MAALRYAGLDDTDSEDELPPGWEERTTKDGWVYYANHTEEKTQWEHPKTGKRKRVAGDLPYGWEQETDENGQVFFVDHINKRTTYLDPRLAFTVDDNPTKPTTRQRYDGSTTAMEILQGRDFTGKVVVVTGANSGIGFETAKSFALHGAHVILACRNMARASEAVSRILEEWHKAKVETMTLDLALLRSVQHFAEAFKAKNVPLHVLVCNAATFALPWSLTKDGLETTFQVNHLGHFYLVQLLQDVLCRSAPARVIVVSSESHRFTDINDSLGKLDFSRLSPTKNDYWAMLAYNRSKLCNILFSNELHRRLSPRGVTSNAVHPGNMMYSNIHRSWWVYTLLFTLARPFTKSMFNNCCRCMPSPEAQSEETARTLWALSERLIQERLGSQSG

SEQ ID NO: 914230 - protein, 36 aa, Homo sapiens
MAALRYAGLDDTDSEDELPPGWEERTTKDGWVYYAK

SEQ ID NO: 914231 - protein, 120 aa, Homo sapiens
  misc_feature (9)..(9): Xaa can be any naturally occurring amino acid
GHLIMLHHXEHPSAFKNSVGRNRMLRELSWSCRGPGTGRSGGGPQQPRIPEPAARPGRSCALPPPGARRSRGTFQELPRAEVPGLGVASSCQIPCSPGDPEKHRAIPDPGTFRRLAAIWE

SEQ ID NO: 914232 - protein, 228 aa, Homo sapiens
HTGPLNQSSQQDWETGVTFPTLQRMKQSGKASEGPYTSDIAKQDLSPGSSVQTYLLGFLSHVYSIAGKVVEDTFWPTLSVYNPERGDPQKPSDMSTATRRVCGNVEGEPETPWSLPSLAGSFLPERSPQGTLEEELSWSCRGPGTGRSGGGPQQPRIPEPAARPGRSCALPPPGARRSRGTFQELPRAEVPGLGVASSCQIPCSPGDPEKHRAIPDPGTFRRLAAIWE

SEQ ID NO: 914233 - protein, 228 aa, Homo sapiens; identical to SEQ ID NO: 914232

SEQ ID NO: 914234 - protein, 228 aa, Homo sapiens; identical to SEQ ID NO: 914232

SEQ ID NO: 914235 - protein, 754 aa, Homo sapiens
MHTGGETSACKPSSVRLAPSFSFHAAGLQMAGQMPHSHQYSDRRQPNISDQQVSALSYSDQIQQPLTNQRRMPQTFRDPATAPLRKLSVDLIKTYKHINEVYYAKKKRRHQQGQGDDSSHKKERKVYNDGYDDDNYDYIVKNGEKWMDRYEIDSLIGKGSFGQVVKAYDRVEQEWVAIKIIKNKKAFLNQAQIEVRLLELMNKHDTEMKYYIVHLKRHFMFRNHLCLVFEMLSYNLYDLLRNTNFRGVSLNLTRKFAQQMCTALLFLATPELSIIHCDLKPENILLCNPKRSAIKIVDFGSSCQLGQRIYQYIQSRFYRSPEVLLGMPYDLAIDMWSLGCILVEMHTGEPLFSGANEVDQMNKIVEVLGIPPAHILDQAPKARKFFEKLPDGTWNLKKTKDGKREYKPPGTRKLHNILGVETGGPGGRRAGESGHTVADYLKFKDLILRMLDYDPKTRIQPYYALQHSFFKKTADEGTNTSNSVSTSPAMEQSQSSGTTSSTSSSSGGSSGTSNSGRARSDPTHQHRHSGGHFTAAVQAMDCETHSPQVRQQFPAPLGWSGTEAPTQVTVETHPVQETTFHVAPQQNALHHHHGNSSHHHHHHHHHHHHHGQQALGNRTRPRVYNSPTNSSSTQDSMEVGHSHHSMTSLSSSTTSSSTSSSSTGNQGNQAYQNRPVAANTLDFGQNGAMDVNLTVYSNPRQETGIAGHPTYQFSANTGPAHYMTEGHLTMRQGADREESPMTGVCVQQSPVASS

SEQ ID NO: 914236 - protein, 584 aa, Homo sapiens
MHTGGETSACKPSSVRLAPSFSFHAAGLQMAGQMPHSHQYSDRRQPNISDQQVSALSYSDQIQQPLTNQVMPDIVMLQRRMPQTFRDPATAPLRKLSVDLIKTYKHINEVYYAKKKRRHQQGQGDDSSHKKERKVYNDGYDDDNYDYIVKNGEKWMDRYEIDSLIGKGSFGQVVKAYDRVEQEWVAIKIIKNKKAFLNQAQIEVRLLELMNKHDTEMKYYIVHLKRHFMFRNHLCLVFEMLSYNLYDLLRNTNFRGVSLNLTRKFAQQMCTALLFLATPELSIIHCDLKPENILLCNPKRSAIKIVDFGSSCQLGQRIYQYIQSRFYRSPEVLLGMPYDLAIDMWSLGCILVEMHTGEPLFSGANEVDQMNKIVEVLGIPPAHILDQAPKARKFFEKLPDGTWNLKKTKDGKREYKPPGTRKLHNILGVETGGPGGRRAGESGHTVADYLKFKDLILRMLDYDPKTRIQPYYALQHSFFKKTADEGTNTSNSVSTSPAMEQSQSSGTTSSTSSSSGGSSGTSNSGRARSDPTHQHRHSGGHFTAAVQAMDCETHSPQVSSHVVHLLVSPAILRWSSTGCQVPLE

SEQ ID NO: 914237 - protein, 763 aa, Homo sapiens
MHTGGETSACKPSSVRLAPSFSFHAAGLQMAGQMPHSHQYSDRRQPNISDQQVSALSYSDQIQQPLTNQVMPDIVMLQRRMPQTFRDPATAPLRKLSVDLIKTYKHINEVYYAKKKRRHQQGQGDDSSHKKERKVYNDGYDDDNYDYIVKNGEKWMDRYEIDSLIGKGSFGQVVKAYDRVEQEWVAIKIIKNKKAFLNQAQIEVRLLELMNKHDTEMKYYIVHLKRHFMFRNHLCLVFEMLSYNLYDLLRNTNFRGVSLNLTRKFAQQMCTALLFLATPELSIIHCDLKPENILLCNPKRSAIKIVDFGSSCQLGQRIYQYIQSRFYRSPEVLLGMPYDLAIDMWSLGCILVEMHTGEPLFSGANEVDQMNKIVEVLGIPPAHILDQAPKARKFFEKLPDGTWNLKKTKDGKREYKPPGTRKLHNILGVETGGPGGRRAGESGHTVADYLKFKDLILRMLDYDPKTRIQPYYALQHSFFKKTADEGTNTSNSVSTSPAMEQSQSSGTTSSTSSSSGGSSGTSNSGRARSDPTHQHRHSGGHFTAAVQAMDCETHSPQVRQQFPAPLGWSGTEAPTQVTVETHPVQETTFHVAPQQNALHHHHGNSSHHHHHHHHHHHHHGQQALGNRTRPRVYNSPTNSSSTQDSMEVGHSHHSMTSLSSSTTSSSTSSSSTGNQGNQAYQNRPVAANTLDFGQNGAMDVNLTVYSNPRQETGIAGHPTYQFSANTGPAHYMTEGHLTMRQGADREESPMTGVCVQQSPVASS

SEQ ID NO: 914238 - protein, 763 aa, Homo sapiens; identical to SEQ ID NO: 914237

SEQ ID NO: 914239 - protein, 763 aa, Homo sapiens; identical to SEQ ID NO: 914237

SEQ ID NO: 914240 - protein, 109 aa, Homo sapiens
MTSLSSSTTSSSTSSSSTGNQGNQAYQNRPVAANTLDFGQNGAMDVNLTVYSNPRQETGIAGHPTYQFSANTGPAHYMTEGHLTMRQGADREESPMTGVCVQQSPVASS

SEQ ID NO: 914241 - protein, 763 aa, Homo sapiens; identical to SEQ ID NO: 914237

SEQ ID NO: 914242 - protein, 763 aa, Homo sapiens; identical to SEQ ID NO: 914237

SEQ ID NO: 914243 - protein, 258 aa, Homo sapiens
RPRSASESGHPERGVRAPPPPLLLLLFLLLLLVPLPPPASRRDRCECECVCEGACARAIVRASVRVCASVCLSVRGLGGGRFGLSWRRSRRRRPGPGASRCAGSERAPFCEIYKILLGKKPPAAAAARRPASPTPPSAPGRPCGPAAWNRGPGTAVFAGEGAVASPAPGAAGTASRGETEQAAARPGAGAPGAERGCRGGAGCGGRGGSAAREPEAETHRRKRRERPAIVPDLTLLPRLECSGMIRAHCSLDFLESVL

SEQ ID NO: 914244 - protein, 763 aa, Homo sapiens; identical to SEQ ID NO: 914237

SEQ ID NO: 914245 - protein, 763 aa, Homo sapiens; identical to SEQ ID NO: 914237

SEQ ID NO: 914246 - protein, 982 aa, Homo sapiens
RPRSASESGHPERGVRAPPPPLLLLLFLLLLLVPLPPPASRRDRCECECVCEGACARAIVRASVRVCASVCLSVRGLGGGRFGLSWRRSRRRRPGPGASRCAGSERAPFCEIYKILLGKKPPAAAAARRPASPTPPSAPGRPCGPAAWNRGPGTAVFAGEGAVASPAPGAAGTASRGETEQAAARPGAGAPGAERGCRGGAGCGGRGGSAAREPEAETHRRKRRERPAIVPGGETSACKPSSVRLAPSFSFHAAGLQMAGQMPHSHQYSDRRQPNISDQQVSALSYSDQIQQPLTNQRRMPQTFRDPATAPLRKLSVDLIKTYKHINEVYYAKKKRRHQQGQGDDSSHKKERKVYNDGYDDDNYDYIVKNGEKWMDRYEIDSLIGKGSFGQVVKAYDRVEQEWVAIKIIKNKKAFLNQAQIEVRLLELMNKHDTEMKYYIVHLKRHFMFRNHLCLVFEMLSYNLYDLLRNTNFRGVSLNLTRKFAQQMCTALLFLATPELSIIHCDLKPENILLCNPKRSAIKIVDFGSSCQLGQRIYQYIQSRFYRSPEVLLGMPYDLAIDMWSLGCILVEMHTGEPLFSGANEVDQMNKIVEVLGIPPAHILDQAPKARKFFEKLPDGTWNLKKTKDGKREYKPPGTRKLHNILGVETGGPGGRRAGESGHTVADYLKFKDLILRMLDYDPKTRIQPYYALQHSFFKKTADEGTNTSNSVSTSPAMEQSQSSGTTSSTSSSSGGSSGTSNSGRARSDPTHQHRHSGGHFTAAVQAMDCETHSPQVRQQFPAPLGWSGTEAPTQVTVETHPVQETTFHVAPQQNALHHHHGNSSHHHHHHHHHHHHHGQQALGNRTRPRVYNSPTNSSSTQDSMEVGHSHHSMTSLSSSTTSSSTSSSSTGNQGNQAYQNRPVAANTLDFGQNGAMDVNLTVYSNPRQETGIAGHPTYQFSANTGPAHYMTEGHLTMRQGADREESPMTGVCVQQSPVASS

SEQ ID NO: 914247 - protein, 763 aa, Homo sapiens; identical to SEQ ID NO: 914237

SEQ ID NO: 914248 - protein, 763 aa, Homo sapiens; identical to SEQ ID NO: 914237

SEQ ID NO: 914249 - protein, 609 aa, Homo sapiens
RPRSASESGHPERGVRAPPPPLLLLLFLLLLLVPLPPPASRRDRCECECVCEGACARAIVRASVRVCASVCLSVRGLGGGRFGLSWRRSRRRRPGPGASRCAGSERAPFCEIYKILLGKKPPAAAAARRPASPTPPSAPGRPCGPAAWNRGPGTAVFAGEGAVASPAPGAAGTASRGETEQAAARPGAGAPGAERGCRGGAGCGGRGGSAAREPEAETHRRKRRERPAIVPGGETSACKPSSVRLAPSFSFHAAGLQMAGQMPHSHQYSDRRQPNISDQQVSALSYSDQIQQPLTNQRRMPQTFRDPATAPLRKLSVDLIKTYKHINEVYYAKKKRRHQQGQGDDSSHKKERKVYNDGYDDDNYDYIVKNGEKWMDRYEIDSLIGKGSFGQVVKAYDRVEQEWVAIKIIKNKKAFLNQAQIEVRLLELMNKHDTEMKYYIVHLKRHFMFRNHLCLVFEMLSYNLYDLLRNTNFRGVSLNLTRKFAQQMCTALLFLATPELSIIHCDLKPENILLCNPKRSAIKIVDFGSSCQLGQRIYQYIQSRFYRSPEVLLGMPYDLAIDMWSLGCILVEMHTGEPLFSGANEVNDVLLYKFCFHNLFLSFICDSVI

SEQ ID NO: 914250 - protein, 228 aa, Homo sapiens
DTSLLILQNITVAHCKSQLASGLFMLMAVLSGVRWLTRALVSAGNPGAWRGLSTSAAAHAASRSQAEDVRVEGSFPVTMLPGDGVGPELMHAVKEVFKAAAVPVEFQEHHLSEVQNMASEEKLEQVLSSMKENKVAIIGKIHTPMEYKGELASYDMRLRRKLDLFANVVHVKSLPGYMTRHNNLDLVIIREQTEGEYSSLEHESARGVIECLNDCHTSQVSADCKVRL

SEQ ID NO: 914251 - protein, 228 aa, Homo sapiens; identical to SEQ ID NO: 914250

SEQ ID NO: 914252 - protein, 202 aa, Homo sapiens
MAALSGVRWLTRALVSAGNPGAWRGLSTSAAAHAASRSQAEDVRVEGSFPVTMLPGDGVGPELMHAVKEVFKAAAVPVEFQEHHLSEVQNMASEEKLEQVLSSMKENKVAIIGKIHTPMEYKGELASYDMRLRRKLDLFANVVHVKSLPGYMTRHNNLDLVIIREQTEGEYSSLEHESARGVIECLNDCHTSQVSADCKVRL

SEQ ID NO: 914253 - protein, 202 aa, Homo sapiens; identical to SEQ ID NO: 914252

SEQ ID NO: 914254 - protein, 202 aa, Homo sapiens; identical to SEQ ID NO: 914252

SEQ ID NO: 914255 - protein, 202 aa, Homo sapiens; identical to SEQ ID NO: 914252

SEQ ID NO: 914256 - protein, 202 aa, Homo sapiens; identical to SEQ ID NO: 914252

SEQ ID NO: 914257 - protein, 202 aa, Homo sapiens; identical to SEQ ID NO: 914252

SEQ ID NO: 914258 - protein, 212 aa, Homo sapiens
NPNIHGRGWCESDEGGVRWLTRALVSAGNPGAWRGLSTSAAAHAASRSQAEDVRVEGSFPVTMLPGDGVGPELMHAVKEVFKAAAVPVEFQEHHLSEVQNMASEEKLEQVLSSMKENKVAIIGKIHTPMEYKGELASYDMRLRRKLDLFANVVHVKSLPGYMTRHNNLDLVIIREQTEGEYSSLEHESARGVIECLNDCHTSQVSADCKVRL

SEQ ID NO: 914259 - protein, 202 aa, Homo sapiens; identical to SEQ ID NO: 914252

SEQ ID NO: 914260 - protein, 204 aa, Homo sapiens
MAALSGVRWLTRALVSAGNPGAWRGLSTSAAAHAASRSQAEDVRVEGSFPVTMLPGDGVGPELMHAVKEVFKAAAVPVEFQEHHLSEVQNMASEEKLEQVLSSMKENKVAIIGKIHTPMEYKGELASYDMRLRRKLDLFANVVHVKSLPGYMTRHNNLDLVIIREQTEGEYSSLEHEVRPQKLGEGKDEDGREVELLVSLPSVT

SEQ ID NO: 914261 - protein, 160 aa, Homo sapiens
MGCSCSAVRKVAELYPKIKFETMIIDNCCMQLVQNPYQFDVLVMPNLYGNIIDNLAAGLVGGAGVVPGESYSAEYAVFETGARHPFAQAVGRNIANPTAMLLSASNMLRHLNLEYHSSMIADAVKKVIKVGKVRTRDMGGYSTTTDFIKSVIGHLQTKGS

SEQ ID NO: 914262 - protein, 160 aa, Homo sapiens; identical to SEQ ID NO: 914261

SEQ ID NO: 914263 - protein, 202 aa, Homo sapiens; identical to SEQ ID NO: 914252

SEQ ID NO: 914264 - protein, 202 aa, Homo sapiens; identical to SEQ ID NO: 914252

SEQ ID NO: 914265 - protein, 212 aa, Homo sapiens [sequence omitted]

SEQ ID NO: 914266 - protein, 165 aa, Homo sapiens
MLCLLGSHILPLICVSHHLCLLSLLSCPGCSTANSGLRGVAGPCASHPGSSFHSCALPFFWLSRILGFHFLNHIALPPFMGSLFSLPTAVAGGGCRCGLETWAATAPQPTSSSLSSVTCRLKGARALYFFQPCKDHTPHTLQCSVPGKRPCASKQWTMVTLLGRA

SEQ ID NO: 914267 - protein, 150 aa, Homo sapiens
MAALSGVRWLTRALVSAGNPGAWRGLSTSAAAHAASRSQAEDVRVEGSFPVTMLPGDGVGPELMHAVKEVFKAAAVPVEFQEHHLSEVQNMASEEKLEQVLSSMKENKVAIIGKIHTPMEYKGELASYDMRLRRKLDLFANVVHVKSLPG

SEQ ID NO: 914268 - protein, 211 aa, Homo sapiens
MAALSGVRWLTRALVSAGNPGAWRGLSTSAAAHAASRSQAEDVRVEGSFPVTMLPGDGVGPELMHAVKEVFKAAAVPVEFQEHHLSEVQNMASEEKLEQVLSSMKENKVAIIGKIHTPMEYKGELASYDMRLRRKLDLFANVVHVKSLRSVHLHIDLTSHLASQGYILDLFHKGTHLTGGHQFFLVLSQVGILSLQQAEVGGNLLLQPRLH

SEQ ID NO: 914269 - protein, 204 aa, Homo sapiens; identical to SEQ ID NO: 914260

SEQ ID NO: 914270 - protein, 228 aa, Homo sapiens; identical to SEQ ID NO: 914250

SEQ ID NO: 914271 - protein, 202 aa, Homo sapiens; identical to SEQ ID NO: 914252

SEQ ID NO: 914272 - protein, 202 aa, Homo sapiens; identical to SEQ ID NO: 914252

SEQ ID NO: 914273 - protein, 202 aa, Homo sapiens; identical to SEQ ID NO: 914252

SEQ ID NO: 914274 - protein, 202 aa, Homo sapiens; identical to SEQ ID NO: 914252

SEQ ID NO: 914275 - protein, 205 aa, Homo sapiens
LFQYCWLGFVVDTYVLGSLAFTPGAWRGLSTSAAAHAASRSQAEDVRVEGSFPVTMLPGDGVGPELMHAVKEVFKAAAVPVEFQEHHLSEVQNMASEEKLEQVLSSMKENKVAIIGKIHTPMEYKGELASYDMRLRRKLDLFANVVHVKSLPGYMTRHNNLDLVIIREQTEGEYSSLEHESARGVIECLNDCHTSQVSADCKVRL

SEQ ID NO: 914276 - protein, 202 aa, Homo sapiens; identical to SEQ ID NO: 914252

SEQ ID NO: 914277 - protein, 202 aa, Homo sapiens; identical to SEQ ID NO: 914252

SEQ ID NO: 914278 - protein, 202 aa, Homo sapiens; identical to SEQ ID NO: 914252

SEQ ID NO: 914279 - protein, 202 aa, Homo sapiens; identical to SEQ ID NO: 914252

SEQ ID NO: 914280 - protein, 202 aa, Homo sapiens; identical to SEQ ID NO: 914252

SEQ ID NO: 914281 - protein, 228 aa, Homo sapiens; identical to SEQ ID NO: 914250

SEQ ID NO: 914282 - protein, 209 aa, Homo sapiens
DTSLLILQNITVAHCKSQLASGLFMLMAVLSGVRWLTRALVSAGNPGAWRGLSTSAAAHAASRSQAEDVRVEGSFPVTMLPGDGVGPELMHAVKEVFKAAAVPVEFQEHHLSEVQNMASEEKLEQVLSSMKENKVAIIGKIHTPMEYKGELASYDMRLRRKLDLFANVVHVKSLPGYMTRHNNLDLVIIREQTEGEYSSLEHESARGVV

SEQ ID NO: 914283 - protein, 248 aa, Homo sapiens
MDLCKNRLVSGGRDCQVKVWDVDTGKCLKTFRHKDPILATRINDTYIVSSCERGLVKVWHIAMAQLVKTLSGHEGAVKCLFFDQWHLLSGSTDGLVMAWSMVGKYERCLMAFKHPKEVPDVSLLFLRIISACANGKIRIYNFLHGNCMKVIKANGRGDPVLSFPRISVCHISTFAKRINVGWNGIEPSATAQGGNASLTECAHVRLHIAGHLPASRLPVAAVQPMTGGMAPTTAPTHVLAMLILFSGV

SEQ ID NO: 914284 - protein, 116 aa, Homo sapiens
MDLCKNRLVSGGRDCQVKVWDVDTGKCLKTFRHKDPILATRINDTYIVSSCERGLVKVWHIAMAQLVKTLSGHEGAVKCLFFDQWHLLSGSTDGLVMAWSMVGKYERCLMAFKHPK

SEQ ID NO: 914285 - protein, 254 aa, Homo sapiens
MDLCKNRLVSGGRDCQVKVWDVDTGKCLKTFRHKDPILATRINDTYIVSSCERGLVKVWHIAMAQLVKTLSGHEGAVKCLFFDQWHLLSGSTDGLVMAWSMVGKYERCLMAFKHPKEVPDVSLLFLRIISACANGKIRIYNFLHGNCMKVIKANGRGDPVLSFFIQGNSHRISVCHISTFAKRINVGWNGIEPSATAQGGNASLTECAHVRLHIAGHLPASRLPVAAVQPMTGGMAPTTAPTHVLAMLILFSGV

SEQ ID NO: 914286 - protein, 179 aa, Homo sapiens
FWIAGSLNHLYSGRSVLWAHELLVSLLFGGARPREVLLESDLMGSMSLCFCDGEQNSTVTFPFPPFSPLPCLPLSPSFSVWDVDTGKCLKTFRHKDPILATRINDTYIVSSCERGLVKVWHIAMAQLVKVSGQWATLAERALGRRWVGSPYLAPQVILEQLSMAFKKDSPEALKGKAPK

SEQ ID NO: 914287 - protein, 172 aa, Homo sapiens
MGKGRFDEKENVSNCIQLKTSVIKGIKNQLIEQFPGIEPWLNQIMPKKDPVKIVRCHEHIEILTVNGELLFFRQREGPFYPTLRLLHKYPFILPHQQVDKGAIKFVLSGANIMCPGLTSPGAKLYPAAVDTIVAIMAEGKQHALCVGVMKMSAEDIEKSHQGNCIENFPFFK

SEQ ID NO: 914288 - protein, 181 aa, Homo sapiens
MFKKFDEKENVSNCIQLKTSVIKGIKNQLIEQFPGIEPWLNQIMPKKDPVKIVRCHEHIEILTVNGELLFFRQREGPFYPTLRLLHKYPFILPHQQVDKGAIKFVLSGANIMCPGLTSPGAKLYPAAVDTIVAIMAEGKQHALCVGVMKMSAEDIEKVNKGIGIENIHYLNDGLWHMKTYK

SEQ ID NO: 914289 - protein, 181 aa, Homo sapiens; identical to SEQ ID NO: 914288

SEQ ID NO: 914290 - protein, 138 aa, Homo sapiens
MPKKDPVKIVRCHEHIEILTVNGELLFFRQREGPFYPTLRLLHKYPFILPHQQVDKGAIKFVLSGANIMCPGLTSPGAKLYPAAVDTIVAIMAEGKQHALCVGVMKMSAEDIEKVNKGIGIENIHYLNDGLWHMKTYK

SEQ ID NO: 914291 - protein, 182 aa, Homo sapiens
MGKGRFDEKENVSNCIQLKTSVIKGIKNQLIEQFPGIEPWLNQIMPKKDPVKIVRCHEHIEILTVNGELLFFRQREGPFYPTLRLLHKYPFILPHQQVDKGAIKFVLSGANIMCPGLTSPGAKLYPAAVDTIVAIMAEGKQHALCVGVMKMSAEDIEKVNKGIGIENIHYLNDGLWHMKTYK

SEQ ID NO: 914292 - protein, 138 aa, Homo sapiens; identical to SEQ ID NO: 914290

SEQ ID NO: 914293 - protein, 181 aa, Homo sapiens; identical to SEQ ID NO: 914288

SEQ ID NO: 914294 - protein, 181 aa, Homo sapiens; identical to SEQ ID NO: 914288

SEQ ID NO: 914295 - protein, 110 aa, Homo sapiens
MFKKFDEKENVSNCIQLKTSVIKGIKNQLIEQFPGIEPWLNQIMPKKDPVKIVRCHEHIEILTVNGELLFFRQREGPFYPTLRLLHKCYHGRRKTACSMCWSHEDVCRRH

SEQ ID NO: 914296 - protein, 236 aa, Homo sapiens
MAKDAGLIEANGELKVFIDQNLSPGKGVVSLVAVHPSTVNPLGKQLLPKTFGQSNVNIAQQVVIGTPQRPAASNTLVVGSPHTPSTHFASQNQPSDSSPWSAGKRNRKGEKNGKGLRHFSMKVCEKVQRKGTTSYNEVADELVAEFSAADNHILPNESAYDQKNIRRRVYDALNVLMAMNIISKEKKEIKWIGLPTNSAQECQNLEVERQRRLERIKQKQSQLQELILQVREYVSV

SEQ ID NO: 914297 - protein, 410 aa, Homo sapiens
MAKDAGLIEANGELKVFIDQNLSPGKGVVSLVAVHPSTVNPLGKQLLPKTFGQSNVNIAQQVVIGTPQRPAASNTLVVGSPHTPSTHFASQNQPSDSSPWSAGKRNRKGEKNGKGLRHFSMKVCEKVQRKGTTSYNEVADELVAEFSAADNHILPNESAYDQKNIRRRVYDALNVLMAMNIISKEKKEIKWIGLPTNSAQECQNLEVERQRRLERIKQKQSQLQELILQQIAFKNLVQRNRHAEQQASRPPPPNSVIHLPFIIVNTSKKTVIDCSISNDKFEYLFNFDNTFEIHDDIEVLKRMGMACGLESGSCSAEDLKMARSLVPKALEPYVTEMAQGTVGGVFITTAGSTSNGTRFSASDLTNGADGMLATSSNGSQYSGSRVETPVSYVGEDDEEDDDFNENDEDD

SEQ ID NO: 914298 - protein, 410 aa, Homo sapiens; identical to SEQ ID NO: 914297

SEQ ID NO: 914299 - protein, 410 aa, Homo sapiens; identical to SEQ ID NO: 914297

SEQ ID NO: 914300 - protein, 410 aa, Homo sapiens; identical to SEQ ID NO: 914297

SEQ ID NO: 914301 - protein, 315 aa, Homo sapiens
MSTLPSKWKRNRKGEKNGKGLRHFSMKVCEKVQRKGTTSYNEVADELVAEFSAADNHILPNESAYDQKNIRRRVYDALNVLMAMNIISKEKKEIKWIGLPTNSAQECQNLEVERQRRLERIKQKQSQLQELILQQIAFKNLVQRNRHAEQQASRPPPPNSVIHLPFIIVNTSKKTVIDCSISNDKFEYLFNFDNTFEIHDDIEVLKRMGMACGLESGSCSAEDLKMARSLVPKALEPYVTEMAQGTVGGVFITTAGSTSNGTRFSASDLTNGADGMLATSSNGSQYSGSRVETPVSYVGEDDEEDDDFNENDEDD

SEQ ID NO: 914302 - protein, 410 aa, Homo sapiens; identical to SEQ ID NO: 914297

SEQ ID NO: 914303 - protein, 337 aa, Homo sapiens
MAKDAGLIEANGELKVFIDQNLSPGKGVVSLVAVHPSTVNPLGKQLLPKTFGQSNVNIAQQVVIGTPQRPAASNTLVVGSPHTPSTHFASQNQPSDSSPWSAGKRNRKGEKNGKGLRHFSMKVCEKVQRKGTTSYNEVADELVAEFSAADNHILPNESAYDQKNIRRRVYDALNVLMAMNIISKEKKEIKWIGLPTNSAQECQNLEVERQRRLERIKQKQSQLQELILQQIAFKNLVQRNRHAEQQASRPPPPNSVIHLPFIIVNTSKKTVIDCSISNDKFEYLFNFDNTFEIHDDIEVLKRMGMACGLESGSCSAEDLKMARSLVPKALEPYVTVT

SEQ ID NO: 914304 - protein, 108 aa, Homo sapiens [sequence omitted]

SEQ ID NO: 914305 - protein, 319 aa, Homo sapiens
SAFHFPGWAKSTARHPLQGHHPVGAMVVGGLRGVKDSKESTSKIGVLLSAVAVEDTFIRARMAVRPLSLSSPLRIPFPERFSPWAAEVSTQRPALAFQMSRPTPRCHVDAGRAVRTPRAQGLRSCAATGHLAPLIFFEQIAFKNLVQRNRHAEQQASRPPPPNSVIHLPFIIVNTSKKTVIDCSISNDKFEYLFNFDNTFEIHDDIEVLKRMGMACGLESGSCSAEDLKMARSLVPKALEPYVTEMAQGTVGGVFITTAGSTSNGTRFSASDLTNGADGMLATSSNGSQYSGSRVETPVSYVGEDDEEDDDFNENDEDD

SEQ ID NO: 914306 - protein, 162 aa, Homo sapiens
MAKDAGLIEANGELKVFIDQNLSPGKGVVSLVAVHPSTVNPLGKQLLPKTFGQSNVNIAQQVVIGTPQRPAASNTLVVGSPHTPSTHFASQNQPSDSSPWSAGKRNRKGEKNGKGLRHFSMKVCEKVQRKGTTSYNEVADELVAEFSAADNHILPNESAYLP

SEQ ID NO: 914307 - protein, 366 aa, Homo sapiens
MAKDAGLIEANGELKVFIDQNLSPGKGVVSLVAVHPSTVNPLGKQLLPKTFGQSNVNIAQQVVIGTPQRPAASNTLVVGSPHTPSTHFASQNQPSDSSPWSAGKRNRKGEKNGKGLRHFSMKVCEKVQRKGTTSYNEVADELVAEFSAADNHILPNESAYDQKNIRRRVYDALNVLMAMNIISKEKKEIKWIGLPTNSAQECQNLEVERQRRLERIKQKQSQLQELILQQIAFKNLVQRNRHAEQQASRPPPPNSVIHLPFIIVNTSKKTVIDCSISNDKFEYLFNFDNTFEIHDDIEVLKRMGMACGLESGSCSAEDLKMARSLVPKALEPYVTEMAQGTVGGVFITTAGSTSNGTRFSARGDSR

SEQ ID NO: 914308 - protein, 116 aa, Homo sapiens
AGGAGDRGAAEEEEEGAEGAKRRAGALRGAGPPPPTSPRRAHVTPARRSARVSPASRRHSAQGRDPATAGTARPGPSPRLSAPPRAPHRALSASPPARPDRAARKIIFLLWEGEHL

SEQ ID NO: 914309 - protein, 410 aa, Homo sapiens; identical to SEQ ID NO: 914297

SEQ ID NO: 914310 - protein, 410 aa, Homo sapiens; identical to SEQ ID NO: 914297

SEQ ID NO: 914311 - protein, 410 aa, Homo sapiens; identical to SEQ ID NO: 914297

SEQ ID NO: 914312 - protein, 464 aa, Homo sapiens
MAKDAGLIEANGELKVFIDQNLSPGKGVVSLVAVHPSTVNPLGKQLLPKTFGQSNVNIAQQVVIGTPQRPAASNTLVVGSPHTPSTHFASQNQPSDSSPWSAGLSTSLWTLRVVGLLAVRTSTFSWATCVTQSCDGAPTRVDASLRITLTHHRGLHRKRNRKGEKNGKGLRHFSMKVCEKVQRKGTTSYNEVADELVAEFSAADNHILPNESAYDQKNIRRRVYDALNVLMAMNIISKEKKEIKWIGLPTNSAQECQNLEVERQRRLERIKQKQSQLQELILQQIAFKNLVQRNRHAEQQASRPPPPNSVIHLPFIIVNTSKKTVIDCSISNDKFEYLFNFDNTFEIHDDIEVLKRMGMACGLESGSCSAEDLKMARSLVPKALEPYVTEMAQGTVGGVFITTAGSTSNGTRFSASDLTNGADGMLATSSNGSQYSGSRVETPVSYVGEDDEEDDDFNENDEDD

SEQ ID NO: 914313 - protein, 410 aa, Homo sapiens; identical to SEQ ID NO: 914297

SEQ ID NO: 914314 - protein, 410 aa, Homo sapiens; identical to SEQ ID NO: 914297

SEQ ID NO: 914315 - protein, 410 aa, Homo sapiens; identical to SEQ ID NO: 914297

SEQ ID NO: 914316 - protein, 162 aa, Homo sapiens; identical to SEQ ID NO: 914306

SEQ ID NO: 914317 - protein, 212 aa, Homo sapiens
MAKDAGLIEANGELKVFIDQNLSPGKGVVSLVAVHPSTVNPLGKQLLPKTFGQSNVNIAQQVVIGTPQRPAASNTLVVGSPHTPSTHFASQNQPSDSSPWSAGKRNRKGEKNGKGLRHFSMKVCEKVQRKGTTSYNEVADELVAEFSAADNHILPNESAYDQKNIRRRVYDALNVLMAMNIISKEKKEIKWIGLPTNSAQECQNLEVERQLF

SEQ ID NO: 914318 - protein, 162 aa, Homo sapiens
MAKDAGLIEANGELKVFIDQNLSPGKGVVSLVAVHPSTVNPLGKQLLPKTFGQSNVNIAQQVVSLPQERTAGISVGGRDRMSRVVGDVPRCAWIWAPVAAWGLSLIREPVASARFSIALCSCPRVVVGEVMAPTALLCAPAHAILPVTGGWWVGPRPQPEAA

SEQ ID NO: 914319 - protein, 354 aa, Homo sapiens
MGWSCLVTGAGGLLGQRIVRLLVEEKELKEIRALDKAFRPELREEFSKLQNRTKLTVLEGDILDEPFLKRACQDVSVVIHTACIIDVFGVTHRESIMNVNVKGTQLLLEACVQASVPVFIYTSSIEVAGPNSYKEIIQNGHEEEPLENTWPTPYPYSKKLAEKAVLAANGWNLKGGPFLSASINEALNNNGILSSVGKFSTVNPVYVGNVAWAHILALRALRDPKKAPSVRGQFYYISDDTPHQSYDNLNYILSKEFGLRLDSRWSLPLTLMYWIGFLLEVVSFLLSPIYSYQPPFNRHTVTLSNSVFTFSYKKAQRDLAYKPLYSWEEAKQKTVEWVGSLVDRHKETLKSKTQ

SEQ ID NO: 914320 - protein, 176 aa, Homo sapiens
MGWSCLVTGAGGLLGQRIVRLLVEEKELKEIRALDKAFRPELREEFSKLQNRTKLTVLEGDILDEPFLKRACQDVSVVIHTACIIDVFGVTHRESIMNVNVKGTQLLLEACVQASVPVFIYTSSIEVAGPNSYKEIIQNGHEEEPLENTWPTPYPYSKKLAEKAVLAANGWNLKKW

SEQ ID NO: 914321 - protein, 354 aa, Homo sapiens; identical to SEQ ID NO: 914319

SEQ ID NO: 914322 - protein, 354 aa, Homo sapiens; identical to SEQ ID NO: 914319

SEQ ID NO: 914323 - protein, 336 aa, Homo sapiens
MGWSCLVTGAGGLLGQRIVRLLVEEKELKEIRALDKAFRPELREEFSKLQNRTKLTVLEGDILDEPFLKRACQDVSVVIHTACIIDVFGVTHRESIMNVNVKGTQLLLEACVQASVPVFIYTSSIEVAGPNSYKEIIQNGHEEEPLENTWPTPYPYSKKLAEKAVLAANGWNLKGGPFLSASINEALNNNGILSSVGKFSTVNPVYVGNVAWAHILALRALRDPKKAPSVRGQFYYISDDTPHQSYDNLNYILSKEFGLRLDSRWSLPLTLMYWIGFLLEVVSFLLSPIYSYQPPFNRHTVTLSNSVFTFSYKKAQRDLAYKPLYSWEEAKQSKTQ

SEQ ID NO: 914324 - protein, 176 aa, Homo sapiens; identical to SEQ ID NO: 914320

SEQ ID NO: 914325 - protein, 176 aa, Homo sapiens; identical to SEQ ID NO: 914320

SEQ ID NO: 914326 - protein, 181 aa, Homo sapiens
MGWSCLVTGAGGLLGQRIVRLLVEEKELKEIRALDKAFRPELREEFSKLQNRTKLTVLEGDILDEPFLKRACQDVSVVIHTACIIDVFGVTHRESIMNVNVKGTQLLLEACVQASVPVFIYTSSIEVAGPNSYKEIIQNGHEEEPLENTWPTPYPYSKKLAEKAVLAANGWNLKGALSFCR

SEQ ID NO: 914327 - protein, 182 aa, Homo sapiens
MGWSCLVTGAGGLLGQRIVRLLVEEKELKEIRALDKAFRPELREEFSKLQNRTKLTVLEGDILDEPFLKRACQDVSVVIHTACIIDVFGVTHRESIMNVNVKGTQLLLEACVQASVPVFIYTSSIEVAGPNSYKEIIQNGHEEEPLENTWPTPYPYSKKLAEKAVLAANGWNLKGPSFLAGK

SEQ ID NO: 914328 - protein, 198 aa, Homo sapiens
MGWSCLVTGAGGLLGQRIVRLLVEEKELKEIRALDKAFRPELREEFSKLQNRTKLTVLEGDILDEPFLKRACQDVSVVIHTACIIDVFGVTHRESIMNVNVKGTQLLLEACVQASVPVFIYTSSIEVAGPNSYKEIIQNGHEEEPLENTWPTPYPYSKKLAEKAVLAANGWNLKSFCHLIGATTRGLSGGKIFLNPPC

SEQ ID NO: 914329 - protein, 183 aa, Homo sapiens
MGKGGPFLSASINEALNNNGILSSVGKFSTVNPVYVGNVAWAHILALRALRDPKKAPSVRGQFYYISDDTPHQSYDNLNYILSKEFGLRLDSRWSLPLTLMYWIGFLLEVVSFLLSPIYSYQPPFNRHTVTLSNSVFTFSYKKAQRDLAYKPLYSWEEAKQKTVEWVGSLVDRHKETLKSKTQ

SEQ ID NO: 914330 - protein, 226 aa, Homo sapiens
PRAVRIRLELLCSAFNNLFYALFWVTLESDLLSSIFCFLASVSCYFGLATMGWSCLVTGAGGLLGQRIVRLLVEEKELKEIRALDKAFRPELREEFSKLQNRTKLTVLEGDILDEPFLKRACQDVSVVIHTACIIDVFGVTHRESIMNVNVKGTQLLLEACVQASVPVFIYTSSIEVAGPNSYKEIIQNGHEEEPLENTWPTPYPYSKKLAEKAVLAANGWNLKKW

SEQ ID NO: 914331 - protein, 183 aa, Homo sapiens; identical to SEQ ID NO: 914329

SEQ ID NO: 914332 - protein, 113 aa, Homo sapiens
MGWSCLVTGAGGLLGQRIVRLLVEEKELKEIRALDKAFRPELREEFSKLQNRTKLTVLEGDILDEPFLVFGVTHRESIMNVNVKGTVAWGGDKTSWLNEDQKEGQEREEKSLH

SEQ ID NO: 914333 - protein, 397 aa, Homo sapiens
MGWSCLVTGAGGLLGQRIVRLLVEEKELKEIRALDKAFRPELREEFSNPWKLTGKSHFLSALDFCYEMAIPLSQSVKVGSKGEADEGSRKELQNRTKLTVLEGDILDEPFLKRACQDVSVVIHTACIIDVFGVTHRESIMNVNVKGTQLLLEACVQASVPVFIYTSSIEVAGPNSYKEIIQNGHEEEPLENTWPTPYPYSKKLAEKAVLAANGWNLKGGPFLSASINEALNNNGILSSVGKFSTVNPVYVGNVAWAHILALRALRDPKKAPSVRGQFYYISDDTPHQSYDNLNYILSKEFGLRLDSRWSLPLTLMYWIGFLLEVVSFLLSPIYSYQPPFNRHTVTLSNSVFTFSYKKAQRDLAYKPLYSWEEAKQKTVEWVGSLVDRHKETLKSKTQ

SEQ ID NO: 914334 - protein, 113 aa, Homo sapiens
MGWSCLVTGAGGLLGQRIVRLLVEEKELKEIRALDKAFRPELREEFSKLQNRTKLTVLEGDILDEPFLKRACQDVSVVIHTACIIDVFGVTHRESIMNVNVKGTVAWGGDSLH

SEQ ID NO: 914335 - protein, 145 aa, Homo sapiens
MGWSCLVTGAGGLLGQRIVRLLVEEKELKEIRALDKAFRPELREEFSIPNQTKLTDFEGNILGEALPEKNPPEPFGCNKPAGYMVVLGGPHRRPPLNAIGKGPPLFWGGLFKQQGPLFFFPPRLKGARPPPPQGKFPQTPPKKTL

SEQ ID NO: 914336 - protein, 81 aa, Homo sapiens
NRTKLTVLEGDILDEPFLKRACQDVSVVIHTACIIDVFGVTHRESIMNVNVKGTVAWGGDKTSWLNEDQKEGQEREEKSLH

SEQ ID NO: 914337 - protein, 354 aa, Homo sapiens; identical to SEQ ID NO: 914319

SEQ ID NO: 914338 - protein, 354 aa, Homo sapiens; identical to SEQ ID NO: 914319

SEQ ID NO: 914339 - protein, 354 aa, Homo sapiens; identical to SEQ ID NO: 914319

SEQ ID NO: 914340 - protein, 176 aa, Homo sapiens; identical to SEQ ID NO: 914320

SEQ ID NO: 914341 - protein, 200 aa, Homo sapiens
MGWSCLVTGAGGLLGQRIVRLLVEEKELKEIRALDKAFRPELREEFSKLQNRTKLTVLEGDILDEPFLKRACQDVSVVIHTACIIDVFGVTHRESIMNVNVKGTQLLLEACVQASVPVFIYTSSIEVAGPNSYKEIIQNGHEEEPLENTWPTPYPYSKKLAEKAVLAANGWNLKPFLSALMRPDNMDLAGWKSLSTSMCT

SEQ ID NO: 914342 - protein, 176 aa, Homo sapiens; identical to SEQ ID NO: 914320

SEQ ID NO: 914343 - protein, 204 aa, Homo sapiens
MGWSCLVTGAGGLLGQRIVRLLVEEKELKEIRALDKAFRPELREEFSKLQNRTKLTVLEGDILDEPFLKRACQDVSVVIHTACIIDVFGVTHRESIMNVNVKGTQLLLEACVQASVPVFIYTSSIEVAGPNSYKEIIQNGHEEEPLENTWPTPYPYSKKLAEKAVLAANGWNLKRGPISFCQFNEGLTTWGPGQGGKVSHEPTP

SEQ ID NO: 914344 - protein, 354 aa, Homo sapiens; identical to SEQ ID NO: 914319

SEQ ID NO: 914345 - protein, 158 aa, Homo sapiens
MGWSCLVTGAGGLLGQRIVRLLVEEKELKEIRALDKAFRPELREEFSKLQNRTKLTVLEGDILDEPFLKRACQDVSVVIHTACIIDVFGVTHRESIMNVNVKGTQLLLEACVQASVPVFIYTSSIEVAGPNSYKEIIQNGHEEEPAVLAANGWNLKKW

SEQ ID NO: 914346 - protein, 113 aa, Homo sapiens; identical to SEQ ID NO: 914332

SEQ ID NO: 914347 - protein, 131 aa, Homo sapiens
MGWSCLVTGAGGLLGQRIVRLLVEEKELKEIRALDKAFRPELREEFSKLQNRTKLTVLEGDILDEPFLKRACQDVSVVIHTACIIDVFGVTHRESIMNVNVKGTVAWGGDKTSWLNEDQKEGQEREEKSLH

SEQ ID NO: 914348 - protein, 102 aa, Homo sapiens
MGWSCLVTGAGGLLGQRIVRLLVEEKELKEIRALDKAFRPELREEFSRLHTEGNRGTSPGPAASLSHNAQLTVFFMSSKTNNMICCYQISVADSEQLWSLLT

SEQ ID NO: 914349 - protein, 616 aa, Homo sapiens
MSSLAVRDPAMDRSLRSVFVGNIPYEATEEQLKDIFSEVGSVVSFRLVYDRETGKPKGYGFCEYQDQETALSAMRNLNGREFSGRALRVDNAASEKNKEELKSLGPAAPIIDSPYGDPIDPEDAPESITRAVASLPPEQMFELMKQMKLCVQNSHQEARNMLLQNPQLAYALLQAQVVMRIMDPEIALKILHRKIHVTPLIPGKSQSVSVSGPGPGPGPGLCPGPNVLLNQQNPPAPQPQHLARRPVKDIPPLMQTPIQGGIPAPGPIPAAVPGAGPGSLTPGGAMQPQLGMPGVGPVPLERGQVQMSDPRAPIPRGPVTPGGLPPRGLLGDAPNDPRGGTLLSVTGEVEPRGYLGPPHQGPPMHHASGHDTRGPSSHEMRGGPLGDPRLLIGEPRGPMIDQRGLPMDGRGGRDSRAMETRAMETEVLETRVMERRGMETCAMETRGMEARGMDARGLEMRGPVPSSRGPMTGGIQGPGPINIGAGGPPQGPRQVPGISGVGNPGAGMQGTGIQGTGMQGAGIQGGGMQGAGIQGVSIQGGGIQGGGIQGASKQGGSQPSSFSPGQSQVTPQDQEKAALIMQVLQLTADQIAMLPPEQRQSILILKEQIQKSTGAS

SEQ ID NO: 914350 - protein, 595 aa, Homo sapiens
MSSLAVRDPAMDRSLRSVFVGNIPYEATEEQLKDIFSEVGSVVSFRLVYDRETGKPKGYGFCEYQDQETALSAMRNLNGREFSGRALRVDNAASEKNKEELKSLGPAAPIIDSPYGDPIDPEDAPESITRAVASLPPEQMFELMKQMKLCVQNSHQEARNMLLQNPQLAYALLQAQVVMRIMDPEIALKILHRKIHVTPLIPGPNVLLNQQNPPAPQPQHLARRPVKDIPPLMQTPIQGGIPAPGPIPAAVPGAGPGSLTPGGAMQPQLGMPGVGPVPLERGQVQMSDPRAPIPRGPVTPGGLPPRGLLGDAPNDPRGGTLLSVTGEVEPRGYLGPPHQGPPMHHASGHDTRGPSSHEMRGGPLGDPRLLIGEPRGPMIDQRGLPMDGRGGRDSRAMETRAMETEVLETRVMERRGMETCAMETRGMEARGMDARGLEMRGPVPSSRGPMTGGIQGPGPINIGAGGPPQGPRQVPGISGVGNPGAGMQGTGIQGTGMQGAGIQGGGMQGAGIQGVSIQGGGIQGGGIQGASKQGGSQPSSFSPGQSQVTPQDQEKAALIMQVLQLTADQIAMLPPEQRQSILILKEQIQKSTGAS

SEQ ID NO: 914351 - protein, 616 aa, Homo sapiens; identical to SEQ ID NO: 914349

SEQ ID NO: 914352 - protein, 616 aa, Homo sapiens; identical to SEQ ID NO: 914349

SEQ ID NO: 914353 - protein, 222 aa, Homo sapiens
MSSLAVRDPAMDRSLRSVFVGNIPYEATEEQLKDIFSEVGSVVSFRLVYDRETGKPKGYGFCEYQDQETALSAMRNLNGREFSGRALRVDNAASEKNKEELKSLGPAAPIIDSPYGDPIDPEDAPESITRAVASLPPEQMFELMKQMKLCVQNSHQEARNMLLQNPQLAYALLQVTPQDQEKAALIMQVLQLTADQIAMLPPEQRQSILILKEQIQKSTGAS

SEQ ID NO: 914354 - protein, 146 aa, Homo sapiens
MSPGPRAGFARKHPTKALGKETNGEEENERLQEGAPVLALPPTWGPSGYQCPWRGFLAASPTKELWSLRTMDALNRNQIGPGCQTQTMVQKGPLDLIETGKGLKVQTDKPHLVSLGSGRLSTAITLLPLEEGKCEQGISLTTPLSL

SEQ ID NO: 914355 - protein, 721 aa, Homo sapiens
MELGKQQEGSWERQRLETILNLCAEYSRADGGPEAGELPSIGEATAALALAGRRPSRGLAGASGRSSEEPGVATQRLWESMERSDEENLKEECSSTESTQQEHEDAPSTKLQGEVLALEEERAQVLGHVEQLKVRVKELEQQLQESAREAEMERALLQGEREAERALLQKEQKAVDQLQEKLVALETGIQKERDKEAEALETETKLFEDLEFQQLERESRVEEERELAGQGLLRSKAELLRSIAKRKERLAILDSQAGQIRAQAVQESERLARDKNASLQLLQKEKEKLTVLERRYHSLTGGRPFPKTTSTLKEVYRSKMDGEATSPLPRTRSGPLPSSSGSSSSSSQLSVATLGRSPSPKSALLTQNGTGSLPRNLAATLQDIETKRQLALQQKGQQVIEEQRRRLAELKQKAAAEAQCQWDALHGAAPFPAGPSGFPPLMHHSILHHLPAGRERGEEGEHAYDTLSLESSDSMETSISTGGNSACSPDNMSSASGLDMGKIEEMEKMLKEAHAEKNRLMESREREMELRRQALEEERRRREQVERRLQSESARRQQLVEKEVKMREKQFSQARPLTRYLPIRKEDFDLKTHIESSGHGVDTCLHVVLSSKVCRGYLVKMGGKIKSWKKRWFVFDRLKRTLSYYVDKHETKLKGVIYFQAIEEVYYDHLRSAAKSPNPALTFCVKTHDRLYYMVAPSAEAMRIWMDVIVTGAEGYTQFMN

SEQ ID NO: 914356 - protein, 1282 aa, Homo sapiens
PCGNACTIDGLPVRQPTRLTQGCMLCLGQSTFLRFNHPAEAKWMKSMIPAGGRAPGPPYSPVPAESESLVNGNHTPQTATRGPSACASHSSLVSSIEKDLQEIMDSLVLEEPGAAGKKPAATSPLSPMANGGRYLLSPPTSPGAMSVGSSYENTSPAFSPLSSPASSGSCASHSPSGQEPGPSVPPLVPARSSSYHLALQPPQSRPSGARSESPRLSRKGGHERPPSPGLRGLLTDSPAATVLAEARRATESPRLGGQLPVVAISLSEYPASGALSQPTSIPGSPKFQPPVPAPRNKIGTLQDRPPSPFREPPGSERVLTTSPSRQLVGRTFSDGLATRTLQPPESPRLGRRGLDSMRELPPLSPSLSRRALSPLPTRTTPDPKLNREVAESPRPRRWAAHGASPEDFSLTLGARGRRTRSPSPTLGESLAPHKGSFSGRLSPAYSLGSLTGASPCQSPCVQRKLSSGDLRVPVTRERKNSITEISDNEDDLLEYHRRQRQERLREQEMERLERQRLETILNLCAEYSRADGGPEAGELPSIGEATAALALAGRRPSRGLAGASGRSSEEPGVATQRLWESMERSDEENLKEECSSTESTQQEHEDAPSTKLQGEVLALEEERAQVLGHVEQLKVRVKELEQQLQESAREAEMERALLQGEREAERALLQKEQKAVDQLQEKLVALETGIQKERDKEAEALETETKLFEDLEFQQLERESRVEEERELAGQGLLRSKAELLRSIAKRKERLAILDSQAGQIRAQAVQESERLARDKNASLQLLQKEKEKLTVLERRYHSLTGGRPFPKTTSTLKELQMEKLLLPAVDLEQWYQELMAGLGTGPAAASPHSSPPPLPAKASRQLQVYRSKMDGEATSPLPRTRSGPLPSSSGSSSSSSQLSVATLGRSPSPKSALLTQNGTGSLPRNLAATLQDIETKRQLALQQKGQQVIEEQRRRLAELKQKAAAEAQCQWDALHGAAPFPAGPSGFPPLMHHSILHHLPAGRERGEEGEHAYDTLSLESSDSMETSISTGGNSACSPDNMSSASGLDMGKIEEMEKMLKEAHAEKNRLMESREREMELRRQALEEERRRREQVERRLQSESARRQQLVEKEVKMREKQFSQARPLTRYLPIRKEDFDLKTHIESSGHGVDTCLHVVLSSKVCRGYLVKMGGKIKSWKKRWFVFDRLKRTLSYYVDKHETKLKGVIYFQAIEEVYYDHLRSAAKKRFFRFTMVTESPNPALTFCVKTHDRLYYMVAPSAEAMRIWMDVIVTGAEGYTQFMN

SEQ ID NO: 914357 - protein, 844 aa, Homo sapiens
PCGNACTIDGLPVRQPTRLTQGCMLCLGQSTFLRFNHPAEAKWMKSMIPAGGRAPGPPYSPVPAESESLVNGNHTPQTATRGPSACASHSSLVSSIEKDLQEIMDSLVLEEPGAAGKKPAATSPLSPMANGGRYLLSPPTSPGAMSVGSSYENTSPAFSPLSSPASSGSCASHSPSGQEPGPSVPPLVPARSSSYHLALQPPQSRPSGARSESPRLSRKGGHERPPSPGLRGLLTDSPAATVLAEARRATESPRLGGQLPVVAISLSEYPASGALSQPTSIPGSPKFQPPVPAPRNKIGTLQDRPPSPFREPPGSERVLTTSPSRQLVGRTFSDGLATRTLQPPESPRLGRRGLDSMRELPPLSPSLSRRALSPLPTRTTPDPKLNREVAESPRPRRWAAHGASPEDFSLTLGARGRRTRSPSPTLGESLAPHKGSFSGRLSPAYSLGSLTGASPCQSPCVQRKLSSGDLRVPVTRERKNSITEISDNEDDLLEYHRRQRQERLREQEMERLERQRLETILNLCAEYSRADGGPEAGELPSIGEATAALALAGRRPSRGLAGASGRSSEEPGVATQRLWESMERSDEENLKEECSSTESTQQEHEDAPSTKLQGEVLALEEERAQVLGHVEQLKVRVKELEQQLQESAREAEMERALLQGEREAERALLQKEQKAVDQLAGLVEKEVKMREKQFSQARPLTRYLPIRKEDFDLKTHIESSGHGVDTCLHVVLSSKVCRGYLVKMGGKIKSWKKRWFVFDRLKRTLSYYVDKHETKLKGVIYFQAIEEVYYDHLRSAAKSPNPALTFCVKTHDRLYYMVAPSAEAMRIWMDVIVTGAEGYTQFMN

SEQ ID NO: 914358 - protein, 194 aa, Homo sapiens
MELRRQALEEERRRREQVERRLQSESARRQQLVEKEVKMREKQFSQARPLTRYLPIRKEDFDLKTHIESSGHGVDTCLHVVLSSKVCRGYLVKMGGKIKSWKKRWFVFDRLKRTLSYYVDKHETKLKGVIYFQAIEEVYYDHLRSAAKSPNPALTFCVKTHDRLYYMVAPSAEAMRIWMDVIVTGAEGYTQFMN

SEQ ID NO: 914359 - protein, 1222 aa, Homo sapiens
PCGNACTIDGLPVRQPTRLTQGCMLCLGQSTFLRFNHPAEAKWMKSMIPAGGRAPGPPYSPVPAESESLVNGNHTPQTATRGPSACASHSSLVSSIEKDLQEIMDSLVLEEPGAAGKKPAATSPLSPMANGGRYLLSPPTSPGAMSVGSSYENTSPAFSPLSSPASSGSCASHSPSGQEPGPSVPPLVPARSSSYHLALQPPQSRPSGARSESPRLSRKGGHERPPSPGLRGLLTDSPAATVLAEARRATESPRLGGQLPVVAISLSEYPASGALSQPTSIPGSPKFQPPVPAPRNKIGTLQDRPPSPFREPPGSERVLTTSPSRQLVGRTFSDGLATRTLQPPESPRLGRRGLDSMRELPPLSPSLSRRALSPLPTRTTPDPKLNREVAESPRPRRWAAHGASPEDFSLTLGARGRRTRSPSPTLGESLAPHKGSFSGRLSPAYSLGSLTGASPCQSPCVQRKLSSGDLRVPVTRERKNSITEISDNEDDLLEYHRRQRQERLREQEMERLERQRLETILNLCAEYSRADGGPEAGELPSIGEATAALALAGRRPSRGLAGASGRSSEEPGVATQRLWESMERSDEENLKEECSSTESTQQEHEDAPSTKLQGEVLALEEERAQVLGHVEQLKVRVKELEQQLQESAREAEMERALLQGEREAERALLQKEQKAVDQLQEKLVALETGIQKERDKEAEALETETKLFEDLEFQQLERESRVEEERELAGQGLLRSKAELLRSIAKRKERLAILDSQAGQIRAQAVQESERLARDKNASLQLLQKEKEKLTVLERRYHSLTGGRPFPKTTSTLKEVYRSKMDGEATSPLPRTRSGPLPSSSGSSSSSSQLSVATLGRSPSPKSALLTQNGTGSLPRNLAATLQDIETKRQLALQQKGQQVIEEQRRRLAELKQKAAAEAQCQWDALHGAAPFPAGPSGFPPLMHHSILHHLPAGRERGEEGEHAYDTLSLESSDSMETSISTGGNSACSPDNMSSASGLDMGKIEEMEKMLKEAHAEKNRLMESREREMELRRQALEEERRRREQVERRLQSESARRQQLVEKEVKMREKQFSQARPLTRYLPIRKEDFDLKTHIESSGHGVDTCLHVVLSSKVCRGYLVKMGGKIKSWKKRWFVFDRLKRTLSYYVDKHETKLKGVIYFQAIEEVYYDHLRSAAKSPNPALTFCVKTHDRLYYMVAPSAEAMRIWMDVIVTGAEGYTQFMN

SEQ ID NO: 914360 - protein, 76 aa, Homo sapiens
GSVPGPVRMCTTTTCAGDKKRFFRFTMVTESPNPALTFCVKTHDRLYYMVAPSAEAMRIWMDVIVTGAEGYTQFMN

SEQ ID NO: 914361 - protein, 84 aa, Homo sapiens
RANPPRSSYRSVRIDHRARCSQIKSVLSASLLVTESPASPNPALTFCVKTHDRLYYMVAPSAEAMRIWMDVIVTGAEGYTQFMN

SEQ ID NO: 914362 - protein, 1222 aa, Homo sapiens; identical to SEQ ID NO: 914359

SEQ ID NO: 914363 - protein, 1222 aa, Homo sapiens; identical to SEQ ID NO: 914359

SEQ ID NO: 914364 - protein, 809 aa, Homo sapiens
PCGNACTIDGLPVRQPTRLTQGCMLCLGQSTFLRFNHPAEAKWMKSMIPAGGRAPGPPYSPVPAESESLVNGNHTPQTATRGPSACASHSSLVSSIEKDLQEIMDSLVLEEPGAAGKKPAATSPLSPMANGGRYLLSPPTSPGAMSVGSSYENTSPAFSPLSSPASSGSCASHSPSGQEPGPSVPPLVPARSSSYHLALQPPQSRPSGARSESPRLSRKGGHERPPSPGLRGLLTDSPAATVLAEARRATESPRLGGQLPVVAISLSEYPASGALSQPTSIPGSPKFQPPVPAPRNKIGTLQDRPPSPFREPPGSERVLTTSPSRQLVGRTFSDGLATRTLQPPESPRLGRRGLDSMRELPPLSPSLSRRALSPLPTRTTPDPKLNREVAESPRPRRWAAHGASPEDFSLTLGARGRRTRSPSPTLGESLAPHKGSFSGRLSPAYSLGSLTGASPCQSPCVQRKLSSGDLRVPVTRERKNSITEISDNEDDLLEYHRRQRQERLREQEMERLERQRLETILNLCAEYSRADGGPEAGELPSIGEATAALALAGRRPSRGLAGASGRSSEEPGVATQRLWESMERSDEENLKEECSSTESTQQEHEDAPSTKLQGEVLALEEERAQVLGHVEQLKVRVKELEQQLQESAREAEMERALLQGEREAERALLQKEQKAVDQLQEKLVALETGIQKERDKERAELAAGRRHLEARQALYAELQTQLDNCPESVREQLQEQLRREAEALETETKLFEDLEFQQLERESRVEEERELAGQGLLRSKAELLRSIAKRKVCPTSFPAACCWRPVTWV

SEQ ID NO: 914365 - protein, 846 aa, Homo sapiens
PCGNACTIDGLPVRQPTRLTQGCMLCLGQSTFLRFNHPAEAKWMKSMIPAGGRAPGPPYSPVPAESESLVNGNHTPQTATRGPSACASHSSLVSSIEKDLQEIMDSLVLEEPGAAGKKPAATSPLSPMANGGRYLLSPPTSPGAMSVGSSYENTSPAFSPLSSPASSGSCASHSPSGQEPGPSVPPLVPARSSSYHLALQPPQSRPSGARSESPRLSRKGGHERPPSPGLRGLLTDSPAATVLAEARRATESPRLGGQLPVVAISLSEYPASGALSQPTSIPGSPKFQPPVPAPRNKIGTLQDRPPSPFREPPGSERVLTTSPSRQLVGRTFSDGLATRTLQPPESPRLGRRGLDSMRELPPLSPSLSRRALSPLPTRTTPDPKLNREVAESPRPRRWAAHGASPEDFSLTLGARGRRTRSPSPTLGESLAPHKGSFSGRLSPAYSLGSLTGASPCQSPCVQRKLSSGDLRVPVTRERKNSITEISDNEDDLLEYHRRQRQERLREQEMERLERQRLETILNLCAEYSRADGGPEAGELPSIGEATAALALAGRRPSRGLAGASGRSSEEPGVATQRLWESMERSDEENLKEECSSTESTQQEHEDAPSTKLQGEVLALEEERAQVLGHVEQLKVRVKELEQQLQESAREAEMERALLQGEREAERALLQKEQKAVDQLQEKLVALETGIQKERDKERAELAAGRRHLEARQALYAELQTQLDNCPESVREQLQEQLRRVSSTAPPPPAPRATPQKEERRAVGRDHLALQYLPDTREAEALETETKLFEDLEFQQLERESRVEEERELAGQGLLRSKAELLRSIAKRKVCPTSFPAACCWRPVTWV

SEQ ID NO: 914366 - protein, 136 aa, Homo sapiens
KAVDQLQEKLVALETGIQKERDKVTHTWPSLVLGTSGLGEKEKCLLWGPVPFTSSSILQYKWSLWLSRDRVTSPPLWKEPAWRALPGAGLVSGVSSVWVCVLPLGACHPRPFMALLGSAKAPSWAVSTAQGTDIGE

SEQ ID NO: 914367 - protein, 34 aa, Homo sapiens
MDSLVLEEPGAAGKKPAATSPLSPMANGGRYLLS

SEQ ID NO: 914368 - protein, 137 aa, Homo sapiens
RGIYGTEEERCSWERKLEGLWLEFCTVLSFRQGKRIPPMLLERKPEQEMMQQRGRALWCRRPSFSLRRVMEMESGGPGLQLSGLALHALTLSPPPLLSFPALSPWLPGPRLGVFSICKHFSRTIKPLDYGKVSGRPV

SEQ ID NO: 914369 - protein, 115 aa, Homo sapiens [sequence omitted]

SEQ ID NO: 914370 - protein, 1222 aa, Homo sapiens; identical to SEQ ID NO: 914359

SEQ ID NO: 914371 - protein, 1176 aa, Homo sapiens
PCGNACTIDGLPVRQPTRLTQGCMLCLGQSTFLRFNHPAEAKWMKSMIPAGGRAPGPPYSPVPAESESLVNGNHTPQTATRGPSACASHSSLVSSIEKDLQEIMDSLVLEEPGAAGKKPAATSPLSPMANGGRYLLSPPTSPGAMSVGSSYENTSPAFSPLSSPASSGSCASHSPSGQEPGPSVPPLVPARSSSYHLALQPPQSRPSGARSESPRLSRKGGHERPPSPGLRGLLTDSPAATVLAEARRATESPRLGGQLPVVAISLSEYPASGALSQPTSIPGSPKFQPPVPAPRNKIGTLQDRPPSPFREPPGSERVLTTSPSRQLVGRTFSDGLATRTLQPPESPRLGRRGLDSMRELPPLSPSLSRRALSPLPTRTTPDPKLNREVAESPRPRRWAAHGASPEDFSLTLGARGRRTRSPSPTLGESLAPHKGSFSGRLSPAYSLGSLTGASPCQSPCVQRKLSSGDLRVPVTRERKNSITEISDNEDDLLEYHRRQRQERLREQEMERLERQRLETILNLCAEYSRADGGPEAGELPSIGEATAALALAGRRPSRGLAGASGRSSEEPGVATQRLWESMERSDEENLKEECSSTESTQQEHEDAPSTKLQGEVLALEEERAQVLGHVEQLKVRVKELEQQLQESAREEAEALETETKLFEDLEFQQLERESRVEEERELAGQGLLRSKAELLRSIAKRKERLAILDSQAGQIRAQAVQESERLARDKNASLQLLQKEKEKLTVLERRYHSLTGGRPFPKTTSTLKEVYRSKMDGEATSPLPRTRSGPLPSSSGSSSSSSQLSVATLGRSPSPKSALLTQNGTGSLPRNLAATLQDIETKRQLALQQKGQQVIEEQRRRLAELKQKAAAEAQCQWDALHGAAPFPAGPSGFPPLMHHSILHHLPAGRERGEEGEHAYDTLSLESSDSMETSISTGGNSACSPDNMSSASGLDMGKIEEMEKMLKEAHAEKNRLMESREREMELRRQALEEERRRREQVERRLQSESARRQQLVEKEVKMREKQFSQARPLTRYLPIRKEDFDLKTHIESSGHGVDTCLHVVLSSKVCRGYLVKMGGKIKSWKKRWFVFDRLKRTLSYYVDKHETKLKGVIYFQAIEEVYYDHLRSAAKSPNPALTFCVKTHDRLYYMVAPSAEAMRIWMDVIVTGAEGYTQFMN

SEQ ID NO: 914372 - protein, 1097 aa, Homo sapiens
PCGNACTIDGLPVRQPTRLTQGCMLCLGQSTFLRFNHPAEAKWMKSMIPAGGRAPGPPYSPVPAESESLVNGNHTPQTATRGPSACASHSSLVSSIEKDLQEIMDSLVLEEPGAAGKKPAATSPLSPMANGGRYLLSPPTSPGAMSVGSSYENTSPAFSPLSSPASSGSCASHSPSGQEPGPSVPPLVPARSSSYHLALQPPQSRPSGARSESPRLSRKGGHERPPSPGLRGLLTDSPAATVLAEARRATESPRLGGQLPVVAISLSEYPASGALSQPTSIPGSPKFQPPVPAPRNKIGTLQDRPPSPFREPPGSERVLTTSPSRQLVGRTFSDGLATRTLQPPESPRLGRRGLDSMRELPPLSPSLSRRALSPLPTRTTPDPKLNREVAESPRPRRWAAHGASPEDFSLTLGARGRRTRSPSPTLGESLAPHKGSFSGRLSPAYSLGSLTGASPCQSPCVQRKLSSGDLRVPVTRERKNSITEISDNEDDLLEYHRRQRQERLREQEMERLERQRLETILNLCAEYSRADGGPEAGELPSIGEATAALALAGRRPSRGLAGASGRSSEEPGVATQRLWESMERSDEENLKEECSSTESTQQEHEDAPSTKLQGEVLALEEERAQVLGHVEQLKVRVKELEQQLQESAREAEMERALLQGEREAERALLQKEQKAVDQLQEKLVALETGIQKERDKEAEALETETKLFEDLEFQQLERESRVEEERELAGQGLLRSKAELLRSIAKRKERLAILDSQAGQIRAQAVQEIRTPGPGQECLLTAAAKGEGEADCAGKEIPLTHRGQAFPEDHIDPQRALMHHSILHHLPAGRERGEEGEHAYDTLSLESSDSMETSISTGGNSACSPDNMSSASGLDMGKIEEMEKMLKEAHAEKNRLMESREREMELRRQALEEERRRREQVERRLQSESARRQQLVEKEVKMREKQFSQARPLTRYLPIRKEDFDLKTHIESSGHGVDTCLHVVLSSKVCRGYLVKMGGKIKSWKKRWFVFDRLKRTLSYYVDKHETKLKGVIYFQAIEEVYYDHLRSAAKSPNPALTFCVKTHDRLYYMVAPSAEAMRIWMDVIVTGAEGYTQFMN

SEQ ID NO: 914373 - protein, 1194 aa, Homo sapiens
PCGNACTIDGLPVRQPTRLTQGCMLCLGQSTFLRFNHPAEAKWMKSMIPAGGRAPGPPYSPVPAESESLVNGNHTPQTATRGPSACASHSSLVSSIEKDLQEIMDSLVLEEPGAAGKKPAATSPLSPMANGGRYLLSPPTSPGAMSVGSSYENTSPAFSPLSSPASSGSCASHSPSGQEPGPSVPPLVPARSSSYHLALQPPQSRPSGARSESPRLSRKGGHERPPSPGLRGLLTDSPAATVLAEARRATESPRLGGQLPVVAISLSEYPASGALSQPTSIPGSPKFQPPVPAPRNKIGTLQDRPPSPFREPPGSERVLTTSPSRQLVGRTFSDGLATRTLQPPESPRLGRRGLDSMRELPPLSPSLSRRALSPLPTRTTPDPKLNREVAESPRPRRWAAHGASPEDFSLTLGARGRRTRSPSPTLGESLAPHKGSFSGRLSPAYSLGSLTGASPCQSPCVQRKLSSGDLRVPVTRERKNSITEISDNEDDLLEYHRRQRQERLREQEMERLERQRLETILNLCAEYSRADGGPEAGELPSIGEATAALALAGRRPSRGLAGASGRSSEEPGVATQRLWESMERSDEENLKEECSSTESTQQEHEDAPSTKLQGEVLALEEERAQVLGHVEQLKVRVKELEQQLQESAREAEMERALLQGEREAERALLQKEQKAVDQLQEKLVALETGIQKERDKEAEALETETKLFEDLEFQQLERESRVEEERELAGQGLLRSKAELLRSIAKRKERLAILDSQAGQIRAQAVQESERLARDKNASLQLLQKEKEKLTVLERRYHSLTGGRPFPKTTSTLKEVYRSKMDGEATSPLPRTRSGPLPSSSGSSSSSSQLSVATLGRSPSPKSALLTQNGTGSLPRNLAATLQDIETKRQLALQQKGQQVIEEQRRRLAELKQKAAAEAQCQWDALHGAAPFPAGPSGFPPLMHHSILHHLPAGRERGEEGEHAYDTLSLESSDSMETSISTGGNSACSPDNMSSASGLDMGKIEEMEKMLKEAHAEKNRLMESREREMELRRQALEEERRRREQVERRLQSESARRQQLVEKEVKMREKQFSQARPLTRYLPIRKEDFDLKTHIESSGHGVDTCLHVVLSSKVCRGYLVKMGGKIKSWKKRWFVFDRLKRTLSYYVDKHETKLKGVIYFQAIEEVYTWWPHLQRPCVSGWMSLSQGLRATLSS

SEQ ID NO: 914374 - protein, 1222 aa, Homo sapiens; identical to SEQ ID NO: 914359

SEQ ID NO: 914375 - protein, 1222 aa, Homo sapiens; identical to SEQ ID NO: 914359

SEQ ID NO: 914376 - protein, 1222 aa, Homo sapiens; identical to SEQ ID NO: 914359

SEQ ID NO: 914377 - protein, 1062 aa, Homo sapiens
PCGNACTIDGLPVRQPTRLTQGCMLCLGQSTFLRFNHPAEAKWMKSMIPAGGRAPGPPYSPVPAESESLVNGNHTPQTATRGPSACASHSSLVSSIEKDLQEIMDSLVLEEPGAAGKKPAATSPLSPMANGGRYLLSPPTSPGAMSVGSSYENTSPAFSPLSSPASSGSCASHSPSGQEPGPSVPPLVPARSSSYHLALQPPQSRPSGARSESPRLSRKGGHERPPSPGLRGLLTDSPAATVLAEARRATESPRLGGQLPVVAISLSEYPASGALSQPTSIPGSPKFQPPVPAPRNKIGTLQDRPPSPFREPPGSERVLTTSPSRQLVGRTFSDGLATRTLQPPESPRLGRRGLDSMRELPPLSPSLSRRALSPLPTRTTPDPKLNREVAESPRPRRWAAHGASPEDFSLTLGARGRRTRSPSPTLGESLAPHKGSFSGRLSPAYSLGSLTGASPCQSPCVQRKLSSGDLRVPVTRERKNSITEISDNEDDLLEYHRRQRQERLREQEMERLERQRLETILNLCAEYSRADGGPEAGELPSIGEATAALALAGRRPSRGLAGASGRSSEEPGVATQRLWESMERSDEENLKEECSSTESTQQEHEDAPSTKLQGEVLALEEERAQVLGHVEQLKVRVKELEQQLQESAREAEMERALLQGEREAERALLQKEQKAVDQLQEKLVALETGIQKERDKEAEALETETKLFEDLEFQQLERESRVEEERELAGQGLLRSKAELLRSIAKRKERLAILDSQAGQIRAQAVQESERLARDKNASLQLLQKEKEKLTVLERRYHSLTGGRPFPKTTSTLKEVYRSKMDGEATSPLPRTRSGPLPSSSGSSSSSSQLSVATLGRSPSPKSALLTQNGTGSLPRNLAATLQDIETKRQLALQQKGQQVIEEQRRRLAELKQKAAAEAQCQWDALHGAAPFPAGPSGFPPLMHHSILHHLPAGRERGEEGEHAYDTLSLESSDSMETSISTGGNSACSPDNMSSASGLDMGKIEEMEKMLKEAHAEKNRLMESREREMELRRQAEALRWKSENEQGTPYILQQMDGIQVGI

SEQ ID NO: 914378 - protein, 959 aa, Homo sapiens
PCGNACTIDGLPVRQPTRLTQGCMLCLGQSTFLRFNHPAEAKWMKSMIPAGGRAPGPPYSPVPAESESLVNGNHTPQTATRGPSACASHSSLVSSIEKDLQEIMDSLVLEEPGAAGKKPAATSPLSPMANGGRYLLSPPTSPGAMSVGSSYENTSPAFSPLSSPASSGSCASHSPSGQEPGPSVPPLVPARSSSYHLALQPPQSRPSGARSESPRLSRKGGHERPPSPGLRGLLTDSPAATVLAEARRATESPRLGGQLPVVAISLSEYPASGALSQPTSIPGSPKFQPPVPAPRNKIGTLQDRPPSPFREPPGSERVLTTSPSRQLVGRTFSDGLATRTLQPPESPRLGRRGLDSMRELPPLSPSLSRRALSPLPTRTTPDPKLNREVAESPRPRRWAAHGASPEDFSLTLGARGRRTRSPSPTLGESLAPHKGSFSGRLSPAYSLGSLTGASPCQSPCVQRKLSSGDLRVPVTRERKNSITEISDNEDDLLEYHRRQRQERLREQEMERLERQRLETILNLCAEYSRADGGPEAGELPSIGEATAALALAGRRPSRGLAGASGRSSEEPGVATQRLWESMERSDEENLKEECSSTESTQQEHEDAPSTKLQGEVLALEEERAQVLGHVEQLKVRVKELEQQLQESAREAEMERALLQGEREAERALLQKEQKAVDQLQEKLVALETGIQKERDKEAEALETETKLFEDLEFQQLERESRVEEERELAGQGLLRSKAELLRSIAKRKERLAILDSQAGQIRAQAVQESERLARDKNASLQLLQKEKEKLTVLERRYHSLTGGRPFPKTTSTLKEVYRSKMDGEATSPLPRTRSGPLPSSSGSSSSSSQLSVATLGRSPSPKSALLTQNGTGSLPRNLAATLQDIETKRQLALQQKGQQVIEEQRRRLAELKQKAAAEAQCQWDALHGAAPFPAGPSGFPPLMHHSILHHLLPCSPSQH

SEQ ID NO: 914379 - protein, 558 aa, Homo sapiens
PCGNACTIDGLPVRQPTRLTQGCMLCLGQSTFLRFNHPAEAKWMKSMIPAGGRAPGPPYSPVPAESESLVNGNHTPQTATRGPSACASHSSLVSSIEKDLQEIMDSLVLEEPGAAGKKPAATSPLSPMANGGRYLLSPPTSPGAMSVGSSYENTSPAFSPLSSPASSGSCASHSPSGQEPGPSVPPLVPARSSSYHLALQPPQSRPSGARSESPRLSRKGGHERPPSPGLRGLLTDSPAATVLAEARRATESPRLGGQLPVVAISLSEYPASGALSQPTSIPGSPKFQPPVPAPRNKIGTLQDRPPSPFREPPGSERVLTTSPSRQLVGRTFSDGLATRTLQPPESPRLGRRGLDSMRELPPLSPSLSRRALSPLPTRTTPDPKLNREVAESPRPRRWAAHGASPEDFSLTLGARGRRTRSPSPTLGESLAPHKGSFSGRLSPAYSLGSLTGASPCQSPCVQRKLSSGDLRVPVTRERKNSITEISDNEDDLLEYHRRQRQERLREQEMERLVSGCQGGLPLSMAESLPGLEQASWQSRRGPQTGLRLLKVPHLQDTL

SEQ ID NO: 914380 - protein, 95 aa, Homo sapiens
PDGEAAAPCCRLRAVVPGADGRAGDWPRCSLPSLFSPASARQSFPSAAGNPSFTARPPQPLHLSTLIPPANPSATQYHLEWRRQPSQGNEGTSGP

SEQ ID NO: 914381 - protein, 94 aa, Homo sapiens
CGLVFQAQSGIASTTQPPLSLSLKEAEALETETKLFEDLEFQQLERESRVEEERELAGQGLLRSKAELLRSIAKRKVCPTSFPAACCWRPVTWV

SEQ ID NO: 914382 - protein, 103 aa, Homo sapiens [sequence omitted]

SEQ ID NO: 914383 - protein, 76 aa, Homo sapiens
ETSRRDCKLPFPKWREGLKTKKARTQTAGLKPRRIRERNTSASVAPDGSEKMDVEDENLSDYFELMFVAMEMLPIC

SEQ ID NO: 914384 - protein, 103 aa, Homo sapiens [sequence omitted]

SEQ ID NO: 914385 - protein, 764 aa, Homo sapiens
MERQQRAGSKTAGPPCQWSRMASEGTNIPSPVVRQIDKQFLICSICLERYKNPKVLPCLHTFCERCLQNYIPAHSLTLSCPVCRQTSILPEKGVAALQNNFFITNLMDVLQRTPGSNAEESSILETVTAVAAGKPLSCPNHDGNVMEFYCQSCETAMCRECTEGEHAEHPTVPLKDVVEQHKASLQVQLDAVNKRLPEIDSALQFISEIIHQLTNQKASIVDDIHSTFDELQKTLNVRKSVLLMELEVNYGLKHKVLQSQLDTLLQGQESIKSCSNFTAQALNHGTETEVLLVKKQMSEKLNELADQDFPLHPRENDQLDFIVETEGLKKSIHNLGTILTTNAVASETVATGEGLRQTIIGQPMSVTITTKDKDGELCKTGNAYLTAELSTPDGSVADGEILDNKNGTYEFLYTVQKEGDFTLSLRLYDQHIRGSPFKLKVIRSADVSPTTEGVKRRVKSPGSGHVKQKAVKRPASMYSTGKRKENPIEDDLIFRVGTKGRNKGEFTNLQGVAASTNGKILIADSNNQCVQIFSNDGQFKSRFGIRGRSPGQLQRPTGVAVHPSGDIIIADYDNKWVSIFSSDGKFKTKIGSGKLMGPKGVSVDRNGHIIVVDNKACCVFIFQPNGKIVTRFGSRGNGDRQFAGPHFAAVNSNNEIIITDFHNHSVKVFNQEGEFMLKFGSNGEGNGQFNAPTGVAVDSNGNIIVADWGNSRIQVFDGSGSFLSYINTSADPLYGPQGLALTSDGHVVVADSGNHCFKVYRYLQ

SEQ ID NO: 914386 - protein, 154 aa, Homo sapiens
MQQRAGSKTAGPPCQWSRMASEGTNIPSPVVRQIDKQFLICSICLERYKNPKVLPCLHTFCERCLQNYIPAHSLTLSCPVCRQTSILPEKGVAALQNNFFITNLMDVLQRTPGSNAEESSILETVTAVAAGKPLSCPNHDGNVSGWDGRYCPGA

SEQ ID NO: 914387 - protein, 744 aa, Homo sapiens
MASEGTNIPSPVVRQIDKQFLICSICLERYKNPKVLPCLHTFCERCLQNYIPAHSLTLSCPVCRQTSILPEKGVAALQNNFFITNLMDVLQRTPGSNAEESSILETVTAVAAGKPLSCPNHDGNVMEFYCQSCETAMCRECTEGEHAEHPTVPLKDVVEQHKASLQVQLDAVNKRLPEIDSALQFISEIIHQLTNQKASIVDDIHSTFDELQKTLNVRKSVLLMELEVNYGLKHKVLQSQLDTLLQGQESIKSCSNFTAQALNHGTETEVLLVKKQMSEKLNELADQDFPLHPRENDQLDFIVETEGLKKSIHNLGTILTTNAVASETVATGEGLRQTIIGQPMSVTITTKDKDGELCKTGNAYLTAELSTPDGSVADGEILDNKNGTYEFLYTVQKEGDFTLSLRLYDQHIRGSPFKLKVIRSADVSPTTEGVKRRVKSPGSGHVKQKAVKRPASMYSTGKRKENPIEDDLIFRVGTKGRNKGEFTNLQGVAASTNGKILIADSNNQCVQIFSNDGQFKSRFGIRGRSPGQLQRPTGVAVHPSGDIIIADYDNKWVSIFSSDGKFKTKIGSGKLMGPKGVSVDRNGHIIVVDNKACCVFIFQPNGKIVTRFGSRGNGDRQFAGPHFAAVNSNNEIIITDFHNHSVKVFNQEGEFMLKFGSNGEGNGQFNAPTGVAVDSNGNIIVADWGNSRIQVFDGSGSFLSYINTSADPLYGPQGLALTSDGHVVVADSGNHCFKVYRYLQ

SEQ ID NO: 914388 - protein, 744 aa, Homo sapiens; identical to SEQ ID NO: 914387

SEQ ID NO: 914389 - protein, 633 aa, Homo sapiens
MAQNQELFLCHPQVMEFYCQSCETAMCRECTEGEHAEHPTVPLKDVVEQHKASLQVQLDAVNKRLPEIDSALQFISEIIHQLTNQKASIVDDIHSTFDELQKTLNVRKSVLLMELEVNYGLKHKVLQSQLDTLLQGQESIKSCSNFTAQALNHGTETEVLLVKKQMSEKLNELADQDFPLHPRENDQLDFIVETEGLKKSIHNLGTILTTNAVASETVATGEGLRQTIIGQPMSVTITTKDKDGELCKTGNAYLTAELSTPDGSVADGEILDNKNGTYEFLYTVQKEGDFTLSLRLYDQHIRGSPFKLKVIRSADVSPTTEGVKRRVKSPGSGHVKQKAVKRPASMYSTGKRKENPIEDDLIFRVGTKGRNKGEFTNLQGVAASTNGKILIADSNNQCVQIFSNDGQFKSRFGIRGRSPGQLQRPTGVAVHPSGDIIIADYDNKWVSIFSSDGKFKTKIGSGKLMGPKGVSVDRNGHIIVVDNKACCVFIFQPNGKIVTRFGSRGNGDRQFAGPHFAAVNSNNEIIITDFHNHSVKVFNQEGEFMLKFGSNGEGNGQFNAPTGVAVDSNGNIIVADWGNSRIQVFDGSGSFLSYINTSADPLYGPQGLALTSDGHVVVADSGNHCFKVYRYLQ

SEQ ID NO: 914390 - protein, 653 aa, Homo sapiens
MERQQRAGSKTAGPPCQWSRMASEGTNIPSPVVRQIDKQFLICSICLERYKNPKVLPCLHTFCERCLQNYIPAHSLTLSCPVCRQTSILPEKGVAALQNNFFITNLMDVLQRTPGSNAEESSILETVTAVAAGKPLSCPNHDGNVLQSQLDTLLQGQESIKSCSNFTAQALNHGTETEVLLVKKQMSEKLNELADQDFPLHPRENDQLDFIVETEGLKKSIHNLGTILTTNAVASETVATGEGLRQTIIGQPMSVTITTKDKDGELCKTGNAYLTAELSTPDGSVADGEILDNKNGTYEFLYTVQKEGDFTLSLRLYDQHIRGSPFKLKVIRSADVSPTTEGVKRRVKSPGSGHVKQKAVKRPASMYSTGKRKENPIEDDLIFRVGTKGRNKGEFTNLQGVAASTNGKILIADSNNQCVQIFSNDGQFKSRFGIRGRSPGQLQRPTGVAVHPSGDIIIADYDNKWVSIFSSDGKFKTKIGSGKLMGPKGVSVDRNGHIIVVDNKACCVFIFQPNGKIVTRFGSRGNGDRQFAGPHFAAVNSNNEIIITDFHNHSVKVFNQEGEFMLKFGSNGEGNGQFNAPTGVAVDSNGNIIVADWGNSRIQVFDGSGSFLSYINTSADPLYGPQGLALTSDGHVVVADSGNHCFKVYRYLQ

SEQ ID NO: 914391 - protein, 744 aa, Homo sapiens; identical to SEQ ID NO: 914387

SEQ ID NO: 914392 - protein, 744 aa, Homo sapiens; identical to SEQ ID NO: 914387

SEQ ID NO: 914393 - protein, 744 aa, Homo sapiens; identical to SEQ ID NO: 914387

SEQ ID NO: 914394 - protein, 136 aa, Homo sapiens
MASEGTNIPSPVVRQIDKQFLICSICLERYKNPKVLPCLHTFCERCLQNYIPAHSLTLSCPVCRQTSILPEKGVAALQNNFFITNLMDVLQRTPGSNAEESSILETVTAVAAGKPLSCPNHDGNVSGWDGRYCPGA

SEQ ID NO: 914395 - protein, 154 aa, Homo sapiens; identical to SEQ ID NO: 914386

SEQ ID NO: 914396 - protein, 302 aa, Homo sapiens
MERQQRAGSKTAGPPCQWSRMASEGTNIPSPVVRQIDKQFLICSICLERYKNPKVLPCLHTFCERCLQNYIPAHSLTLSCPVCRQTSILPEKGVAALQNNFFITNLMDVLQRTPGSNAEESSILETVTAVAAGKPLSCPNHDGNVMEFYCQSCETAMCRECTEGEHAEHPTVPLKDVVEQHKASLQVQLDAVNKRLPEIDSALQFISEIIHQLTNQKASIVDDIHSTFDELQKTLNVRKSVLLMELEVNYGLKHKVLQSQLDTLLQGQESIKSCSVPQLERCSAVVRAVSSRPFCILSTLIS

SEQ ID NO: 914397 - protein, 111 aa, Homo sapiens
MASEGTNIPSPVVRQIDKQFLICSICLERYVHQRLQIETELHVEKSVIKKDFYQQTDYLLTFFDQNYLNNEINLHCVSFTHIVGIPKDSKPVAICKLTYINICVINLWIRI

SEQ ID NO: 914398 - protein, 107 aa, Homo sapiens
VLDYPSEKSAEPGDAMCLQNYIPAHSLTLSCPVCRQTSILPEKGVAALQNNFFITNLMDVLQRTPGSNAEESSILETVTAVAAGKPLSCPNHDGNVSGWDGRYCPGA

SEQ ID NO: 914399 - protein, 144 aa, Homo sapiens
YHIWLDDTKDKDGELCKTGNAYLTAELSTPDGSVADGEILDNKNGTYEFLYTVQKEGDFTLSLRLYDQHIRGSPFKLKVIRSADVSPTTEGVKRRVKSPGSGHVKQKAVKRPASMYSTGKRKENPIEDDLIFRVGKERASVPDA

SEQ ID NO: 914400 - protein, 762 aa, Homo sapiens
MQQRAGSKTAGPPCQWSRMASEGTNIPSPVVRQIDKQFLICSICLERYKNPKVLPCLHTFCERCLQNYIPAHSLTLSCPVCRQTSILPEKGVAALQNNFFITNLMDVLQRTPGSNAEESSILETVTAVAAGKPLSCPNHDGNVMEFYCQSCETAMCRECTEGEHAEHPTVPLKDVVEQHKASLQVQLDAVNKRLPEIDSALQFISEIIHQLTNQKASIVDDIHSTFDELQKTLNVRKSVLLMELEVNYGLKHKVLQSQLDTLLQGQESIKSCSNFTAQALNHGTETEVLLVKKQMSEKLNELADQDFPLHPRENDQLDFIVETEGLKKSIHNLGTILTTNAVASETVATGEGLRQTIIGQPMSVTITTKDKDGELCKTGNAYLTAELSTPDGSVADGEILDNKNGTYEFLYTVQKEGDFTLSLRLYDQHIRGSPFKLKVIRSADVSPTTEGVKRRVKSPGSGHVKQKAVKRPASMYSTGKRKENPIEDDLIFRVGTKGRNKGEFTNLQGVAASTNGKILIADSNNQCVQIFSNDGQFKSRFGIRGRSPGQLQRPTGVAVHPSGDIIIADYDNKWVSIFSSDGKFKTKIGSGKLMGPKGVSVDRNGHIIVVDNKACCVFIFQPNGKIVTRFGSRGNGDRQFAGPHFAAVNSNNEIIITDFHNHSVKVFNQEGEFMLKFGSNGEGNGQFNAPTGVAVDSNGNIIVADWGNSRIQVFDGSGSFLSYINTSADPLYGPQGLALTSDGHVVVADSGNHCFKVYRYLQ

SEQ ID NO: 914401 - protein, 744 aa, Homo sapiens; identical to SEQ ID NO: 914387

SEQ ID NO: 914402 - protein, 394 aa, Homo sapiens
MASEGTNIPSPVVRQIDKQFLICSICLERYILDNKNGTYEFLYTVQKEGDFTLSLRLYDQHIRGSPFKLKVIRSADVSPTTEGVKRRVKSPGSGHVKQKAVKRPASMYSTGKRKENPIEDDLIFRVGTKGRNKGEFTNLQGVAASTNGKILIADSNNQCVQIFSNDGQFKSRFGIRGRSPGQLQRPTGVAVHPSGDIIIADYDNKWVSIFSSDGKFKTKIGSGKLMGPKGVSVDRNGHIIVVDNKACCVFIFQPNGKIVTRFGSRGNGDRQFAGPHFAAVNSNNEIIITDFHNHSVKVFNQEGEFMLKFGSNGEGNGQFNAPTGVAVDSNGNIIVADWGNSRIQVFDGSGSFLSYINTSADPLYGPQGLALTSDGHVVVADSGNHCFKVYRYLQ

SEQ ID NO: 914403 - protein, 744 aa, Homo sapiens; identical to SEQ ID NO: 914387

SEQ ID NO: 914404 - protein, 756 aa, Homo sapiens
MERQQRAGSKTAGPPCQWSRMASEGTNIPSPVVRQIDKQFLICSICLERYKNPKVLPCLHTFCERCLQNYIPAHSLTLSCPVCRQTSILPEKGVAALQNNFFITNLMDVLQRTPGSNAEESSILETVTAVAAGKPLSCPNHDGNVMEFYCQSCETAMCRECTEGEHAEHPTVPLKDVVEQHKASLQVQLDAVNKRLPEIDSALQFISEIIHQLTNQKASIVDDIHSTFDELQKTLNVRKSVLLMELEVNYGLKHKVLQSQLDTLLQGQESIKSCSNFTAQALNHGTETEVLLVKKQMSEKLNELADQDFPLHPRENDQLDFIVETEGLKKSIHNLGTILTTNAVASETVATGEGLRQTIIGQPMSVTITTKDKDGELCKTGNAYLTAELSTPDGSVADGEILDNKNGTYEFLYTVQKEGDFTLSLRLYDQHIRGSPFKLKVIRSADVSPTTEGVKRRVKSPGSGHVKQKAVKRPASMYSTGKRKENPIEDDLIFRVGTKGRNKGEFTNLQGVAASTNGKILIADSNNQCVQIFSNDGQFKSRFGIRGRSPGQLQRPTGVAVHPSGDIIIADYDNKWVSIFSSDGKFKTKIGSGKLMGPKGVSVDRNGHIIVVDNKACCVFIFQPNGKIVTRFGSRGNGDRQFAGPHFAAVNSNNEIIITDFHNHSVKVFNQEGEFMLKFGSNGEGNGQFNAPTGVAVDSNGNIIVADWGNSRIQVFDGSGSFLSYINTSADPLYGPQGLALTSDGHVVVADSGNHY

SEQ ID NO: 914405 - protein, 701 aa, Homo sapiens
MERQQRAGSKTAGPPCQWSRMASEGTNIPSPVVRQIDKQFLICSICLERYKNPKVLPCLHTFCERCLQNYIPAHSLTLSCPVCRQTSILPEKGVAALQNNFFITNLMDVLQRTPGSNAEESSILETVTAVAAGKPLSCPNHDGNVMEFYCQSCETAMCRECTEGEHAEHPTVPLKDVVEQHKASLQVQLDAVNKRLPEIDSALQFISEIIHQLTNQKASIVDDIHSTFDELQKTLNVRKSVLLMELEVNYGLKHKVLQSQLDTLLQGQESIKSCSNFTAQALNHGTETEVLLVKKQMSEKLNELADQDFPLHPRENDQLDFIVETEGLKKSIHNLGTILTTNAVASETVATGEGLRQTIIGQPMSVTITTKDKDGELCKTGNAYLTAELSTPDGSVADGEILDNKNGTYEFLYTVQKEGDFTLSLRLYDQHIRGSPFKLKVIRSADVSPTTEGVKRRVKSPGSGHVKQKAVKRPASMYSTGKRKENPIEDDLIFRVGTKGRNKGEFTNLQGVAASTNGKILIADSNNQCVQIFSNDGQFKSRFGIRGRSPGQLQRPTGVAVHPSGDIIIADYDNKWVSIFSSDGKFKTKIGSGKLMGPKGVSVDRNGHIIVVDNKACCVFIFQPNGKIVTRFGSRGNGDRQFAGPHFAAVNSNNEIIITDFHNHSVKVLQAHELLLTFNCFYGEIGLRENNAILTYGTKGS

SEQ ID NO: 914406 - protein, 445 aa, Homo sapiens
MERQQRAGSKTAGPPCQWSRMASEGTNIPSPVVRQIDKQFLICSICLERYKNPKVLPCLHTFCERCLQNYIPAHSLTLSCPVCRQTSILPEKGVAALQNNFFITNLMDVLQRTPGSNAEESSILETVTAVAAGKPLSCPNHDGNVMEFYCQSCETAMCRECTEGEHAEHPTVPLKDVVEQHKASLQVQLDAVNKRLPEIDSALQFISEIIHQLTNQKASIVDDIHSTFDELQKTLNVRKSVLLMELEVNYGLKHKVLQSQLDTLLQGQESIKSCSNFTAQALNHGTETEVLLVKKQMSEKLNELADQDFPLHPRENDQLDFIVETEGLKKSIHNLGTILTTNAVASETVATGEGLHCMQRAGSKTAGPPCQWSRMASEGTNIPSPVVRQIDKQFLICSICLERYKNPKVLPCLHTFCERCLQNYIPAHSLTLSCPASCRLVPARG

SEQ ID NO: 914407 - protein, 320 aa, Homo sapiens
QGVVRQWHAQQRAAASRPVPRSQLQPPPPRSRRLSCSLCGSVLSGTWAPVAPSKPFRPPQCPPPSPARPSPAKMVDREQLVQKARLAEQAERYDDMAAAMKNVTELNEPLSNEERNLLSVAYKNVVGARRSSWRVISSIEQKTSADGNEKKIEMVRAYREKIEKELEAVCQDVLSLLDNYLIKNCSETQYESKVFYLKMKGDYYRYLAEVATGEKRATVVESSEKAYSEAHEISKEHMQPTHPIRLGLALNYSVFYYEIQNAPEQACHLAKTAFDDAIAELDTLNEDSYKDSTLIMQLLRDNLTLWTSDQQDDDGGEGNN

SEQ ID NO: 914408 - protein, 320 aa, Homo sapiens; identical to SEQ ID NO: 914407

SEQ ID NO: 914409 - protein, 320 aa, Homo sapiens; identical to SEQ ID NO: 914407

SEQ ID NO: 914410 - protein, 320 aa, Homo sapiens; identical to SEQ ID NO: 914407

SEQ ID NO: 914411 - protein, 320 aa, Homo sapiens; identical to SEQ ID NO: 914407

SEQ ID NO: 914412 - protein, 320 aa, Homo sapiens; identical to SEQ ID NO: 914407

SEQ ID NO: 914413 - protein, 320 aa, Homo sapiens; identical to SEQ ID NO: 914407

SEQ ID NO: 914414 - protein, 320 aa, Homo sapiens; identical to SEQ ID NO: 914407

SEQ ID NO: 914415 - protein, 320 aa, Homo sapiens; identical to SEQ ID NO: 914407

SEQ ID NO: 914416 - protein, 106 aa, Homo sapiens
RGLSVSGTHSSRSRLAPGPAVAAPAASSAQPPPQLLALWVGPLRHLGSSRALQALQAAPVSSSFSGQTQPREDGGPRATGAESPAGRAGGALRRHGRGHEERDRAE

SEQ ID NO: 914417 - protein, 320 aa, Homo sapiens; identical to SEQ ID NO: 914407

SEQ ID NO: 914418 - protein, 320 aa, Homo sapiens; identical to SEQ ID NO: 914407

SEQ ID NO: 914419 - protein, 320 aa, Homo sapiens; identical to SEQ ID NO: 914407

SEQ ID NO: 914420 - protein, 320 aa, Homo sapiens; identical to SEQ ID NO: 914407

SEQ ID NO: 914421 - protein, 320 aa, Homo sapiens; identical to SEQ ID NO: 914407

SEQ ID NO: 914422 - protein, 320 aa, Homo sapiens; identical to SEQ ID NO: 914407

SEQ ID NO: 914423 - protein, 246 aa, Homo sapiens
AGGCPSVARTAAAAASRPVPRSQLQPPPPRSRRLSCSLCGSVLSGTWAPVAPSKPFRPPQCPPPSPARPSPAKMVDREQLVQKARLAEQAERYDDMAAAMKNVTELNEPLSNEERNLLSVAYKNVVGARRSSWRVISSIEQKTSADGNEKKIEMVRAYREKIEKELEAVCQDVLSLLDNYLIKNCSETQYESKVFYLKMKGDYYRYLAEVATGEKRATVVESSEKAYSEAHEISKEHMQPTPGLEV

SEQ ID NO: 914424 - protein, 497 aa, Homo sapiens
MSQDGASQFQEVIRQELELSVKKELEKILTTASSHEFEHTKKDLDGFRKLFHRFLQEKGPSVDWGKIQRPPEDSIQPYEKIKARGLPDNISSVLNKLVVVKLNGGLGTSMGCKGPKSLIGVRNENTFLDLTVQQIEHLNKTYNTDVPLVLMNSFNTDEDTKKILQKYNHCRVKIYTFNQSRYPRINKESLLPVAKDVSYSGENTEAWYPPGHGDIYASFYNSGLLDTFIGEGKEYIFVSNIDNLGATVDLYILNHLMNPPNGKRCEFVMEVTNKTRADVKGGTLTQYEGKLRLVEIAQVPKAHVDEFKSVSKFKIFNTNNLWISLAAVKRLQEQNAIDMEIIVNAKTLDGGLNVIQLETAVGAAIKSFENSLGINVPRSRFLPVKTTSDLLLVMSNLYSLNAGSLTMSEKREFPTVPLVKLGSSFTKVQDYLRRFESIPDMLELDHLTVSGDVTFGKNVSLKGTVIIIANHGDRIDIPPGAVLENKIVSGNLRILDH

SEQ ID NO: 914425 - protein, 250 aa, Homo sapiens
MVSTQSAHYGRAPNGKRCEFVMEVTNKTRADVKGGTLTQYEGKLRLVEIAQVPKAHVDEFKSVSKFKIFNTNNLWISLAAVKRLQEQNAIDMEIIVNAKTLDGGLNVIQLETAVGAAIKSFENSLGINVPRSRFLPVKTTSDLLLVMSNLYSLNAGSLTMSEKREFPTVPLVKLGSSFTKVQDYLRRFESIPDMLELDHLTVSGDVTFGKNVSLKGTVIIIANHGDRIDIPPGAVLENKIVSGNLRILDH

SEQ ID NO: 914426 - protein, 497 aa, Homo sapiens; identical to SEQ ID NO: 914424

SEQ ID NO: 914427 - protein, 508 aa, Homo sapiens
MSRFVQDLSKAMSQDGASQFQEVIRQELELSVKKELEKILTTASSHEFEHTKKDLDGFRKLFHRFLQEKGPSVDWGKIQRPPEDSIQPYEKIKARGLPDNISSVLNKLVVVKLNGGLGTSMGCKGPKSLIGVRNENTFLDLTVQQIEHLNKTYNTDVPLVLMNSFNTDEDTKKILQKYNHCRVKIYTFNQSRYPRINKESLLPVAKDVSYSGENTEAWYPPGHGDIYASFYNSGLLDTFIGEGKEYIFVSNIDNLGATVDLYILNHLMNPPNGKRCEFVMEVTNKTRADVKGGTLTQYEGKLRLVEIAQVPKAHVDEFKSVSKFKIFNTNNLWISLAAVKRLQEQNAIDMEIIVNAKTLDGGLNVIQLETAVGAAIKSFENSLGINVPRSRFLPVKTTSDLLLVMSNLYSLNAGSLTMSEKREFPTVPLVKLGSSFTKVQDYLRRFESIPDMLELDHLTVSGDVTFGKNVSLKGTVIIIANHGDRIDIPPGAVLENKIVSGNLRILDH

SEQ ID NO: 914428 - protein, 508 aa, Homo sapiens; identical to SEQ ID NO: 914427

SEQ ID NO: 914429 - protein, 497 aa, Homo sapiens; identical to SEQ ID NO: 914424

SEQ ID NO: 914430 - protein, 104 aa, Homo sapiens [sequence omitted]

SEQ ID NO: 914431 - protein, 508 aa, Homo sapiens; identical to SEQ ID NO: 914427

SEQ ID NO: 914432 - protein, 106 aa, Homo sapiens [sequence omitted]

SEQ ID NO: 914433 - protein, 263 aa, Homo sapiens
MEANGSQGTSGSANDSQHDPGKMFIGGLSWQTSPDSLRDYFSKFGEIRECMVMRDPTTKRSRGFGFVTFADPASVDKVLGQPHHELDSKTIDPKVAFPRRAQPKMVTRTKKIFVGGLSANTVVEDVKQYFEQFGKVEDAMLMFDKTTNRHRGRVAIYEEQMEAKTPFLLWAGCVLLGHLGRPPKTSLKTREIGGCVKMSHLQIGFEVERPFGFSPHLEKSRSSTEDLQTQSLCTAQSLKDLLPFSGSKTHLKRGNKYSRVIHT

SEQ ID NO: 914434 - protein, 92 aa, Homo sapiens
EDTQIVRLSWQSSPDSLRDYFSKFGEIRECMVMRDPTTKRSRGFGFVTFADPASVDKVLGQPHHELDSKTIDPKVAFPRRAQPKSSLQDNLI

SEQ ID NO: 914435 - protein, 356 aa, Homo sapiens
MEANGSQGTSGSANDSQHDPGKMFIGGLSWQTSPDSLRDYFSKFGEIRECMVMRDPTTKRSRGFGFVTFADPASVDKVLGQPHHELDSKTIDPKVAFPRRAQPKMVTRTKKIFVGGLSANTVVEDVKQYFEQFGKVEDAMLMFDKTTNRHRGFGFVTFENEDVVEKVCEIHFHEINNKMVECKKAQPKEVMFPPGTRGRARGLPYTMDAFMLGMGMLGYPNFVATYGRGYPGFAPSYGYQFPASSGLWTSGSSGGGGSKRIRLQPGAARRLPGGQQPRTCRRSLRPCQPGLRSGELHKCGQPTAGLGLRPRHSWTFDCNGLYKWIPLSRCFRCHLTLRAYLDVQARLGEVSEWPFV

SEQ ID NO: 914436 - protein, 128 aa, Homo sapiens
APQNKSPCLGKGTVRLEGSLRIDWRMTSTESTLRLQPGAARRLPGGQQPRTCRRSLRPCQPGLRSGELHKCGQPTAGLGLRPRHSWTFDCNGLYKWIPLSRCFRCHLTLRAYLDVQARLGEVSEWPFV

SEQ ID NO: 914437 - protein, 263 aa, Homo sapiens
MEANGSQGTSGSANDSQHDPGKMFIGGLSWQTSPDSLRDYFSKFGEIRECMVMRDPTTKRSRGFGFVTFADPASVDKVLGQPHHELDSKTIDPKVAFPRRAQPKMVTRTKKIFVGGLSANTVVEDVKQYFEQFGKVEDAMLMFDKTTNRHRGFGFVTFENEDVVEKVCEIHFHEINNKMVECKKAQPKEVMFPPGTRGRARGLPYTMDAFMLGMGMLGYPNFVATYGRGYPGFAPSYGYQFPAQQRLMDQWQQRRWRQQEDQS

SEQ ID NO: 914438 - protein, 263 aa, Homo sapiens; identical to SEQ ID NO: 914437

SEQ ID NO: 914439 - protein, 263 aa, Homo sapiens; identical to SEQ ID NO: 914437

SEQ ID NO: 914440 - protein, 263 aa, Homo sapiens; identical to SEQ ID NO: 914437

SEQ ID NO: 914441 - protein, 263 aa, Homo sapiens; identical to SEQ ID NO: 914437

SEQ ID NO: 914442 - protein, 133 aa, Homo sapiens
EDTQIVRLSWQSSPDSLRDYFSKFGEIRECMVMRDPTTKRSRGFGFVTFADPASVDKVLGQPHHELDSKTIDPKVAFPRRAQPKVSRRINSRILALRDDCQEFQISNSIGHELLKPGIHCSFGVSGQAGQVVL

SEQ ID NO: 914443 - protein, 106 aa, Homo sapiens [sequence omitted]

SEQ ID NO: 914444 - protein, 132 aa, Homo sapiens
MTHACMLLTNTLTHTSSISTGFCASDQLSCTNASMLWQHKLCAAFHFPCTHHIIPMVECKKAQPKEVMFPPGTRGRARGLPYTMDAFMLGMGMLGYPNFVATYGRGYPGFAPSYGYQFPDYLPVSQDIIFIN

SEQ ID NO: 914445 - protein, 263 aa, Homo sapiens; identical to SEQ ID NO: 914437

SEQ ID NO: 914446 - protein, 216 aa, Homo sapiens
QNCLNPGDRCCSELRSCHCTPDWVTEHVFVSNEKKKRTQHGEDAQSPSLWAHEMTQIFPLGHPVLLLENFVPGRAEMIILVAQGLVAQVEDAMLMFDKTTNRHRGFGFVTFENEDVVEKVCEIHFHEINNKMVECKKAQPKEVMFPPGTRGRARGLPYTMDAFMLGMGMLGYPNFVATYGRGYPGFAPSYGYQFPAQQRLMDQWQQRRWRQQEDQS

SEQ ID NO: 914447 - protein, 263 aa, Homo sapiens; identical to SEQ ID NO: 914437

SEQ ID NO: 914448 - protein, 263 aa, Homo sapiens; identical to SEQ ID NO: 914437

SEQ ID NO: 914449 - protein, 263 aa, Homo sapiens; identical to SEQ ID NO: 914437

SEQ ID NO: 914450 - protein, 259 aa, Homo sapiens
MEANGSQGTSGSANDSQHDPGKMFIGGLSWQTSPDSLRDYFSKFGEIRECMVMRDPTTKRSRGFGFVTFADPASVDKVLGQPHHELDSKTIDPKVAFPRRAQPKMVTRTKKIFVGGLSANTVVEDVKQYFEQFGKVEDAMLMFDKTTNRHRGFGFVTFENEDVVEKVCEIHFHEINNKMVECKKAQPKEVMFPPGTRGRARGLPYTMDAFMLGMGMLGESGQDRRSPWTGRAMEASTPNWVTYQWGKLLHLSKPQFPCL

SEQ ID NO: 914451 - protein, 106 aa, Homo sapiens [sequence omitted]

SEQ ID NO: 914452 - protein, 162 aa, Homo sapiens
MAETVADTRRLITKPQNLNDAYGPPSNFLEIDVSNPQTVGVGRGRFTTYEIRVKTNLPIFKLKESTVRRRYSDFEWLRSELERESKVVVPPLPGKAFLRQLPFRGDDGIFDDNFIEERKQGLEQFINKVAGHPLAQNERCLHMFLQDEIIDKSYTPSKIRHA

SEQ ID NO: 914453 - protein, 162 aa, Homo sapiens; identical to SEQ ID NO: 914452

SEQ ID NO: 914454 - protein, 162 aa, Homo sapiens; identical to SEQ ID NO: 914452

SEQ ID NO: 914455 - protein, 162 aa, Homo sapiens; identical to SEQ ID NO: 914452

SEQ ID NO: 914456 - protein, 110 aa, Homo sapiens
MTPLLLTPQSAVPLPSLGRASREPGVAFQLVSRFSPGLGGGSLRGAGRSFACGVNARSTCSFSSRPLRASPVSPRRAAAAAAAAERGGGGGSPRRRQQPTDPPATSSRSM

SEQ ID NO: 914457 - protein, 120 aa, Homo sapiens
MTPLLLTPQSAVPLPSLGRASREPGVAFQLVSRFSPGLGGGSLRGAGRSFACGVNARSTCSFSSRPLRASPVSPRRAAAAAAAAERGGGGGSPRRRQQLHHLRNQGQDKSSYFQAERIYC

SEQ ID NO: 914458 - protein, 105 aa, Homo sapiens
MAETVADTRRLITKPQNLNDAYGPPSNFLEIDVSNPQTVGVGRGRFTTYEIRVKTNLPIFKLKESTVRRRYSDFEWLRSELERESKGRWSSSGTERTLSSHVFTR

SEQ ID NO: 914459 - protein, 162 aa, Homo sapiens; identical to SEQ ID NO: 914452

SEQ ID NO: 914460 - protein, 110 aa, Homo sapiens
  misc_feature (3)..(3): Xaa can be any naturally occurring amino acid
GGXGEAGSTTHLITNVTTSLDRTAFSILKESTVRRRYSDFEWLRSELERESKVVVPPLPGKAFLRQLPFRGDDGIFDDNFIEERKQGLEQFINKVAGHPLAQNERCLHMF

SEQ ID NO: 914461 - protein, 130 aa, Homo sapiens
MAETVADTRRLITKPQNLNDAYGPPSNFLEIDVSNPQTVGVGRGRFTTYEIRVKVVVPPLPGKAFLRQLPFRGDDGIFDDNFIEERKQGLEQFINKVAGHPLAQNERCLHMFLQDEIIDKSYTPSKIRHA

SEQ ID NO: 914462 - protein, 162 aa, Homo sapiens; identical to SEQ ID NO: 914452

SEQ ID NO: 914463 - protein, 162 aa, Homo sapiens; identical to SEQ ID NO: 914452

SEQ ID NO: 914464 - protein, 140 aa, Homo sapiens
MAETVADTRRLITKPQNLNDAYGPPSNFLEIDTNLPIFKLKESTVRRRYSDFEWLRSELERESKVVVPPLPGKAFLRQLPFRGDDGIFDDNFIEERKQGLEQFINKVAGHPLAQNERCLHMFLQDEIIDKSYTPSKIRHA

SEQ ID NO: 914465 - protein, 129 aa, Homo sapiens
MAETVADTRRLITKPQNLNDAYGPPSNFLEIDVSNPQTVGVGRGRFTTYEIRVKTNLPIFKLKESTVRRRYSDFEWLRSELERESKVVVPPLPGKAFLRQLPFRGDDGRSLVILWHRTNVVFTCFYKMK

SEQ ID NO: 914466 - protein, 144 aa, Homo sapiens
MAETVADTRRLITKPQNLNDAYGPPSNFLEIDVSNPQTVGVGRGRFTTYEIRVKTNLPIFKLKESTVRRRYSDFEWLRSELERESKVVVPPLPGKAFLRQLPFRGDDGIFDDNFIEERKQGLEQFINKVAGHPLAQNERCLHMF

SEQ ID NO: 914467 - protein, 128 aa, Homo sapiens
MAETVADTRRLITKPQNLNDAYGPPSNFLEIDVSNPQTVGVGRGRFTTYEIRVKTNLPIFKLKESTVRRRYSDFEWLRSELERESKVVVPPLPGKAFLRQLPFRGDDGKKMTRVIDGKQNQDWWPATV

SEQ ID NO: 914468 - protein, 548 aa, Homo sapiens
PCRGPTDTTRATTQSRARMAAALRSVMMAGYLSEWRTPTYRSTEMVQRLRMEAVQHSTSTAAVGGLVVSAQGVGVGVFLAAFILMAVAGNLLVILSVACNRHLQTVTNYFIVNLAVADLLLSATVLPFSATMEVLGFWAFGRAFCDVWAAVDVLCCTASILSLCTISVDRYVGVRHSLKYPAIMTERKAAAILALLWVVALVVSVGPLLGWKEPVPPDERFCGITEEAGYAVFSSVCSFYLPMAVIVVMYCRVYVVARSTTRSLEAGVKRERGKASEVVLRIHCRGAATGADGAHGMRSAKGHTFRSSLSVRLLKFSREKKAAKTLAIVVGVFVLCWFPFFFVLPLGSLFPQLKPSEGVFKVIFWLGYFNSCVNPLIYPCSSREFKRAFLRLLRCQCRRRRRRRPLWRVYGHHWRASTSGLRQDCAPSSGDAPPGAPLALTALPDPDPEPPGTPEMQAPVASRRKPPSAFREWRLLGPFRRPTTQLRAKVSSLSHKIRAGGAQRAEAACAQRSEVEAVSLGVPHEVAEGATCQAYELADYSNLRETDI

SEQ ID NO: 914469 - protein, 261 aa, Homo sapiens
MLARRNEQTWLCLLLCLIIRNCQYCTGFELQKQQLHVVLSNSTLVCCLHSLKVILISGRGSLFPQLKPSEGVFKVIFWLGYFNSCVNPLIYPCSSREFKRAFLRLLRCQCRRRRRRRPLWRVYGHHWRASTSGLRQDCAPSSGDAPPGAPLALTALPDPDPEPPGTPEMQAPVASRRKPPSAFREWRLLGPFRRPTTQLRAKVSSLSHKIRAGGAQRAEAACAQRSEVEAVSLGVPHEVAEGATCQAYELADYSNLRETDI

SEQ ID NO: 914470 - protein, 591 aa, Homo sapiens
PCRPLVLCPRPGHRRPRVEMTFRDLLSVSFEGPRPDSSAGGSSAGGGGGSAGGAAPSEGPAVGGVPGGAGGGGGVVGAGSGEDNRSSAGEPGSAGAGGDVNGTAAVGGLVVSAQGVGVGVFLAAFILMAVAGNLLVILSVACNRHLQTVTNYFIVNLAVADLLLSATVLPFSATMEVLGFWAFGRAFCDVWAAVDVLCCTASILSLCTISVDRYVGVRHSLKYPAIMTERKAAAILALLWVVALVVSVGPLLGWKEPVPPDERFCGITEEAGYAVFSSVCSFYLPMAVIVVMYCRVYVVARSTTRSLEAGVKRERGKASEVVLRIHCRGAATGADGAHGMRSAKGHTFRSSLSVRLLKFSREKKAAKTLAIVVGVFVLCWFPFFFVLPLGSLFPQLKPSEGVFKVIFWLGYFNSCVNPLIYPCSSREFKRAFLRLLRCQCRRRRRRRPLWRVYGHHWRASTSGLRQDCAPSSGDAPPGAPLALTALPDPDPEPPGTPEMQAPVASRRKPPSAFREWRLLGPFRRPTTQLRAKVSSLSHKIRAGGAQRAEAACAQRSEVEAVSLGVPHEVAEGATCQAYELADYSNLRETDI

SEQ ID NO: 914471 - protein, 236 aa, Homo sapiens [sequence omitted]

SEQ ID NO: 914472 - protein, 464 aa, Homo sapiens
MAVAGNLLVILSVACNRHLQTVTNYFIVNLAVADLLLSATVLPFSATMEVLGFWAFGRAFCDVWAAVDVLCCTASILSLCTISVDRYVGVRHSLKYPAIMTERKAAAILALLWVVALVVSVGPLLGWKEPVPPDERFCGITEEAGYAVFSSVCSFYLPMAVIVVMYCRVYVVARSTTRSLEAGVKRERGKASEVVLRIHCRGAATGADGAHGMRSAKGHTFRSSLSVRLLKFSREKKAAKTLAIVVGVFVLCWFPFFFVLPLGSLFPQLKPSEGVFKVIFWLGYFNSCVNPLIYPCSSREFKRAFLRLLRCQCRRRRRRRPLWRVYGHHWRASTSGLRQDCAPSSGDAPPGAPLALTALPDPDPEPPGTPEMQAPVASRRKPPSAFREWRLLGPFRRPTTQLRAKVSSLSHKIRAGGAQRAEAACAQRSEVEAVSLGVPHEVAEGATCQAYELADYSNLRETDI

SEQ ID NO: 914473 - protein, 1786 aa, Homo sapiens
MGLLQLLAFSFLALCRARVRAQEPEFSYGCAEGSCYPATGDLLIGRAQKLSVTSTCGLHKPEPYCIVSHLQEDKKCFICNSQDPYHETLNPDSHLIENVVTTFAPNRLKIWWQSENGVENVTIQLDLEAEFHFTHLIMTFKTFRPAAMLIERSSDFGKTWGVYRYFAYDCEASFPGISTGPMKKVDDIICDSRYSDIEPSTEGEVIFRALDPAFKIEDPYSPRIQNLLKITNLRIKFVKLHTLGDNLLDSRMEIREKYYYAVYDMVVRGNCFCYGHASECAPVDGFNEEVEGMVHGHCMCRHNTKGLNCELCMDFYHDLPWRPAEGRNSNACKKCNCNEHSISCHFDMAVYLATGNVSGGVCDDCQHNTMGRNCEQCKPFYYQHPERDIRDPNFCERCTCDPAGSQNEGICDSYTDFSTGLIAGQCRCKLNVEGEHCDVCKEGFYDLSSEDPFGCKSCACNPLGTIPGGNPCDSETGHCYCKRLVTGQHCDQCLPEHWGLSNDLDGCRPCDCDLGGALNNSCFAESGQCSCRPHMIGRQCNEVEPGYYFATLDHYLYEAEEANLGPGVSIVERQYIQDRIPSWTGAGFVRVPEGAYLEFFIDNIPYSMEYDILIRYEPQLPDHWEKAVITVQRPGRIPTSSRCGNTIPDDDNQVVSLSPGSRYVVLPRPVCFEKGTNYTVRLELPQYTSSDSDVESPYTLIDSLVLMPYCKSLDIFTVGGSGDGVVTNSAWETFQRYRCLENSRSVVKTPMTDVCRNIIFSISALLHQTGLACECDPQGSLSSVCDPNGGQCQCRPNVVGRTCNRCAPGTFGFGPSGCKPCECHLQGSVNAFCNPVTGQCHCFQGVYARQCDRCLPGHWGFPSCQPCQCNGHADDCDPVTGECLNCQDYTMGHNCERCLAGYYGDPIIGSGDHCRPCPCPDGPDSGRQFARSCYQDPVTLQLACVCDPGYIGSRCDDCASGYFGNPSEVGGSCQPCQCHNNIDTTDPEACDKETGRCLKCLYHTEGEHCQFCRFGYYGDALRQDCRKCVCNYLGTVQEHCNGSDCQCDKATGQCLCLPNVIGQNCDRCAPNTWQLASGTGCDPCNCNAAHSFGPSCNEFTGQCQCMPGFGGRTCSECQELFWGDPDVECRACDCDPRGIETPQCDQSTGQCVCVEGVEGPRCDKCTRGYSGVFPDCTPCHQCFALWDVIIAELTNRTHRFLEKAKALKISGVIGPYRETVDSVERKVSEIKDILAQSPAAEPLKNIGNLFEEAEKLIKDVTEMMAQVEVKLSDTTSQSNSTAKELDSLQTEAESLDNTVKELAEQLEFIKNSDIRGALDSITKYFQMSLEAEERVNASTTEPNSTVEQSALMRDRVEDVMMERESQFKEKQEEQARLLDELAGKLQSLDLSAAAEMTCGTPPGASCSETECGGPNCRTDEGERKCGGPGCGGLVTVAHNAWQKAMDLDQDVLSALAEVEQLSKMVSEAKLRADEAKQSAEDILLKTNATKEKMDKSNEELRNLIKQIRNFLTQDSADLDSIEAVANEVLKMEMPSTPQQLQNLTEDIRERVESLSQVEVILQHSAADIARAEMLLEEAKRASKSATDVKVTADMVKEALEEAEKAQVAAEKAIKQADEDIQGTQNLLTSIESETAASEETLFNASQRISELERNVEELKRKAAQNSGEAEYIEKVVYTVKQSAEDVKKTLDGELDEKYKKVENLIAKKTEESADARRKAEMLQNEAKTLLAQANSKLQLLKDLERKYEDNQRYLEDKAQELARLEGEVRSLLKDISQKVAVYSTCL

SEQ ID NO: 914474 - protein, 217 aa, Homo sapiens
MTCGTPPGASCSETECGGPNCRTDEGERKCGGPGCGGLVTVAHNAWQKAMDLDQDVLSALAEVEQLSKMVSEAKLRADEAKQSAEDILLKTNATKEKMDKSNEELRNLIKQIRNFLTQDSADLDSIEAVANEVLKMEMPSTPQQLQNLTEDIRERVESLSQVEVILQHSAADIARAEMLLEEAKRASKVHRCKVSSRYDTGSSGRSRKHGRQQESGF

SEQ ID NO: 914475 - protein, 1475 aa, Homo sapiens
GGHEPRLLTHSSNSQTPSNACKKCNCNEHSISCHFDMAVYLATGNVSGGVCDDCQHNTMGRNCEQCKPFYYQHPERDIRDPNFCERCTCDPAGSQNEGICDSYTDFSTGLIAGQCRCKLNVEGEHCDVCKEGFYDLSSEDPFGCKSCACNPLGTIPGGNPCDSETGHCYCKRLVTGQHCDQCLPEHWGLSNDLDGCRPCDCDLGGALNNSCFAESGQCSCRPHMIGRQCNEVEPGYYFATLDHYLYEAEEANLGPGVSIVERQYIQDRIPSWTGAGFVRVPEGAYLEFFIDNIPYSMEYDILIRYEPQLPDHWEKAVITVQRPGRIPTSSRCGNTIPDDDNQVVSLSPGSRYVVLPRPVCFEKGTNYTVRLELPQYTSSDSDVESPYTLIDSLVLMPYCKSLDIFTVGGSGDGVVTNSAWETFQRYRCLENSRSVVKTPMTDVCRNIIFSISALLHQTGLACECDPQGSLSSVCDPNGGQCQCRPNVVGRTCNRCAPGTFGFGPSGCKPCECHLQGSVNAFCNPVTGQCHCFQGVYARQCDRCLPGHWGFPSCQPCQCNGHADDCDPVTGECLNCQDYTMGHNCERCLAGYYGDPIIGSGDHCRPCPCPDGPDSGRQFARSCYQDPVTLQLACVCDPGYIGSRCDDCASGYFGNPSEVGGSCQPCQCHNNIDTTDPEACDKETGRCLKCLYHTEGEHCQFCRFGYYGDALRQDCRKCVCNYLGTVQEHCNGSDCQCDKATGQCLCLPNVIGQNCDRCAPNTWQLASGTGCDPCNCNAAHSFGPSCNEFTGQCQCMPGFGGRTCSECQELFWGDPDVECRACDCDPRGIETPQCDQSTGQCVCVEGVEGPRCDKCTRGYSGVFPDCTPCHQCFALWDVIIAELTNRTHRFLEKAKALKISGVIGPYRETVDSVERKVSEIKDILAQSPAAEPLKNIGNLFEEAEKLIKDVTEMMAQVEVKLSDTTSQSNSTAKELDSLQTEAESLDNTVKELAEQLEFIKNSDIRGALDSITKYFQMSLEAEERVNASTTEPNSTVEQSALMRDRVEDVMMERESQFKEKQEEQARLLDELAGKLQSLDLSAAAEMTCGTPPGASCSETECGGPNCRTDEGERKCGGPGCGGLVTVAHNAWQKAMDLDQDVLSALAEVEQLSKMVSEAKLRADEAKQSAEDILLKTNATKEKMDKSNEELRNLIKQIRNFLTQDSADLDSIEAVANEVLKMEMPSTPQQLQNLTEDIRERVESLSQVEVILQHSAADIARAEMLLEEAKRASKSATDVKVTADMVKEALEEAEKAQVAAEKAIKQADEDIQGTQNLLTSIESETAASEETLFNASQRISELERNVEELKRKAAQNSGEAEYIEKVVYTVKQSAEDVKKTLDGELDEKYKKVENLIAKKTEESADARRKAEMLQNEAKTLLAQANSKLQLLKDLERKYEDNQRYLEDKAQELARLEGEVRSLLKDISQKVAVYSTCL

SEQ ID NO: 914476 - protein, 1159 aa, Homo sapiens
MADDGGVHPPGQGLLGQQDGHHTLRAAVPIPRCVEGLAGALGAEHPQPQNYTVRLELPQYTSSDSDVESPYTLIDSLVLMPYCKSLDIFTVGGSGDGVVTNSAWETFQRYRCLENSRSVVKTPMTDVCRNIIFSISALLHQTGLACECDPQGSLSSVCDPNGGQCQCRPNVVGRTCNRCAPGTFGFGPSGCKPCECHLQGSVNAFCNPVTGQCHCFQGVYARQCDRCLPGHWGFPSCQPCQCNGHADDCDPVTGECLNCQDYTMGHNCERCLAGYYGDPIIGSGDHCRPCPCPDGPDSGRQFARSCYQDPVTLQLACVCDPGYIGSRCDDCASGYFGNPSEVGGSCQPCQCHNNIDTTDPEACDKETGRCLKCLYHTEGEHCQFCRFGYYGDALRQDCRKCVCNYLGTVQEHCNGSDCQCDKATGQCLCLPNVIGQNCDRCAPNTWQLASGTGCDPCNCNAAHSFGPSCNEFTGQCQCMPGFGGRTCSECQELFWGDPDVECRACDCDPRGIETPQCDQSTGQCVCVEGVEGPRCDKCTRGYSGVFPDCTPCHQCFALWDVIIAELTNRTHRFLEKAKALKISGVIGPYRETVDSVERKVSEIKDILAQSPAAEPLKNIGNLFEEAEKLIKDVTEMMAQVEVKLSDTTSQSNSTAKELDSLQTEAESLDNTVKELAEQLEFIKNSDIRGALDSITKYFQMSLEAEERVNASTTEPNSTVEQSALMRDRVEDVMMERESQFKEKQEEQARLLDELAGKLQSLDLSAAAEMTCGTPPGASCSETECGGPNCRTDEGERKCGGPGCGGLVTVAHNAWQKAMDLDQDVLSALAEVEQLSKMVSEAKLRADEAKQSAEDILLKTNATKEKMDKSNEELRNLIKQIRNFLTQDSADLDSIEAVANEVLKMEMPSTPQQLQNLTEDIRERVESLSQVEVILQHSAADIARAEMLLEEAKRASKSATDVKVTADMVKEALEEAEKAQVAAEKAIKQADEDIQGTQNLLTSIESETAASEETLFNASQRISELERNVEELKRKAAQNSGEAEYIEKVVYTVKQSAEDVKKTLDGELDEKYKKVENLIAKKTEESADARRKAEMLQNEAKTLLAQANSKLQLLKDLERKYEDNQRYLEDKAQELARLEGEVRSLLKDISQKVAVYSTCL

SEQ ID NO: 914477 - protein, 1786 aa, Homo sapiens; identical to SEQ ID NO: 914473

SEQ ID NO: 914478 - protein, 1786 aa, Homo sapiens; identical to SEQ ID NO: 914473

SEQ ID NO: 914479 - protein, 662 aa, Homo sapiens
MAYSLLACDCDPRGIETPQCDQSTGQCVCVEGVEGPRCDKCTRGYSGVFPDCTPCHQCFALWDVIIAELTNRTHRFLEKAKALKISGVIGPYRETVDSVERKVSEIKDILAQSPAAEPLKNIGNLFEEAEKLIKDVTEMMAQVEVKLSDTTSQSNSTAKELDSLQTEAESLDNTVKELAEQLEFIKNSDIRGALDSITKYFQMSLEAEERVNASTTEPNSTVEQSALMRDRVEDVMMERESQFKEKQEEQARLLDELAGKLQSLDLSAAAEMTCGTPPGASCSETECGGPNCRTDEGERKCGGPGCGGLVTVAHNAWQKAMDLDQDVLSALAEVEQLSKMVSEAKLRADEAKQSAEDILLKTNATKEKMDKSNEELRNLIKQIRNFLTQDSADLDSIEAVANEVLKMEMPSTPQQLQNLTEDIRERVESLSQVEVILQHSAADIARAEMLLEEAKRASKSATDVKVTADMVKEALEEAEKAQVAAEKAIKQADEDIQGTQNLLTSIESETAASEETLFNASQRISELERNVEELKRKAAQNSGEAEYIEKVVYTVKQSAEDVKKTLDGELDEKYKKVENLIAKKTEESADARRKAEMLQNEAKTLLAQANSKLQLLKDLERKYEDNQRYLEDKAQELARLEGEVRSLLKDISQKVAVYSTCL

SEQ ID NO: 914480 - protein, 1758 aa, Homo sapiens
MGLLQLLAFSFLALCRARVRAQEPEFSYGCAEGSCYPATGDLLIGRAQKLSVTSTCGLHKPEPYCIVSHLQEDKKCFICNSQDPYHETLNPDSHLIENVVTTFAPNRLKIWWQSENGVENVTIQLDLEAEFHFTHLIMTFKTFRPAAMLIERSSDFGKTWGVYRYFAYDCEASFPGISTGPMKKVDDIICDSRYSDIEPSTEGEVIFRALDPAFKIEDPYSPRIQNLLKITNLRIKFVKLHTLGDNLLDSRMEIREKYYYAVYDMVVRGNCFCYGHASECAPVDGFNEEVEGMVHGHCMCRHNTKGLNCELCMDFYHDLPWRPAEGRNSNACKKCNCNEHSISCHFDMAVYLATGNVSGGVCDDCQHNTMGRNCEQCKPFYYQHPERDIRDPNFCERCTCDPAGSQNEGICDSYTDFSTGLIAGQCRCKLNVEGEHCDVCKEGFYDLSSEDPFGCKSCACNPLGTIPGGNPCDSETGHCYCKRLVTGQHCDQCLPEHWGLSNDLDGCRPCDCDLGGALNNSCFAESGQCSCRPHMIGRQCNEVEPGYYFATLDHYLYEAEEANLGPGVSIVERQYIQDRIPSWTGAGFVRVPEGAYLEFFIDNIPYSMEYDILIRYEPQLPDHWEKAVITVQRPGRIPTSSRCGNTIPDDDNQVVSLSPGSRYVVLPRPVCFEKGTNYTVRLELPQYTSSDSDVESPYTLIDSLVLMPYCKSLDIFTVGGSGDGVVTNSAWETFQRYRCLENSRSVVKTPMTDVCRNIIFSISALLHQTGLACECDPQGSLSSVCDPNGGQCQCRPNVVGRTCNRCAPGTFGFGPSGCKPCECHLQGSVNAFCNPVTGQCHCFQGVYARQCDRCLPGHWGFPSCQPCQCNGHADDCDPVTGECLNCQDYTMGHNCERCLAGYYGDPIIGSGDHCRPCPCPDGPDSGRQFARSCYQDPVTLQLACVCDPGYIGSRCDDCASGYFGNPSEVGGSCQPCQCHNNIDTTDPEACDKETGRCLKCLYHTEGEHCQFCRFGYYGDALRQDCRKCVCNYLGTVQEHCNGSDCQCDKATGQCLCLPNVIGQNCDRCAPNTWQLASGTGCDPCNCNAAHSFGPSCNEFTGQCQCMPGFGGRTCSECQELFWGDPDVECRACDCDPRGIETPQCDQSTGQCVCVEGVEGPRCDKCTRGYSGVFPDCTPCHQCFALWDVIIAELTNRTHRFLEKAKALKISGVIGPYRETVDSVERKVSEIKDILAQSPAAEPLKNIGNLFEEAEKLIKDVTEMMAQVEVKLSDTTSQSNSTAKELDSLQTEAESLDNTVKELAEQLEFIKNSDIRGALDSITKYFQMSLEAEERVNASTTEPNSTVEQSALMRDRVEDVMMERESQFKEKQEEQARLLDELAGKLQSLDLSAAAEMTCGTPPGASCSETECGGPNCRTDEGERKCGGPGCGGLVTVAHNAWQKAMDLDQDVLSALAEVEQLSKMVSEAKLRADEAKQSAEDILLKTNATKEKMDKSNEELRNLIKQIRNFLTQDSADLDSIEAVANEVLKMEMPSTPQQLQNLTEDIRERVESLSQVEVILQHSAADIARAEMLLEEAKRASKSATDVKVTADMVKEALEEAEKAQVAAEKAIKQADEDIQGTQNLLTSIESETAASEETLFNASQRISELERNVEELKRKAAQNSGEAEYIEKVVYTVKQSAEDVKKTSQWCTVWHSLHLDNFCPKRESCAQEPSAQIETTFLTMSAGPIRDSPPTKPHKEERRPDTTVYFQEDART

SEQ ID NO: 914481 - protein, 1746 aa, Homo sapiens
  misc_feature (1663)..(1663): Xaa can be any naturally occurring amino acid
  misc_feature (1668)..(1668): Xaa can be any naturally occurring amino acid
  misc_feature (1674)..(1674): Xaa can be any naturally occurring amino acid
  misc_feature (1681)..(1681): Xaa can be any naturally occurring amino acid
  misc_feature (1689)..(1690): Xaa can be any naturally occurring amino acid
  misc_feature (1694)..(1694): Xaa can be any naturally occurring amino acid
  misc_feature (1698)..(1698): Xaa can be any naturally occurring amino acid
  misc_feature (1701)..(1702): Xaa can be any naturally occurring amino acid
  misc_feature (1704)..(1705): Xaa can be any naturally occurring amino acid
  misc_feature (1710)..(1711): Xaa can be any naturally occurring amino acid
  misc_feature (1717)..(1717): Xaa can be any naturally occurring amino acid
  misc_feature (1719)..(1719): Xaa can be any naturally occurring amino acid
  misc_feature (1722)..(1722): Xaa can be any naturally occurring amino acid
  misc_feature (1725)..(1725): Xaa can be any naturally occurring amino acid
  misc_feature (1731)..(1731): Xaa can be any naturally occurring amino acid
  misc_feature (1733)..(1733): Xaa can be any naturally occurring amino acid
  misc_feature (1737)..(1737): Xaa can be any naturally occurring amino acid
  misc_feature (1740)..(1740): Xaa can be any naturally occurring amino acid
MGLLQLLAFSFLALCRARVRAQEPEFSYGCAEGSCYPATGDLLIGRAQKLSVTSTCGLHKPEPYCIVSHLQEDKKCFICNSQDPYHETLNPDSHLIENVVTTFAPNRLKIWWQSENGVENVTIQLDLEAEFHFTHLIMTFKTFRPAAMLIERSSDFGKTWGVYRYFAYDCEASFPGISTGPMKKVDDIICDSRYSDIEPSTEGEVIFRALDPAFKIEDPYSPRIQNLLKITNLRIKFVKLHTLGDNLLDSRMEIREKYYYAVYDMVVRGNCFCYGHASECAPVDGFNEEVEGMVHGHCMCRHNTKGLNCELCMDFYHDLPWRPAEGRNSNACKKCNCNEHSISCHFDMAVYLATGNVSGGVCDDCQHNTMGRNCEQCKPFYYQHPERDIRDPNFCERCTCDPAGSQNEGICDSYTDFSTGLIAGQCRCKLNVEGEHCDVCKEGFYDLSSEDPFGCKSCACNPLGTIPGGNPCDSETGHCYCKRLVTGQHCDQCLPEHWGLSNDLDGCRPCDCDLGGALNNSCFAESGQCSCRPHMIGRQCNEVEPGYYFATLDHYLYEAEEANLGPGVSIVERQYIQDRIPSWTGAGFVRVPEGAYLEFFIDNIPYSMEYDILIRYEPQLPDHWEKAVITVQRPGRIPTSSRCGNTIPDDDNQVVSLSPGSRYVVLPRPVCFEKGTNYTVRLELPQYTSSDSDVESPYTLIDSLVLMPYCKSLDIFTVGGSGDGVVTNSAWETFQRYRCLENSRSVVKTPMTDVCRNIIFSISALLHQTGLACECDPQGSLSSVCDPNGGQCQCRPNVVGRTCNRCAPGTFGFGPSGCKPCECHLQGSVNAFCNPVTGQCHCFQGVYARQCDRCLPGHWGFPSCQPCQCNGHADDCDPVTGECLNCQDYTMGHNCERCLAGYYGDPIIGSGDHCRPCPCPDGPDSGRQFARSCYQDPVTLQLACVCDPGYIGSRCDDCASGYFGNPSEVGGSCQPCQCHNNIDTTDPEACDKETGRCLKCLYHTEGEHCQFCRFGYYGDALRQDCRKCVCNYLGTVQEHCNGSDCQCDKATGQCLCLPNVIGQNCDRCAPNTWQLASGTGCDPCNCNAAHSFGPSCNEFTGQCQCMPGFGGRTCSECQELFWGDPDVECRACDCDPRGIETPQCDQSTGQCVCVEGVEGPRCDKCTRGYSGVFPDCTPCHQCFALWDVIIAELTNRTHRFLEKAKALKISGVIGPYRETVDSVERKVSEIKDILAQSPAAEPLKNIGNLFEEAEKLIKDVTEMMAQVEVKLSDTTSQSNSTAKELDSLQTEAESLDNTVKELAEQLEFIKNSDIRGALDSITKYFQMSLEAEERVNASTTEPNSTVEQSALMRDRVEDVMMERESQFKEKQEEQARLLDELAGKLQSLDLSAAAEMTCGTPPGASCSETECGGPNCRTDEGERKCGGPGCGGLVTVAHNAWQKAMDLDQDVLSALAEVEQLSKMVSEAKLRADEAKQSAEDILLKTNATKEKMDKSNEELRNLIKQIRNFLTQDSADLDSIEAVANEVLKMEMPSTPQQLQNLTEDIRERVESLSQVEVILQHSAADIARAEMLLEEAKRASKSATDVKVTADMVKEALEEAEKAQVAAEKAIKQADEDIQGTQNLLTSIESETAASEETLFNASQRISELERNVEELKRGAXGGSGXAEFIGXVVYTVRXSAGGVGGXXGGGXGGGXGGXXHXXPPHTXXSAAPRXPXPLXPPXPPPLFXHXHRPXPLXKFRKKI

SEQ ID NO: 914482 - protein, 573 aa, Homo sapiens
MAYSLLACDCDPRGIETPQCDQSTGQCVCVEGVEGPRCDKCTRGYSGVFPDCTPCHQCFALWDVIIAELTNRTHRFLEKAKALKISGVIGPYRETVDSVERKVSEIKDILAQSPAAEPLKNIGNLFEEAEKLIKDVTEMMAQVEVKLSDTKSQFKEKQEEQARLLDELAGKLQSLDLSAAAEMTCGTPPGASCSETECGGPNCRTDEGERKCGGPGCGGLVTVAHNAWQKAMDLDQDVLSALAEVEQLSKMVSEAKLRADEAKQSAEDILLKTNATKEKMDKSNEELRNLIKQIRNFLTQDSADLDSIEAVANEVLKMEMPSTPQQLQNLTEDIRERVESLSQVEVILQHSAADIARAEMLLEEAKRASKSATDVKVTADMVKEALEEAEKAQVAAEKAIKQADEDIQGTQNLLTSIESETAASEETLFNASQRISELERNVEELKRKAAQNSGEAEYIEKVVYTVKQSAEDVKKTLDGELDEKYKKVENLIAKKTEESADARRKAEMLQNEAKTLLAQANSKLQLLKDLERKYEDNQRYLEDKAQELARLEGEVRSLLKDISQKVAVYSTCL

SEQ ID NO: 914483 - protein, 1070 aa, Homo sapiens
MGLLQLLAFSFLALCRARVRAQEPEFSYGCAEGSCYPATGDLLIGRAQKLSVTSTCGLHKPEPYCIVSHLQEDKKCFICNSQDPYHETLNPDSHLIENVVTTFAPNRLKIWWQSENGVENVTIQLDLEAEFHFTHLIMTFKTFRPAAMLIERSSDFGKTWGVYRYFAYDCEASFPGISTGPMKKVDDIICDSRYSDIEPSTEGEVIFRALDPAFKIEDPYSPRIQNLLKITNLRIKFVKLHTLGDNLLDSRMEIREKYYYAVYDMVVRGNCFCYGHASECAPVDGFNEEVEGMVHGHCMCRHNTKGLNCELCMDFYHDLPWRPAEGRNSNACKKCNCNEHSISCHFDMAVYLATGNVSGGVCDDCQHNTMGRNCEQCKPFYYQHPERDIRDPNFCERCTCDPAGSQNEGICDSYTDFSTGLIAGQCRCKLNVEGEHCDVCKEGFYDLSSEDPFGCKSCACNPLGTIPGGNPCDSETGHCYCKRLVTGQHCDQCLPEHWGLSNDLDGCRPCDCDLGGALNNSCFAESGQCSCRPHMIGRQCNEVEPGYYFATLDHYLYEAEEANLGPGVSIVERQYIQDRIPSWTGAGFVRVPEGAYLEFFIDNIPYSMEYDILIRYEPQLPDHWEKAVITVQRPGRIPTSSRCGNTIPDDDNQVVSLSPGSRYVVLPRPVCFEKGTNYTVRLELPQYTSCSETECGGPNCRTDEGERKCGGPGCGGLVTVAHNAWQKAMDLDQDVLSALAEVEQLSKMVSEAKLRADEAKQSAEDILLKTNATKEKMDKSNEELRNLIKQIRNFLTQDSADLDSIEAVANEVLKMEMPSTPQQLQNLTEDIRERVESLSQVEVILQHSAADIARAEMLLEEAKRASKSATDVKVTADMVKEALEEAEKAQVAAEKAIKQADEDIQGTQNLLTSIESETAASEETLFNASQRISELERNVEELKRKAAQNSGEAEYIEKVVYTVKQSAEDVKKTLDGELDEKYKKVENLIAKKTEESADARRKAEMLQNEAKTLLAQANSKLQLLKDLERKYEDNQRYLEDKAQELARLEGEVRSLLKDISQKVAVYSTCL

SEQ ID NO: 914484 - protein, 333 aa, Homo sapiens
DSAGSFKLSLMVSEAKLRADEAKQSAEDILLKTNATKEKMDKSNEELRNLIKQIRNFLTQDSADLDSIEAVANEVLKMEMPSTPQQLQNLTEDIRERVESLSQVEVILQHSAADIARAEMLLEEAKRASKSATDVKVTADMVKEALEEAEKAQVAAEKAIKQADEDIQGTQNLLTSIESETAASEETLFNASQRISELERNVEELKRKAAQNSGEAEYIEKVVYTVKQSAEDVKKTLDGELDEKYKKVENLIAKKTEESADARRKAEMLQNEAKTLLAQANSKLQLLKDLERKYEDNQRYLEDKAQELARLEGEVRSLLKDISQKVAVYSTCL

SEQ ID NO: 914485 - protein, 256 aa, Homo sapiens
MEMPSTPQQLQNLTEDIRERVESLSQVEVILQHSAADIARAEMLLEEAKRASKSATDVKVTADMVKEALEEAEKAQVAAEKAIKQADEDIQGTQNLLTSIESETAASEETLFNASQRISELERNVEELKRKAAQNSGEAEYIEKVVYTVKQSAEDVKKTLDGELDEKYKKVENLIAKKTEESADARRKAEMLQNEAKTLLAQANSKLQLLKDLERKYEDNQRYLEDKAQELARLEGEVRSLLKDISQKVAVYSTCL

SEQ ID NO: 914486 - protein, 269 aa, Homo sapiens
MASKGLILCIYHGVKSISLTNETSKKDLCESLWVISGRLFFKEKNTESTFFMFSNNILSHYFLLSKSATDVKVTADMVKEALEEAEKAQVAAEKAIKQADEDIQGTQNLLTSIESETAASEETLFNASQRISELERNVEELKRKAAQNSGEAEYIEKVVYTVKQSAEDVKKTLDGELDEKYKKVENLIAKKTEESADARRKAEMLQNEAKTLLAQANSKLQLLKDLERKYEDNQRYLEDKAQELARLEGEVRSLLKDISQKVAVYSTCL

SEQ ID NO: 914487 - protein, 283 aa, Homo sapiens
SIFNTSLATSFNAVQISIEAVANEVLKMEMPSTPQQLQNLTEDIRERVESLSQVEVILQHSAADIARAEMLLEEAKRASKSATDVKVTADMVKEALEEAEKAQVAAEKAIKQADEDIQGTQNLLTSIESETAASEETLFNASQRISELERNVEELKRKAAQNSGEAEYIEKVVYTVKQSAEDVKKTLDGELDEKYKKVENLIAKKTEESADARRKAEMLQNEAKTLLAQANSKLQLLKDLERKYEDNQRYLEDKAQELARLEGEVRSLLKDISQKVAVYSTCL

SEQ ID NO: 914488 - protein, 1413 aa, Homo sapiens
MGLLQLLAFSFLALCRARVRAQEPEFSYGCAEGSCYPATGDLLIGRAQKLSVTSTCGLHKPEPYCIVSHLQEDKKCFICNSQDPYHETLNPDSHLIENVVTTFAPNRLKIWWQSENGVENVTIQLDLEAEFHFTHLIMTFKTFRPAAMLIERSSDFGKTWGVYRYFAYDCEASFPGISTGPMKKVDDIICDSRYSDIEPSTEGEVIFRALDPAFKIEDPYSPRIQNLLKITNLRIKFVKLHTLGDNLLDSRMEIREKYYYAVYDMVVRGNCFCYGHASECAPVDGFNEEVEGMVHGHCMCRHNTKGLNCELCMDFYHDLPWRPAEGRNSNACKKCNCNEHSISCHFDMAVYLATGNVSGGVCDDCQHNTMGRNCEQCKPFYYQHPERDIRDPNFCERCTCDPAGSQNEGICDSYTDFSTGLIAGQCRCKLNVEGEHCDVCKEGFYDLSSEDPFGCKSCACNPLGTIPGGNPCDSETGHCYCKRLVTGQHCDQCLPEHWGLSNDLDGCRPCDCDLGGALNNSCFAESGQCSCRPHMIGRQCNEVEPGYYFATLDHYLYEAEEANLGPGVSIVERQYIQDRIPSWTGAGFVRVPEGAYLEFFIDNIPYSMEYDILIRYEPQLPDHWEKAVITVQRPGRIPTSSRCGNTIPDDDNQVVSLSPGSRYVVLPRPVCFEKGTNYTVRLELPQYTSSDSDVESPYTLIDSLVLMPYCKSLDIFTVGGSGDGVVTNSAWETFQRYRCLENSRSVVKTPMTDVCRNIIFSISALLHQTGLACECDPQGSLSSVCDPNGGQCQCRPNVVGRTCNRCAPGTFGFGPSGCKPCECHLQGSVNAFCNPVTGQCHCFQGVYARQCDRCLPGHWGFPSCQPCQCNGHADDCDPVTGECLNCQDYTMGHNCERCLAGYYGDPIIGSGDHCRPCPCPDGPDSGRQFARSCYQDPVTLQLACVCDPGYIGSRCDDCASGYFGNPSEVGGSCQPCQCHNNIDTTDPEACDKETGRCLKCLYHTEGEHCQFCRFGYYGDALRQDCRKCVCNYLGTVQEHCNGSDCQCDKATGQCLCLPNVIGQNCDRCAPNTWQLASGTGCDPCNCNAAHSFGPSCNEFTGQCQCMPGFGGRTCSECQELFWGDPDVECRACDCDPRGIETPQCDQSTGQCVCVEGVEGPRCDKCTRGYSGVFPDCTPCHQCFALWDVIIAELTNRTHRFLEKAKALKISGVIGPYRETVDSVERKVSEIKDILAQSPAAEPLKNIGNLFEEAEKLIKDVTEMMAQVEVKLSDTTSQSNSTAKELDSLQTEAESLDNTVKELAEQLEFIKNSDIRGALDSITKYFQMSLEAEERVNASTTEPNSTVEQSALMRDRVEDVMMERESQFKEKQEEQARLLDELAGKLQSLDLSAAAEMVRFGDVALLLWCQAKKK

SEQ ID NO: 914489 - protein, 1138 aa, Homo sapiens
MGLLQLLAFSFLALCRARVRAQEPEFSYGCAEGSCYPATGDLLIGRAQKLSVTSTCGLHKPEPYCIVSHLQEDKKCFICNSQDPYHETLNPDSHLIENVVTTFAPNRLKIWWQSENGVENVTIQLDLEAEFHFTHLIMTFKTFRPAAMLIERSSDFGKTWGVYRYFAYDCEASFPGISTGPMKKVDDIICDSRYSDIEPSTEGEVIFRALDPAFKIEDPYSPRIQNLLKITNLRIKFVKLHTLGDNLLDSRMEIREKYYYAVYDMVVRGNCFCYGHASECAPVDGFNEEVEGMVHGHCMCRHNTKGLNCELCMDFYHDLPWRPAEGRNSNACKKCNCNEHSISCHFDMAVYLATGNVSGGVCDDCQHNTMGRNCEQCKPFYYQHPERDIRDPNFCERCTCDPAGSQNEGICDSYTDFSTGLIAGQCRCKLNVEGEHCDVCKEGFYDLSSEDPFGCKSCACNPLGTIPGGNPCDSETGHCYCKRLVTGQHCDQCLPEHWGLSNDLDGCRPCDCDLGGALNNSCFAESGQCSCRPHMIGRQCNEVEPGYYFATLDHYLYEAEEANLGPGVSIVERQYIQDRIPSWTGAGFVRVPEGAYLEFFIDNIPYSMEYDILIRYEPQLPDHWEKAVITVQRPGRIPTSSRCGNTIPDDDNQVVSLSPGSRYVVLPRPVCFEKGTNYTVRLELPQYTSSDSDVESPYTLIDSLVLMPYCKSLDIFTVGGSGDGVVTNSAWETFQRYRCLENSRSVVKTPMTDVCRNIIFSISALLHQTGLACECDPQGSLSSVCDPNGGQCQCRPNVVGRTCNRCAPGTFGFGPSGCKPCECHLQGSVNAFCNPVTGQCHCFQGVYARQCDRCLPGHWGFPSCQPCQCNGHADDCDPVTGECLNCQDYTMGHNCERCLAGYYGDPIIGSGDHCRPCPCPDGPDSGRQFARSCYQDPVTLQLACVCDPGYIGSRCDDCASGYFGNPSEVGGSCQPCQCHNNIDTTDPEACDKETGRCLKCLYHTEGEHCQFCRFGYYGDALRQDCRKCVCNYLGTVQEHCNGSDCQCDKATGQCLCLPNVIGQNCDRCAPNTWQLASGTGCDPCNCNAAHSFGPSCNEFTGQCQCMPGFGGRTCSECQELFWGDPDVECRGELWAFSH

SEQ ID NO: 914490 - protein, 305 aa, Homo sapiens
MTRPPQFIEKKESAKKRDDLIYKNDGEETRNKTKTKTGEKEDKKRGDIREKKKTNKRGGGGKKTYRAKQQPKERNNKTTTTETKTKQNNTEQTQKVKQKTQKQKRRRRRKEKSKSTSTRREINRSNSTQQPLSTTSGGGPNNRTRHKQHDRTTHHATTPRRKNTTDHNNTTTPDHDKTKNKQQRKREDEKERGKRRNRNERAKEKTGKARGRQKERRERKKTQTKREKERRRKREKEERHSDHTRRQREEKRRQETEEKEKTKTKTGQHGQSGEKRKKQKENKRKQKRGEAGRTAEKKKDGRKET

SEQ ID NO: 914491 - protein, 142 aa, Homo sapiens
MDCPLSAPTPPPPLVRFFRAPLPACVPPTLLPVLPAALCRARVRAQEPEFSYGCAEGSCYPATGDLLIGRAQKLSVTSTCGLHKPEPYCIVSHLQVRAESGVRGSASASSRPDLRGRPWGLRILPAIQIGSAASRGVPGLGL

SEQ ID NO: 914492 - protein, 205 aa, Homo sapiens
DSAGSFKLSLMVSEAKLRADEAKQSAEDILLKTNATKEKMDKSNEELRNLIKQIRNFLTQDSADLDSIEAVANEVLKMEMPSTPQQLQNLTEDIRERVESLSQVEVILQHSAADIARAEMLLEEAKRASKSATDVKVTADMVKEALEEAEKAQVAAEKAIKQADEDIQGTQNLLTSIESETAASEETLFNASQRISESCRYRLDS

SEQ ID NO: 914493 - protein, 1709 aa, Homo sapiens
MGLLQLLAFSFLALCRARVRAQEPEFSYGCAEGSCYPATGDLLIGRAQKLSVTSTCGLHKPEPYCIVSHLQEDKKCFICNSQDPYHETLNPDSHLIENVVTTFAPNRLKIWWQSENGVENVTIQLDLEAEFHFTHLIMTFKTFRPAAMLIERSSDFGKTWGVYRYFAYDCEASFPGISTGPMKKVDDIICDSRYSDIEPSTEGEVIFRALDPAFKIEDPYSPRIQNLLKITNLRIKFVKLHTLGDNLLDSRMEIREKYYYAVYDMVVRGNCFCYGHASECAPVDGFNEEVEGMVHGHCMCRHNTKGLNCELCMDFYHDLPWRPAEGRNSNACKKCNCNEHSISCHFDMAVYLATGNVSGGVCDDCQHNTMGRNCEQCKPFYYQHPERDIRDPNFCERCTCDPAGSQNEGICDSYTDFSTGLIAGQCRCKLNVEGEHCDVCKEGFYDLSSEDPFGCKSCACNPLGTIPGGNPCDSETGHCYCKRLVTGQHCDQCLPEHWGLSNDLDGCRPCDCDLGGALNNSCFAESGQCSCRPHMIGRQCNEVEPGYYFATLDHYLYEAEEANLGPGVSIVERQYIQDRIPSWTGAGFVRVPEGAYLEFFIDNIPYSMEYDILIRYEPQLPDHWEKAVITVQRPGRIPTSSRCGNTIPDDDNQVVSLSPGSRYVVLPRPVCFEKGTNYTVRLELPQYTSSDSDVESPYTLIDSLVLMPYCKSLDIFTVGGSGDGVVTNSAWETFQRYRCLENSRSVVKTPMTDVCRNIIFSISALLHQTGLACECDPQGSLSSVCDPNGGQCQCRPNVVGRTCNRCAPGTFGFGPSGCKRAWLVTMATPSLGQEITAALALAQMVPTVDASLPGAATKILLLYSYACVCDPGYIGSRCDDCASGYFGNPSEVGGSCQPCQCHNNIDTTDPEACDKETGRCLKCLYHTEGEHCQFCRFGYYGDALRQDCRKCVCNYLGTVQEHCNGSDCQCDKATGQCLCLPNVIGQNCDRCAPNTWQLASGTGCDPCNCNAAHSFGPSCNEFTGQCQCMPGFGGRTCSECQELFWGDPDVECRACDCDPRGIETPQCDQSTGQCVCVEGVEGPRCDKCTRGYSGVFPDCTPCHQCFALWDVIIAELTNRTHRFLEKAKALKISGVIGPYRETVDSVERKVSEIKDILAQSPAAEPLKNIGNLFEEAEKLIKDVTEMMAQVEVKLSDTTSQSNSTAKELDSLQTEAESLDNTVKELAEQLEFIKNSDIRGALDSITKYFQMSLEAEERVNASTTEPNSTVEQSALMRDRVEDVMMERESQFKEKQEEQARLLDELAGKLQSLDLSAAAEMTCGTPPGASCSETECGGPNCRTDEGERKCGGPGCGGLVTVAHNAWQKAMDLDQDVLSALAEVEQLSKMVSEAKLRADEAKQSAEDILLKTNATKEKMDKSNEELRNLIKQIRNFLTQDSADLDSIEAVANEVLKMEMPSTPQQLQNLTEDIRERVESLSQVEVILQHSAADIARAEMLLEEAKRASKSATDVKVTADMVKEALEEAEKAQVAAEKAIKQADEDIQGTQNLLTSIESETAASEETLFNASQRISELERNVEELKRKAAQNSGEAEYIEKVVYTVKQSAEDVKKTLDGELDEKYKKVENLIAKKTEESADARRKAEMLQNEAKTLLAQANSKLQLLKDLERKYEDNQRYLEDKAQELARLEGEVRSLLKDISQKVAVYSTCL

SEQ ID NO: 914494 - protein, 1786 aa, Homo sapiens; identical to SEQ ID NO: 914473

SEQ ID NO: 914495 - protein, 1786 aa, Homo sapiens; identical to SEQ ID NO: 914473

SEQ ID NO: 914496 - protein, 647 aa, Homo sapiens
TQLQRVQTMYQGASQETGEGPRCDKCTRGYSGVFPDCTPCHQCFALWDVIIAELTNRTHRFLEKAKALKISGVIGPYRETVDSVERKVSEIKDILAQSPAAEPLKNIGNLFEEAEKLIKDVTEMMAQVEVKLSDTTSQSNSTAKELDSLQTEAESLDNTVKELAEQLEFIKNSDIRGALDSITKYFQMSLEAEERVNASTTEPNSTVEQSALMRDRVEDVMMERESQFKEKQEEQARLLDELAGKLQSLDLSAAAEMTCGTPPGASCSETECGGPNCRTDEGERKCGGPGCGGLVTVAHNAWQKAMDLDQDVLSALAEVEQLSKMVSEAKLRADEAKQSAEDILLKTNATKEKMDKSNEELRNLIKQIRNFLTQDSADLDSIEAVANEVLKMEMPSTPQQLQNLTEDIRERVESLSQVEVILQHSAADIARAEMLLEEAKRASKSATDVKVTADMVKEALEEAEKAQVAAEKAIKQADEDIQGTQNLLTSIESETAASEETLFNASQRISELERNVEELKRKAAQNSGEAEYIEKVVYTVKQSAEDVKKTLDGELDEKYKKVENLIAKKTEESADARRKAEMLQNEAKTLLAQANSKLQLLKDLERKYEDNQRYLEDKAQELARLEGEVRSLLKDISQKVAVYSTCL

SEQ ID NO: 914497 - protein, 1855 aa, Homo sapiens
MGLLQLLAFSFLALCRARVRAQEPEFSYGCAEGSCYPATGDLLIGRAQKLSVTSTCGLHKPEPYCIVSHLQEDKKCFICNSQDPYHETLNPDSHLIENVVTTFAPNRLKIWWQSENGVENVTIQLDLEAEFHFTHLIMTFKTFRPAAMLIERSSDFGKTWGVYRYFAYDCEASFPGISTGPMKKVDDIICDSRYSDIEPSTEGEVIFRALDPAFKIEDPYSPRIQNLLKITNLRIKFVKLHTLGDNLLDSRMEIREKYYYAVYDMVVRGNCFCYGHASECAPVDGFNEEVEGMVHGHCMCRHNTKGLNCELCMDFYHDLPWRPAEGRNSNACKKCNCNEHSISCHFDMAVYLATGNVSGGVCDDCQHNTMGRNCEQCKPFYYQHPERDIRDPNFCERCTCDPAGSQNEGICDSYTDFSTGLIAGQCRCKLNVEGEHCDVCKEGFYDLSSEDPFGCKSCACNPLGTIPGGNPCDSETGHCYCKRLVTGQHCDQCLPEHWGLSNDLDGCRPCDCDLGGALNNSCFAESGQCSCRPHMIGRQCNEVEPGYYFATLDHYLYEAEEANLGPGVSIVERQYIQDRIPSWTGAGFVRVPEGAYLEFFIDNIPYSMEYDILIRYEPQLPDHWEKAVITVQRPGRIPTSSRCGNTIPDDDNQVVSLSPGSRYVVLPRPVCFEKGTNYTVRLELPQYTSSDSDVESPYTLIDSLVLMPYCKSLDIFTVGGSGDGVVTNSAWETFQRYRCLENSRSVVKTPMTDVCRNIIFSISALLHQTGLACECDPQGSLSSVCDPNGGQCQCRPNVVGRTCNRCAPGTFGFGPSGCKPCECHLQGSVNAFCNPVTGQCHCFQGVYARQCDRCLPGHWGFPSCQPCQCNGHADDCDPVTGECLNCQDYTMGHNCERCLAGYYGDPIIGSGDHCRPCPCPDGPDSGRQFARSCYQDPVTLQLACVCDPGYIGSRCDDCASGYFGNPSEVGGSCQPCQCHNNIDTTDPEACDKETGRCLKCLYHTEGEHCQFCRFGYYGDALRQDCRKCVCNYLGTVQEHCNGSDCQCDKATGQCLCLPNVIGQNCDRCAPNTWQLASGTGCDPCNCNAAHSFGPSCNEFTGQCQCMPGFGGRTCSECQELFWGDPDVECRACDCDPRGIETPQCDQSTGQCVCVEGVEGPRCDKCTRGYSGVFPDCTPCHQCFALWDVIIAELTNRTHRFLEKAKALKISGVIGPYRETVDSVERKVSEIKDILAQSPAAEPLKNIGNLFEEAEKLIKDVTEMMAQVEVKLSDTTSQSNSTAKELDSLQTEAESLDNTVKELAEQLEFIKNSDIRGALDSITKYFQMSLEAEERVNASTTEPNSTVEQSALMRDRVEDVMMERESQFKEKQEEQARLLDELAGKLQSLDLSAAAEMTCGTPPGASCSETECGGPNCRTDEGERKCGGPGCGGLVTVAHNAWQKAMDLDQDVLSALAEVEQLSKMVSEAKLRADEAKQSAEDILLKTNATKEKMDKSNEELRNLIKQIRNFLTQDSADLDSIEAVANEVLKMEMPSTPQQLQNLTEDIRERVESLSQVEVILQHSAADIARAEMLLEEAKRARYLKTWHLRGLFCVSIMEYKSISLTNETSKKDLCESLWVISGRLFFKEKNTESTFFMFSNNILSHYFLLSKSATDVKVTADMVKEALEEAEKAQVAAEKAIKQADEDIQGTQNLLTSIESETAASEETLFNASQRISELERNVEELKRKAAQNSGEAEYIEKVVYTVKQSAEDVKKTLDGELDEKYKKVENLIAKKTEESADARRKAEMLQNEAKTLLAQANSKLQLLKDLERKYEDNQRYLEDKAQELARLEGEVRSLLKDISQKVAVYSTCL

SEQ ID NO: 914498 - protein, 1658 aa, Homo sapiens
MGLLQLLAFSFLALCRARVRAQEPEFSYGCAEGSCYPATGDLLIGRAQKLSVTSTCGLHKPEPYCIVSHLQEDKKCFICNSQDPYHETLNPDSHLIENVVTTFAPNRLKIWWQSENGVENVTIQLDLEAEFHFTHLIMTFKTFRPAAMLIERSSDFGKTWGVYRYFAYDCEASFPGISTGPMKKVDDIICDSRYSDIEPSTEGEVIFRALDPAFKIEDPYSPRIQNLLKITNLRIKFVKLHTLGDNLLDSRMEIREKYYYAVYDMVVRGNCFCYGHASECAPVDGFNEEVEGMVHGHCMCRHNTKGLNCELCMDFYHDLPWRPAEGRNSNACKKCNCNEHSISCHFDMAVYLATGNVSGGVCDDCQHNTMGRNCEQCKPFYYQHPERDIRDPNFCERCTCDPAGSQNEGICDSYTDFSTGLIAGQCRCKLNVEGEHCDVCKEGFYDLSSEDPFGCKSCACNPLGTIPGGNPCDSETGHCYCKRLVTGQHCDQCLPEHWGLSNDLDGCRPCDCDLGGALNNSCFAESGQCSCRPHMIGRQCNEVEPGYYFATLDHYLYEAEEANLGPGVSIVERQYIQDRIPSWTGAGFVRVPEGAYLEFFIDNIPYSMEYDILIRYEPQLPDHWEKAVITVQRPGRIPTSSRCGNTIPDDDNQVVSLSPGSRYVVLPRPVCFEKGTNYTVRLELPQYTSSDSDVESPYTLIDSLVLMPYCKSLDIFTVGGSGDGVVTNSAWETFQRYRCLENSRSVVKTPMTDVCRNIIFSISALLHQTGLACECDPQGSLSSVCDPNGGQCQCRPNVVGRTCNRCAPGTFGFGPSGCKPCECHLQGSVNAFCNPVTGQCHCFQGVYARQCDRCLPGHWGFPSCQPCQCNGHADDCDPVTGECLNCQDYTMGHNCERCLAGYYGDPIIGSGDHCRPCPCPDGPDSGRQFARSCYQDPVTLQLACVCDPGYIGSRCDDCASGYFGNPSEVGGSCQPCQCHNNIDTTDPEACDKETGRCLKCLYHTEGEHCQFCRFGYYGDALRQDCRKCVCNYLGTVQEHCNGSDCQCDKATGQCLCLPNVIGQNCDRCAPNTWQLASGTGCDPCNCNAAHSFGPSCNEFTGQCQCMPGFGGRTCSECQELFWGDPDVECRACDCDPRGIETPQCDQSTGQCVCVEGVEGPRCDKCTRGYSGVFPDCTPCHQCFALWDVIIAELTNRTHRFLEKAKALKISGVIGPYRETVDSVERKVSEIKDILAQSPAAEPLKNIGNLFEEAEKLIKDVTEMMAQVEVKLSDTTSQSNSTAKELDSLQTEAESLDNTVKELAEQLEFIKNSDIRGALDSITKYFQMSLEAEERVNASTTEPNSTVEQSALMRDRVEDVMMERESQFKEKQEEQARLLDELAGKLQSLDLSAAAEMTCGTPPGASCSETECGGPNCRTDEGERKCGGPGCGGLVTVAHNAWQKAMDLDQDVLSALAEVEQLSKMVSEAKLRADEAKQSAEDILLKTNATKEKMDKSNEELRNLIKQIRNFLTQDSADLDSIEAVANEVLKMEMPSTPQQLQNLTEDIRERVESLSQVEVILQHSAADIARAEMLLEEAKRASKSATDVKVTADMVKEALEEAEKAQVAAEKAIKQADEDIQGTQNLLTSIESETAASEETLFNASQRISESCRYRARF

SEQ ID NO: 914499 - protein, 1525 aa, Homo sapiens
MGLLQLLAFSFLALCRARVRAQEPEFSYGCAEGSCYPATGDLLIGRAQKLSVTSTCGLHKPEPYCIVSHLQEDKKCFICNSQDPYHETLNPDSHLIENVVTTFAPNRLKIWWQSENGVENVTIQLDLEAEFHFTHLIMTFKTFRPAAMLIERSSDFGKTWGVYRYFAYDCEASFPGISTGPMKKVDDIICDSRYSDIEPSTEGEVIFRALDPAFKIEDPYSPRIQNLLKITNLRIKFVKLHTLGDNLLDSRMEIREKYYYAVYDMVVRGNCFCYGHASECAPVDGFNEEVEGMVHGHCMCRHNTKGLNCELCMDFYHDLPWRPAEGRNSNACKKCNCNEHSISCHFDMAVYLATGNVSGGVCDDCQHNTMGRNCEQCKPFYYQHPERDIRDPNFCERCTCDPAGSQNEGICDSYTDFSTGLIAGQCRCKLNVEGEHCDVCKEGFYDLSSEDPFGCKSCACNPLGTIPGGNPCDSETGHCYCKRLVTGQHCDQCLPEHWGLSNDLDGCRPCDCDLGGALNNSCFAESGQCSCRPHMIGRQCNEVEPGYYFATLDHYLYEAEEANLGPGVSIVERQYIQDRIPSWTGAGFVRVPEGAYLEFFIDNIPYSMEYDILIRYEPQLPDHWEKAVITVQRPGRIPTSSRCGNTIPDDDNQVVSLSPGSRYVVLPRPVCFEKGTNYTVRLELPQYTSSDSDVESPYTLIDSLVLMPYCKSLDIFTVGGSGDGVVTNSAWETFQRYRCLENSRSVVKTPMTDVCRNIIFSISALLHQTGLACECDPQGSLSSVCDPNGGQCQCRPNVVGRTCNRCAPGTFGFGPSGCKPCECHLQGSVNAFCNPVTGQCHCFQGVYARQCDRCLPGHWGFPSCQPCQCNGHADDCDPVTGECLNCQDYTMGHNCERCLAGYYGDPIIGSGDHCRPCPCPDGPDSGRQFARSCYQDPVTLQLACVCDPGYIGSRCDDCASGYFGNPSEVGGSCQPCQCHNNIDTTDPEACDKETGRCLKCLYHTEGEHCQFCRFGYYGDALRQDCRKCVCNYLGTVQEHCNGSDCQCDKATGQCLCLPNVIGQNCDRCAPNTWQLASGTGCDPCNCNAAHSFGPSCNEFTGQCQCMPGFGGRTCSECQELFWGDPDVECRACDCDPRGIETPQCDQSTGQCVCVEGVEGPRCDKCTRGYSGVFPDCTPCHQCFALWDVIIAELTNRTHRFLEKAKALKISGVIGPYRETVDSVERKVSEIKDILAQSPAAEPLKNIGNLFEEAEKLIKDVTEMMAQVEVKLSDTTSQSNSTAKELDSLQTEAESLDNTVKELAEQLEFIKNSDIRGALDSITKYFQMSLEAEERVNASTTEPNSTVEQSALMRDRVEDVMMERESQFKEKQEEQARLLDELAGKLQSLDLSAAAEMTCGTPPGASCSETECGGPNCRTDEGERKCGGPGCGGLVTVAHNAWQKAMDLDQDVLSALAEVEQLSKMVSEAKLRADEAKQSAEDILLKTNATKEKMDKSNEELRNLIKQIRNFLTPKVQQMLKSLQIW

SEQ ID NO: 914500 - protein, 1612 aa, Homo sapiens
MGLLQLLAFSFLALCRARVRAQEPEFSYGCAEGSCYPATGDLLIGRAQKLSVTSTCGLHKPEPYCIVSHLQEDKKCFICNSQDPYHETLNPDSHLIENVVTTFAPNRLKIWWQSENGVENVTIQLDLEAEFHFTHLIMTFKTFRPAAMLIERSSDFGKTWGVYRYFAYDCEASFPGISTGPMKKVDDIICDSRYSDIEPSTEGEVIFRALDPAFKIEDPYSPRIQNLLKITNLRIKFVKLHTLGDNLLDSRMEIREKYYYAVYDMVVRGNCFCYGHASECAPVDGFNEEVEGMVHGHCMCRHNTKGLNCELCMDFYHDLPWRPAEGRNSNACKKCNCNEHSISCHFDMAVYLATGNVSGGVCDDCQHNTMGRNCEQCKPFYYQHPERDIRDPNFCERCTCDPAGSQNEGICDSYTDFSTGLIAGQCRCKLNVEGEHCDVCKEGFYDLSSEDPFGCKSCACNPLGTIPGGNPCDSETGHCYCKRLVTGQHCDQCLPEHWGLSNDLDGCRPCDCDLGGALNNSCFAESGQCSCRPHMIGRQCNEVEPGYYFATLDHYLYEAEEANLGPGVSIVERQYIQDRIPSWTGAGFVRVPEGAYLEFFIDNIPYSMEYDILIRYEPQLPDHWEKAVITVQRPGRIPTSSRCGNTIPDDDNQVVSLSPGSRYVVLPRPVCFEKGTNYTVRLELPQYTSSDSDVESPYTLIDSLVLMPYCKSLDIFTVGGSGDGVVTNSAWETFQRYRCLENSRSVVKTPMTDVCRNIIFSISALLHQTGLACECDPQGSLSSVCDPNGGQCQCRPNVVGRTCNRCAPGTFGFGPSGCKPCECHLQGSVNAFCNPVTGQCHCFQGVYARQCDRCLPGHWGFPSCQPCQCNGHADDCDPVTGECLNCQDYTMGHNCERCLAGYYGDPIIGSGDHCRPCPCPDGPDSGRQFARSCYQDPVTLQLACVCDPGYIGSRCDDCASGYFGNPSEVGGSCQPCQCHNNIDTTDPEACDKETGRCLKCLYHTEGEHCQFCRFGYYGDALRQDCRKCVCNYLGTVQEHCNGSDCQCDKATGQCLCLPNVIGQNCDRCAPNTWQLASGTGCDPCNCNAAHSFGPSCNEFTGQCQCMPGFGGRTCSECQELFWGDPDVECRACDCDPRGIETPQCDQSTGQCVCVEGVEGPRCDKCTRGYSGVFPDCTPCHQCFALWDVIIAELTNRTHRFLEKAKALKISGVIGPYRETVDSVERKVSEIKDILAQSPAAEPLKNIGNLFEEAEKLIKDVTEMMAQVEVKLSDTTSQSNSTAKELDSLQTEAESLDNTVKELAEQLEFIKNSDIRGALDSITKYFQMSLEAEERVNASTTEPNSTVEQSALMRDRVEDVMMERESQFKEKQEEQARLLDELAGKLQSLDLSAAAEMTCGTPPGASCSETECGGPNCRTDEGERKCGGPGCGGLVTVAHNAWQKAMDLDQDVLSALAEVEQLSKMVSEAKLRADEAKQSAEDILLKTNATKEKMDKSNEELRNLIKQIRNFLTQDSADLDSIEAVANEVLKMEMPSTPQQLQNLTEDIRERVESLSQVEVILQHSAADIARAEMLLEEAKRASKVHRCKVSSRYDTGSSGRSRKHGRQQESGF

SEQ ID NO: 914501 - protein, 256 aa, Homo sapiens; identical to SEQ ID NO: 914485

SEQ ID NO: 914502 - protein, 1755 aa, Homo sapiens
MGLLQLLAFSFLALCRARVRAQEPEFSYGCAEGSCYPATGDLLIGRAQKLSVTSTCGLHKPEPYCIVSHLQEDKKCFICNSQDPYHETLNPDSHLIENVVTTFAPNRLKIWWQSENGVENVTIQLDLEAEFHFTHLIMTFKTFRPAAMLIERSSDFGKTWGVYRYFAYDCEASFPGISTGPMKKVDDIICDSRYSDIEPSTEGEVIFRALDPAFKIEDPYSPRIQNLLKITNLRIKFVKLHTLGDNLLDSRMEIREKYYYAVYDMVVRGNCFCYGHASECAPVDGFNEEVEGMVHGHCMCRHNTKGLNCELCMDFYHDLPWRPAEGRNSNACKKCNCNEHSISCHFDMAVYLATGNVSGGVCDDCQHNTMGRNCEQCKPFYYQHPERDIRDPNFCERCTCDPAGSQNEGICDSYTDFSTGLIAGQCRCKLNVEGEHCDVCKEGFYDLSSEDPFGCKSCACNPLGTIPGGNPCDSETGHCYCKRLVTGQHCDQCLPEHWGLSNDLDGCRPCDCDLGGALNNSCFAESGQCSCRPHMIGRQCNEVEPGYYFATLDHYLYEAEEANLGPGVSIVERQYIQDRIPSWTGAGFVRVPEGAYLEFFIDNIPYSMEYDILIRYEPQLPDHWEKAVITVQRPGRIPTSSRCGNTIPDDDNQVVSLSPGSRYVVLPRPVCFEKGTNYTVRLELPQYTSSDSDVESPYTLIDSLVLMPYCKSLDIFTVGGSGDGVVTNSAWETFQRYRCLENSRSVVKTPMTDVCRNIIFSISALLHQTGLACECDPQGSLSSVCDPNGGQCQCRPNVVGRTCNRCAPGTFGFGPSGCKPCECHLQGSVNAFCNPVTGQCHCFQGVYARQCDRCLPGHWGFPSCQPCQCNGHADDCDPVTGECLNCQDYTMGHNCERCLAGYYGDPIIGSGDHCRPCPCPDGPDSGRQFARSCYQDPVTLQLACVCDPGYIGSRCDDCASGYFGNPSEVGGSCQPCQCHNNIDTTDPEACDKETGRCLKCLYHTEGEHCQFCRFGYYGDALRQDCRKCVCNYLGTVQEHCNGSDCQCDKATGQCLCLPNVIGQNCDRCAPNTWQLASGTGCDPCNCNAAHSFGPSCNEFTGQCQCMPGFGGRTCSECQELFWGDPDVECRACDCDPRGIETPQCDQSTGQCVCVEGVEGPRCDKCTRGYSGVFPDCTPCHQCFALWDVIIAELTNRTHRFLEKAKALKISGVIGPYRETVDSVERKVSEIKDILAQSPAAEPLKNIGNLFEEAEKLIKDVTEMMAQVEVKLSDTTSQSNSTAKELDSLQTEAESLDNTVKELAEQLEFIKNSDIRGALDSITKYFQMSLEAEERVNASTTEPNSTVEQSALMRDRVEDVMMERESQFKEKQEEQARLLDELAGKLQSLDLSAAAEMVRFGDVALLLWCQAKKKKKKKKTKKKKKHKQTKKNKKTKRGGGPQNPPGGAPQADQTTTFIEKKESAKKRDDLIYKNDGEETRNKTKTKDRRKRRQEERRHPREEENKQKGGRREKNIIEPNNNQKREIKDHNDRDKNKTKQHGANTEGETKNTETINEDAEEKKKSKSTSTRREINRSNSTQQPLSTTSGGGPNNRTRHKQHDRTTHHATTPRRKNTTDHNNTTTPDHDKTKNKQQRKREDEKERGKRRNRNERAKEKTGKEEEDKKREEKDRKHRQKGKRKEDEKEKKEERHSDHTRRQREEKRRQETEEKEKTKTKTGQHGQSGEKRKKQKENKRKQKRGEAGRTAEKKKDGRKET

SEQ ID NO: 914503 - protein, 1188 aa, Homo sapiens
MGLLQLLAFSFLALCRARVRAQEPEFSYGCAEGSCYPATGDLLIGRAQKLSVTSTCGLHKPEPYCIVSHLQEDKKCFICNSQDPYHETLNPDSHLIENVVTTFAPNRLKIWWQSENGVENVTIQLDLEAEFHFTHLIMTFKTFRPAAMLIERSSDFGKTWGVYRYFAYDCEASFPGISTGPMKKVDDIICDSRYSDIEPSTEGEVIFRALDPAFKIEDPYSPRIQNLLKITNLRIKFVKLHTLGDNLLDSRMEIREKYYYAVYDMVVRGNCFCYGHASECAPVDGFNEEVEGMVHGHCMCRHNTKGLNCELCMDFYHDLPWRPAEGRNSNACKKCNCNEHSISCHFDMAVYLATGNVSGGVCDDCQHNTMGRNCEQCKPFYYQHPERDIRDPNFCERCTCDPAGSQNEGICDSYTDFSTGLIAGQCRCKLNVEGEHCDVCKEGFYDLSSEDPFGCKSCACNPLGTIPGGNPCDSETGHCYCKRLVTGQHCDQCLPEHWGLSNDLDGCRPCDCDLGGALNNSCFAESGQCSCRPHMIGRQCNEVEPGYYFATLDHYLYEAEEANLGPGVSIVERQYIQDRIPSWTGAGFVRVPEGAYLEFFIDNIPYSMEYDILIRYEPQLPDHWEKAVITVQRPGRIPTSSRCGNTIPDDDNQVVSLSPGSRYVVLPRPVCFEKGTNYTVRLELPQYTSSDSDVESPYTLIDSLVLMPYCKSLDIFTVGGSGDGVVTNSAWETFQRYRCLENSRSVVKTPMTDVCRNIIFSISALLHQTGLACECDPQGSLSSVCDPNGGQCQCRPNVVGRTCNRCAPGTFGFGPSGCKPCECHLQGSVNAFCNPVTGQCHCFQGVYARQCDRCLPGHWGFPSCQPCQCNGHADDCDPVTGECLNCQDYTMGHNCERCLAGYYGDPIIGSGDHCRPCPCPDGPDSGRQFARSCYQDPVTLQLACVCDPGYIGSRCDDCASGYFGNPSEVGGSCQPCQCHNNIDTTDPEACDKETGRCLKCLYHTEGEHCQFCRFGYYGDALRQDCRKCVCNYLGTVQEHCNGSDCQCDKATGQCLCLPNVIGQNCDRCAPNTWQLASGTGCDPCNCNAAHSFGPSCNEFTGQCQCMPGFGGRTCSECQELFWGDPDVECRDVEDVTQFPDYPGSHNMCGEGRIYHLSPQFMLLTIMLYSSNLPLESLECRGRTKTIKR

SEQ ID NO: 914504 - protein, 959 aa, Homo sapiens
MGLLQLLAFSFLALCRARVRAQEPEFSYGCAEGSCYPATGDLLIGRAQKLSVTSTCGLHKPEPYCIVSHLQEDKKCFICNSQDPYHETLNPDSHLIENVVTTFAPNRLKIWWQSENGVENVTIQLDLEAEFHFTHLIMTFKTFRPAAMLIERSSDFGKTWGVYRYFAYDCEASFPGISTGPMKKVDDIICDSRYSDIEPSTEGEVIFRALDPAFKIEDPYSPRIQNLLKITNLRIKFVKLHTLGDNLLDSRMEIREKYYYAVYDMVVRGNCFCYGHASECAPVDGFNEEVEGMVHGHCMCRHNTKGLNCELCMDFYHDLPWRPAEGRNSNACKKCNCNEHSISCHFDMAVYLATGNVSGGVCDDCQHNTMGRNCEQCKPFYYQHPERDIRDPNFCERCTCDPAGSQNEGICDSYTDFSTGLIAGQCRCKLNVEGEHCDVCKEGFYDLSSEDPFGCKSCACNPLGTIPGGNPCDSETGHCYCKRLVTGQHCDQCLPEHWGLSNDLDGCRPCDCDLGGALNNSCFAESGQCSCRPHMIGRQCNEVEPGYYFATLDHYLYEAEEANLGPGVSIVERQYIQDRIPSWTGAGFVRVPEGAYLEFFIDNIPYSMEYDILIRYEPQLPDHWEKAVITVQRPGRIPTSSRCGNTIPDDDNQVVSLSPGSRYVVLPRPVCFEKGTNYTVRLELPQYTSSDSDVESPYTLIDSLVLMPYCKSLDIFTVGGSGDGVVTNSAWETFQRYRCLENSRSVVKTPMTDVCRNIIFSISALLHQTGLACECDPQGSLSSVCDPNGGQCQCRPNVVGRTCNRCAPGTFGFGPSGCKPCECHLQGSVNAFCNPVTGQCHCFQGVYARQCDRCLPGHWGFPSCQPCQCNGHADDCDPVTGECLNCQDYTMGHNCERCLAGYYGDPIIGSGDHCRPCPFHGAVPVHAWVWRPHLQRVPGTLLGRPRRGVPRCGRRDSVS

SEQ ID NO: 914505 - protein, 106 aa, Homo sapiens
MSILNWGQGAYKRSMFPLNEFLKAVPCLPVSLACECHLQGSVNAFCNPVTGQCHCFQGVYARQCDRCLPGHWGFPSCQPCQCNGHADDCDPVTGECLNCQDYTMGH

SEQ ID NO: 914506 - protein, 482 aa, Homo sapiens
MASFSAETNSTDLLSQPWNEPPVILSMVILSLTFLLGLPGNGLVLWVAGLKMQRTVNTIWFLHLTLADLLCCLSLPFSLAHLALQGQWPYGRFLCKLIPSIIVLNMFASVFLLTAISLDRCLVVFKPIWCQNHRNVGMACSICGCIWVVAFVMCIPVFVYREIFTTDNHNRCGYKFGLSSSLDYPDFYGDPLENRSLENIVQPPGEMNDRLDPSSFQTNDHPWTVPTVFQPQTFQRPSADSLPRGSARLTSQNLYSNVFKPADVVSPKIPSGFPIEDHETSPLDNSDAFLSTHLKLFPSASSNSFYESELPQGFQDYYNLGQFTDDDQVPTPLVAITITRLVVGFLLPSVIMIACYSFIVFRMQRGRFAKSQSKTFRVAVVVVAVFLVCWTPYHIFGVLSLLTDPETPLGKTLMSWDHVCIALASANSCFNPFLYALLGKDFRKKARQSIQGILEAAFSEELTRSTHCPSNNVISERNSTTV

SEQ ID NO: 914507 - protein, 164 aa, Homo sapiens
MASFSAETNSTDLLSQPWNEPPVILSMVILSLTFLLGLPGNGLVLWVAGLKMQRTVNTIWFLHLTLADLLCCLSLPFSLAHLALQGQWPYGRFLCKLIPSIIVLNMFASVFLLTAISLDRCLVVFKPIWCQNHRNVGMACSICGCIWVVAFVMCIPVFVYREIS

SEQ ID NO: 914508 - protein, 395 aa, Homo sapiens
MASFSAETNSTDLLSQPWNEPPVILSMVILSLTFLLGLPGNGLVLWVAGLKMQRTVNTIWFLHLTLADLLCCLSLPFSLAHLALQGQWPYGRFLCKLIPSIIVLNMFASVFLLTAISLDRCLVVFKPIWCQNHRNVGMACSICGCIWVVAFVMCIPVFVYREIFTTDNHNRCGYKFGLSSSLDYPDFYGDPLENRSLENIVQPPGEMNDRLDPSSFQTNDHPWTVPTVFQPQTFQRPSADSLPRGSARLTSQNLYSNVFKPADVVSPKIPSGFPIEDHETSPLDNSDAFLSTHLKLFPSASSNSFYESELPQGFQDYYNLGQFTDDDQVPTPLVAITITRLVVGFLLPSVIMIACYSFIVFRMQRGRFAKSQSKTFRVAVVVVALESYSVNWPTS

SEQ ID NO: 914509 - protein, 482 aa, Homo sapiens; identical to SEQ ID NO: 914506

SEQ ID NO: 914510 - protein, 482 aa, Homo sapiens; identical to SEQ ID NO: 914506

SEQ ID NO: 914511 - protein, 438 aa, Homo sapiens [sequence omitted]

SEQ ID NO: 914512 - protein, 126 aa, Homo sapiens
MTTYEPGGRRKYTSRMGPYFRNKLIVKEYEVRSSGRVVSLSTPIIWRRGHEPQSFIRRNQDLICSFFTWFSDHSLPESDKIAEIIKEDLWPNPLQYYLLREGVRRARRRPLREPVEIPRPFGFQSG

SEQ ID NO: 914513 - protein, 438 aa, Homo sapiens [sequence omitted]

SEQ ID NO: 914514 - protein, 438 aa, Homo sapiens [sequence omitted]

SEQ ID NO: 914515 - protein, 438 aa, Homo sapiens [sequence omitted]

SEQ ID NO: 914516 - protein, 438 aa, Homo sapiens [sequence omitted]

SEQ ID NO: 914517 - protein, 180 aa, Homo sapiens
MSRQANRGTESKKMSSELFTLTYGALVTQLCKDYENDEDVNKQLDKMGFNIGVRLIEDFLARSNVGRCHDFRETADVIAKVAFKMYLGITPSITNWSPAGDEFSLILENNPLVDFVELPDNHSSLIYSNLLCGVLRGALEMVQMAVEAKFVQDTLKGDGVTEIRMRFIRRIEDNLPAGEE

SEQ ID NO: 914518 - protein, 180 aa, Homo sapiens; identical to SEQ ID NO: 914517

SEQ ID NO: 914519 - protein, 180 aa, Homo sapiens; identical to SEQ ID NO: 914517

SEQ ID NO: 914520 - protein, 134 aa, Homo sapiens
MGFNIGVRLIEDFLARSNVGRCHDFRETADVIAKVAFKMYLGITPSITNWSPAGDEFSLILENNPLVDFVELPDNHSSLIYSNLLCGVLRGALEMVQMAVEAKFVQDTLKGDGVTEIRMRFIRRIEDNLPAGEE

SEQ ID NO: 914521 - protein, 180 aa, Homo sapiens; identical to SEQ ID NO: 914517

SEQ ID NO: 914522 - protein, 134 aa, Homo sapiens; identical to SEQ ID NO: 914520

SEQ ID NO: 914523 - protein, 142 aa, Homo sapiens
MLFSNFLPRGFNIGVRLIEDFLARSNVGRCHDFRETADVIAKVAFKMYLGITPSITNWSPAGDEFSLILENNPLVDFVELPDNHSSLIYSNLLCGVLRGALEMVQMAVEAKFVQDTLKGDGVTEIRMRFIRRIEDNLPAGEE

SEQ ID NO: 914524 - protein, 161 aa, Homo sapiens
MSRQANRGTESKKMSSELFTLTYGALVTQLCKDYENDEDVNKQLDKMGFNIGVRLIEDFLARSNVGRCHDFRETADVIAKVAFKMYLGITPSITNWSPAGDEFSLILENNPLVDFVELPDNHSSLIYSNLLCGVLRGALEMVSATLYLLGHPKCNRDLISV

SEQ ID NO: 914525 - protein, 123 aa, Homo sapiens
SVIRDTELSQCGGPDFRNAELMPVAFKMYLGITPSITNWSPAGDEFSLILENNPLVDFVELPDNHSSLIYSNLLCGVLRGALEMVQMAVEAKFVQDTLKGDGVTEIRMRFIRRIEDNLPAGEE

SEQ ID NO: 914526 - protein, 134 aa, Homo sapiens; identical to SEQ ID NO: 914520

SEQ ID NO: 914527 - protein, 180 aa, Homo sapiens; identical to SEQ ID NO: 914517

SEQ ID NO: 914528 - protein, 180 aa, Homo sapiens; identical to SEQ ID NO: 914517

SEQ ID NO: 914529 - protein, 180 aa, Homo sapiens; identical to SEQ ID NO: 914517

SEQ ID NO: 914530 - protein, 213 aa, Homo sapiens
MQEAGAVIVYLAVLLGVAFSNPWLGEWGGAAGTMSRQANRGTESKKMSSELFTLTYGALVTQLCKDYENDEDVNKQLDKMGFNIGVRLIEDFLARSNVGRCHDFRETADVIAKVAFKMYLGITPSITNWSPAGDEFSLILENNPLVDFVELPDNHSSLIYSNLLCGVLRGALEMVQMAVEAKFVQDTLKGDGVTEIRMRFIRRIEDNLPAGEE

SEQ ID NO: 914531 - protein, 180 aa, Homo sapiens; identical to SEQ ID NO: 914517

SEQ ID NO: 914532 - protein, 161 aa, Homo sapiens
MSRQANRGTESKKMSSELFTLTYGALVTQLCKDYENDEDFLARSNVGRCHDFRETADVIAKVAFKMYLGITPSITNWSPAGDEFSLILENNPLVDFVELPDNHSSLIYSNLLCGVLRGALEMVQMAVEAKFVQDTLKGDGVTEIRMRFIRRIEDNLPAGEE

SEQ ID NO: 914533 - protein, 162 aa, Homo sapiens
MSRQANRGTESKKMSSELFTLTYGALVTQLCKDYENDEDVNKQLDKMGFNIGVRLIEDFLARSNVGRCHDFRETADVIAKVAFKMYLGITPSITNWSPAGDEFSLILVYSNLLCGVLRGALEMVQMAVEAKFVQDTLKGDGVTEIRMRFIRRIEDNLPAGEE

SEQ ID NO: 914534 - protein, 147 aa, Homo sapiens
MQEAGAVIVYLAVLLGVAFSNPWLGEWGGAAGTMSRQANRGTESKKMVAFKMYLGITPSITNWSPAGDEFSLILENNPLVDFVELPDNHSSLIYSNLLCGVLRGALEMVQMAVEAKFVQDTLKGDGVTEIRMRFIRRIEDNLPAGEE

SEQ ID NO: 914535 - protein, 161 aa, Homo sapiens; identical to SEQ ID NO: 914524

SEQ ID NO: 914536 - protein, 421 aa, Homo sapiens
MPGRWRWQRDMHPARKLLSLLFLILMGTELTQVLPTNPEESWQVYSSAQDSEGRCICTVVAPQQTMCSRDARTKQLRQLLEKVQNMSQSIEVLDRRTQRDLQYVEKMENQMKGLESKFKQVEESHKQHLARQFKAIKAKMDELRPLIPVLEEYKADAKLVLQFKEEVQNLTSVLNELQEEIGAYDYDELQSRVSNLEERLRACMQKLACGKLTGISDPVTVKTSGSRFGSWMTDPLAPEGDNRVWYMDGYHNNRFVREYKSMVDFMNTDNFTSHRLPHPWSGTGQVVYNGSIYFNKFQSHIIIRFDLKTETILKTRSLGTMPVTTTCYHYAWGWATRDIDLMVGRERAVGPCYATNQNAGQHRGSVGWTPCPLQTLQTWEHELPQAQRRGGLHHLRHAVRHQRLLRGYQGPLCIPDQCLHL

SEQ ID NO: 914537 - protein, 135 aa, Homo sapiens
MPGRWRWQRDMHPARKLLSLLFLILMGTELTQVLPTNPEESWQVYSSAQDSEGRCICTVVAPQQTMCSRDARTKQLRQLLEKVQNMSQSIEVLDRRTQRDLQYVEKMENQMKGLESKFKQVEESHKQHLARQFKG

SEQ ID NO: 914538 - protein, 77 aa, Homo sapiens
MHPARKLLSLLFLILMGTELTQDSAAPDSLLRSSKGSTRGSLAAIVIWRGKSESRIAKTPGIFRGGGTLVLPPTHTP

SEQ ID NO: 914539 - protein, 125 aa, Homo sapiens
MALPPCFSLSSRRATDVGRNSRICSWNCSPRRPGFPPRPVPLWSNNILKRRGNDCWPSSHRGKNPTVKDGHETFPLESWSSSRGNVAVPRLFEEAMGCTPGRRPSVNSHPHCSARFLDCVAVSLD

SEQ ID NO: 914540 - protein, 262 aa, Homo sapiens
ERRAGRRFPVAAEEPGGTQPGKAGRRAGGARRRARRAEATWPPSLAPGEGAAMAGARGAAAAAGGRRRAEGARGHSQAPLPARCPPPEGRLGAGAGASSERALEAARGAMSVPLLKIGVVLSTMAMITNWMSQTLPSLVGLNTTKLSAAGGGTLDRSTGVLPTNPEESWQVYSSAQDSEGRCICTVVAPQQTMCSRDARTKQLRQLLEKVQNMSQSIEVLDRRTQRDLQYVEKMENQMKGLESKFKQVEESHKQHLARQFKG

SEQ ID NO: 914541 - protein, 236 aa, Homo sapiens
ERRAGRRFPVAAEEPGGTQPGKAGRRAGGARRRARRAEATWPPSLAPGEGAAMAGAPVPAAEGRLGAGAGASSERALEAARGAMSVPLLKIGVVLSTMAMITNWMSQTLPSLVGLNTTKLSAAGGGTLDRSTGVLPTNPEESWQVYSSAQDSEGRCICTVVAPQQTMCSRDARTKQLRQLLEKVQNMSQSIEVLDRRTQRDLQYVEKMENQMKGLESKFKQVEESHKQHLARQFKG

SEQ ID NO: 914542 - protein, 169 aa, Homo sapiens
MPGRWRWQRDMHPARKLLSLLFLILMGTELTQNKRENKAEKMGGPESERKTTGEKTLNELPLFCLEAHAGSLALPRMCSPNPNPAVGLCRPAYPQSPSPGAAQTISQSLLERFCMASRREVFLAPGRPGGGWWLCTVAGQMHSFMCTHTHTHAHTGEQIPAEKSQPGPD

SEQ ID NO: 914543 - protein, 548 aa, Homo sapiens
ERRAGRRFPVAAEEPGGTQPGKAGRRAGGARRRARRAEATWPPSLAPGEGAAMAGARGAAAAAGGRRRAEGARGHSQAPLPARCPPPEGRLGAGAGASSERALEAARGAMSVPLLKIGVVLSTMAMITNWMSQTLPSLVGLNTTKLSAAGGGTLDRSTGVLPTNPEESWQVYSSAQDSEGRCICTVVAPQQTMCSRDARTKQLRQLLEKVQNMSQSIEVLDRRTQRDLQYVEKMENQMKGLESKFKQVEESHKQHLARQFKAIKAKMDELRPLIPVLEEYKADAKLVLQFKEEVQNLTSVLNELQEEIGAYDYDELQSRVSNLEERLRACMQKLACGKLTGISDPVTVKTSGSRFGSWMTDPLAPEGDNRVWYMDGYHNNRFVREYKSMVDFMNTDNFTSHRLPHPWSGTGQVVYNGSIYFNKFQSHIIIRFDLKTETILKTRSLGTMPVTTTCYHYAWGLATRDIDLMVGRERAVGPCYATNQNAGQHRGSVGWTPCPLQTLQTWEHELPQAQRRGGLHHLRHAVRHQRLLRGYQGPLCIPDQCLHL

SEQ ID NO: 914544 - protein, 351 aa, Homo sapiens
MPGRWRWQRDMHPARKLLSLLFLILMGTELTQVLPTNPEESWQVYSSAQDSEGRCICTVVAPQQTMCSRDARTKQLRQLLEKVQNMSQSIEVLDRRTQRDLQYVEKMENQMKGLESKFKQVEESHKQHLARQFKAIKAKMDELRPLIPVLEEYKADAKLVLQFKEEVQNLTSVLNELQEEIGAYDYDELQSRVSNLEERLRACMQKLACGKLTGISDPVTVKTSGSRFGSWMTDPLAPEGDNRVWYMDGYHNNRFVREYKSMVDFMNTDNFTSHRLPHPWSGTGQVVYNGSIYFNKFQSHIIIRFDLKTETILKTRSLGTMPVTTTCYHYAWGWATRDIDLMVGRERAVGP

SEQ ID NO: 914545 - protein, 85 aa, Homo sapiens
  misc_feature (6)..(6): Xaa can be any naturally occurring amino acid
  misc_feature (16)..(16): Xaa can be any naturally occurring amino acid
  misc_feature (33)..(33): Xaa can be any naturally occurring amino acid
PLVELXRHPCIPTASXPDEGGKGLIFYDTKVTXMNRVLNATVQRQRTQRDLQYVEKMENQMKGLESKFKQVEESHKQHLARQFKG

SEQ ID NO: 914546 - protein, 633 aa, Homo sapiens
MPEIRLRHVVSCSSQDSTHCAENLLKADTYRKWRAAKAGEKTISVVLQLEKEEQIHSVDIGNDGSAFVEVLVGSSAGGAGEQDYEVLLVTSSFMSPSESRSGSNPNRVRMFGPDKLVRAAAEKRWDRVKIVCSQPYSKDSPFGLSFVRFHSPPDKDEAEAPSQKVTVTKLGQFRVKEEDESANSLRPGALFFSRINKTSPVTASDPAGPSYAAATLQASSAASSASPVSRAIGSTSKPQESPKGKRKLDLNQEEKKTPSKPPAQLSPSVPKRPKLPAPTRTPATAPVPARAQGAVTGKPRGEGTEPRRPRAGPEELGKILQGVVVVLSGFQNPFRSELRDKALELGAKYRPDWTRDSTHLICAFANTPKYSQVLGLGGRIVRKEWVLDCHRMRRRLPSRRYLMAGPGSSSEEDEASHSGGSGDEAPKLPQKQPQTKTKPTQAAGPSSPQKPPTPEETKAASPVLQEDIDIEGVQSEGQDNGAEDSGDTEDELRRVAEQKEHRLPPGQEENGEDPYAGSTDENTDSEEHQEPPDLPVPELPDFFQGKHFFLYGEFPGDERRKLIRYVTAFNGELEDYMSDRVQFVITAQEWDPSFEEALMDNPSLAFVRPRWIYSCNEKQKLLPHQLYGVVPQA

SEQ ID NO: 914547 - protein, 633 aa, Homo sapiens; identical to SEQ ID NO: 914546

SEQ ID NO: 914548 - protein, 572 aa, Homo sapiens
MPEIRLRHVVSCSSQDSTHCAENLLKADTYRKWRAAKAGEKTISVVLQLEKEEQIHSVDIGNDGSAFVEVLVGSSAGGAGEQDYEVLLVTSSFMSPSESRSGSNPNRVRMFGPDKLVRAAAEKRWDRVKIVCSQPYSKDSPFGLSFVRFHSPPDKDEAEAPSQKVTVTKLGQFRVKEEDESANSLRPGALFFSRINKTSPVTASDPAGPSYAAATLQASSAASSASPVSRAIGSTSKPQESPKGKRKLDLNQEEKKTPSKPPAQLSPSVPKRPKLPAPTRTPATAPVPARAQGAVTGKPRGEGTEPRRPRAGPEELGKILQGVVVVLSGFQNPFRSELRDKALELGAKYRPDWTRDSTHLICAFANTPKYSQVLGLGGRIVRKEWVLDCHRMRRRLPSRRYLMAGPGSSSEEDEASHSGGSGDEAPKLPQKQPQTKTKPTQAAGPSSPQKPPTPEETKAASPVLQEDIDIEGVQSEGQDNGAEDSGDTEDELRRVAEQKEHRLPPGQEENGEDPYAGSTDENTDSEEHQEPPDLPVPELPDFFQGKHFFLYGEFPGDERRKLIRYVTAFNGP

SEQ ID NO: 914549 - protein, 506 aa, Homo sapiens
MPEIRLRHVVSCSSQDSTHCAENLLKADTYRKWRAAKAGEKTISVVLQLEKEEQIHSVDIGNDGSAFVEVLVGSSAGGAGEQDYEVLLVTSSFMSPSESRSGSNPNRVRMFGPDKLVRAAAEKRWDRVKIVCSQPYSKDSPFGLSFVRFHSPPDKDEAEAPSQKVTVTKLGQFRVKEEDESANSLRPGALFFSRINKTSPVTASDPAGPSYAAATLQASSAASSASPVSRAIGSTSKPQESPKGKRKLDLNQEEKKTPSKPPAQLSPSVPKRPKLPAPTRTPATAPVPARAQGAVTGKPRGEGTEPRRPRAGPEELGKILQGVVVVLSGFQNPFRSELRDKALELGAKYRPDWTRDSTHLIEDELRRVAEQKEHRLPPGQEENGEDPYAGSTDENTDSEEHQEPPDLPVPELPDFFQGKHFFLYGEFPGDERRKLIRYVTAFNGELEDYMSDRVQFVITAQEWDPSFEEALMDNPSLAFVRPRWIYSCNEKQKLLPHQLYGVVPQA

SEQ ID NO: 914550 - protein, 662 aa, Homo sapiens
MHGTGLSVDKLHGPRPVHIFTPGEAHDVDMPEIRLRHVVSCSSQDSTHCAENLLKADTYRKWRAAKAGEKTISVVLQLEKEEQIHSVDIGNDGSAFVEVLVGSSAGGAGEQDYEVLLVTSSFMSPSESRSGSNPNRVRMFGPDKLVRAAAEKRWDRVKIVCSQPYSKDSPFGLSFVRFHSPPDKDEAEAPSQKVTVTKLGQFRVKEEDESANSLRPGALFFSRINKTSPVTASDPAGPSYAAATLQASSAASSASPVSRAIGSTSKPQESPKGKRKLDLNQEEKKTPSKPPAQLSPSVPKRPKLPAPTRTPATAPVPARAQGAVTGKPRGEGTEPRRPRAGPEELGKILQGVVVVLSGFQNPFRSELRDKALELGAKYRPDWTRDSTHLICAFANTPKYSQVLGLGGRIVRKEWVLDCHRMRRRLPSRRYLMAGPGSSSEEDEASHSGGSGDEAPKLPQKQPQTKTKPTQAAGPSSPQKPPTPEETKAASPVLQEDIDIEGVQSEGQDNGAEDSGDTEDELRRVAEQKEHRLPPGQEENGEDPYAGSTDENTDSEEHQEPPDLPVPELPDFFQGKHFFLYGEFPGDERRKLIRYVTAFNGELEDYMSDRVQFVITAQEWDPSFEEALMDNPSLAFVRPRWIYSCNEKQKLLPHQLYGVVPQA

SEQ ID NO: 914551 - protein, 819 aa, Homo sapiens
LLAVRNLRPGDSQTAAQARDQTAALLNSAGLGAADLFVLPANCGSSDGCEELERLRAALQSQAEALRRLLPPAQDGFEVLGAAELEAVREAFETGGLEAALSWVRSGLERLGSARLDLAVAGKADVGLVVDMLLGLDPGDPGAAPASVPTAPTPFPAPERPNVVLWTVPLGHTGTATPRPPPLTQRTTTPSSSSPLGPPLRRTGPRSRPCCYQMRLLSACAQTARARIRSVWEKLEKEEQIHSVDIGNDGSAFVEVLVGSSAGGAGEQDYEVLLVTSSFMSPSESRSGSNPNRVRMFGPDKLVRAAAEKRWDRVKIVCSQPYSKDSPFGLSFVRFHSPPDKDEAEAPSQKVTVTKLGQFRVKEEDESANSLRPGALFFSRINKTSPVTASDPAGPSYAAATLQASSAASSASPVSRAIGSTSKPQESPKGKRKLDLNQEEKKTPSKPPAQLSPSVPKRPKLPAPTRTPATAPVPARAQGAVTGKPRGEGTEPRRPRAGPEELGKILQGVVVVLSGFQNPFRSELRDKALELGAKYRPDWTRDSTHLICAFANTPKYSQVLGLGGRIVRKEWVLDCHRMRRRLPSRRYLMAGPGSSSEEDEASHSGGSGDEAPKLPQKQPQTKTKPTQAAGPSSPQKPPTPEETKAASPVLQEDIDIEGVQSEGQDNGAEDSGDTEDELRRVAEQKEHRLPPGQEENGEDPYAGSTDENTDSEEHQEPPDLPVPELPDFFQGKHFFLYGEFPGDERRKLIRYVTAFNGELEDYMSDRVQFVITAQEWDPSFEEALMDNPSLAFVRPRWIYSCNEKQKLLPHQLYGVVPQA

SEQ ID NO: 914552 - protein, 586 aa, Homo sapiens
MLEKEEQIHSVDIGNDGSAFVEVLVGSSAGGAGEQDYEVLLVTSSFMSPSESRSGSNPNRVRMFGPDKLVRAAAEKRWDRVKIVCSQPYSKDSPFGLSFVRFHSPPDKDEAEAPSQKVTVTKLGQFRVKEEDESANSLRPGALFFSRINKTSPVTASDPAGPSYAAATLQASSAASSASPVSRAIGSTSKPQESPKGKRKLDLNQEEKKTPSKPPAQLSPSVPKRPKLPAPTRTPATAPVPARAQGAVTGKPRGEGTEPRRPRAGPEELGKILQGVVVVLSGFQNPFRSELRDKALELGAKYRPDWTRDSTHLICAFANTPKYSQVLGLGGRIVRKEWVLDCHRMRRRLPSRRYLMAGPGSSSEEDEASHSGGSGDEAPKLPQKQPQTKTKPTQAAGPSSPQKPPTPEETKAASPVLQEDIDIEGVQSEGQDNGAEDSGDTEDELRRVAEQKEHRLPPGQEENGEDPYAGSTDENTDSEEHQEPPDLPVPELPDFFQGKHFFLYGEFPGDERRKLIRYVTAFNGELEDYMSDRVQFVITAQEWDPSFEEALMDNPSLAFVRPRWIYSCNEKQKLLPHQLYGVVPQA

SEQ ID NO: 914553 - protein, 526 aa, Homo sapiens
SQEEVSLSEKGLGPWPLSLGQTPCLPPLLSQDSPFGLSFVRFHSPPDKDEAEAPSQKVTVTKLGQFRVKEEDESANSLRPGALFFSRINKTSPVTASDPAGPSYAAATLQASSAASSASPVSRAIGSTSKPQESPKGKRKLDLNQEEKKTPSKPPAQLSPSVPKRPKLPAPTRTPATAPVPARAQGAVTGKPRGEGTEPRRPRAGPEELGKILQGVVVVLSGFQNPFRSELRDKALELGAKYRPDWTRDSTHLICAFANTPKYSQVLGLGGRIVRKEWVLDCHRMRRRLPSRRYLMAGPGSSSEEDEASHSGGSGDEAPKLPQKQPQTKTKPTQAAGPSSPQKPPTPEETKAASPVLQEDIDIEGVQSEGQDNGAEDSGDTEDELRRVAEQKEHRLPPGQEENGEDPYAGSTDENTDSEEHQEPPDLPVPELPDFFQGKHFFLYGEFPGDERRKLIRYVTAFNGELEDYMSDRVQFVITAQEWDPSFEEALMDNPSLAFVRPRWIYSCNEKQKLLPHQLYGVVPQA

SEQ ID NO: 914554 - protein, 242 aa, Homo sapiens [sequence omitted]

SEQ ID NO: 914555 - protein, 485 aa, Homo sapiens
MAADYHGADGRVHPEKVTVTKLGQFRVKEEDESANSLRPGALFFSRINKTSPVTASDPAGPSYAAATLQASSAASSASPVSRAIGSTSKPQESPKGKRKLDLNQEEKKTPSKPPAQLSPSVPKRPKLPAPTRTPATAPVPARAQGAVTGKPRGEGTEPRRPRAGPEELGKILQGVVVVLSGFQNPFRSELRDKALELGAKYRPDWTRDSTHLICAFANTPKYSQVLGLGGRIVRKEWVLDCHRMRRRLPSRRYLMAGPGSSSEEDEASHSGGSGDEAPKLPQKQPQTKTKPTQAAGPSSPQKPPTPEETKAASPVLQEDIDIEGVQSEGQDNGAEDSGDTEDELRRVAEQKEHRLPPGQEENGEDPYAGSTDENTDSEEHQEPPDLPVPELPDFFQGKHFFLYGEFPGDERRKLIRYVTAFNGELEDYMSDRVQFVITAQEWDPSFEEALMDNPSLAFVRPRWIYSCNEKQKLLPHQLYGVVPQA

SEQ ID NO: 914556 - protein, 274 aa, Homo sapiens
MPEIRLRHVVSCSSQDSTHCAENLLKADTYRKWRAAKAGEKTISVVLQLEKEEQIHSVDIGNDGSAFVEVLVGSSAGGAGEQDYEVLLVTSSFMSPSESRSGSNPNRVRMFGPDKLVRAAAEKRWDRVKIVCSQPYSKDSPFGLSFVRFHSPPDKDEAEAPSQKVTVTKLGQFRVKEEDESANSLRPGALFFSRINKTSPVTASDPAGPSYAAATLQASSAASSASPVSRAIGSTSKALMDNPSLAFVRPRWIYSCNEKQKLLPHQLYGVVPQA

SEQ ID NO: 914557 - protein, 231 aa, Homo sapiens [sequence omitted]

SEQ ID NO: 914558 - protein, 190 aa, Homo sapiens
MPEIRLRHVVSCSSQDSTHCAENLLKADTYRKWRAAKAGEKTISVVLQLEKEEQIHSVDIGNDGSAFVEVLVGSSAGGAGEQDYEVLLVTSSFMSPSESRSGSNPNRVRMFGPDKLVRAAAEKRWDRVKIVCSQPYSKDSPFGLSFVRFHSPPDKDEAEAPSQKVTVTKLGQFRVKEEDESANSRSSRTI

SEQ ID NO: 914559 - protein, 633 aa, Homo sapiens; identical to SEQ ID NO: 914546

SEQ ID NO: 914560 - protein, 633 aa, Homo sapiens; identical to SEQ ID NO: 914546

SEQ ID NO: 914561 - protein, 498 aa, Homo sapiens
MPEIRLRHVVSCSSQDSTHCAENLLKADTYRKWRAAKAGEKTISVVLQLEKEEQIHSVDIGNDGSAFVEVLVGSSAGGAGEQDYEVLLVTSSFMSPSESRSGSNPNRVRMFGPDKLVRAAAEKRWDRVKIVCSQPYSKDSPFGLSFVRFHSPPDKDEAEAPSQKVTVTKLGQFRVKEEDESANSLRPGALFFSRINKTSPVTASDPAGPSYAAATLQASSAASSASPVSRAIGSTSKPQESPKGKRKLDLNQEEKKTPSKPPAQLSPSVPKRPKLPAPTRTPATAPVPARAQGAVTGKPRGEGTEPRRPRAGPEELGKILQGVVVVLSGFQNPFRSELRDKALELGAKYRPDWTRDSTHLICAFANTPKYSQVLGLGGRIVRKEWVLDCHRMRRRLPSRRYLMAGPGSSSEEDEASHSGGSGDEAPKLPQKQPQTKTKPTQAAGPSSPQKPPTPEETKAASPISSRASTSFFTGSSLGTSGGNSSDTSQPSMGSSRTI

SEQ ID NO: 914562 - protein, 658 aa, Homo sapiens
MPEIRLRHVVSCSSQDSTHCAENLLKADTYRKWRAAKAGEKTISVVLQLEKEEQIHSVDIGNDGSAFVEVLVGSSAGGAGEQDYEVLLVTSSFMSPSESRSGSNPNRVRMFGPDKLVRAAAEKRWDRVKIVCSQPYSKDSPFGLSFVRFHSPPDKDEAEAPSQKVTVTKLGQFRVKEEDESANSLRPGALFFSRINKTSPVTASDPAGPSYAAATLQASSAASSASPVSRAIGSTSKGEIIRLWWGGGGEKLEAINPSPSPQPQESPKGKRKLDLNQEEKKTPSKPPAQLSPSVPKRPKLPAPTRTPATAPVPARAQGAVTGKPRGEGTEPRRPRAGPEELGKILQGVVVVLSGFQNPFRSELRDKALELGAKYRPDWTRDSTHLICAFANTPKYSQVLGLGGRIVRKEWVLDCHRMRRRLPSRRYLMAGPGSSSEEDEASHSGGSGDEAPKLPQKQPQTKTKPTQAAGPSSPQKPPTPEETKAASPVLQEDIDIEGVQSEGQDNGAEDSGDTEDELRRVAEQKEHRLPPGQEENGEDPYAGSTDENTDSEEHQEPPDLPVPELPDFFQGKHFFLYGEFPGDERRKLIRYVTAFNGELEDYMSDRVQFVITAQEWDPSFEEALMDNPSLAFVRPRWIYSCNEKQKLLPHQLYGVVPQA

SEQ ID NO: 914563 - protein, 635 aa, Homo sapiens
REIRPSDASVDVQRETRTRTHCAENLLKADTYRKWRAAKAGEKTISVVLQLEKEEQIHSVDIGNDGSAFVEVLVGSSAGGAGEQDYEVLLVTSSFMSPSESRSGSNPNRVRMFGPDKLVRAAAEKRWDRVKIVCSQPYSKDSPFGLSFVRFHSPPDKDEAEAPSQKVTVTKLGQFRVKEEDESANSLRPGALFFSRINKTSPVTASDPAGPSYAAATLQASSAASSASPVSRAIGSTSKPQESPKGKRKLDLNQEEKKTPSKPPAQLSPSVPKRPKLPAPTRTPATAPVPARAQGAVTGKPRGEGTEPRRPRAGPEELGKILQGVVVVLSGFQNPFRSELRDKALELGAKYRPDWTRDSTHLICAFANTPKYSQVLGLGGRIVRKEWVLDCHRMRRRLPSRRYLMAGPGSSSEEDEASHSGGSGDEAPKLPQKQPQTKTKPTQAAGPSSPQKPPTPEETKAASPVLQEDIDIEGVQSEGQDNGAEDSGDTEDELRRVAEQKEHRLPPGQEENGEDPYAGSTDENTDSEEHQEPPDLPVPELPDFFQGKHFFLYGEFPGDERRKLIRYVTAFNGELEDYMSDRVQFVITAQEWDPSFEEALMDNPSLAFVRPRWIYSCNEKQKLLPHQLYGVVPQA

SEQ ID NO: 914564 - protein, 603 aa, Homo sapiens
LGTRLSKRAGEKTISVAYLEKEEQIHSVDIGNDGSAFVEVLVGSSAGGAGEQDYEVLLVTSSFMSPSESRSGSNPNRVRMFGPDKLVRAAAEKRWDRVKIVCSQPYSKDSPFGLSFVRFHSPPDKDEAEAPSQKVTVTKLGQFRVKEEDESANSLRPGALFFSRINKTSPVTASDPAGPSYAAATLQASSAASSASPVSRAIGSTSKPQESPKGKRKLDLNQEEKKTPSKPPAQLSPSVPKRPKLPAPTRTPATAPVPARAQGAVTGKPRGEGTEPRRPRAGPEELGKILQGVVVVLSGFQNPFRSELRDKALELGAKYRPDWTRDSTHLICAFANTPKYSQVLGLGGRIVRKEWVLDCHRMRRRLPSRRYLMAGPGSSSEEDEASHSGGSGDEAPKLPQKQPQTKTKPTQAAGPSSPQKPPTPEETKAASPVLQEDIDIEGVQSEGQDNGAEDSGDTEDELRRVAEQKEHRLPPGQEENGEDPYAGSTDENTDSEEHQEPPDLPVPELPDFFQGKHFFLYGEFPGDERRKLIRYVTAFNGELEDYMSDRVQFVITAQEWDPSFEEALMDNPSLAFVRPRWIYSCNEKQKLLPHQLYGVVPQA

SEQ ID NO: 914565 - protein, 486 aa, Homo sapiens
MIWKTPWENLDKGRSHKVTVTKLGQFRVKEEDESANSLRPGALFFSRINKTSPVTASDPAGPSYAAATLQASSAASSASPVSRAIGSTSKPQESPKGKRKLDLNQEEKKTPSKPPAQLSPSVPKRPKLPAPTRTPATAPVPARAQGAVTGKPRGEGTEPRRPRAGPEELGKILQGVVVVLSGFQNPFRSELRDKALELGAKYRPDWTRDSTHLICAFANTPKYSQVLGLGGRIVRKEWVLDCHRMRRRLPSRRYLMAGPGSSSEEDEASHSGGSGDEAPKLPQKQPQTKTKPTQAAGPSSPQKPPTPEETKAASPVLQEDIDIEGVQSEGQDNGAEDSGDTEDELRRVAEQKEHRLPPGQEENGEDPYAGSTDENTDSEEHQEPPDLPVPELPDFFQGKHFFLYGEFPGDERRKLIRYVTAFNGELEDYMSDRVQFVITAQEWDPSFEEALMDNPSLAFVRPRWIYSCNEKQKLLPHQLYGVVPQA

SEQ ID NO: 914566 - protein, 485 aa, Homo sapiens
MPLHSRPGQQEQNFISRKKKLARRGGRCLSQLLRRLMRPGALFFSRINKTSPVTASDPAGPSYAAATLQASSAASSASPVSRAIGSTSKPQESPKGKRKLDLNQEEKKTPSKPPAQLSPSVPKRPKLPAPTRTPATAPVPARAQGAVTGKPRGEGTEPRRPRAGPEELGKILQGVVVVLSGFQNPFRSELRDKALELGAKYRPDWTRDSTHLICAFANTPKYSQVLGLGGRIVRKEWVLDCHRMRRRLPSRRYLMAGPGSSSEEDEASHSGGSGDEAPKLPQKQPQTKTKPTQAAGPSSPQKPPTPEETKAASPVLQEDIDIEGVQSEGQDNGAEDSGDTEDELRRVAEQKEHRLPPGQEENGEDPYAGSTDENTDSEEHQEPPDLPVPELPDFFQGKHFFLYGEFPGDERRKLIRYVTAFNGELEDYMSDRVQFVITAQEWDPSFEEALMDNPSLAFVRPRWIYSCNEKQKLLPHQLYGVVPQA

SEQ ID NO: 914567 - protein, 300 aa, Homo sapiens
LLAVRNLRPGDSQTAAQARDQTAALLNSAGLGAADLFVLPANCGSSDGCEELERLRAALQSQAEALRRLLPPAQDGFEVLGAAELEAVREAFETGGLEAALSWVRSGLERLGSARLDLAVAGKADVGLVVDMLLGLDPGDPGAAPASVPTAPTPFPAPERPNVVLWTVPLGHTGTATTAAAASHPTHYDALILVTPGAPTEKDWAQVQALLLPDAPLVCVRTDGEGEDPECLGEGKMENPKGESLKNAGGGGLENALSKGREKCSAGSQKAGVMPEIISEKARQFCVCVCAHRGVLVVLI

SEQ ID NO: 914568 - protein, 494 aa, Homo sapiens
LLAVRNLRPGDSQTAAQARDQTAALLNSAGLGAADLFVLPANCGSSDGCEELERLRAALQSQAEALRRLLPPAQDGFEVLGAAELEAVREAFETGGLEAALSWVRSGLERLGSARLDLAVAGKADVGLVVDMLLGLDPGDPGAAPASVPTAPTPFPAPERPNVVLWTVPLGHTGTATTAAAASHPTHYDALILVTPGAPTEKDWAQVQALLLPDAPLVCVRTDGEGEDPECLGEGKMENPKGESLKNAGGGGLENALSKGREKCSAGSQKAGSGEGPGKAGSEGLQQVVGMKKSGGGDSERAAALSPEDETWEVLEEAPPPVFPLRPGGLPGLCEWLRRALPPAQAGALLLALPPASPSAARTKAAALRAGAWRPALLASLAAAAAPLPGLGWACDVALLRGQLAEWRRGLGLEPTALARRERALGLASGELAARAHFPGPVTRAEVEARLGAWAGEGTAGGAALGALSFLWPAGGAAATGGLGYRAAHGVLLQ

SEQ ID NO: 914569 - protein, 357 aa, Homo sapiens
PPRPDPFPSPASQCLGPGILASACGAGGTRFPPPRGSASGLVLSPAAPCRRSHRSSYRREWRADQGAAGLPSAIPVSLRPRGPPEPATMPLGLKPTCSVCKTTSSSMWKKGAQGEILCHHCTGRGGAGSGGAGSGAAGGTGGSGGGGFGAATFASTSATPPQSNGGGGGKQSKQEIHRRSARLRNTKYKSAPAAEKKVSTKGKGRRHIFKLKNPIKAPESVSTIITAESIFYKGVYYQIGDVVSVIDEQDGKPYYAQIRGFIQDQYCEKSAALTWLIPTLSSPRDQFDPASYIIGPEEDLPRKMEYLEFVCHAPSEYFKSRSSPFPTVPTRPEKGYIWTHVGPTPAITIKESVANHL

SEQ ID NO: 914570 - protein, 140 aa, Homo sapiens
MFYFYFQCGIIFCFPQGVYYQIGDVVSVIDEQDGKPYYAQIRGFIQDQYCEKSAALTWLIPTLSSPRDQFDPASYIIGPEEDLPRKMEYLEFVCHAPSEYFKSRSSPFPTVPTRPEKGYIWTHVGPTPAITIKESVANHL

SEQ ID NO: 914571 - protein, 357 aa, Homo sapiens; identical to SEQ ID NO: 914569

SEQ ID NO: 914572 - protein, 321 aa, Homo sapiens
MADSMQEKQRMAGQMLLQTFFNIDQISPNKKAHPNMEAGPPESGESTDALKLCPHEEFLRLCKERAEEIYPIKERNNRTRLALIICNTEFDHLPPRNGADFDITGMKELLEGLDYSVDVEENLTARDMESALRAFATRPEHKSSDSTFLVLMSHGILEGICGTVHDEKKPDVLLYDTIFQIFNNRNCLSLKDKPKVIIVQACRGANRGELWVRDSPASLEVASSQSSENLEEDAVYKTHVEKDFIAFCSSTPHNVSWRDSTMGSIFITQLITCFQKYSWCCHLEEVFRKVQQSFETPRAKAQMPTIERLSMTRYFYLFPGN

SEQ ID NO: 914573 - protein, 286 aa, Homo sapiens
MEAGPPESGESTDALKLCPHEEFLRLCKERAEEIYPIKERNNRTRLALIICNTEFDHLPPRNGADFDITGMKELLEGLDYSVDVEENLTARDMESALRAFATRPEHKSSDSTFLVLMSHGILEGICGTVHDEKKPDVLLYDTIFQIFNNRNCLSLKDKPKVIIVQACRGANRGELWVRDSPASLEVASSQSSENLEEDAVYKTHVEKDFIAFCSSTPHNVSWRDSTMGSIFITQLITCFQKYSWCCHLEEVFRKVQQSFETPRAKAQMPTIERLSMTRYFYLFPGN

SEQ ID NO: 914574 - protein, 394 aa, Homo sapiens
NYRQVARLGVESAEGLSLWQGNHRKKPLKVLESLGKDFLTGVLDNLVEQNVLNWKEEEKKKYYDAKTEDKVRVMADSMQEKQRMAGQMLLQTFFNIDQISPNKKAHPNMEAGPPESGESTDALKLCPHEEFLRLCKERAEEIYPIKERNNRTRLALIICNTEFDHLPPRNGADFDITGMKELLEGLDYSVDVEENLTARDMESALRAFATRPEHKSSDSTFLVLMSHGILEGICGTVHDEKKPDVLLYDTIFQIFNNRNCLSLKDKPKVIIVQACRGANRGELWVRDSPASLEVASSQSSENLEEDAVYKTHVEKDFIAFCSSTPHNVSWRDSTMGSIFITQLITCFQKYSWCCHLEEVFRKVQQSFETPRAKAQMPTIERLSMTRYFYLFPGN

SEQ ID NO: 914575 - protein, 321 aa, Homo sapiens; identical to SEQ ID NO: 914572

SEQ ID NO: 914576 - protein, 320 aa, Homo sapiens
MDKGVICPELLQPFGERDRGYLSPLQAALVFWTQVVCTPPESGESTDALKLCPHEEFLRLCKERAEEIYPIKERNNRTRLALIICNTEFDHLPPRNGADFDITGMKELLEGLDYSVDVEENLTARDMESALRAFATRPEHKSSDSTFLVLMSHGILEGICGTVHDEKKPDVLLYDTIFQIFNNRNCLSLKDKPKVIIVQACRGANRGELWVRDSPASLEVASSQSSENLEEDAVYKTHVEKDFIAFCSSTPHNVSWRDSTMGSIFITQLITCFQKYSWCCHLEEVFRKVQQSFETPRAKAQMPTIERLSMTRYFYLFPGN

SEQ ID NO: 914577 - protein, 377 aa, Homo sapiens
MAEGNHRKKPLKVLESLGKDFLTGVLDNLVEQNVLNWKEEEKKKYYDAKTEDKVRVMADSMQEKQRMAGQMLLQTFFNIDQISPNKKAHPNMEAGPPESGESTDALKLCPHEEFLRLCKERAEEIYPIKERNNRTRLALIICNTEFDHLPPRNGADFDITGMKELLEGLDYSVDVEENLTARDMESALRAFATRPEHKSSDSTFLVLMSHGILEGICGTVHDEKKPDVLLYDTIFQIFNNRNCLSLKDKPKVIIVQACRGANRGELWVRDSPASLEVASSQSSENLEEDAVYKTHVEKDFIAFCSSTPHNVSWRDSTMGSIFITQLITCFQKYSWCCHLEEVFRKVQQSFETPRAKAQMPTIERLSMTRYFYLFPGN

SEQ ID NO: 914578 - protein, 359 aa, Homo sapiens
MAEGNHRKKPLKVLESLGKDFLTGVLDNLVEQNVLNWKEEEKKKYYDAKTEDKVRVMADSMQEKQRMAGQMLLQTFFNIDQISPNKKAHPNMEAGPPESGESTDALKLCPHEEFLRLCKERAEEIYPIKERNNRTRLALIICNTEFDHLPPRNGADFDITGMKELLEGLDYSVDVEENLTARDMESALRAFATRPEHKSSDSTFLVLMSHGILEGICGTVHDENCLSLKDKPKVIIVQACRGANRGELWVRDSPASLEVASSQSSENLEEDAVYKTHVEKDFIAFCSSTPHNVSWRDSTMGSIFITQLITCFQKYSWCCHLEEVFRKVQQSFETPRAKAQMPTIERLSMTRYFYLFPGN

SEQ ID NO: 914579 - protein, 263 aa, Homo sapiens
MAEGNHRKKPLKVLESLGKDFLTGVLDNLVEQNVLNWKEEEKKKYYDAKTEDKVRVMADSMQEKQRMAGQMLLQTFFNIDQISPNKKAHPNMEAGPPESGESTDALKLCPHEEFLRLCKERAEEIYPIKERNNRTRLALIICNTEFDHLPPRNGADFDITGMKELLEGLDYSVDVEENLTARDMESALRAFATRPEHKSSDSTFLVLMSHGILEGICGTVHDEKKPDVLLYDTIFQIFNNRNCLSLKDKPKVIIVQACRGGEC

SEQ ID NO: 914580 - protein, 377 aa, Homo sapiens; identical to SEQ ID NO: 914577

SEQ ID NO: 914581 - protein, 263 aa, Homo sapiens; identical to SEQ ID NO: 914579

SEQ ID NO: 914582 - protein, 321 aa, Homo sapiens; identical to SEQ ID NO: 914572

SEQ ID NO: 914583 - protein, 377 aa, Homo sapiens; identical to SEQ ID NO: 914577

SEQ ID NO: 914584 - protein, 361 aa, Homo sapiens
MAEGNHRKKPLKVLESLGKDFLTGVLDNLVEQNVLNWKEEEKKKYYDAKTEDKVRVMADSMQEKQRMAGQMLLQTFFNIDQISPNKKDALKLCPHEEFLRLCKERAEEIYPIKERNNRTRLALIICNTEFDHLPPRNGADFDITGMKELLEGLDYSVDVEENLTARDMESALRAFATRPEHKSSDSTFLVLMSHGILEGICGTVHDEKKPDVLLYDTIFQIFNNRNCLSLKDKPKVIIVQACRGANRGELWVRDSPASLEVASSQSSENLEEDAVYKTHVEKDFIAFCSSTPHNVSWRDSTMGSIFITQLITCFQKYSWCCHLEEVFRKVQQSFETPRAKAQMPTIERLSMTRYFYLFPGN

SEQ ID NO: 914585 - protein, 390 aa, Homo sapiens
MAEGNHRKKPLKVLESLGKDFLTGVLDNLVEQNVLNWKEEEKKKYYDAKTEDKVRVMADSMQEKQRMAGQMLLQTFFNIDQISPNKKAHPNMEAGPPESGESTDALKLCPHEEFLRLCKERAEEIYPIKERNNRTRLALIICNTEFDHLPPRNGADFDITGMKELLEGLDYSVDVEENLTARDMESALRAFATRPEHKSSDSTFLVLMSHGILEGICGTVHDEKKPDVLLYDTIFQIFNNRNCLSLKDKPKVIIVQACRGANRGELWVRDSPASLEVASSQSSENLEEDAVYKTHVEKDFIAFCSSTPHNVSWRDSTMGSIFITQLITCFQKYSWCCHLEEVFRKVSVSFLVTHLFLQEEFVMIHFLLHNDNFCQGSESREVPSFCHSVV

SEQ ID NO: 914586 - protein, 157 aa, Homo sapiens
MAEGNHRKKPLKVLESLGKDFLTGVLDNLVEQNVLNWKEEEKKKYYDAKTEDKVRVMADSMQEKQRMAGQMLLQTFFNIDQISPNKKAHPNMEAGPPESGESTDALKLCPHEEFLRLCKERAEEVLCYLYEIEKKEEISLLSFSAPFLTALNDWGWG

SEQ ID NO: 914587 - protein, 1511 aa, Homo sapiens
AHSWDVGRGRAGAVGSRPWWLRASERPSAPSAMAKRSRGPGRRCLLALVLFCAWGTLAVVAQKPGAGCPSRCLCFRTTVRCMHLLLEAVPAVAPQTSILDLRFNRIREIQPGAFRRLRNLNTLLLNNNQIKRIPSGAFEDLENLKYLYLYKNEIQSIDRQAFKGLASLEQLYLHFNQIETLDPDSFQHLPKLERLFLHNNRITHLVPGTFNHLESMKRLRLDSNTLHCDCEILWLADLLKTYAESGNAQAAAICEYPRRIQGRSVATITPEELNCERPRITSEPQDADVTSGNTVYFTCRAEGNPKPEIIWLRNNNELSMKTDSRLNLLDDGTLMIQNTQETDQGIYQCMAKNVAGEVKTQEVTLRYFGSPARPTFVIQPQNTEVLVGESVTLECSATGHPPPRISWTRGDRTPLPVDPRVNITPSGGLYIQNVVQGDSGEYACSATNNIDSVHATAFIIVQALPQFTVTPQDRVVIEGQTVDFQCEAKGNPPPVIAWTKGGSQLSVDRRHLVLSSGTLRISGVALHDQGQYECQAVNIIGSQKVVAHLTVQPRVTPVFASIPSDTTVEVGANVQLPCSSQGEPEPAITWNKDGVQVTESGKFHISPEGFLTINDVGPADAGRYECVARNTIGSASVSMVLSVNVPDVSRNGDPFVATSIVEAIATVDRAINSTRTHLFDSRPRSPNDLLALFRYPRDPYTVEQARAGEIFERTLQLIQEHVQHGLMVDLNGTSYHYNDLVSPQYLNLIANLSGCTAHRRVNNCSDMCFHQKYRTHDGTCNNLQHPMWGASLTAFERLLKSVYENGFNTPRGINPHRLYNGHALPMPRLVSTTLIGTETVTPDEQFTHMLMQWGQFLDHDLDSTVVALSQARFSDGQHCSNVCSNDPPCFSVMIPPNDSRARSGARCMFFVRSSPVCGSGMTSLLMNSVYPREQINQLTSYIDASNVYGSTEHEARSIRDLASHRGLLRQGIVQRSGKPLLPFATGPPTECMRDENESPIPCFLAGDHRANEQLGLTSMHTLWFREHNRIATELLKLNPHWDGDTIYYETRKIVGAEIQHITYQHWLPKILGEVGMRTLGEYHGYDPGINAGIFNAFATAAFRFGHTLVNPLLYRLDENFQPIAQDHLPLHKAFFSPFRIVNEGGIDPLLRGLFGVAGKMRVPSQLLNTELTERLFSMAHTVALDLAAINIQRGRDHGIPPYHDYRVYCNLSAAHTFEDLKNEIKNPEIREKLKRLYGSTLNIDLFPALVVEDLVPGSRLGPTLMCLLSTQFKRLRDGDRLWYENPGVFSPAQLTQIKQTSLARILCDNADNITRVQSDVFRVAEFPHGYGSCDEIPRVDLRVWQDCCEDCRTRGQFNAFSYHFRGRRSLEFSYQEDKPTKKTRPRKIPSVGRQGEHLSNSTSAFSTRSDASGTNDFREFVLEMQKTITDLRTQIKKLESRLSTTECVDAGGESHANNTKWKKDACTICECKDGQVTCFVEACPPATCAVPVNIPGACCPVCLQKRAEEKP

SEQ ID NO: 914588 - protein, 1148 aa, Homo sapiens
MPTACFSYARPTFVIQPQNTEVLVGESVTLECSATGHPPPRISWTRGDRTPLPVDPRVNITPSGGLYIQNVVQGDSGEYACSATNNIDSVHATAFIIVQALPQFTVTPQDRVVIEGQTVDFQCEAKGNPPPVIAWTKGGSQLSVDRRHLVLSSGTLRISGVALHDQGQYECQAVNIIGSQKVVAHLTVQPRVTPVFASIPSDTTVEVGANVQLPCSSQGEPEPAITWNKDGVQVTESGKFHISPEGFLTINDVGPADAGRYECVARNTIGSASVSMVLSVNVPDVSRNGDPFVATSIVEAIATVDRAINSTRTHLFDSRPRSPNDLLALFRYPRDPYTVEQARAGEIFERTLQLIQEHVQHGLMVDLNGTSYHYNDLVSPQYLNLIANLSGCTAHRRVNNCSDMCFHQKYRTHDGTCNNLQHPMWGASLTAFERLLKSVYENGFNTPRGINPHRLYNGHALPMPRLVSTTLIGTETVTPDEQFTHMLMQWGQFLDHDLDSTVVALSQARFSDGQHCSNVCSNDPPCFSVMIPPNDSRARSGARCMFFVRSSPVCGSGMTSLLMNSVYPREQINQLTSYIDASNVYGSTEHEARSIRDLASHRGLLRQGIVQRSGKPLLPFATGPPTECMRDENESPIPCFLAGDHRANEQLGLTSMHTLWFREHNRIATELLKLNPHWDGDTIYYETRKIVGAEIQHITYQHWLPKILGEVGMRTLGEYHGYDPGINAGIFNAFATAAFRFGHTLVNPLLYRLDENFQPIAQDHLPLHKAFFSPFRIVNEGGIDPLLRGLFGVAGKMRVPSQLLNTELTERLFSMAHTVALDLAAINIQRGRDHGIPPYHDYRVYCNLSAAHTFEDLKNEIKNPEIREKLKRLYGSTLNIDLFPALVVEDLVPGSRLGPTLMCLLSTQFKRLRDGDRLWYENPGVFSPAQLTQIKQTSLARILCDNADNITRVQSDVFRVAEFPHGYGSCDEIPRVDLRVWQDCCEDCRTRGQFNAFSYHFRGRRSLEFSYQEDKPTKKTRPRKIPSVGRQGEHLSNSTSAFSTRSDASGTNDFREFVLEMQKTITDLRTQIKKLESRLSTTECVDAGGESHANNTKWKKDACTICECKDGQVTCFVEACPPATCAVPVNIPGACCPVCLQKRAEEKP

SEQ ID NO: 914589 - protein, 254 aa, Homo sapiens
ERERERERERERERERERERADRLWYENPGVFSPAQLTQIKQTSLARILCDNADNITRVQSDVFRVAEFPHGYGSCDEIPRVDLRVWQDCCEDCRTRGQFNAFSYHFRGRRSLEFSYQEDKPTKKTRPRKIPSVGRQGEHLSNSTSAFSTRSDASGTNDFREFVLEMQKTITDLRTQIKKLESRLSTTECVDAGGESHANNTKWKKDACTICECKDGQVTCFVEACPPATCAVPVNIPGACCPVCLQKRAEEKP

SEQ ID NO: 914590 - protein, 1390 aa, Homo sapiens
AHSWDVGRGRAGAVGSRPWWLRASERPSAPSAMAKRSRGPGRRCLLALVLFCAWGTLAVVAQKPGAGCPSRCLCFRTTVRCMHLLLEAVPAVAPQTSILDLRFNRIREIQPGAFRRLRNLNTLLLNNNQIKRIPSGAFEDLENLKYLYLYKNEIQSIDRQAFKGLASLEQLYLHFNQIETLDPDSFQHLPKLERLFLHNNRITHLVPGTFNHLESMKRLRLDSNTLHCDCEILWLADLLKTYAESGNAQAAAICEYPRRIQGRSVATITPEELNCERPRITSEPQDADVTSGNTVYFTCRAEGNPKPEIIWLRNNNELSMKTDSRLNLLDDGTLMIQNTQETDQGIYQCMAKNVAGEVKTQEVTLRYFGSPARPTFVIQPQNTEVLVGESVTLECSATGHPPPRISWTRGDRTPLPVDPRVNITPSGGLYIQNVVQGDSGEYACSATNNIDSVHATAFIIVQALPQFTVTPQDRVVIEGQTVDFQCEAKGNPPPVIAWTKGGSQLSVDRRHLVLSSGTLRISGVALHDQGQYECQAVNIIGSQKVVAHLTVQPRVTPVFASIPSDTTVEVGANVQLPCSSQGEPEPAITWNKDGVQVTESGKFHISPEGFLTINDVGPADAGRYECVARNTIGSASVSMVLSVNVPDVSRNGDPFVATSIVEAIATVDRAINSTRTHLFDSRPRSPNDLLALFRYPRDPYTVEQARAGEIFERTLQLIQEHVQHGLMVDLNGTSYHYNDLVSPQYLNLIANLSGCTAHRRVNNCSDMCFHQKYRTHDGTCNNLQHPMWGASLTAFERLLKSVYENGFNTPRGINPHRLYNGHALPMPRLVSTTLIGTETVTPDEQFTHMLMQWGQFLDHDLDSTVVALSQARFSDGQHCSNVCSNDPPCFSVMIPPNDSRARSGARCMFFVRSSPVCGSGMTSLLMNSVYPREQINQLTSYIDASNVYGSTEHEARSIRDLASHRGLLRQGIVQRSGKPLLPFATGPPTECMRDENESPIPCFLAGDHRANEQLGLTSMHTLWFREHNRIATELLKLNPHWDGDTIYYETRKIVGAEIQHITYQHWLPKILGEVGMRTLGEYHGYDPGINAGIFNAFATAAFRFGHTLVNPLLYRLDENFQPIAQDHLPLHKAFFSPFRIVNEGGIDPLLRGLFGVAGKMRVPSQLLNTELTERLFSMAHTVALDLAAINIQRGRDHGIPPYHDYRVYCNLSAAHTFEDLKNEIKNPEIREKLKRLYGSTLNIDLFPALVVEDLVPGSRLGPTLMCLLSTQFKRLRDGDRLWYENPGVFSPAQLTQIKQTSLARILCDNADNITRVQSDVFRVAEFPHGYGSCDEIPRVDLRVWQDCCEDCRTRGQFNAFSYHFRGRRSLEFSYQEDKPTKKTRPRKIPR

SEQ ID NO: 914591 - protein, 1511 aa, Homo sapiens; identical to SEQ ID NO: 914587

SEQ ID NO: 914592 - protein, 1511 aa, Homo sapiens; identical to SEQ ID NO: 914587

SEQ ID NO: 914593 - protein, 66 aa, Homo sapiens
  misc_feature (8)..(8): Xaa can be any naturally occurring amino acid
RPPLGGGXYTHSHNLKLDSSRHLSSSSLGKSHPEAALVQDVDATRAGWERRCQHTPLAPGLFPGNL

SEQ ID NO: 914594 - protein, 981 aa, Homo sapiens
AHSWDVGRGRAGAVGSRPWWLRASERPSAPSAMAKRSRGPGRRCLLALVLFCAWGTLAVVAQKPGAGCPSRCLCFRTTVRCMHLLLEAVPAVAPQTSILDLRFNRIREIQPGAFRRLRNLNTLLLNNNQIKRIPSGAFEDLENLKYLYLYKNEIQSIDRQAFKGLASLEQLYLHFNQIETLDPDSFQHLPKLERLFLHNNRITHLVPGTFNHLESMKRLRLDSNTLHCDCEILWLADLLKTYAESGNAQAAAICEYPRRIQGRSVATITPEELNCERPRITSEPQDADVTSGNTVYFTCRAEGNPKPEIIWLRNNNELSMKTDSRLNLLDDGTLMIQNTQETDQGIYQCMAKNVAGEVKTQEVTLRYFGSPARPTFVIQPQNTEVLVGESVTLECSATGHPPPRISWTRGDRTPLPVDPRVNITPSGGLYIQNVVQGDSGEYACSATNNIDSVHATAFIIVQALPQFTVTPQDRVVIEGQTVDFQCEAKGNPPPVIAWTKGGSQLSVDRRHLVLSSGTLRISGVALHDQGQYECQAVNIIGSQKVVAHLTVQPRVTPVFASIPSDTTVEVGANVQLPCSSQGEPEPAITWNKDGVQVTESGKFHISPEGFLTINDVGPADAGRYECVARNTIGSASVSMVLSVNVPDVSRNGDPFVATSIVEAIATVDRAINSTRTHLFDSRPRSPNDLLALFRYPRDPYTVEQARAGEIFERTLQLIQEHVQHGLMVDLNGTSYHYNDLVSPQYLNLIANLSGCTAHRRVNNCSDMCFHQKYRTHDGTCNNLQHPMWGASLTAFERLLKSVYENGFNTPRGINPHRLYNGHALPMPRLVSTTLIGTETVTPDEQFTHMLMQWGQFLDHDLDSTVVALSQARFSDGQHCSNVRGRFGSGWQVSSTGVWRRGFHGVGEASFLLTGWAHTVPGVICAQPVFQVHILPRRHPDPSSTGRPSCCGGGSISAVRKVIGFMCFICKNGCLNFLTSYW

SEQ ID NO: 914595 - protein, 1511 aa, Homo sapiens; identical to SEQ ID NO: 914587

SEQ ID NO: 914596 - protein, 1292 aa, Homo sapiens
AHSWDVGRGRAGAVGSRPWWLRASERPSAPSAMAKRSRGPGRRCLLALVLFCAWGTLAVVAQKPGAGCPSRCLCFRTTVRCMHLLLEAVPAVAPQTSILDLRFNRIREIQPGAFRRLRNLNTLLLNNNQIKRIPSGAFEDLENLKYLYLYKNEIQSIDRQAFKGLASLEQLYLHFNQIETLDPDSFQHLPKLERLFLHNNRITHLVPGTFNHLESMKRLRLDSNTLHCDCEILWLADLLKTYAESGNAQAAAICEYPRRIQGRSVATITPEELNCERPRITSEPQDADVTSGNTVYFTCRAEGNPKPEIIWLRNNNELSMKTDSRLNLLDDGTLMIQNTQETDQGIYQCMAKNVAGEVKTQEVTLRYFGSPARPTFVIQPQNTEVLVGESVTLECSATGHPPPRISWTRGDRTPLPVDPRVNITPSGGLYIQNVVQGDSGEYACSATNNIDSVHATAFIIVQALPQFTVTPQDRVVIEGQTVDFQCEAKGNPPPVIAWTKGGSQLSVDRRHLVLSSGTLRISGVALHDQGQYECQAVNIIGSQKVVAHLTVQPRVTPVFASIPSDTTVEVGANVQLPCSSQGEPEPAITWNKDGVQVTESGKFHISPEGFLTINDVGPADAGRYECVARNTIGSASVSMVLSVNVPDVSRNGDPFVATSIVEAIATVDRAINSTRTHLFDSRPRSPNDLLALFRYPRDPYTVEQARAGEIFERTLQLIQEHVQHGLMVDLNGTSYHYNDLVSPQYLNLIANLSGCTAHRRVNNCSDMCFHQKYRTHDGTCNNLQHPMWGASLTAFERLLKSVYENGFNTPRGINPHRLYNGHALPMPRLVSTTLIGTETVTPDEQFTHMLMQWGQFLDHDLDSTVVALSQARFSDGQHCSNVCSNDPPCFSVMIPPNDSRARSGARCMFFVRSSPVCGSGMTSLLMNSVYPREQINQLTSYIDASNVYGSTEHEARSIRDLASHRGLLRQGIVQRSGKPLLPFATGPPTECMRDENESPIPCFLAGDHRANEQLGLTSMHTLWFREHNRIATELLKLNPHWDGDTIYYETRKIVGAEIQHITYQHWLPKILGEVGMRTLGEYHGYDPGINAGIFNAFATAAFRFGHTLVNPLLYRLDENFQPIAQDHLPLHKAFFSPFRIVNEGGIDPLLRGLFGVAGKMRVPSQLLNTELTERLFSMAHTVALDLAAINIQRGRDHGIPPYHDYRVYCNLSAAHTFEDLKNEIKNPEIREKLKRLYGSTLNIDLFPALVVEDLVPGSRLGPTLMCLLSTQFKRLRDGDRVVVSDLGVSATK

SEQ ID NO: 914597 - protein, 1525 aa, Homo sapiens
AHSWDVGRGRAGAVGSRPWWLRASERPSAPSAMAKRSRGPGRRCLLALVLFCAWGTLAVVAQKPGAGCPSRCLCFRTTVRCMHLLLEAVPAVAPQTSILNCRSYPSLQQPHPDPSAASNIKARFSTSQKKKTLCRLRDLRFNRIREIQPGAFRRLRNLNTLLLNNNQIKRIPSGAFEDLENLKYLYLHFNQIETLDPDSFQHLPKLERLFLHNNRITHLVPGTFNHLESMKRLRLDSNTLHCDCEILWLADLLKTYAESGNAQAAAICEYPRRIQGRSVATITPEELNCERPRITSEPQDADVTSGNTVYFTCRAEGNPKPEIIWLRNNNELSMKTDSRLNLLDDGTLMIQNTQETDQGIYQCMAKNVAGEVKTQEVTLRYFGSPARPTFVIQPQNTEVLVGESVTLECSATGHPPPRISWTRGDRTPLPVDPRVNITPSGGLYIQNVVQGDSGEYACSATNNIDSVHATAFIIVQALPQFTVTPQDRVVIEGQTVDFQCEAKGNPPPVIAWTKGGSQLSVDRRHLVLSSGTLRISGVALHDQGQYECQAVNIIGSQKVVAHLTVQPRVTPVFASIPSDTTVEVGANVQLPCSSQGEPEPAITWNKDGVQVTESGKFHISPEGFLTINDVGPADAGRYECVARNTIGSASVSMVLSVNVPDVSRNGDPFVATSIVEAIATVDRAINSTRTHLFDSRPRSPNDLLALFRYPRDPYTVEQARAGEIFERTLQLIQEHVQHGLMVDLNGTSYHYNDLVSPQYLNLIANLSGCTAHRRVNNCSDMCFHQKYRTHDGTCNNLQHPMWGASLTAFERLLKSVYENGFNTPRGINPHRLYNGHALPMPRLVSTTLIGTETVTPDEQFTHMLMQWGQFLDHDLDSTVVALSQARFSDGQHCSNVCSNDPPCFSVMIPPNDSRARSGARCMFFVRSSPVCGSGMTSLLMNSVYPREQINQLTSYIDASNVYGSTEHEARSIRDLASHRGLLRQGIVQRSGKPLLPFATGPPTECMRDENESPIPCFLAGDHRANEQLGLTSMHTLWFREHNRIATELLKLNPHWDGDTIYYETRKIVGAEIQHITYQHWLPKILGEVGMRTLGEYHGYDPGINAGIFNAFATAAFRFGHTLVNPLLYRLDENFQPIAQDHLPLHKAFFSPFRIVNEGGIDPLLRGLFGVAGKMRVPSQLLNTELTERLFSMAHTVALDLAAINIQRGRDHGIPPYHDYRVYCNLSAAHTFEDLKNEIKNPEIREKLKRLYGSTLNIDLFPALVVEDLVPGSRLGPTLMCLLSTQFKRLRDGDRLWYENPGVFSPAQLTQIKQTSLARILCDNADNITRVQSDVFRVAEFPHGYGSCDEIPRVDLRVWQDCCEDCRTRGQFNAFSYHFRGRRSLEFSYQEDKPTKKTRPRKIPSVGRQGEHLSNSTSAFSTRSDASGTNDFREFVLEMQKTITDLRTQIKKLESRLSTTECVDAGGESHANNTKWKKDACTICECKDGQVTCFVEACPPATCAVPVNIPGACCPVCLQKRAEEKP

SEQ ID NO: 914598 - protein, 480 aa, Homo sapiens
RTAGTWAAAGRAQSGAGRGGSVRPSVRPRRRPWPSVPKILGEVGMRTLGEYHGYDPGINAGIFNAFATAAFRFGHTLVNPLLYRLDENFQPIAQDHLPLHKAFFSPFRIVNEGGIDPLLRGLFGVAGKMRVPSQLLNTELTERLFSMAHTVALDLAAINIQRGRDHGIPPYHDYRVYCNLSAAHTFEDLKNEIKNPEIREKLKRLYGSTLNIDLFPALVVEDLVPGSRLGPTLMCLLSTQFKRLRDGDRLWYENPGVFSPAQLTQIKQTSLARILCDNADNITRVQSDVFRVAEFPHGYGSCDEIPRVDLRVWQDCCEDCRTRGQFNAFSYHFRGRRSLEFSYQEDKPTKKTRPRKIPSVGRQGEHLSNSTSAFSTRSDASGTNDFREFVLEMQKTITDLRTQIKKLESRLSTTECVDAGGESHANNTKWKKDACTICECKDGQVTCFVEACPPATCAVPVNIPGACCPVCLQKRAEEKP

SEQ ID NO: 914599 - protein, 1511 aa, Homo sapiens; identical to SEQ ID NO: 914587

SEQ ID NO: 914600 - protein, 1511 aa, Homo sapiens; identical to SEQ ID NO: 914587

SEQ ID NO: 914601 - protein, 66 aa, Homo sapiens; identical to SEQ ID NO: 914593
  misc_feature (8)..(8): Xaa can be any naturally occurring amino acid

SEQ ID NO: 914602 - protein, 1511 aa, Homo sapiens; identical to SEQ ID NO: 914587

SEQ ID NO: 914603 - protein, 1511 aa, Homo sapiens; identical to SEQ ID NO: 914587

SEQ ID NO: 914604 - protein, 190 aa, Homo sapiens
HIQVTLMQEVGSLGLQQLHPCHFAGYSFPPDYFHGLALNVCGFFQSLLSIRGSLFSPRRNSRASLFSFRGRAKDIGSENDFADDEHSTFEDNDSRRDSLFVPHRHGERRHSNVSQASRASRVLPILPMNGKMHSAVDCNGVVSLVGGPSTLTSAGQLLPEVRPIKIAADVKRVVTGAGRSVFPFPHLRIC

SEQ ID NO: 914605 - protein, 2005 aa, Homo sapiens
MAQSVLVPPGPDSFRFFTRESLAAIEQRIAEEKAKRPKQERKDEDDENGPKPNSDLEAGKSLPFIYGDIPPEMVSVPLEDLDPYYINKKTFIVLNKGKAISRFSATPALYILTPFNPIRKLAIKILVHSLFNMLIMCTILTNCVFMTMSNPPDWTKNVEYTFTGIYTFESLIKILARGFCLEDFTFLRDPWNWLDFTVITFAYVTEFVDLGNVSALRTFRVLRALKTISVIPGLKTIVGALIQSVKKLSDVMILTVFCLSVFALIGLQLFMGNLRNKCLQWPPDNSSFEINITSFFNNSLDGNGTTFNRTVSIFNWDEYIEDKSHFYFLEGQNDALLCGNSSDAGQCPEGYICVKAGRNPNYGYTSFDTFSWAFLSLFRLMTQDFWENLYQLTLRAAGKTYMIFFVLVIFLGSFYLINLILAVVAMAYEEQNQATLEEAEQKEAEFQQMLEQLKKQQEEAQAAAAAASAESRDFSGAGGIGVFSESSSVASKLSSKSEKELKNRRKKKKQKEQSGEEEKNDRVLKSESEDSIRRKGFRFSLEGSRLTYEKRFSSPHQSLLSIRGSLFSPRRNSRASLFSFRGRAKDIGSENDFADDEHSTFEDNDSRRDSLFVPHRHGERRHSNVSQASRASRVLPILPMNGKMHSAVDCNGVVSLVGGPSTLTSAGQLLPEGTTTETEIRKRRSSSYHVSMDLLEDPTSRQRAMSIASILTNTMEELEESRQKCPPCWYKFANMCLIWDCCKPWLKVKHLVNLVVMDPFVDLAITICIVLNTLFMAMEHYPMTEQFSSVLSVGNLVFTGIFTAEMFLKIIAMDPYYYFQEGWNIFDGFIVSLSLMELGLANVEGLSVLRSFRLLRVFKLAKSWPTLNMLIKIIGNSVGALGNLTLVLAIIVFIFAVVGMQLFGKSYKECVCKISNDCELPRWHMHDFFHSFLIVFRVLCGEWIETMWDCMEVAGQTMCLTVFMMVMVIGNLVVLNLFLALLLSSFSSDNLAATDDDNEMNNLQIAVGRMQKGIDFVKRKIREFIQKAFVRKQKALDEIKPLEDLNNKKDSCISNHTTIEIGKDLNYLKDGNGTTSGIGSSVEKYVVDESDYMSFINNPSLTVTVPIAVGESDFENLNTEEFSSESDMEESKEKLNATSSSEGSTVDIGAPAEGEQPEVEPEESLEPEACFTEDCVRKFKCCQISIEEGKGKLWWNLRKTCYKIVEHNWFETFIVFMILLSSGALAFEDIYIEQRKTIKTMLEYADKVFTYIFILEMLLKWVAYGFQVYFTNAWCWLDFLIVDVSLVSLTANALGYSELGAIKSLRTLRALRPLRALSRFEGMRAVVNALLGAIPSIMNVLLVCLIFWLIFSIMGVNLFAGKFYHCINYTTGEMFDVSVVNNYSECKALIESNQTARWKNVKVNFDNVGLGYLSLLQVATFKGWMDIMYAAVDSRNVELQPKYEDNLYMYLYFVIFIIFGSFFTLNLFIGVIIDNFNQQKKKFGGQDIFMTEEQKKYYNAMKKLGSKKPQKPIPRPANKFQGMVFDFVTKQVFDISIMILICLNMVTMMVETDDQSQEMTNILYWINLVFIVLFTGECVLKLISLRYYYFTIGWNIFDFVVVILSIVGMFLAELIEKYFVSPTLFRVIRLARIGRILRLIKGAKGIRTLLFALMMSLPALFNIGLLLFLVMFIYAIFGMSNFAYVKREVGIDDMFNFETFGNSMICLFQITTSAGWDGLLAPILNSGPPDCDPDKDHPGSSVKGDCGNPSVGIFFFVSYIIISFLVVVNMYIAVILENFSVATEESAEPLSEDDFEMFYEVWEKFDPDATQFIEFAKLSDFADALDPPLLIAKPNKVQLIAMDLPMVSGDRIHCLDILFAFTKRVLGESGEMDALRIQMEERFMASNPSKVSYEPITTTLKRKQEEVSAIIIQRAYRRYLLKQKVKKVSSIYKKDKGKECDGTPIKEDTLIDKLNENSTPEKTDMTPSTTSPPSYDSVTKPEKEKFEKDKSEKEDKGKDIRESKK

SEQ ID NO: 914606 - protein, 2005 aa, Homo sapiens; identical to SEQ ID NO: 914605

SEQ ID NO: 914607 - protein, 128 aa, Homo sapiens
KLAKSWPTLNMLIKIIGNSVGALGNLTLVLAIIVFIFAVVGMQLFGKSYKECVCKISNDCELPRWHMHDFFHSFLIVFRVLCGEWIETMWDCMEVAGQTMCLTVFMMVMVIGNLVVCSKNIFLIFIKR

SEQ ID NO: 914608 - protein, 275 aa, Homo sapiens
PGGAGASGAERGAGPAAKVRGGIDVAAAADDPHPAGRLRRPTLAARQGARRAPRERVPARGSSAASPFGRSGSRLSGPAWRPRLRRGGRQRRPGMASAGSGMEEVRVSVLTPLKLVGLVCIFLALCLDLGAVLSPAWVTADHQYYLSLWESCRKPASLDIWHCESTLSSDWQIATLALLLGGAAIILIAFLVGLISICVGSRRRFYRPVAVMLFAAVVLQVCSLVLYPIKFIETVSLKIYHEFNWGYGLAWGATIFSFGGAILYCLNPKNYEDYY

SEQ ID NO: 914609 - protein, 275 aa, Homo sapiens; identical to SEQ ID NO: 914608

SEQ ID NO: 914610 - protein, 275 aa, Homo sapiens; identical to SEQ ID NO: 914608

SEQ ID NO: 914611 - protein, 275 aa, Homo sapiens; identical to SEQ ID NO: 914608

SEQ ID NO: 914612 - protein, 210 aa, Homo sapiens
AGRSGRERGRARRGAGGEGPGWNRRRCGCRRPTPGRPPPQTHLGRAAGGAQSPEGASPRAWQLGGFSLREVRLPALRTRLASSPAAGRTTAAPRNGFGGQRHGGDWQIATLALLLGGAAIILIAFLVGLISICVGSRRRFYRPVAVMLFAAVVLQVCSLVLYPIKFIETVSLKIYHEFNWGYGLAWGATIFSFGGAILYCLNPKNYEDYY

SEQ ID NO: 914613 - protein, 275 aa, Homo sapiens; identical to SEQ ID NO: 914608

SEQ ID NO: 914614 - protein, 239 aa, Homo sapiens
MAPSVPAAEPEYPKGIRAVLLGPPGAGKGTQAPRLAENFCVCHLATGDMLRAMVASGSELGKKLKATMDAGKLVSDEMVVELIEKNLETPLCKNGFLLDGFPRTVRQAEMLDDLMEKRKEKLDSVIEFSIPDSLLIRRITGRLIHPKSGRSYHEEFNPPKEPMKDDITGEPLIRRSDDNEKALKIRLQAYHTQTTPLIEYYRKRGIHSAIDASQTPDVVFASILAAFSKATCKDLVMFI

SEQ ID NO: 914615 - protein, 239 aa, Homo sapiens; identical to SEQ ID NO: 914614

SEQ ID NO: 914616 - protein, 112 aa, Homo sapiens
MATGHEYLATLLPSLPGPSECLLPLSCLVFLALNQLHPLLMETQSGFVCFWEAHDFWEWARKRSETKTVSYVCLVWDPSLGDSGIMNLRISSPLTRDNCKHLASKLRFLNVC

SEQ ID NO: 914617 - protein, 155 aa, Homo sapiens [sequence omitted]

SEQ ID NO: 914618 - protein, 155 aa, Homo sapiens
MVVELIEKNLETPLCKNGFLLDGFPRTVRQAEMLDDLMEKRKEKLDSVIEFSIPDSLLIRRITGRLIHPKSGRSYHEEFNPPKEPMKDDITGEPLIRRSDDNEKALKIRLQAYHTQTTPLIEYYRKRGIHSAIDASQTPDVVFASILAAFSKATC

SEQ ID NO: 914619 - protein, 155 aa, Homo sapiens [sequence omitted]

SEQ ID NO: 914620 - protein, 155 aa, Homo sapiens [sequence omitted]

SEQ ID NO: 914621 - protein, 155 aa, Homo sapiens [sequence omitted]

SEQ ID NO: 914622 - protein, 168 aa, Homo sapiens
MAPSVPAAEPEYPKGIRAVLLGPPGAGKGTQAPRLAENFCVCHLATGDMLRAMVASGSELGKKLKATMDAGKLVSDEMVVELIEKNLETPLCKNGFLLDGFPRTVRQAEMLDDLMEKRKEKLDSVIEFSIPDSLLIRRITGRLIHPKSGRSYHEEFNPPKEPMKDDRM

SEQ ID NO: 914623 - protein, 162 aa, Homo sapiens [sequence omitted]

SEQ ID NO: 914624 - protein, 161 aa, Homo sapiens
  misc_feature (9)..(9): Xaa can be any naturally occurring amino acid
  misc_feature (16)..(16): Xaa can be any naturally occurring amino acid
  misc_feature (55)..(55): Xaa can be any naturally occurring amino acid
KPGVFSPKXLDFGTFXSVSSSLYVPRSVRIPVLHIFCELTLKLSRFTIQEFLPSXPAPLVVLVSDEMVVELIEKNLETPLCKNGFLLDGFPRTVRQAEMLDDLMEKRKEKLDSVIEFSIPDSLLIRRITGRLIHPKSGRSYHEEFNPPKEPMKDDMIMKRP

SEQ ID NO: 914625 - protein, 232 aa, Homo sapiens
MAPSVPAAEPEYPKGIRAVLLGPPGAGKGTQAPRLAENFCVCHLATGDMLRAMVASGSELGKKLKATMDAGKLVSDEMVVELIEKNLETPLCKNGFLLDGFPRTVRQAEMLDDLMEKRKEKLDSVIEFSIPDSLLIRRITGRLIHPKSGRSYHEEFNPPKEPMKDDITGEPLIRRSDDNEKALKIRLQAYHTQTTPLIEYYRKRGIHSAIDASQTPDVVFASILAAFSKATS

SEQ ID NO: 914626 - protein, 155 aa, Homo sapiens [sequence omitted]

SEQ ID NO: 914627 - protein, 155 aa, Homo sapiens [sequence omitted]

SEQ ID NO: 914628 - protein, 155 aa, Homo sapiens [sequence omitted]

SEQ ID NO: 914629 - protein, 155 aa, Homo sapiens [sequence omitted]

SEQ ID NO: 914630 - protein, 162 aa, Homo sapiens [sequence omitted]

SEQ ID NO: 914631 - protein, 155 aa, Homo sapiens [sequence omitted]

SEQ ID NO: 914632 - protein, 162 aa, Homo sapiens [sequence omitted]

SEQ ID NO: 914633 - protein, 108 aa, Homo sapiens
HFNLLLSVFSIRLLSPVLSLILLLIALELVNIHAVCGKNAHEYQQYLKFVKSILQYTENLVAYTSYEKNKWNETINLTHTALLKMWTFSEKKQMLIHLAKKSTSKVLL

SEQ ID NO: 914634 - protein, 326 aa, Homo sapiens
MEFLWDFLNHQEGPRIRDHLSHGEINLHEFSKETTNQLLAFSLVLLLRFVDDCLLSVFKEKSAVELLISLAEGYSSRCHPVFQLKKQVLSCEESIRVWALLPFPEELTRQAVRLEDNSETNACHSLITKMTDELYHHMPENRCVLKDLDRLPTETWPQLLRELCSTPVPTLFCPRIVLEVLVVLRSISEQCRRVSSQVTVASELRHRQWVERTLRSRQRQNYLRMWSSIRLLSPVLSLILLLIALELVNIHAVCGKNAHEYQQYLKFVKSILQYTENLVAYTSYEKNKWNETINLTHTALLKMWTFSEKKQMLIHLAKKSTSKVLL

SEQ ID NO: 914635 - protein, 642 aa, Homo sapiens
IHARRSGAPEVMEVLIGDPITTCLSPSVYDIICNLGFQLRENCDINSIVTQNGEVCWKTITDCVSYTESEQGLDYWGSVRLLGPVCEAVHSHFLSLTKGQFEIRYAPWFQWTSFPELFPEIFDALESLQSPAISLSLMKLTSCLERALGDVFLLIGKECPFLLRDLLSSEELAQVFSQSVMNVLKVFVGSPCGLNLRNVLWHGFASPEEIPPKYCSMMILLTAGLGQLLKSYLQNTKLTLAHRSFISLTNLEDLIVFPDVTYEVLSVLEEVMMKSAFILKIMLPYWEVALVKFKSHRFADCAILLLTQLETGLRNVFATLNRCPKRLLTAESTALYTTFDQILAKHLNDGKINQLPLFLGEPAMEFLWDFLNHQEGPRIRDHLSHGEINLHEFSKETTNQLLAFSLVLLLRFVDDCLLSVFKEKSAVELLISLAEGYSSRCHPVFQLKKQVLSCEESIRVWALLPFPEELTRQAVRLEDNSETNACHSLITKMTDELYHHMPENRCVLKDLDRLPTETPTSDTPLALAPRKPQPCRCRRRVRPSIRLLSPVLSLILLLIALELVNIHAVCGKNAHEYQQYLKFVKSILQYTENLVAYTSYEKNKWNETINLTHTALLKMWTFSEKKQMLIHLAKKSTSKVLL

SEQ ID NO: 914636 - protein, 197 aa, Homo sapiens
MTDELYHHMPENRCVLKDLDRLPTETWPQLLRELCSTPVPTLFCPRIVLEVLVVLRSISEQCRRVSSQVTVASELRHRQWVERTLRSRQRQNYLRMWSSIRLLSPVLSLILLLIALELVNIHAVCGKNAHEYQQYLKFVKSILQYTENLVAYTSYEKNKWNETINLTHTALLKMWTFSEKKQMLIHLAKKSTSKVLL

SEQ ID NO: 914637 - protein, 325 aa, Homo sapiens
IHARRSGAPEVMEVLIGDPITTCLSPSVYDIICNLGFQLRENCDINSIVTQNGEVCWKTITDCVSYTESEQGLDYWGSVRLLGPVCEAVHSHFLSLTKGQFEIRYAPWFQWTSFPELFPEIFDALESLQSPAISLSLMKLTSCLERALGDVFLLIGKECPFLLRDLLSSEELAQVFSQSVMNVLKVFVGSPCGLNLRNVLWHGFASPEEIPPKYCSMMILLTAGLGQLLKSYLQNTKLTLAHRSFISLTNLEDLIVFPDVTYEVLSVLEEVMMKSAFILKIMLPYWEVALVKFKSHRFADCAILLLTQLETGLRNVFGNGLRLVC

SEQ ID NO: 914638 - protein, 689 aa, Homo sapiens
IHARRSGAPEVMEVLIGDPITTCLSPSVYDIICNLGFQLRENCDINSIVTQNGEVCWKTITDCVSYTESEQGLDYWGSVRLLGPVCEAVHSHFLSLTKGQFEIRYAPWFQWTSFPELFPEIFDALESLQSPAISLSLMKLTSCLERALGDVFLLIGKECPFLLRDLLSSEELAQVFSQSVMNVLKVFVGSPCGLNLRNVLWHGFASPEEIPPKYCSMMILLTAGLGQLLKSYLQNTKLTLAHRSFISLTNLEDLIVFPDVTYEVLSVLEEVMMKSAFILKIMLPYWEVALVKFKSHRFADCAILLLTQLETGLRNVFATLNRCPKRLLTAESTALYTTFDQILAKHLNDGKINQLPLFLGEPAMEFLWDFLNHQEGPRIRDHLSHGEINLHEFSKETTNQLLAFSLVLLLRFVDDCLLSVFKEKSAVELLISLAEGYSSRCHPVFQLKKQVLSCEESIRVWALLPFPEELTRQAVRLEDNSETNACHSLITKMTDELYHHMPENRCVLKDLDRLPTETWPQLLRELCSTPVPTLFCPRIVLEVLVVLRSISEQCRRVSSQVTVASELRHRQWVERTLRSRQRQNYLRMWSSIRLLSPVLSLILLLIALELVNIHAVCGKNAHEYQQYLKFVKSILQYTENLVAYTSYEKNKWNETINLTHTALLKMWTFSEKKQMLIHLAKKSTSKVLL

SEQ ID NO: 914639 - protein, 344 aa, Homo sapiens
IHARRSGAPEVMEVLIGDPITTCLSPSVYDIICNLGFQLRENCDINSIVTQNGEVCWKTITDCVSYTESEQGLDYWGSVRLLGPVCEAVHSHFLSLTKGQFEIRYAPWFQWTSFPELFPEIFDALESLQSPAISLSLMKLTSCLERALGDVFLLIGKECPFLLRDLLSSEELAQVFSQSVMNVLKVFVGSPCGLNLRNVLWHGFASPEEIPPKYCSMMILLTAGLGQLLKSYLQNTKLTLAHRSFISLTNLEDLIVFPDVTYEVLSVLEEVMMKSAFILKIMLPYWEVALVKFKSHRFADCAILLLTQLETGLRNVFATLNRCPKRLLTAESTALYTTFDQVSK

SEQ ID NO: 914640 - protein, 344 aa, Homo sapiens; identical to SEQ ID NO: 914639

SEQ ID NO: 914641 - protein, 344 aa, Homo sapiens; identical to SEQ ID NO: 914639

SEQ ID NO: 914642 - protein, 82 aa, Homo sapiens
AAVGGRAREERRLRLRAGLVSGAAERAGVGRGQRTEPAGASRAPGRLPTAGLGFLSDVPRNNAGVKKFPLFCSKPEDSVPCI

SEQ ID NO: 914643 - protein, 82 aa, Homo sapiens; identical to SEQ ID NO: 914642

SEQ ID NO: 914644 - protein, 82 aa, Homo sapiens; identical to SEQ ID NO: 914642

SEQ ID NO: 914645 - protein, 209 aa, Homo sapiens
MHKEISQRSTATMYIIGGYYWHPLSEVHIWDPLTNVWIQGAEIPDYTRESYGVTCLGPNIYVTGGYRTDNIEALDTVWIYNSESDEWTEGLPMLNARYYHCAVTLGGCVYALGGYRKGAPAEEAEFYDPLKEKWIPIANMIKGVGNATACVLHDVIYVIGGHCGYRGSCTYDKVQSYNSDINEWSLITSSPHPGYMKKMAICKPGSRSS

SEQ ID NO: 914646 - protein, 135 aa, Homo sapiens
GSLQPLPPGFKQFSCLSLLSSWDYRHVPPHLGVGNATACVLHDVIYVIGGHCGYRGSCTYDKVQSYNSDINEWSLITSSPHPDGVSLSPRLECSGAISGHCKLRLPGSRHSPASASRVAGTTGAHYHAWLVFLYF

SEQ ID NO: 914647 - protein, 296 aa, Homo sapiens
MHKEISQRSTATMYIIGGYYWHPLSEVHIWDPLTNVWIQGAEIPDYTRESYGVTCLGPNIYVTGGYRTDNIEALDTVWIYNSESDEWTEGLPMLNARYYHCAVTLGGCVYALGGYRKGAPAEEAEFYDPLKEKWIPIANMIKGVGNATACVLHDVIYVIGGHCGYRGSCTYDKVQSYNSDINEWSLITSSPHPEYGLCSVPFENKLYLVGGQTTITECYDPEQNEWREIAPMMERRMECGAVIMNGCIYVTGGYSYSKGTYLQSIEKYDPDLNKWEIVGNLPSAMRSHGCVCVYNV

SEQ ID NO: 914648 - protein, 296 aa, Homo sapiens; identical to SEQ ID NO: 914647

SEQ ID NO: 914649 - protein, 104 aa, Homo sapiens
MKILLVFDFDNTIIDDNSDTWIVQCAPNKKLPIELRDSYRKGFWTEFMGRVFKYLGDKGVREHEMKRAVTSLPFTPGMVELFNFIRKNRINLTALLFQIQIRSS

SEQ ID NO: 914650 - protein, 115 aa, Homo sapiens
PLPVTTPRPVGRAGCARLAGGGSRRRSGRRRHRRRHRDCSRGDCYLPTGTNTQQPLPPPREPLPELPARTPAVLRSVLHTVKLTHLKCMVQWVLVYYLHRTFSSLRKEEETLNLP

SEQ ID NO: 914651 - protein, 772 aa, Homo sapiens
TVAVTTPRPVGRAGCARLAGGGSRRRSGRRRHRRRHRDCSRGDCYLPTGTNTQQPLPPPREPLPELPARTPDLSMQNSEGGADSPASVALRPSAAAPPVPASPQRVLVQAASSNPKGAQMQPISLPRVQQVPQQVQPVQHVYPAQVQYVEGGDAVYTNGAIRTAYTYNPEPQMYAPSSTASYFEAPGGAQVTVAASSPPAVPSHSMVGITMDVGGSPIVSSAGAYLIHGGMDSTRHSLAHTSRSSPATLQWLLDNYETAEGVSLPRSSLYNHYLRHCQEHKLDPVNAASFGKLIRSVFMGLRTRRLGTRGNSKYHYYGIRLKPDSPLNRLQEDTQYMAMRQQPMHQKPRYRPAQKTDSLGDSGSHSGLHSTPEQTMAVQSQHHQQYIDVSHVFPEFPAPDLGSFLLQDGVTLHDVKALQLVYRRHCEATVDVVMNLQFHYIEKLWLSFWNSKASSSDGPTSLPASDEDPEGAVLPKDKLISLCQCDPILRWMRSCDHILYQALVEILIPDVLRPVPSTLTQAIRNFAKSLEGWLTNAMSDFPQQVIQTKVGVVSAFAQTLRRYTSLNHLAQAARAVLQNTSQINQMLSDLNRVDFANVQEQASWVCQCEESVVQRLEQDFKLTLQQQSSLDQWASWLDSVVTQVLKQHAGSPSFPKAARQFLLKWSFYSSMVIRDLTLRSAASFGSFHLIRLLYDEYMFYLVEHRVAEATGETPIAVMGEFNDLASLSLTLLDKDDMGDEQRGSEAGPDARSLGEPLVKRERSDPNHSLQGI

SEQ ID NO: 914652 - protein, 474 aa, Homo sapiens
MGLRTRRLGTRGNSKYHYYGIRLKPDSPLNRLQEDTQYMAMRQQPMHQKPRYRPAQKTDSLGDSGSHSGLHSTPEQTMAVQSQHHQQYIDVSHVFPEFPAPDLGSFLLQDGVTLHDVKALQLVYRRHCEATVDVVMNLQFHYIEKLWLSFWNSKASSSDGPTSLPASDEDPEGAVLPKDKLISLCQCDPILRWMRSCDHILYQALVEILIPDVLRPVPSTLTQAIRNFAKSLEGWLTNAMSDFPQQVIQTKVGVVSAFAQTLRRYTSLNHLAQAARAVLQNTSQINQMLSDLNRVDFANVQEQASWVCQCEESVVQRLEQDFKLTLQQQSSLDQWASWLDSVVTQVLKQHAGSPSFPKAARQFLLKWSFYSSMVIRDLTLRSAASFGSFHLIRLLYDEYMFYLVEHRVAEATGETPIAVMGEFNDLASLSLTLLDKDDMGDEQRGSEAGPDARSLGEPLVKRERSDPNHSLQGI

SEQ ID NO: 914653 - protein, 189 aa, Homo sapiens
PLPVTTPRPVGRAGCARLAGGGSRRRSGRRRHRRRHRDCSRGDCYLPTGTNTQQPLPPPREPLPELPARTPDLSMQNSEGGADSPASVALRPSAAAPPVPASPQRVLVQAASSNPKGAQMQPISLPRVQQVPQQVQPVQHVYPAQVQYVEGGDAVYTNGAIRTAYTYNPEPGHSGNLDFTGSTKLVPLR

SEQ ID NO: 914654 - protein, 49 aa, Homo sapiens
MFIKAIEDTSSLNNLQATHEGVTGGNAAYPMFQVQPVQHVYPAQVQYVE

SEQ ID NO: 914655 - protein, 797 aa, Homo sapiens
TVAVTTPRPVGRAGCARLAGGGSRRRSGRRRHRRRHRDCSRGDCYLPTGTNTQQPLPPPREPLPELPARTPDLSMQNSEGGADSPASVALRPSAAAPPVPASPQRVLVQAASSNPKGAQMQPISLPRVQQVPQQVQPVQHVYPAQVQYVEGGDAVYTNGAIRTAYTYNPEPQMYAPSSTASYFEAPGGAQVTVAASSPPAVPSHSMVGITMDVGGSPIVSSAGAYLIHGGMDSTRHSLAHTSRSSPATLEMAIENLQKSEGITSHKSGLLNSHLQWLLDNYETAEGVSLPRSSLYNHYLRHCQEHKLDPVNAASFGKLIRSVFMGLRTRRLGTRGNSKYHYYGIRLKPDSPLNRLQEDTQYMAMRQQPMHQKPRYRPAQKTDSLGDSGSHSGLHSTPEQTMAVQSQHHQQYIDVSHVFPEFPAPDLGSFLLQDGVTLHDVKALQLVYRRHCEATVDVVMNLQFHYIEKLWLSFWNSKASSSDGPTSLPASDEDPEGAVLPKDKLISLCQCDPILRWMRSCDHILYQALVEILIPDVLRPVPSTLTQAIRNFAKSLEGWLTNAMSDFPQQVIQTKVGVVSAFAQTLRRYTSLNHLAQAARAVLQNTSQINQMLSDLNRVDFANVQEQASWVCQCEESVVQRLEQDFKLTLQQQSSLDQWASWLDSVVTQVLKQHAGSPSFPKAARQFLLKWSFYSSMVIRDLTLRSAASFGSFHLIRLLYDEYMFYLVEHRVAEATGETPIAVMGEFNDLASLSLTLLDKDDMGDEQRGSEAGPDARSLGEPLVKRERSDPNHSLQGI

SEQ ID NO: 914656 - protein, 653 aa, Homo sapiens
MQPISLPRVQQVPQQVQPVQHVYPAQVQYVEGGDAVYTNGAIRTAYTYNPEPQMYAPSSTASYFEAPGGAQVTVAASSPPAVPSHSMVGITMDVGGSPIVSSAGAYLIHGGMDSTRHSLAHTSRSSPATLQWLLDNYETAEGVSLPRSSLYNHYLRHCQEHKLDPVNAASFGKLIRSVFMGLRTRRLGTRGNSKYHYYGIRLKPDSPLNRLQEDTQYMAMRQQPMHQKPRYRPAQKTDSLGDSGSHSGLHSTPEQTMAVQSQHHQQYIDVSHVFPEFPAPDLGSFLLQDGVTLHDVKALQLVYRRHCEATVDVVMNLQFHYIEKLWLSFWNSKASSSDGPTSLPASDEDPEGAVLPKDKLISLCQCDPILRWMRSCDHILYQALVEILIPDVLRPVPSTLTQAIRNFAKSLEGWLTNAMSDFPQQVIQTKVGVVSAFAQTLRRYTSLNHLAQAARAVLQNTSQINQMLSDLNRVDFANVQEQASWVCQCEESVVQRLEQDFKLTLQQQSSLDQWASWLDSVVTQVLKQHAGSPSFPKAARQFLLKWSFYSSMVIRDLTLRSAASFGSFHLIRLLYDEYMFYLVEHRVAEATGETPIAVMGEFNDLASLSLTLLDKDDMGDEQRGSEAGPDARSLGEPLVKRERSDPNHSLQGI

SEQ ID NO: 914657 - protein, 339 aa, Homo sapiens [sequence omitted]

SEQ ID NO: 914658 - protein, 526 aa, Homo sapiens
HEERGSVESWSSRHRRRRGSPGTAAPGRRVRCSRSPTQGDSRPLVRPGQPGTDPPAQARLQPEGWEGIALAASRGGQAEAREQVRGTKSFADVPGVLRAPAAGTRRPGAREEPVDVLRAAWEPPPPPPQREEECTGRAAAGRAPPLLALLAALLLAARGAAAQETELSVSAELVPTSSWNISSELNKDSYLTLDEPMNNITTSLGQTAELHCKVSGNPPPTIRWFKNDAPVVQEPRRLSFRSTIYGSRLRIRNLDTTDTGYFQCVATNGKEVVSSTGVLFVKFGPPPTASPGYSDEYEEDGFCQPYRGIACARFIGNRTVYMESLHMQGEIENQITAAFTMIGTSSHLSDKCSQFAIPSLCHYAFPYCDETSSVPKPRDLCRDECEILENVLCQTEYIFARSNPMILMRLKLPNCEDLPQPESPEAANCIRIGIPMADPINKNHKCYNSTGVDYRGTVSVTKSGRQCQPWNSQYPHTHTFTALRFPELNGGHSYCRNPGNQKEAPWCFTLDENFKSDLCDIPACGK

SEQ ID NO: 914659 - protein, 381 aa, Homo sapiens
MRGKSPAEPVETTDSFFGETELSVSAELVPTSSWNISSELNKDSYLTLDEPMNNITTSLGQTAELHCKVSGNPPPTIRWFKNDAPVVQEPRRLSFRSTIYGSRLRIRNLDTTDTGYFQCVATNGKEVVSSTGVLFVKFGPPPTASPGYSDEYEEDGFCQPYRGIACARFIGNRTVYMESLHMQGEIENQITAAFTMIGTSSHLSDKCSQFAIPSLCHYAFPYCDETSSVPKPRDLCRDECEILENVLCQTEYIFARSNPMILMRLKLPNCEDLPQPESPEAANCIRIGIPMADPINKNHKCYNSTGVDYRGTVSVTKSGRQCQPWNSQYPHTHTFTALRFPELNGGHSYCRNPGNQKEAPWWFLVKLVDLGTLDPVPEIQD

SEQ ID NO: 914660 - protein, 1070 aa, Homo sapiens
HEERGSVESWSSRHRRRRGSPGTAAPGRRVRCSRSPTQGDSRPLVRPGQPGTDPPAQARLQPEGWEGIALAASRGGQAEAREQVRGTKSFADVPGVLRAPAAGTRRPGAREEPVDVLRAAWEPPPPPPQREEECTGRAAAGRAPPLLALLAALLLAARGAAAQETELSVSAELVPTSSWNISSELNKDSYLTLDEPMNNITTSLGQTAELHCKVSGNPPPTIRWFKNDAPVVQEPRRLSFRSTIYGSRLRIRNLDTTDTGYFQCVATNGKEVVSSTGVLFVKFGPPPTASPGYSDEYEEDGFCQPYRGIACARFIGNRTVYMESLHMQGEIENQITAAFTMIGTSSHLSDKCSQFAIPSLCHYAFPYCDETSSVPKPRDLCRDECEILENVLCQTEYIFARSNPMILMRLKLPNCEDLPQPESPEAANCIRIGIPMADPINKNHKCYNSTGVDYRGTVSVTKSGRQCQPWNSQYPHTHTFTALRFPELNGGHSYCRNPGNQKEAPWCFTLDENFKSDLCDIPACDSKDSKEKNKMEILYILVPSVAIPLAIALLFFFICVCRNNQKSSSAPVQRQPKHVRGQNVEMSMLNAYKPKSKAKELPLSAVRFMEELGECAFGKIYKGHLYLPGMDHAQLVAIKTLKDYNNPQQWMEFQQEASLMAELHHPNIVCLLGAVTQEQPVCMLFEYINQGDLHEFLIMRSPHSDVGCSSDEDGTVKSSLDHGDFLHIAIQIAAGMEYLSSHFFVHKDLAARNILIGEQLHVKISDLGLSREIYSADYYRVQSKSLLPIRWMPPEAIMYGKFSSDSDIWSFGVVLWEIFSFGLQPYYGFSNQEVIEMVRKRQLLPCSEDCPPRMYSLMTECWNEIPSRRPRFKDIHVRLRSWEGLSSHTSSTTPSGGNATTQTTSLSASPVSNLSNPRYPNYMFPSQGITPQGQIAGFIGPPIPQNQRFIPINGYPIPPGYAAFPAAHYQPTGPPRVIQHCPPPKSRSPSSASGSTSTGHVTSLPSSGSNQEANIPLLPHMSIPNHPGGMGITVFGNKSQKPYKIDSKQASLLGDANIHGHTESMISAEL

SEQ ID NO: 914661 - protein, 948 aa, Homo sapiens
TASRSVLVRCGKLGSLLRLSRYTMRGKSPAEPVETTDSFFGETELSVSAELVPTSSWNISSELNKDSYLTLDEPMNNITTSLGQTAELHCKVSGNPPPTIRWFKNDAPVVQEPRRLSFRSTIYGSRLRIRNLDTTDTGYFQCVATNGKEVVSSTGVLFVKFGPPPTASPGYSDEYEEDGFCQPYRGIACARFIGNRTVYMESLHMQGEIENQITAAFTMIGTSSHLSDKCSQFAIPSLCHYAFPYCDETSSVPKPRDLCRDECEILENVLCQTEYIFARSNPMILMRLKLPNCEDLPQPESPEAANCIRIGIPMADPINKNHKCYNSTGVDYRGTVSVTKSGRQCQPWNSQYPHTHTFTALRFPELNGGHSYCRNPGNQKEAPWCFTLDENFKSDLCDIPACDSKDSKEKNKMEILYILVPSVAIPLAIALLFFFICVCRNNQKSSSAPVQRQPKHVRGQNVEMSMLNAYKPKSKAKELPLSAVRFMEELGECAFGKIYKGHLYLPGMDHAQLVAIKTLKDYNNPQQWMEFQQEASLMAELHHPNIVCLLGAVTQEQPVCMLFEYINQGDLHEFLIMRSPHSDVGCSSDEDGTVKSSLDHGDFLHIAIQIAAGMEYLSSHFFVHKDLAARNILIGEQLHVKISDLGLSREIYSADYYRVQSKSLLPIRWMPPEAIMYGKFSSDSDIWSFGVVLWEIFSFGLQPYYGFSNQEVIEMVRKRQLLPCSEDCPPRMYSLMTECWNEIPSRRPRFKDIHVRLRSWEGLSSHTSSTTPSGGNATTQTTSLSASPVSNLSNPRYPNYMFPSQGITPQGQIAGFIGPPIPQNQRFIPINGYPIPPGYAAFPAAHYQPTGPPRVIQHCPPPKSRSPSSASGSTSTGHVTSLPSSGSNQEANIPLLPHMSIPNHPGGMGITVFGNKSQKPYKIDSKQASLLGDANIHGHTESMISAEL

SEQ ID NO: 914662 - protein, 356 aa, Homo sapiens
SRRGYERKASAWRSGARARAVFSSPTMSVRAAVVASFLQTRPARLLNLAEAWSESREVWGEVGGALHACAASERREGAGDPRQRYPVNTQSGAGLTPPPLLTLLAERPPDGRGRPWGWGGQGRGGGGRRWRAVMAAGDGDVKLGTLGSGSESSNDGGSESPGDAGAAAEGGGWAAAALALLTGGGEMLLNVALVALVLLGAYRLWVRWGRRGLGAGAGAGEESPATSLPRMKKRDFSLEQLRQYDGSRNPRILLAVNGKVFDVTKGSKFYGPAGPYGIFAGRDASRGLATFCLDKDALRDEYDDLSDLNAVQMESVREWEMQFKEKYDYVGRLLKPGEEPSEYTDEEDTKDHNKQD

SEQ ID NO: 914663 - protein, 356 aa, Homo sapiens; identical to SEQ ID NO: 914662

SEQ ID NO: 914664 - protein, 356 aa, Homo sapiens; identical to SEQ ID NO: 914662

SEQ ID NO: 914665 - protein, 356 aa, Homo sapiens; identical to SEQ ID NO: 914662

SEQ ID NO: 914666 - protein, 120 aa, Homo sapiens
MAKHVGAVSIVSAMLCLKCKVAELRVDDVSVSSRASGCRVAQWNPVLLTPTISCFTAQCVSQKGMLSGLPILGDTSFKFTNTSSNNQDSTVSLRCPCNHVFDKVSVSWGINDSHKVGIFC

SEQ ID NO: 914667 - protein, 394 aa, Homo sapiens
SRRGYERKASAWRSGARARAVFSSPTMSVRAAVVASFLQTRPARLLNLAEAWSESREVWGEVGGALHACAASERREGAGDPRQRYPVNTQSGAGLTPPPLLTLLAERPPDGRGRPWGWGGQGRGGGGRRWRAVMAAGDGDVKLGTLGSGSESSNDGGSESPGDAGAAAEGGGWAAAALALLTGGGEMLLNVALVALVLLGAYRLWVRWGRRGLGAGAGAGEESPATSLPRMKKRDFSLEQLRQYDGSRNPRILLAVNGKVFDVTKGSKFYGPGEELEGEGKDPLQLKHNPLRTGRPLGTGLVCPAFSSPGPPRLGRRTWDGPSRPYTHTVPPQLRAPPVLPPKPGSPVAPQRPALSIHLSSIPFLLAAFFFCFFGWIFQNRFSCHRSTLALNLF

SEQ ID NO: 914668 - protein, 356 aa, Homo sapiens; identical to SEQ ID NO: 914662

SEQ ID NO: 914669 - protein, 356 aa, Homo sapiens; identical to SEQ ID NO: 914662

SEQ ID NO: 914670 - protein, 356 aa, Homo sapiens; identical to SEQ ID NO: 914662

SEQ ID NO: 914671 - protein, 356 aa, Homo sapiens; identical to SEQ ID NO: 914662

SEQ ID NO: 914672 - protein, 477 aa, Homo sapiens
MKSLPILLLLCVAVCSAYPLDGAARGEDTSMNLVQKYLENYYDLKKDVKQFVRRKDSGPVVKKIREMQKFLGLEVTGKLDSDTLEVMRKPRCGVPDVGHFRTFPGIPKWRKTHLTYRIVNYTPDLPKDAVDSAVEKALKVWEEVTPLTFSRLYEGEADIMISFAVREHGDFYPFDGPGNVLAHAYAPGPGINGDAHFDDDEQWTKDTTGTNLFLVAAHEIGHSLGLFHSANTEALMYPLYHSLTDLTRFRLSQDDINGIQSLYGPPPDSPETPLVPTEPVPPEPGTPANCDPALSFDAVSTLRGEILIFKDRHFWRKSLRKLEPELHLISSFWPSLPSGVDAAYEVTSKDLVFIFKGNQFWAIRGNEVRAGYPRGIHTLGFPPTVRKIDAAISDKEKNKTYFFVEDKYWRFDEKRNSMEPGFPKQIAEDFPGIDSKIDAVFEEFGFFYFFTGSSQLEFDPNAKKVTHTLKSNSWLNC

SEQ ID NO: 914673 - protein, 477 aa, Homo sapiens; identical to SEQ ID NO: 914672

SEQ ID NO: 914674 - protein, 507 aa, Homo sapiens
APPEVSAAALRGRGSGSGGCSCRTQALTLDLRWLPHLSGAMATGADVRDILELGGPEGDAASGTISKKDIINPDKKKSKKSSETLTFKRPEGMHREVYALLYSDKKDAPPLLPSDTGQGYRTVKAKLGSKKVRPWKWMPFTNPARKDGAMFFHWRRAAEEGKDYPFARFNKTVQVPVYSEQEYQLYLHDDAWTKAETDHLFDLSRRFDLRFVVIHDRYDHQQFKKRSVEDLKERYYHICAKLANVRAVPGTDLKIPVFDAGHERRRKEQLERLYNRTPEQVAEEEYLLQELRKIEARKKEREKRSQDLQKLITAADTTAEQRRTERKAPKKKLPQKKEAEKPAVPETAGIKFPDFKSAGVTLRSQRMKLPSSVGQKKIKALEQMLLELGVELSPTPTEELVHMFNELRSDLVLLYELKQACANCEYELQMLRHRHEALARAGVLGGPATPASGPGPASAEPAVTEPGLGPDPKDTIIDVVGAPLTPNSRKRRESASSSSSVKKAKKP

SEQ ID NO: 914675 - protein, 91 aa, Homo sapiens
RPPTTTIARIQASNDVRRHEALARAGVLGGPATPASGPGPASAEPAVTEPGLGPDPKDTIIDVVGAPLTPNSRKRRESASSSSSVKKAKKP

SEQ ID NO: 914676 - protein, 169 aa, Homo sapiens
LEDPTLGSILELGGPEGDAASGTISKKDIINPDKKKSKKSSETLTFKRPEGMHREVYALLYSDKKDAPPLLPSDTGQGYRTVKAKLGSKKVRPWKWMPFTNPARKDGAMFFHWRRAAEEGKDYPFARFNKGKLPSFGHRPRLPSHFEPFVRALQSPRVGSGGTLMPNCD

SEQ ID NO: 914677 - protein, 507 aa, Homo sapiens; identical to SEQ ID NO: 914674

SEQ ID NO: 914678 - protein, 507 aa, Homo sapiens; identical to SEQ ID NO: 914674

SEQ ID NO: 914679 - protein, 523 aa, Homo sapiens
EHRRKFLPRLCGDGGVVVGAAAAGPRSGLAPPPDLSLVLLQALTLDLRWLPHLSGAMATGADVRDILELGGPEGDAASGTISKKDIINPDKKKSKKSSETLTFKRPEGMHREVYALLYSDKKDAPPLLPSDTGQGYRTVKAKLGSKKVRPWKWMPFTNPARKDGAMFFHWRRAAEEGKDYPFARFNKTVQVPVYSEQEYQLYLHDDAWTKAETDHLFDLSRRFDLRFVVIHDRYDHQQFKKRSVEDLKERYYHICAKLANVRAVPGTDLKIPVFDAGHERRRKEQLERLYNRTPEQVAEEEYLLQELRKIEARKKEREKRSQDLQKLITAADTTAEQRRTERKAPKKKLPQKKEAEKPAVPETAGIKFPDFKSAGVTLRSQRMKLPSSVGQKKIKALEQMLLELGVELSPTPTEELVHMFNELRSDLVLLYELKQACANCEYELQMLRHRHEALARAGVLGGPATPASGPGPASAEPAVTEPGLGPDPKDTIIDVVGAPLTPNSRKRRESASSSSSVKKAKKP

SEQ ID NO: 914680 - protein, 320 aa, Homo sapiens
APPEVSAAALRGRGSGSGGCSCRTQALTLDLRWLPHLSGAMATGADVRDILELGGPEGDAASGTISKKDIINPDKKKSKKSSETLTFKRPEGMHREVYALLYSDKKDAPPLLPSDTGQGYRTVKAKLGSKKVRPWKWMPFTNPARKDGAMFFHWRRAAEEGKDYPFARFNKTVQVPVYSEQEYQLYLHDDAWTKAETDHLFDLSRRFDLRFVVIHDRYDHQQFKKRSVEDLKERYYHICAKLANVRAVPGTDLKIPVFDAGHERRRKEQLERLYNRTPEQVAEEEYLLQELRKIEARKKEREKRSQDLQKLITAADTSCS

SEQ ID NO: 914681 - protein, 467 aa, Homo sapiens
MATGADVRDILELGGPEGDAASGTISKKDIINPDKKKSKKSSETLTFKRPEGMHREVYALLYSDKKDAPPLLPSDTGQGYRTVKAKLGSKKVRPWKWMPFTNPARKDGAMFFHWRRAAEEGKDYPFARFNKTVQVPVYSEQEYQLYLHDDAWTKAETDHLFDLSRRFDLRFVVIHDRYDHQQFKKRSVEDLKERYYHICAKLANVRAVPGTDLKIPVFDAGHERRRKEQLERLYNRTPEQVAEEEYLLQELRKIEARKKEREKRSQDLQKLITAADTTAEQRRTERKAPKKKLPQKKEAEKPAVPETAGIKFPDFKSAGVTLRSQRMKLPSSVGQKKIKALEQMLLELGVELSPTPTEELVHMFNELRSDLVLLYELKQACANCEYELQMLRHRHEALARAGVLGGPATPASGPGPASAEPAVTEPGLGPDPKDTIIDVVGAPLTPNSRKRRESASSSSSVKKAKKP

SEQ ID NO: 914682 - protein, 529 aa, Homo sapiens
APPEVSAAALRGRGSGSGGCSCRTQALTLDLRWLPHLSGAMATGADVRDILELGGPEGDAASGTISKKDIINPDKKKSKKSSETLTFKRPEGMHREVYALLYSDKKDAPPLLPSDTGQGYRTVKAKLGSKKVRPWKWMPFTNPARKDGAMFFHWRRAAEEGKDYPFARFNKTVQVPVYSEQEYQLYLHDDAWTKAETDHLFDLSRRFDLRFVVIHDRYDHQQFKKRSVEDLKERYYHICAKLANVRAVPGTDLKIPVFDAGHERRRKEQLERLYNRTPEQVAEEEYLLQELRKIEARKKEREKRSQDLQKLITAADTTAEQRRTERKAPKKKLPQKKEAEKPAVPETAGIKFPDFKSAGVTLRSQRMKLPSSVGQKKIKALEQMLLELGVELSPTPTEELVHMFNELRSDLVLLYELKQACANCEYELQMLRHRHEALARAGVLGGPATPASGPGPASAEPAVTEPGLGPDPKDTIIDVVGAPLTPNSVRVWTGWEARLGPASEHMHMGVGAPLPLVPAAGTIITSVRV

SEQ ID NO: 914683 - protein, 320 aa, Homo sapiens; identical to SEQ ID NO: 914680

SEQ ID NO: 914684 - protein, 466 aa, Homo sapiens
LEDPTLGSILELGGPEGDAASGTISKKDIINPDKKKSKKSSETLTFKRPEGMHREVYALLYSDKKDAPPLLPSDTGQGYRTVKAKLGSKKVRPWKWMPFTNPARKDGAMFFHWRRAAEEGKDYPFARFNKTVQVPVYSEQEYQLYLHDDAWTKAETDHLFDLSRRFDLRFVVIHDRYDHQQFKKRSVEDLKERYYHICAKLANVRAVPGTDLKIPVFDAGHERRRKEQLERLYNRTPEQVAEEEYLLQELRKIEARKKEREKRSQDLQKLITAADTTAEQRRTERKAPKKKLPQKKEAEKPAVPETAGIKFPDFKSAGVTLRSQRMKLPSSVGQKKIKALEQMLLELGVELSPTPTEELVHMFNELRSDLVLLYELKQACANCEYELQMLRHRHEALARAGVLGGPATPASGPGPASAEPAVTEPGLGPDPKDTIIDVVGAPLTPNSRKRRESASSSSSVKKAKKP

SEQ ID NO: 914685 - protein, 657 aa, Homo sapiens
EHRRKFLPRLCGDGGVVVGAAAAGPRSGLAPPPDLSLVLLQALTLDLRWLPHLSGAMATGADVRDILELGGPEGDAASGTISKKDIINPDKKKSKKSSETLTFKRPEGMHREVYALLYSDKNKGSCLLSRMQEDLKSFAPGHDFLAIGDAPPLLPSDTGQGYRTVKAKLGSKKVRPWKWMPFTNPARKDGAMFFHWRRAAEEGKDYPFARFNKKLTFGLHRSTYMWAPHLNYGGRSVCPMTEALELETVKIDPGINQRQATVPNPARTSSQADKFFPHSMLQGHRPRVWQQTGAAVVTGAWSLLDMTSCGHAPTVSLCASETVQVPVYSEQEYQLYLHDDAWTKAETDHLFDLSRRFDLRFVVIHDRYDHQQFKKRSVEDLKERYYHICAKLANVRAVPGTDLKIPVFDAGHERRRKEQLERLYNRTPEQVAEEEYLLQELRKIEARKKEREKRSQDLQKLITAADTTAEQRRTERKAPKKKLPQKKEAEKPAVPETAGIKFPDFKSAGVTLRSQRMKLPSSVGQKKIKALEQMLLELGVELSPTPTEELVHMFNELRSDLVLLYELKQACANCEYELQMLRHRHEALARAGVLGGPATPASGPGPASAEPAVTEPGLGPDPKDTIIDVVGAPLTPNSRKRRESASSSSSVKKAKKP

SEQ ID NO: 914686 - protein, 176 aa, Homo sapiens
APPEVSAAALRGRGSGSGGCSCRTQALTLDLRWLPHLSGAMATGADVRDILELGGPEGDAASGTISKKDIINPDKKKSKKSSETLTFKRPEGMHREVYALLYSDKKDAPPLLPSDTGQGYRTVKAKLGSKKVRPWKWMPFTNPARKDGAMFFHWRRAAEEGKDYPFARFNKVPYIR

SEQ ID NO: 914687 - protein, 467 aa, Homo sapiens; identical to SEQ ID NO: 914681

SEQ ID NO: 914688 - protein, 189 aa, Homo sapiens
TRPPTRPGSGGCSCRTQALTLDLRWLPHLSGAMATGADVRDILELGGPEGDAASGTISKKDIINPDKKKSKKSSETLTFKRPEGMHREVYALLYSDKKDAPPLLPSDTGQGYRTVKAKLGSKKVRPWKWMPFTNPARKDGAMFFHWRRAAEEGKDYPFARFNKIKTCCKVALLLLREAGSYTAVYSPTD

SEQ ID NO: 914689 - protein, 568 aa, Homo sapiens
EHRRKFLPRLCGDGGVVVGAAAAGPRCGSARAQVAEGAVRNIQAVGHRQIPDLTWTTLLLLARPFNSPPLRSGLAPPPDLSLVLLQALTLDLRWLPHLSGAMATGADVRDILELGGPEGDAASGTISKKDIINPDKKKSKKSSETLTFKRPEGMHREVYALLYSDKKDAPPLLPSDTGQGYRTVKAKLGSKKVRPWKWMPFTNPARKDGAMFFHWRRAAEEGKDYPFARFNKTVQVPVYSEQEYQLYLHDDAWTKAETDHLFDLSRRFDLRFVVIHDRYDHQQFKKRSVEDLKERYYHICAKLANVRAVPGTDLKIPVFDAGHERRRKEQLERLYNRTPEQVAEEEYLLQELRKIEARKKEREKRSQDLQKLITAADTTAEQRRTERKAPKKKLPQKKEAEKPAVPETAGIKFPDFKSAGVTLRSQRMKLPSSVGQKKIKALEQMLLELGVELSPTPTEELVHMFNELRSDLVLLYELKQACANCEYELQMLRHRHEALARAGVLGGPATPASGPGPASAEPAVTEPGLGPDPKDTIIDVVGAPLTPNSRKRRESASSSSSVKKAKKP

SEQ ID NO: 914690 - protein, 515 aa, Homo sapiens
EHRRKFLPRLCGDGGVVVGAAAAGPRCGSARAQALTLDLRWLPHLSGAMATGADVRDILELGGPEGDAASGTISKKDIINPDKKKSKKSSETLTFKRPEGMHREVYALLYSDKKDAPPLLPSDTGQGYRTVKAKLGSKKVRPWKWMPFTNPARKDGAMFFHWRRAAEEGKDYPFARFNKTVQVPVYSEQEYQLYLHDDAWTKAETDHLFDLSRRFDLRFVVIHDRYDHQQFKKRSVEDLKERYYHICAKLANVRAVPGTDLKIPVFDAGHERRRKEQLERLYNRTPEQVAEEEYLLQELRKIEARKKEREKRSQDLQKLITAADTTAEQRRTERKAPKKKLPQKKEAEKPAVPETAGIKFPDFKSAGVTLRSQRMKLPSSVGQKKIKALEQMLLELGVELSPTPTEELVHMFNELRSDLVLLYELKQACANCEYELQMLRHRHEALARAGVLGGPATPASGPGPASAEPAVTEPGLGPDPKDTIIDVVGAPLTPNSRKRRESASSSSSVKKAKKP

SEQ ID NO: 914691 - protein, 516 aa, Homo sapiens
APPEVSAAALRGRGSGSGGCSCRTQALTLDLRWLPHLSGAMATGADVRDILELGGPEGDAASGTISKKDIINPDKKKSKKSSETLTFKRPEGMHREVYALLYSDKKDAPPLLPSDTGQGYRTVKAKLGSKKVRPWKWMPFTNPARKDGAMFFHWRRAAEEGKDYPFARFNKTVQVPVYSEQEYQLYLHDDAWTKAETDHLFDLSRRFDLRFVVIHDRYDHQQFKKRSVEDLKERYYHICAKLANVRAVPGTDLKIPVFDAGHERRRKEQLERLYNRTPEQVAEEEYLLQELRKIEARKKEREKRSQDLQKLITAADTTAEQRRTERKAPKKKLPQKKEAEKPAVPETAGIKFPDFKSAGVTLRSQRDLACQLSLQMKLPSSVGQKKIKALEQMLLELGVELSPTPTEELVHMFNELRSDLVLLYELKQACANCEYELQMLRHRHEALARAGVLGGPATPASGPGPASAEPAVTEPGLGPDPKDTIIDVVGAPLTPNSRKRRESASSSSSVKKAKKP

SEQ ID NO: 914692 - protein, 499 aa, Homo sapiens
TRPPTRPGSGGCSCRTQALTLDLRWLPHLSGAMATGADVRDILELGGPEGDAASGTISKKDIINPDKKKSKKSSETLTFKRPEGMHREVYALLYSDKKDAPPLLPSDTGQGYRTVKAKLGSKKVRPWKWMPFTNPARKDGAMFFHWRRAAEEGKDYPFARFNKTVQVPVYSEQEYQLYLHDDAWTKAETDHLFDLSRRFDLRFVVIHDRYDHQQFKKRSVEDLKERYYHICAKLANVRAVPGTDLKIPVFDAGHERRRKEQLERLYNRTPEQVAEEEYLLQELRKIEARKKEREKRSQDLQKLITAADTTAEQRRTERKAPKKKLPQKKEAEKPAVPETAGIKFPDFKSAGVTLRSQRMKLPSSVGQKKIKALEQMLLELGVELSPTPTEELVHMFNELRSDLVLLYELKQACANCEYELQMLRHRHEALARAGVLGGPATPASGPGPASAEPAVTEPGLGPDPKDTIIDVVGAPLTPNSRKRRESASSSSSVKKAKKP

SEQ ID NO: 914693 - protein, 378 aa, Homo sapiens
MLQGHRPRVWQQTGAAVVTGAWSLLDMTSCGHAPTVSLCASETVQVPVYSEQEYQLYLHDDAWTKAETDHLFDLSRRFDLRFVVIHDRYDHQQFKKRSVEDLKERYYHICAKLANVRAVPGTDLKIPVFDAGHERRRKEQLERLYNRTPEQVAEEEYLLQELRKIEARKKEREKRSQDLQKLITAADTTAEQRRTERKAPKKKLPQKKEAEKPAVPETAGIKFPDFKSAGVTLRSQRMKLPSSVGQKKIKALEQMLLELGVELSPTPTEELVHMFNELRSDLVLLYELKQACANCEYELQMLRHRHEALARAGVLGGPATPASGPGPASAEPAVTEPGLGPDPKDTIIDVVGAPLTPNSRKRRESASSSSSVKKAKKP

SEQ ID NO: 914694 - protein, 641 aa, Homo sapiens
APPEVSAAALRGRGSGSGGCSCRTQALTLDLRWLPHLSGAMATGADVRDILELGGPEGDAASGTISKKDIINPDKKKSKKSSETLTFKRPEGMHREVYALLYSDKNKGSCLLSRMQEDLKSFAPGHDFLAIGDAPPLLPSDTGQGYRTVKAKLGSKKVRPWKWMPFTNPARKDGAMFFHWRRAAEEGKDYPFARFNKKLTFGLHRSTYMWAPHLNYGGRSVCPMTEALELETVKIDPGINQRQATVPNPARTSSQADKFFPHSMLQGHRPRVWQQTGAAVVTGAWSLLDMTSCGHAPTVSLCASETVQVPVYSEQEYQLYLHDDAWTKAETDHLFDLSRRFDLRFVVIHDRYDHQQFKKRSVEDLKERYYHICAKLANVRAVPGTDLKIPVFDAGHERRRKEQLERLYNRTPEQVAEEEYLLQELRKIEARKKEREKRSQDLQKLITAADTTAEQRRTERKAPKKKLPQKKEAEKPAVPETAGIKFPDFKSAGVTLRSQRMKLPSSVGQKKIKALEQMLLELGVELSPTPTEELVHMFNELRSDLVLLYELKQACANCEYELQMLRHRHEALARAGVLGGPATPASGPGPASAEPAVTEPGLGPDPKDTIIDVVGAPLTPNSRKRRESASSSSSVKKAKKP

SEQ ID NO: 914695 - protein, 457 aa, Homo sapiens
MATGADVRDILELGGPEGDAASGTISKKDIINPDKKKSKKSSETLTFKRPEGMHREVYALLYSDKKDAPPLLPSDTGQGYRTVKAKLGSKKVRPWKWMPFTNPARKDGAMFFHWRRAAEEGKDYPFARFNKEYQLYLHDDAWTKAETDHLFDLSRRFDLRFVVIHDRYDHQQFKKRSVEDLKERYYHICAKLANVRAVPGTDLKIPVFDAGHERRRKEQLERLYNRTPEQVAEEEYLLQELRKIEARKKEREKRSQDLQKLITAADTTAEQRRTERKAPKKKLPQKKEAEKPAVPETAGIKFPDFKSAGVTLRSQRMKLPSSVGQKKIKALEQMLLELGVELSPTPTEELVHMFNELRSDLVLLYELKQACANCEYELQMLRHRHEALARAGVLGGPATPASGPGPASAEPAVTEPGLGPDPKDTIIDVVGAPLTPNSRKRRESASSSSSVKKAKKP

SEQ ID NO: 914696 - protein, 210 aa, Homo sapiens
APPEVSAAALRGRGSGSGGCSCRTQALTLDLRWLPHLSGAMATGADVRDILELGGPEGDAASGTISKKDIINPDKKKSKKSSETLTFKRPEGMHREVYALLYSDKKDAPPLLPSDTGQGYRTVKAKLGSKKVRPWKWMPFTNPARKDGAMFFHWRRAAEEGKDYPFARFNKGKLPSFGHRPRLPSHFEPFVRALQSPRVGSGGTLMPNCD

SEQ ID NO: 914697 - protein, 127 aa, Homo sapiens
MTAAATATVLKEGVLEKRSGGLLQLWKRKRCVLTERGLQLFEAKGTGGRPKELSFARIKAVECVESTGRHIYFTLVTEGGGEIDFRCPLEDPGWNAQITLGLVKFKNQQAIQTVRARQSLGTGTLVS

SEQ ID NO: 914698 - protein, 127 aa, Homo sapiens; identical to SEQ ID NO: 914697

SEQ ID NO: 914699 - protein, 127 aa, Homo sapiens; identical to SEQ ID NO: 914697

SEQ ID NO: 914700 - protein, 127 aa, Homo sapiens; identical to SEQ ID NO: 914697

SEQ ID NO: 914701 - protein, 127 aa, Homo sapiens; identical to SEQ ID NO: 914697

SEQ ID NO: 914702 - protein, 127 aa, Homo sapiens; identical to SEQ ID NO: 914697

SEQ ID NO: 914703 - protein, 127 aa, Homo sapiens; identical to SEQ ID NO: 914697

SEQ ID NO: 914704 - protein, 137 aa, Homo sapiens
MNDDSVIHHCAGLLLWSWATNRALPAVVLPSVLQTALSPLALCQAWRRAVPHGVPSQRLRNQEASLVPKGVPRAWYPGPLQNGLWTHLEKGELLGLKPTPGGLLLLRSFWDPHPSRPFLCTLLPPPLCIFPPLRCSA

SEQ ID NO: 914705 - protein, 127 aa, Homo sapiens; identical to SEQ ID NO: 914697

SEQ ID NO: 914706 - protein, 249 aa, Homo sapiens
RERGVLGSRDQGLQAGAQECETEAGEPWDWLKGRRRERGVCRGSPRDGWSAELTVWGTLIPNRSEEARVVEGARVLGARSSQGAGGQRARPASPGRQNPALRGREGRRARRSLELSANLGAPMTAAATATVLKEGVLEKRSGGLLQLWKRKRCVLTERGLQLFEAKGTGGRPKELSFARIKAVECVESTGRHIYFTLVTEGGGEIDFRCPLEDPGWNAQITLGLVKFKNQQAIQTVRARQSLGTGTLVS

SEQ ID NO: 914707 - protein, 231 aa, Homo sapiens
MRCGRAAQEASGGTCKGTSRELPPSAQTEPRGAAEALRPHRTRAAALRGQGHGRPAQGAQLRPHQGRGVRGEHRAPHLLHAGDRRGRRDRLPLPPGRSRLERPDHPRPGQVQEPAGHPDSAGPAEPRDRDPRVLNHRAHHLSFMLPTTSVLRTRQLRCSLWLVGARLCSMWQGGRHGRVEEALELKEWTSPGRRAEGYAGLRMKMQPLDGPRLSGHAQLRGFEPQAWPHMA

SEQ ID NO: 914708 - protein, 127 aa, Homo sapiens; identical to SEQ ID NO: 914697

SEQ ID NO: 914709 - protein, 137 aa, Homo sapiens
KFAAASTRHLASYGMRGSWHRSPLPAVVLPSVLQTALSPLALCQAWRRAVPHGVPSQRLRNQEASLVPKGVPRAWYPGPLQNGLWTHLEKGELLGLKPTPGGLLLLRSFWDPHPSRPFLCTLLPPPLCIFPPLRCSA

SEQ ID NO: 914710 - protein, 731 aa, Homo sapiens
MDDEDEDSEDSEDDEDWDTGSTSSDSDSEEEEGKQTALASRFLKKAPTTDEDKKAAEKKREDKAKKKHDRKSKRLDEEEEDNEGGEWERVRGGVPLVKEKPKMFAKGTEITHAVVIKKLNEILQARGKKGTDRAAQIELLQLLVQIAAENNLGEGVIVKIKFNIIASLYDYNPNLATYMKPEMWGKCLDCINELMDILFANPNIFVGENILEESENLHNADQPLRVRGCILTLVERMDEEFTKIMQNTDPHSQEYVEHLKDEAQVCAIIERVQRYLEEKGTTEEVCRIYLLRILHTYYKFDYKAHQRQLTPPEGSSKSEQDQAENEGEDSAVLMERLCKYIYAKDRTDRIRTCAILCHIYHHALHSRWYQARDLMLMSHLQDNIQHADPPVQILYNRTMVQLGICAFRQGLTKDAHNALLDIQSSGRAKELLGQGLLLRSLQERNQEQEKVERRRQVPFHLHINLELLECVYLVSAMLLEIPYMAAHESDARRRMISKQFHHQLRVGERQPLLGPPESMREHVVAASKAMKMGDWKTCHSFIINEKMNGKVWDLFPEADKVRTMLVRKIQEESLRTYLFTYSSVYDSISMETLSDMFELDLPTVHSIISKMIINEELMASLDQPTQTVVMHRTEPTAQQNLALQLAEKLGSLVENNERVFDHKQGTYGGYFRDQKDGYRKNEGYMRRWWLPPAAVSDGLLSSPLCFPPGPSNLEVLNHTSVTKGLFKVCSG

SEQ ID NO: 914711 - protein, 828 aa, Homo sapiens
MDDEDEDSEDSEDDEDWDTGSTSSDSDSEEEEGKQTALASRFLKKAPTTDEDKKAAEKKREDKAKKKHDRKSKRLDEEEEDNEGGEWERVRGGVPLVKEKPKMFAKGTEITHAVVIKKLNEILQARGKKGTDRAAQIELLQLLVQIAAENNLGEGVIVKIKFNIIASLYDYNPNLATYMKPEMWGKCLDCINELMDILFANPNIFVGENILEESENLHNADQPLRVRGCILTLVERMDEEFTKIMQNTDPHSQEYVEHLKDEAQVCAIIERVQRYLEEKGTTEEVCRIYLLRILHTYYKFDYKAHQRQLTPPEGSSKSEQDQAENEGEDSAVLMERLCKYIYAKDRTDRIRTCAILCHIYHHALHSRWYQARDLMLMSHLQDNIQHADPPVQILYNRTMVQLGICAFRQGLTKDAHNALLDIQSSGRAKELLGQGLLLRSLQERNQEQEKVERRRQVPFHLHINLELLECVYLVSAMLLEIPYMAAHESDARRRMISKQFHHQLRVGERQPLLGPPESMREHVVAASKAMKMGDWKTCHSFIINEKMNGKVWDLFPEADKVRTMLVRKIQEESLRTYLFTYSSVYDSISMETLSDMFELDLPTVHSIISKMIINEELMASLDQPTQTVVMHRTEPTAQQNLALQLAEKLGSLVENNERVFDHKQGTYGGYFRDQKDGYRKNEGYMRRWWLPPAAVSDGLLSSPLCFPPGPSNLEVLNHTSVTKGLFKVKKKIKKLSRLVLSLSPSLPNSARGTCCTPKDGLPGCERGWYRRVPKPDLTCTRLPSDMKGPRGEKACAPGTPTKRLKIYQARGQDQRVVNGHEGDPHKVT

SEQ ID NO: 914712 - protein, 177 aa, Homo sapiens
MEGQEGQFLEPIPHGMSQARSDNKITARARGKEHNTTQHNRTRPETVTKQNTKKNTKRARHDGRRARRENTKETTRTQHPRATGARARTTAKLRRQTEPGKREGKKEGPRAHVKAAQEKKHEQKARAQDKENKTAGYRRHERRKEQTTAEHKKAREESEPERRATKDLSRAERKKGG

SEQ ID NO: 914713 - protein, 185 aa, Homo sapiens
MSRFFTTGSDSESESSLSGEELVTKPVGGNYGKQPLLLSEDEEDTKRVVRSAKDKRFEELTNLIRTIRNAMKIRDVTKCLEEFELLGKAYGKAKSIVDKEGVPRFYIRILADLEDYLNELWEDKEGKKKMNKNNAKALSTLRQKIRKYNRDFESHITSYKQNPEQSADEDAEKNEEDSEGSSVWP

SEQ ID NO: 914714 - protein, 55 aa, Homo sapiens
MTRKRTRQAISFSTKWGYSKKAAVSKPETEPSPDTKSVCQHLNLGLPSSQRTVKN

SEQ ID NO: 914715 - protein, 731 aa, Homo sapiens; identical to SEQ ID NO: 914710

SEQ ID NO: 914716 - protein, 828 aa, Homo sapiens; identical to SEQ ID NO: 914711

SEQ ID NO: 914717 - protein, 719 aa, Homo sapiens
MDDEDEDSEDSEDDEDWDTGSTSSDSDSEEEEGKQTALASRFLKKAPTTDEDKKAAEKKREDKAKKKHDRKSKRLDEEEEDNEGGEWERVRGGVPLVKEKPKMFAKGTEITHAVVIKKLNEILQARGKKGTDRAAQIELLQLLVQIAAENNLGEGVIVKIKFNIIASLYDYNPNLATYMKPEMWGKCLDCINELMDILFANPNIFVGENILEESENLHNADQPLRVRGCILTLVERMDEEFTKIMQNTDPHSQEYVEHLKDEAQVCAIIERVQRYLEEKGTTEEVCRIYLLRILHTYYKFDYKAHQRQLTPPEGSSKSEQDQAENEGEDSAVLMERLCKYIYAKDRTDRIRTCAILCHIYHHALHSRWYQARDLMLMSHLQDNIQHADPPVQILYNRTMVQLGICAFRQGLTKDAHNALLDIQSSGRAKELLGQGLLLRSLQERNQEQEKVERRRQVPFHLHINLELLECVYLVSAMLLEIPYMAAHESDARRRMISKQFHHQLRVGERQPLLGPPESMREHVVAASKAMKMGDWKTCHSFIINEKMNGKVWDLFPEADKVRTMLVRKIQEESLRTYLFTYSSVYDSISMETLSDMFELDLPTVHSIISKMIINEELMASLDQPTQTVVMHRTEPTAQQNLALQLAEKLGSLVENNERVFDHKQGTYGGYFRDQKDGYRKNEGYMRRWWLPPAAVSDGLLSSPLCFPPGPSSLRGNGPG

SEQ ID NO: 914718 - protein, 764 aa, Homo sapiens
MDDEDEDSEDSEDDEDWDTGSTSSDSDSEEEEGKQTALASRFLKKAPTTDEDKKAAEKKREDKAKKKHDRKSKRLDEEEEDNEGGEWERVRGGVPLVKEKPKMFAKGTEITHAVVIKKLNEILQARGKKGTDRAAQIELLQLLVQIAAENNLGEGVIVKIKFNIIASLYDYNPNLATYMKPEMWGKCLDCINELMDILFANPNIFVGENILEESENLHNADQPLRVRGCILTLVERMDEEFTKIMQNTDPHSQEYVEHLKDEAQVCAIIERVQRYLEEKGTTEEVCRIYLLRILHTYYKFDYKAHQRQLTPPEGSSKSEQDQAENEGEDSAVLMERLCKYIYAKDRTDRIRTCAILCHIYHHALHSRWYQARDLMLMSHLQDNIQHADPPVQILYNRTMVQLGICAFRQGLTKDAHNALLDIQSSGRAKELLGQGLLLRSLQERNQEQEKVERRRQVPFHLHINLELLECVYLVSAMLLEIPYMAAHESDARRRMISKQFHHQLRVGERQPLLGPPESMREHVVAASKAMKMGDWKTCHSFIINEKMNGKVWDLFPEADKVRTMLVRRADREAVMGRGRRDWLVPFPEALSVSSVPSSHRKIQEESLRTYLFTYSSVYDSISMETLSDMFELDLPTVHSIISKMIINEELMASLDQPTQTVVMHRTEPTAQQNLALQLAEKLGSLVENNERVFDHKQGTYGGYFRDQKDGYRKNEGYMRRWWLPPAAVSDGLLSSPLCFPPGPSNLEVLNHTSVTKGLFKVCSG

SEQ ID NO: 914719 - protein, 731 aa, Homo sapiens
MDDEDEDSEDSEDDEDWDTGSTSSDSDSEEEEGKQTALASRFLKKAPTTDEDKKAAEKKREDKAKKKHDRKSKRLDEEEEDNEGGEWERVRGGVPLVKEKPKMFAKGTEITHAVVIKKLNEILQARGKKGTDRAAQIELLQLLVQIAAENNLGEGVIVKIKFNIIASLYDYNPNLATYMKPEMWGKCLDCINELMDILFANPNIFVGENILEESENLHNADQPLRVRGCILTLVERMDEEFTKIMQNTDPHSQEYVEHLKDEAQVCAIIERVQRYLEEKGTTEEVCRIYLLRILHTYYKFDYKAHQRQLTPPEGSSKSEQDQAENEGEDSAVLMERLCKYIYAKDRTDRIRTCAILCHIYHHALHSRWYQARDLMLMSHLQDNIQHADPPVQILYNRTMVQLGICAFRQGLTKDAHNALLDIQSSGRAKELLGQGLLLRSLQERNQEQEKVERRRQVPFHLHINLELLECVYLVSAMLLEIPYMAAHESDARRRMISKQFHHQLRVGERQPLLGPPESMREHVVAASKAMKMGDWKTCHSFIINEKMNGKVWDLFPEADKVRTMLVRKIQEESLRTYLFTYSSVYDSISMETLSDMFELDLPTVHSIISKMIINEELMASLDQPTQTVVMHRTEPTAQQNLALQLAEKLGSLVENNERVFDHKQGTYGGYFRGEYFGSSPCPLLVPSPPLTWHSLPFLPISLLQTRRTATAKTRATCAAGGYRQQQSQTAY

SEQ ID NO: 914720 - protein, 684 aa, Homo sapiens
MDDEDEDSEDSEDDEDWDTGSTSSDSDSEEEEGKQTALASRFLKKAPTTDEDKKAAEKKREDKAKKKHDRKSKRLDEEEEDNEGGEWERVRGGVPLVKEKPKMFAKGTEITHAVVIKKLNEILQARGKKGTDRAAQIELLQLLVQIAAENNLGEGVIVKIKFNIIASLYDYNPNLATYMKPEMWGKCLDCINELMDILFANPNIFVGENILEESENLHNADQPLRVRGCILTLVERMDEEFTKIMQNTDPHSQEYVEHLKDEAQVCAIIERVQRYLEEKGTTEEVCRIYLLRILHTYYKFDYKAHQRQLTPPEGSSKSEQDQAENEGEDSAVLMERLCKYIYAKDRTDRIRTCAILCHIYHHALHSRWYQARDLMLMSHLQDNIQHADPPVQILYNRTMVQLGICAFRQGLTKDAHNALLDIQSSGRAKELLGQGLLLRSLQERNQEQEKVERRRQVPFHLHINLELLECVYLVSAMLLEIPYMAAHESDARRRMISKQFHHQLRVGERQPLLGPPESMREHVVAASKAMKMGDWKTCHSFIINEKMNGKVWDLFPEADKVRTMLVRKIQEESLRTYLFTYSSVYDSISMETLSDMFELDLPTVHSIISKMIINEELMASLDQPTQTVVMHRTEPTAQLGRNWRRWEPRRVSPRGPGAPARGSRRPPGSQFTTAPPALSPSFVT

SEQ ID NO: 914721 - protein, 216 aa, Homo sapiens
MSRFFTTGSDSESESSLSGEELVTKPVGGNYGKQPLLLSEDEEDTKRVVRSAKDKRFEELTNLIRTIRNAMKIRDVTKCLEEFELLGKAYGKAKSIVDKEGVPRFYIRILADLEDYLNELWEDKEGKKKMNKNNAKALSTLRQKIRKYNRDFESHITSYKQNPEQSADEDAEKNEEDSEGSSDEDEDEDGVSAATFLNEEIRSSFWGESQVPQKDG

SEQ ID NO: 914722 - protein, 731 aa, Homo sapiens; identical to SEQ ID NO: 914710

SEQ ID NO: 914723 - protein, 713 aa, Homo sapiens
MDDEDEDSEDSEDDEDWDTGSTSSDSDSEEEEGKQTALASRFLKKAPTTDEDKKAAEKKREDKAKKKHDRKSKRLDEEEEDNEGGEWERVRGGVPLVKEKPKMFAKGTEITHAVVIKKLNEILQARGKKGTDRAAQIELLQLLVQIAAENNLGEGVIVKIKFNIIASLYDYNPNLATYMKPEMWGKCLDCINELMDILFANPNIFVGENILEESENLHNADQPLRVRGCILTLVERMDEEFTDEAQVCAIIERVQRYLEEKGTTEEVCRIYLLRILHTYYKFDYKAHQRQLTPPEGSSKSEQDQAENEGEDSAVLMERLCKYIYAKDRTDRIRTCAILCHIYHHALHSRWYQARDLMLMSHLQDNIQHADPPVQILYNRTMVQLGICAFRQGLTKDAHNALLDIQSSGRAKELLGQGLLLRSLQERNQEQEKVERRRQVPFHLHINLELLECVYLVSAMLLEIPYMAAHESDARRRMISKQFHHQLRVGERQPLLGPPESMREHVVAASKAMKMGDWKTCHSFIINEKMNGKVWDLFPEADKVRTMLVRKIQEESLRTYLFTYSSVYDSISMETLSDMFELDLPTVHSIISKMIINEELMASLDQPTQTVVMHRTEPTAQQNLALQLAEKLGSLVENNERVFDHKQGTYGGYFRDQKDGYRKNEGYMRRWWLPPAAVSDGLLSSPLCFPPGPSNLEVLNHTSVTKGLFKVCSG

SEQ ID NO: 914724 - protein, 623 aa, Homo sapiens
MDDEDEDSEDSEDDEDWDTGSTSSDSDSEEEEGKQTALASRFLKKAPTTDEDKKAAEKKREDKAKKKHDRKSKRLDEEEEDNEGGEWERVRGGVPLVKEKPKMFAKGTEITHAVVIKKLNEILQARGKKGTDRAAQIELLQLLVQIAAENNLGEGVIVKIKFNIIASLYDYNPNLATYMKPEMWGKCLDCINELMDILFANPNIFVGENILEESENLHNADQPLRVRGCILTLVERMDEEFTKIMQNTDPHSQEYVEHLKDEAQVCAIIERVQRYLEEKGTTEEVCRIYLLRILHTYYKFDYKAHQRQLTPPEGSSKSEQDQAENEGEDSAVLMERLCKYIYAKDRTDRIRTCAILCHIYHHALHSRWYQARDLMLMSHLQDNIQHADPPVQILYNRTMVQLGICAFRQGLTKDAHNALLDIQSSGRAKELLGQGLLLRSLQERNQEQEKVERRRQVPFHLHINLELLECVYLVSAMLLEIPYMAAHESDARRRMISKQFHHQLRVGERQPLLGPPESMREHVVAASKAMKMGDWKTCHSFIINEKMNGKVWDLFPEADKVRTMLVRKIQEESLRTYLFTYSSVYDSISMETLSDMFELDLPTVPGASRVPVDLRFCFFIKEK

SEQ ID NO: 914725 - protein, 745 aa, Homo sapiens
LARYEAGVKSAEGCQGDEDEDSEDSEDDEDWDTGSTSSDSDSEEEEGKQTALASRFLKKAPTTDEDKKAAEKKREDKAKKKHDRKSKRLDEEEEDNEGGEWERVRGGVPLVKEKPKMFAKGTEITHAVVIKKLNEILQARGKKGTDRAAQIELLQLLVQIAAENNLGEGVIVKIKFNIIASLYDYNPNLATYMKPEMWGKCLDCINELMDILFANPNIFVGENILEESENLHNADQPLRVRGCILTLVERMDEEFTKIMQNTDPHSQEYVEHLKDEAQVCAIIERVQRYLEEKGTTEEVCRIYLLRILHTYYKFDYKAHQRQLTPPEGSSKSEQDQAENEGEDSAVLMERLCKYIYAKDRTDRIRTCAILCHIYHHALHSRWYQARDLMLMSHLQDNIQHADPPVQILYNRTMVQLGICAFRQGLTKDAHNALLDIQSSGRAKELLGQGLLLRSLQERNQEQEKVERRRQVPFHLHINLELLECVYLVSAMLLEIPYMAAHESDARRRMISKQFHHQLRVGERQPLLGPPESMREHVVAASKAMKMGDWKTCHSFIINEKMNGKVWDLFPEADKVRTMLVRKIQEESLRTYLFTYSSVYDSISMETLSDMFELDLPTVHSIISKMIINEELMASLDQPTQTVVMHRTEPTAQQNLALQLAEKLGSLVENNERVFDHKQGTYGGYFRDQKDGYRKNEGYMRRWWLPPAAVSDGLLSSPLCFPPGPSNLEVLNHTSVTKGLFKVCSG

SEQ ID NO: 914726 - protein, 596 aa, Homo sapiens
MDDEDEDSEDSEDDEDWDTGSTSSDSDSEEEEGKQTALASRFLKKAPTTDEDKKAAEKKREDKAKKKHDRKSKRLDEEEEDNEGGEWERVRGGVPLVKEKPKMFAKGTEITHAVVIKKLNEILQARGKKGTDRAAQIELLQLLVQIAAENNLGEGVIVKIKFNIIASLYDYNPNLATYMKPEMWGKCLDCINELMDILFANPNIFVGENILEESENLHNADQPLRVRGCILTLVERMDEEFTKIMQNTDPHSQEYVEHLKDEAQVCAIIERVQRYLEEKGTTEEVCRIYLLRILHTYYKFDYKAHQRQLTPPEGSSKSEQDQAENEGEDSAVLMERLCKYIYAKDRTDRIRTCAILCHIYHHALHSRWYQARDLMLMSHLQDNIQHADPPVQILYNRTMVQLGICAFRQGLTKDAHNALLDIQSSGRAKELLGQGLLLRSLQERNQEQEKVERRRQVPFHLHINLELLECVYLVSAMLLEIPYMAAHESDARRRMISKQFHHQLRVGERQPLLGPPESMREHVVAASKAMKMGDWKTCHSFIINEKMNGKVWDLYPGLHAVRRQESLGPPSARGLVRLVRNVVCGPAIKYSRPPHM

SEQ ID NO: 914727 - protein, 561 aa, Homo sapiens
MDDEDEDSEDSEDDEDWDTGSTSSDSDSEEEEGKQTALASRFLKKAPTTDEDKKAAEKKREDKAKKKHDRKSKRLDEEEEDNEGGEWERVRGGVPLVKEKPKMFAKGTEITHAVVIKKLNEILQARGKKGTDRAAQIELLQLLVQIAAENNLGEGVIVKIKFNIIASLYDYNPNLATYMKPEMWGKCLDCINELMDILFANPNIFVGENILEESENLHNADQPLRVRGCILTLVERMDEEFTKIMQNTDPHSQEYVEHLKDEAQVCAIIERVQRYLEEKGTTEEVCRIYLLRILHTYYKFDYKAHQRQLTPPEGSSKSEQDQAENEGEDSAVLMERLCKYIYAKDRTDRIRTCAILCHIYHHALHSRWYQARDLMLMSHLQDNIQHADPPVQILYNRTMVQLGICAYLFTYSSVYDSISMETLSDMFELDLPTVHSIISKMIINEELMASLDQPTQTVVMHRTEPTAQQNLALQLAEKLGSLVENNERVFDHKQGTYGGYFRDQKDGYRKNEGYMRRWWLPPAAVSDGLLSSPLCFPPGPSNLEVLNHTSVTKGLFKVCSG

SEQ ID NO: 914728 - protein, 525 aa, Homo sapiens
MDDEDEDSEDSEDDEDWDTGSTSSDSDSEEEEGKQTALASRFLKKAPTTDEDKKAAEKKREDKAKKKHDRKSKRLDEEEEDNEGGEWERVRGGVPLVKEKPKMFAKGTEITHAVVIKKLNEILQARGKKGTDRAAQIELLQLLVQIAAENNLGEGVIVKIKFNIIASLYDYNPNLATYMKPEMWGKCLDCINELMDILFANPNIFVGENILEESENLHNADQPLRVRGCILTLVERMDEEFTKIMQNTDPHSQEYVEHLKDEAQVCAIIERVQRYLEEKGTTEEVCRIYLLRILHTYYKFDYKAHQRQLTPPEGSSKSEQDQAENEGEDSAVLMERLCKYIYAKDRTDRIRTCAILCHIYHHALHSRWYQARDLMLMSHLQDNIQHADPPVQILYNRTMVQLGICAFRQGLTKDAHNALLDIQSSGRAKELLGQGLLLRSLQERNQEQEKVERRRQVPFHLHINRTWLCSWPRSWAAWWRTTNGCLTTSRAPTGATSETRRTATAKTRATCAAGGYRQQQSQTAY

SEQ ID NO: 914729 - protein, 629 aa, Homo sapiens
MFAKGTEITHAVVIKKLNEILQARGKKGTDRAAQIELLQLLVQIAAENNLGEGVIVKIKFNIIASLYDYNPNLATYMKPEMWGKCLDCINELMDILFANPNIFVGENILEESENLHNADQPLRVRGCILTLVERMDEEFTKIMQNTDPHSQEYVEHLKDEAQVCAIIERVQRYLEEKGTTEEVCRIYLLRILHTYYKFDYKAHQRQLTPPEGSSKSEQDQAENEGEDSAVLMERLCKYIYAKDRTDRIRTCAILCHIYHHALHSRWYQARDLMLMSHLQDNIQHADPPVQILYNRTMVQLGICAFRQGLTKDAHNALLDIQSSGRAKELLGQGLLLRSLQERNQEQEKVERRRQVPFHLHINLELLECVYLVSAMLLEIPYMAAHESDARRRMISKQFHHQLRVGERQPLLGPPESMREHVVAASKAMKMGDWKTCHSFIINEKMNGKVWDLFPEADKVRTMLVRKIQEESLRTYLFTYSSVYDSISMETLSDMFELDLPTVHSIISKMIINEELMASLDQPTQTVVMHRTEPTAQQNLALQLAEKLGSLVENNERVFDHKQGTYGGYFRDQKDGYRKNEGYMRRWWLPPAAVSDGLLSSPLCFPPGPSNLEVLNHTSVTKGLFKVCSG

SEQ ID NO: 914730 - protein, 331 aa, Homo sapiens
MDDEDEDSEDSEDDEDWDTGSTSSDSDSEEEEGKQTALASRFLKKAPTTDEDKKAAEKKREDKAKKKHDRKSKRLDEEEEDNEGGEWERVRGGVPLVKEKPKMFAKGTEITHAVVIKKLNEILQARGKKGTDRAAQIELLQLLVQIAAENNLGEGVIVKIKFNIIASLYDYNPNLATYMKPEMWGKCLDCINELMDILFANPNIFVGENILEESENLHNADQPLRVRGCILTLVERMDEEFTKIMQNTDPHSQEYVEHLKDEAQVCAIIERVQRYLEEKGTTEEPAGAQPGAGEGGAAPSGPLPPAHQPGAAGVCLPGVCHAPGDPLHGRP

SEQ ID NO: 914731 - protein, 270 aa, Homo sapiens
MDDEDEDSEDSEDDEDWDTGSTSSDSDSEEEEGKQTALASRFLKKAPTTDEDKKAAEKKREDKAKKKHDRKSKRLDEEEEDNEGGEWERVRGGVPLVKEKPKMFAKGTEITHAVVIKKLNEILQARGKKGTDRAAQIELLQLLVQIAAENNLGEGVIVKIKFNIIASLYDYNPNLATYMKPEMWGKCLDCINELMDILFANPNIFVGENILEESENLHNADQPLRVRGCILTLVERMDEEFTKIMQNTDPHSQEYVEHLKDEATNGGPSS

SEQ ID NO: 914732 - protein, 357 aa, Homo sapiens
MLMSHLQDNIQHADPPVQILYNRTMVQLGICAFRQGLTKDAHNALLDIQSSGRAKELLGQGLLLRSLQERNQEQEKVERRRQVPFHLHINLELLECVYLVSAMLLEIPYMAAHESDARRRMISKQFHHQLRVGERQPLLGPPESMREHVVAASKAMKMGDWKTCHSFIINEKMNGKVWDLFPEADKVRTMLVRKIQEESLRTYLFTYSSVYDSISMETLSDMFELDLPTVHSIISKMIINEELMASLDQPTQTVVMHRTEPTAQQNLALQLAEKLGSLVENNERVFDHKQGTYGGYFRDQKDGYRKNEGYMRRWWLPPAAVSDGLLSSPLCFPPGPSNLEVLNHTSVTKGLFKVCSG

SEQ ID NO: 914733 - protein, 292 aa, Homo sapiens
ISSSLMIILLMMIKLRQVPFHLHINLELLECVYLVSAMLLEIPYMAAHESDARRRMISKQFHHQLRVGERQPLLGPPESMREHVVAASKAMKMGDWKTCHSFIINEKMNGKVWDLFPEADKVRTMLVRKIQEESLRTYLFTYSSVYDSISMETLSDMFELDLPTVHSIISKMIINEELMASLDQPTQTVVMHRTEPTAQQNLALQLAEKLGSLVENNERVFDHKQGTYGGYFRDQKDGYRKNEGYMRRWWLPPAAVSDGLLSSPLCFPPGPSNLEVLNHTSVTKGLFKVCSG

SEQ ID NO: 914734 - protein, 216 aa, Homo sapiens; identical to SEQ ID NO: 914721

SEQ ID NO: 914735 - protein, 216 aa, Homo sapiens; identical to SEQ ID NO: 914721

SEQ ID NO: 914736 - protein, 216 aa, Homo sapiens; identical to SEQ ID NO: 914721

SEQ ID NO: 914737 - protein, 218 aa, Homo sapiens
MSRFFTTGSDSESESSLSGEELVTKPVGGNYGKQPLLLSEDEEDTKRVVRSAKDKRFEELTNLIRTIRNAMKIRDVTKCLEEFELLGKAYGKAKSIVDKEGVPRFYIRILADLEDYLNELWEDKEGKKKMNKNNAKALSTLRQKIRKYNRDFESHITSYKQNPEQSADEDAEKNEEDSEGSSDEDEDEDGVSAATFLNEEIRSSFWGESQVPQKDGWD

SEQ ID NO: 914738 - protein, 212 aa, Homo sapiens
MSRFFTTGSDSESESSLSGEELVTKPVGGNYGKQPLLLSEDEEDTKRVVRSAKDKRFEELTNLIRTIRNAMKIRDVTKCLEEFELLGKAYGKAKSIVDKEGVPRFYIRILADLEDYLNELWEDKEGKKKMNKNNAKALSTLRQKIRKYNRDFESHITSYKQNPEQSADEDAEKNEEDSEGSSDEDEDEDGVTSLYADVRNRCGAKLTCLPSI

SEQ ID NO: 914739 - protein, 81 aa, Homo sapiens
FQQPVPEHSSSPSLASLTSELGTRRPASIHCCMGNLALVGSILLHLRVLRIEALLEFLRGELVTSTGSRPSGPSCFLSSSS

SEQ ID NO: 914740 - protein, 246 aa, Homo sapiens
MSRFFTTGSDSESESSLSGEELVTKPVGGNYGKQPLLLSEDEEDTKRVVRSAKDKRFEELTNLIRTIRNAMKIRDVTKCLEEFELLGKAYGKAKSIVDKEGVPRFYIRILADLEDYLNELWEDKEGKKKMNKNNAKALSTLRQKIRKYNRDFESHITSYKQNPEQSADEDAEKNEEDSEGSSDEDEDEDGVSAATFLNEEIRSSFWGESQVPQKDGCYDAGRDPNVDWARSTFVQRGQGTPGQYHT

SEQ ID NO: 914741 - protein, 102 aa, Homo sapiens
MCPPCGLCVTPPLCPSVLAQPWLDVHLAYDPVPVFHVLCHVTLCPASRGARVAWVLGPVALARSQSGAFHPALAYHSCLRASAWLHRIPGAAAPCFSRTLKS

SEQ ID NO: 914742 - protein, 73 aa, Homo sapiens
NSRPRRQDDRRERTWLCSWPRSWAAWWRTTNGCLTTSRAPTGATSETRRTATAKTRATCAAGGYRQQQSQTAY

SEQ ID NO: 914743 - protein, 731 aa, Homo sapiens; identical to SEQ ID NO: 914710

SEQ ID NO: 914744 - protein, 216 aa, Homo sapiens; identical to SEQ ID NO: 914721

SEQ ID NO: 914745 - protein, 755 aa, Homo sapiens
MDDEDEDSEDSEDDEDWDTGSTSSDSDSEEEEGKQTALASRFLKKAPTTDEDKKAAEKKREDKAKKKHDRKSKRLDEEEEDNEGGEWERVRGGVPLVKEKPKMFAKGTEITHAVVIKKLNEILQARGKKGTDRAAQIELLQLLVQIAAENNLGEGVIVKIKFNIIASLYDYNPNLATYMKPEMWGKCLDCINELMDILFANPNIFVGENILEESENLHNADQPLRVRGCILTLVERMDEEFTKIMQNTDPHSQEYVEHLKDEAQVCAIIERVQRYLEEKGTTEEVCRIYLLRILHTYYKFDYKAHQRQLTPPEGSSKSEQDQAENEGEDSAVLMERLCKYIYAKDRTDRIRTCAILCHIYHHALHSRWYQARDLMLMSHLQDNIQHADPPVQILYNRTMVQLGICAFRQGLTKDAHNALLDIQSSGRAKELLGQGLLLRSLQERNQEQEKVERRRQVPFHLHINLELLECVYLVSAMLLEIPYMAAHESDARRRMISKQFHHQLRVGERQPLLGPPESMREHVVAASKAMKMGDWKTCHSFIINEKMNGKVWDLFPEADKVRTMLVRKIQEESLRTYLFTYSSVYDSISMETLSDMFELDLPTVHSIISKMIINEELMASLDQPTQTVVMHRTEPTAQQNLALQLAEKLGSLVENNERVFDHKQGTYGGYFRDQKDGYRKNEGYMRRWWLPPAAVSDGLLSSPLCFPPGPSNLEVLNHTSVTKGLFKVLKKKKKKKKQKQKKKTQKKKGDQTPNN

SEQ ID NO: 914746 - protein, 893 aa, Homo sapiens
MDDEDEDSEDSEDDEDWDTGSTSSDSDSEEEEGKQTALASRFLKKAPTTDEDKKAAEKKREDKAKKKHDRKSKRLDEEEEDNEGGEWERVRGGVPLVKEKPKMFAKGTEITHAVVIKKLNEILQARGKKGTDRAAQIELLQLLVQIAAENNLGEGVIVKIKFNIIASLYDYNPNLATYMKPEMWGKCLDCINELMDILFANPNIFVGENILEESENLHNADQPLRVRGCILTLVERMDEEFTKIMQNTDPHSQEYVEHLKDEAQVCAIIERVQRYLEEKGTTEEVCRIYLLRILHTYYKFDYKAHQRQLTPPEGSSKSEQDQAENEGEDSAVLMERLCKYIYAKDRTDRIRTCAILCHIYHHALHSRWYQARDLMLMSHLQDNIQHADPPVQILYNRTMVQLGICAFRQGLTKDAHNALLDIQSSGRAKELLGQGLLLRSLQERNQEQEKVERRRQVPFHLHINLELLECVYLVSAMLLEIPYMAAHESDARRRMISKQFHHQLRVGERQPLLGPPESMREHVVAASKAMKMGDWKTCHSFIINEKMNGKVWDLFPEADKVRTMLVRKIQEESLRTYLFTYSSVYDSISMETLSDMFELDLPTVHSIISKMIINEELMASLDQPTQTVVMHRTEPTAQQNLALQLAEKLGSLVENNERVFDHKQGTYGGYFRDQKDGYRKNEGYMRRWWLPPAAVSDGLLSSPLCFPPGPSIVTEVWFRTSNFGRRLSAGGEAAADSGPRRSRGIAPGLRSVAPGPEPFEAGASGRQTSWGRPSYSGKTPIPPCWYLLTQRSPDGRTALLPASDDGQQTRTKEMAPGPLQLPSPLSNESQTTDRHQPPSASLLQHGPRPDDPIQIRKRADRIRTIQNTPGLNNNTTPRQQTNQPRTHGNHKTY

SEQ ID NO: 914747 - protein, 731 aa, Homo sapiens; identical to SEQ ID NO: 914710

SEQ ID NO: 914748 - protein, 696 aa, Homo sapiens
MDDEDEDSEDSEDDEDWDTGSTSSDSDSEEEEGKQTALASRFLKKAPTTDEDKKAAEKKREDKAKKKHDRKSKRLDEEEEDNEGGEWERVRGGVPLVKEKPKMFAKGTEITHAVVIKKLNEILQARGKKGTDRAAQIELLQLLVQIAAENNLGEGVIVKIKFNIIASLYDYNPNLATYMKPEMWGKCLDCINELMDILFANPNIFVGENILEESENLHNADQPLRVRGCILTLVERMDEEFTKIMQNTDPHSQEYVEHLKDEAQVCAIIERVQRYLEEKGTTEEVCRIYLLRILHTYYKFDYKAHQRQLTPPEGSSKSEQDQAENEGEDSAVLMERLCKYIYAKDRTDRIRTCAILCHIYHHALHSRWYQARDLMLMSHLQDNIQHADPPVQILYNRTMVQLGICAFRQGLTKDAHNALLDIQSSGRAKELLGQGLLLRSLQERNQEQEKVERRRQVPFHLHINLELLECVYLVSAMLLEIPYMAAHESDARRRMISKQFHHQLRVGERQPLLGPPESMREHVVAASKAMKMGDWKTCHSFIINEKMNGKVWDLFPEADKVRTMLVRKIQEESLRTYLFTYSSVYDSISMETLSDMFELDLPTVHSIISKMIINEELMASLDQPTQTVVMHRTEPTAQQNLALQLAEKLGSLVENNERVFDHKQGTYGGYFRDQKDGLPEKRGVHPRRSVPGTFLL

SEQ ID NO: 914749 - protein, 357 aa, Homo sapiens; identical to SEQ ID NO: 914732

SEQ ID NO: 914750 - protein, 731 aa, Homo sapiens; identical to SEQ ID NO: 914710

SEQ ID NO: 914751 - protein, 567 aa, Homo sapiens
MDDEDEDSEDSEDDEDWDTGSTSSDSDSEEEEGKQTALASRFLKKAPTTDEDKKAAEKKREDKAKKKHDRKSKRLDEEEEDNEGGEWERVRGGVPLVKEKPKMFAKGTEITHAVVIKKLNEILQARGKKGTDRAAQIELLQLLVQIAAENNLGEGVIVKIKFNIIASLYDYNPNLATYMKPEMWGKCLDCINELMDILFANPNIFVGENILEESENLHNADQPLRVRGCILTLVERMDEEFTKIMQNTDPHSQEYVEHLKDEAQVCAIIERVQRYLEEKGTTEEVCRIYLLRILHTYYKFDYKAHQRQLTPPEGSSKSEQDQAENEGEDSAVLMERLCKYIYAKDRTDRIRTCAILCHIYHHALHSRWYQARDLMLMSHLQDNIQHADPPVQILYNRTMVQLGICAFRQGLTKDAHNALLDIQSSGRAKELLGQGLLLRSLQERNQEQEKVERRRQVPFHLHINLELLECVYLVSAMLLEIPYMAAHESDARRRMISKQFHHQLRVGERQPLLGPPESMREHVVAASKAMKMGDWKTCHSFIINEKMNGKVWDLFPEADKVRTMLVR

SEQ ID NO: 914752 - protein, 613 aa, Homo sapiens
MDDEDEDSEDSEDDEDWDTGSTSSDSDSEEEEGKQTALASRFLKKAPTTDEDKKAAEKKREDKAKKKHDRKSKRLDEEEEDNEGGEWERVRGGVPLVKEKPKMFAKGTEITHAVVIKKLNEILQARGKKGTDRAAQIELLQLLVQIAAENNLGEGVIVKIKFNIIASLYDYNPNLATYMKPEMWGKCLDCINELMDILFANPNIFVGENILEESENLHNADQPLRVRGCILTLVERMDEEFTKIMQNTDPHSQEYVEHLKDEAQVCAIIERVQRYLEEKGTTEEVCRIYLLRILHTYYKFDYKAHQRQLTPPEGSSKSEQDQAENEGEDSAVLMERLCKYIYAKDRTDRIRTCAILCHIYHHALHSRWYQARDLMLMSHLQDNIQHADPPVQILYNRTMVQLGICAFRQGLTKDAHNALLDIQSSGRAKELLGQGLLLRSLQERNQEQEKVERRRQVPFHLHINLELLECVYLVSAMLLEIPYMAAHESDARRRMISKQFHHQLRVGERQPLLGPPESMREHVVAASKAMKMGDWKTCHSFIINEKMNGKVWDLFPEADKVRTMLVRKIQEESLRTYLFTYSSVYDSISMETLSASGKRSHTFPFIFSLMIKL

SEQ ID NO: 914753 - protein, 659 aa, Homo sapiens
MDDEDEDSEDSEDDEDWDTGSTSSDSDSEEEEGKQTALASRFLKKAPTTDEDKKAAEKKREDKAKKKHDRKSKRLDEEEEDNEGGEWERVRGGVPLVKEKPKMFAKGTEITHAVVIKKLNEILQARGKKGTDRAAQIELLQLLVQIAAENNLGEGVIVKIKFNIIASLYDYNPNLATYMKPEMWGKCLDCINELMDILFANPNIFVGENILEESENLHNADQPLRVRGCILTLVERMDEEFTKIMQNTDPHSQEYVEHLKDEAQVCAIIERVQRYLEEKGTTEEVCRIYLLRILHTYYKFDYKAHQRQLTPPEGSSKSEQDQAENEGEDSAVLMERLCKYIYAKDRTDRIRTCAILCHIYHHALHSRWYQARDLMLMSHLQDNIQHADPPVQILYNRTMVQLGICAFRQGLTKDAHNALLDIQSSGRAKELLGQGLLLRSLQERNQEQEKVERRRQVPFHLHINLELLECVYLVSAMLLEIPYMAAHESDARRRMISKQFHHQLRVGERQPLLGPPESMREHVVAASKAMKMGDWKTCHSFIINEKMNGKVWDLFPEADKVRTMLVRKIQEESLRTYLFTYSSVYDSISMALMSDMFERHLPTCARQQLCNMINSSGTDHLPGPDNTDLSMLSTSGQLCVRRSAYGASDHNQVMIGYYF

SEQ ID NO: 914754 - protein, 581 aa, Homo sapiens
MDDEDEDSEDSEDDEDWDTGSTSSDSDSEEEEGKQTALASRFLKKAPTTDEDKKAAEKKREDKAKKKHDRKSKRLDEEEEDNEGGEWERVRGGVPLVKEKPKMFAKGTEITHAVVIKKLNEILQARGKKGTDRAAQIELLQLLVQIAAENNLGEGVIVKIKFNIIASLYDYNPNLATYMKPEMWGKCLDCINELMDILFANPNIFVGENILEESENLHNADQPLRVRGCILTLVERMDEEFTKIMQNTDPHSQEYVEHLKDEAQVCAIIERVQRYLEEKGTTEEVCRIYLLRILHTYYKFDYKAHQRQLTPPEGSSKSEQDQAENEGEDSAVLMERLCKYIYAKDRTDRIRTCAILCHIYHHALHSRWYQARDLMLMSHLQDNIQHADPPVQILYNRTMVQLGICAFRQGLTKDAHNALLDIQSSGRAKELLGQGLLLRSLQERNQEQEKVERRRQVPFHLHINLELLECVYLVSAMLLEIPYMAAHESDARRRMISKQFHHQLRVGERQPLLGPPESMREHVVAASKAMKMGDWKTCHSFIINEKMNGKVWDLSGHDYDQDCDIVLSKIQQETLETYILN

SEQ ID NO: 914755 - protein, 525 aa, Homo sapiens; identical to SEQ ID NO: 914728

SEQ ID NO: 914756 - protein, 619 aa, Homo sapiens
EEAGGDPGEESHRHEAKKGTTAAQIELLQLLVQIAAENNLGEGVIVKIKFNIIASLYDYNPNLATYMKPEMWGKCLDCINELMDILFANPNIFVGENILEESENLHNADQPLRVRGCILTLVERMDEEFTKIMQNTDPHSQEYVEHLKDEAQVCAIIERVQRYLEEKGTTEEVCRIYLLRILHTYYKFDYKAHQRQLTPPEGSSKSEQDQAENEGEDSAVLMERLCKYIYAKDRTDRIRTCAILCHIYHHALHSRWYQARDLMLMSHLQDNIQHADPPVQILYNRTMVQLGICAFRQGLTKDAHNALLDIQSSGRAKELLGQGLLLRSLQERNQEQEKVERRRQVPFHLHINLELLECVYLVSAMLLEIPYMAAHESDARRRMISKQFHHQLRVGERQPLLGPPESMREHVVAASKAMKMGDWKTCHSFIINEKMNGKVWDLFPEADKVRTMLVRKIQEESLRTYLFTYSSVYDSISMETLSDMFELDLPTVHSIISKMIINEELMASLDQPTQTVVMHRTEPTAQQNLALQLAEKLGSLVENNERVFDHKQGTYGGYFRDQKDGYRKNEGYMRRWWLPPAAVSDGLLSSPLCFPPGPSNLEVLNHTSVTKGLFKVCSG

SEQ ID NO: 914757 - protein, 313 aa, Homo sapiens
MDDEDEDSEDSEDDEDWDTGSTSSDSDSEEEEGKQTALASRFLKKAPTTDEDKKAAEKKREDKAKKKHDRKSKRLDEEEEDNEGGEWERVRGGVPLVKEKPKMFAKGTEITHAVVIKKLNEILQARGKKGTDRAAQIELLQLLVQIAAENNLGEGVIVKIKFNIIASLYDYNPNLATYMKPEMWGKCLDCINELMDILFANPNIFVGENILEESENLHNADQPLRVRGCILTLVERMDEEFTKIMQNTDPHSQEYVEHLKDEAQVCAIIERVQRYLEEKGTTEEVRITWLRDLKVCSSHRKTLGPKWNGKRGP

SEQ ID NO: 914758 - protein, 278 aa, Homo sapiens
MDDEDEDSEDSEDDEDWDTGSTSSDSDSEEEEGKQTALASRFLKKAPTTDEDKKAAEKKRGPPESMREHVVAASKAMKMGDWKTCHSFIINEKMNGKVWDLFPEADKVRTMLVRKIQEESLRTYLFTYSSVYDSISMETLSDMFELDLPTVHSIISKMIINEELMASLDQPTQTVVMHRTEPTAQQNLALQLAEKLGSLVENNERVFDHKQGTYGGYFRDQKDGYRKNEGYMRRWWLPPAAVSDGLLSSPLCFPPGPSNLEVLNHTSVTKGLFKVCSG

SEQ ID NO: 914759 - protein, 240 aa, Homo sapiens
MDDEDEDSEDSEDDEDWDTGSTSSDSDSEEEEGKQTALASRFLKKAPTTDEDKKAAEKKREDKAKKKHDRKSKRLDEEEEDNEGGEWERVRGGVPLVKEKPKMFAKGTEITHAVVIKKLNEILQARGKKGTDRAAQIELLQLLVQIAAENNLGEGVIVKIKFNIIASLYDYNPNLATYMKPEMWGKCLDCINELMDILFANPNIFVGENILEESENLHNADQPLRVRGCILHGAASSMVL

SEQ ID NO: 914760 - protein, 216 aa, Homo sapiens; identical to SEQ ID NO: 914721

SEQ ID NO: 914761 - protein, 216 aa, Homo sapiens; identical to SEQ ID NO: 914721

SEQ ID NO: 914762 - protein, 185 aa, Homo sapiens; identical to SEQ ID NO: 914713

SEQ ID NO: 914763 - protein, 117 aa, Homo sapiens
MQKSCEENEGKPQNMPKAEEDRPLEDVPQEAEGNPQPSEEGVSQEAEGNPRGGPNQPGQGFKEDTPVRHLDPEEMIRGVDELERLREEIRRVRNKFVMMHWKQRHSRSRPYPVCFRP

SEQ ID NO: 914764 - protein, 117 aa, Homo sapiens; identical to SEQ ID NO: 914763

SEQ ID NO: 914765 - protein, 149 aa, Homo sapiens
MPRRSGNNDRHKTSARPLHQNHSREQTKQEQNSHRQSATANRKAQTHRSKQRRPSRKTRADKQHTRENKRTRSNRTTATRGTRNHNNTQTTHSEETHAKEEQEQQGHAEEDTEHARKHKDEYRERNTKQSQTRRDKTTKPTHKEETERE

SEQ ID NO: 914766 - protein, 117 aa, Homo sapiens; identical to SEQ ID NO: 914763

SEQ ID NO: 914767 - protein, 162 aa, Homo sapiens
MLTVPKNPGGIMSVLETLHNIDGEVINGVNPLRSPAGVQLFINGPNNDDCEENEGKPQNMPKAEEDRPLEDVPQEAEGNPQPSEEGVSQEAEGNPRGGPNQPGQGFKEDTPVRHLDPEEMIRGVDELERLREEIRRVRNKFVMMHWKQRHSRSRPYPVCFRP

SEQ ID NO: 914768 - protein, 854 aa, Homo sapiens
MREMAGAWHMTVEQKFGLFSAEIKEADPLAASEASQPKPCPPEVTPHYIWIDFLVQRFEIAKYCSSDQVEIFSSLLQRSMSLNIGGAKGSMNRHVAAIGPRFKLLTLGLSLLHADVVPNATIRNVLREKIYSTAFDYFSCPPKFPTQGEKRLREDISIMIKFWTAMFSDKKYLTASQLVPPDNQDTRSNLDITVGSRQQATQGWINTYPLSSGMSTISKKSGMSKKTNRGSQLHKYYMKRRTLLLSLLATEIERLITWYNPLSAPELELDQAGENSVANWRSKYISLSEKQWKDNVNLAWSISPYLAVQLPARFKNTEAIGNEVTRLVRLDPGAVSDVPEAIKFLVTWHTIDADAPELSHVLCWAPTDPPTGLSYFSSMYPPHPLTAQYGVKVLRSFPPDAILFYIPQIVQALRYDKMGYVREYILWAASKSQLLAHQFIWNMKTNIYLDEEGHQKDPDIGDLLDQLVEEITGSLSGPAKDFYQREFDFFNKITNVSAIIKPYPKGDERKKACLSALSEVKVQPGCYLPSNPEAIVLDIDYKSGTPMQSAAKAPYLAKFKVKRCGVSELEKEGLRCRSDSEDECSTQEADGQKISWQAAIFKVGDDCRQDMLALQIIDLFKNIFQLVGLDLFVFPYRVVATAPGCGVIECIPDCTSRDQLGRQTDFGMYDYFTRQYGDESTLAFQQARYNFIRSMAAYSLLLFLLQIKDRHNGNIMLDKKGHIIHIDFGFMFESSPGGNLGWEPDIKLTDEMVMIMGGKMEATPFKWFMEMCVRGYLAVRPYMDAVVSLVTLMLDTGLPCFRGQTIKLLKHRFSPNMTEREAANFIMKVIQSCFLSNRSRTYDMIQYYQNDIPY

SEQ ID NO: 914769 - protein, 1777 aa, Homo sapiens
MFKMLRDTLYYMHQDLPTSFVKEIHDFVLEQFNTSQGELQKILHDADRIHNELSPLKLRCQANAACVDLMVWAVKDEQGAENLCIKLSEKLQSKTSSKVIIAHLPLLICCLQGLGRLCERFPVVVHSVTPSLRDFLVIPSPVLVKLYKYHSQYHTVAGNDIKISVTNEHSESTLNVMSGKKSQPSMYEQLRDIAIDNICRCLKAGLTVDPVIVEAFLASLSNRLYISQESDKDAHLIPDHTIRALGHIAVALRDTPKVMEPILQILQQKFCQPPSPLDVLIIDQLGCLVITGNQYIYQEVWNLFQQISVKASSVVYSATKDYKDHGYRHCSLAVINALANIAANIQDEHLVDELLMNLLELFVQLGLEGKRASERASEKGPALKASSSAGNLGVLIPVIAVLTRRLPPIKEAKPRLQKLFRDFWLYSVLMGFAVEGSGLWPEEWYEGVCEIATKSPLLTFPSKEPLRSVLQYNSAMKNDTVTPAQDSHLIFTMLSVPIRADLFTVIINTCCQPLGPVCPGGCPMSPRMFLSLQAELSELRSTIINLLDPPPEVSALINKLDFAMSTYLLSVYRLEYMRVLRSTDPDRFQVMFCYFEDKAIQKDKSGMMQCVIAVADKVFDAFLNMMADKAKTKENEEELERHAQFLLVNFNHIHKRIRRVADKYLSGLVDKFPHLLWSGTVLKTMLDILQTLSLSLSADIHKDQPYYDIPDAPYRITVPDTYEARESIVKDFAARCGMILQEAMKWAPTVTKSHLQEYLNKHQNWVSGLSQHTGLAMATESILHFAGYNKQNTTLGATQLSERPACVKKDYSNFMASLNLRNRYAGEVYGMIRFSGTTGQMSDLNKMMVQDLHSALDRSHPQHYTQAMFKLTAMLISSKDCDPQLLHHLCWGPLRMFNEHGMETALACWEWLLAGKDGVEVPFMREMAGAWHMTVEQKFGLFSAEIKEADPLAASEASQPKPCPPEVTPHYIWIDFLVQRFEIAKYCSSDQVEIFSSLLQRSMSLNIGGAKGSMNRHVAAIGPRFKLLTLGLSLLHADVVPNATIRNVLREKIYSTAFDYFSCPPKFPTQGEKRLREDISIMIKFWTAMFSDKKYLTASQLVPPDNQDTRSNLDITVGSRQQATQGWINTYPLSSGMSTISKKSGMSKKTNRGSQLHKYYMKRRTLLLSLLATEIERLITWYNPLSAPELELDQAGENSVANWRSKYISLSEKQWKDNVNLAWSISPYLAVQLPARFKNTEAIGNEVTRLVRLDPGAVSDVPEAIKFLVTWHTIDADAPELSHVLCWAPTDPPTGLSYFSSMYPPHPLTAQYGVKVLRSFPPDAILFYIPQIVQALRYDKMGYVREYILWAASKSQLLAHQFIWNMKTNIYLDEEGHQKDPDIGDLLDQLVEEITGSLSGPAKDFYQREFDFFNKITNVSAIIKPYPKGDERKKACLSALSEVKVQPGCYLPSNPEAIVLDIDYKSGTPMQSAAKAPYLAKFKVKRCGVSELEKEGLRCRSDSEDECSTQEADGQKISWQAAIFKVGDDCRQDMLALQIIDLFKNIFQLVGLDLFVFPYRVVATAPGCGVIECIPDCTSRDQLGRQTDFGMYDYFTRQYGDESTLAFQQARYNFIRSMAAYSLLLFLLQIKDRHNGNIMLDKKGHIIHIDFGFMFESSPGGNLGWEPDIKLTDEMVMIMGGKMEATPFKWFMEMCVRGYLAVRPYMDAVVSLVTLMLDTGLPCFRGQTIKLLKHRFSPNMTEREAANFIMKVIQSCFLSNRSRTYDMIQYYQNDIPY

SEQ ID NO: 914770 - protein, 937 aa, Homo sapiens
MSDLNKMMVQDLHSALDRSHPQHYTQAMFKLTAMLISSKDCDPQLLHHLCWGPLRMFNEHGMETALACWEWLLAGKDGVEVPFMREMAGAWHMTVEQKFGLFSAEIKEADPLAASEASQPKPCPPEVTPHYIWIDFLVQRFEIAKYCSSDQVEIFSSLLQRSMSLNIGGAKGSMNRHVAAIGPRFKLLTLGLSLLHADVVPNATIRNVLREKIYSTAFDYFSCPPKFPTQGEKRLREDISIMIKFWTAMFSDKKYLTASQLVPPDNQDTRSNLDITVGSRQQATQGWINTYPLSSGMSTISKKSGMSKKTNRGSQLHKYYMKRRTLLLSLLATEIERLITWYNPLSAPELELDQAGENSVANWRSKYISLSEKQWKDNVNLAWSISPYLAVQLPARFKNTEAIGNEVTRLVRLDPGAVSDVPEAIKFLVTWHTIDADAPELSHVLCWAPTDPPTGLSYFSSMYPPHPLTAQYGVKVLRSFPPDAILFYIPQIVQALRYDKMGYVREYILWAASKSQLLAHQFIWNMKTNIYLDEEGHQKDPDIGDLLDQLVEEITGSLSGPAKDFYQREFDFFNKITNVSAIIKPYPKGDERKKACLSALSEVKVQPGCYLPSNPEAIVLDIDYKSGTPMQSAAKAPYLAKFKVKRCGVSELEKEGLRCRSDSEDECSTQEADGQKISWQAAIFKVGDDCRQDMLALQIIDLFKNIFQLVGLDLFVFPYRVVATAPGCGVIECIPDCTSRDQLGRQTDFGMYDYFTRQYGDESTLAFQQARYNFIRSMAAYSLLLFLLQIKDRHNGNIMLDKKGHIIHIDFGFMFESSPGGNLGWEPDIKLTDEMVMIMGGKMEATPFKWFMEMCVRGYLAVRPYMDAVVSLVTLMLDTGLPCFRGQTIKLLKHRFSPNMTEREAANFIMKVIQSCFLSNRSRTYDMIQYYQNDIPY

SEQ ID NO: 914771 - protein, 1679 aa, Homo sapiens
MFKMLRDTLYYMHQDLPTSFVKEIHDFVLEQFNTSQGELQKILHDADRIHNELSPLKLRCQANAACVDLMVWAVKDEQGAENLCIKLSEKLQSKTSSKVIIAHLPLLICCLQGLGRLCERFPVVVHSVTPSLRDFLVIPSPVLVKLYKYHSQYHTVAGNDIKISVTNEHSESTLNVMSGKKSQPSMYEQLRDIAIDNICRCLKAGLTVDPVIVEAFLASLSNRLYISQESDKDAHLIPDHTIRALGHIAVALRDTPKVMEPILQILQQKFCQPPSPLDVLIIDQLGCLVITGNQYIYQEVWNLFQQISVKASSVVYSATKDYKDHGYRHCSLAVINALANIAANIQDEHLVDELLMNLLELFVQLGLEGKRASERASEKGPALKASSSAGNLGVLIPVIAVLTRRLPPIKEAKPRLQKLFRDFWLYSVLMGFAVEGSGLWPEEWYEGVCEIATKSPLLTFPSKEPLRSVLQYNSAMKNDTVTPAELSELRSTIINLLDPPPEVSALINKLDFAMSTYLLSVYRLEYMRVLRSTDPDRFQVMFCYFEDKAIQKDKSGMMQCVIAVADKVFDAFLNMMADKAKTKENEEELERHAQFLLVNFNHIHKRIRRVADKYLSGLVDKFPHLLWSGTVLKTMLDILQTLSLSLSADIHKDQPYYDIPDAPYRITVPDTYEARESIVKDFAARCGMILQEAMKWAPTVTKSHLQEYLNKHQNWVSGLSQHTGLAMATESILHFAGYNKQNTTLGATQLSERPACVKKDYSNFMASLNLRNRYAGEVYGMIRFSGTTGQMSDLNKMMVQDLHSALDRSHPQHYTQAMFKLTAMLISSKDCDPQLLHHLCWGPLRMFNEHGMETALACWEWLLAGKDGVEVPFMREMAGAWHMTVEQKFGLFSAEIKEADPLAASEASQPKPCPPEVTPHYIWIDFLVQRFEIAKYCSSDQVEIFSSLLQRSMSLNIGGAKGSMNRHVAAIGPRFKLLTLGLSLLHADVVPNATIRNVLREKIYSTAFDYFSCPPKFPTQGEKRLREDISIMIKFWTAMFSDKKYLTASQLVPPDNQDTRSNLDITVGSRQQATQGWINTYPLSSGMSTISKKSGMSKKTNRGSQLHKYYMKRRTLLLSLLATEIERLITWYNPLSAPELELDQAGENSVANWRSKYISLSEKQWKDNVNLAWSISPYLAVQLPARFKNTEAIGNEVTRLVRLDPGAVSDVPEAIKFLVTWHTIDADAPELSHVLCWAPTDPPTGLSYFSSMYPPHPLTAQYGVKVLRSFPPDAILFYIPQIVQALRYDKMGYVREYILWAASKSQLLAHQFIWNMKTNIYLDEEGHQKDPDIGDLLDQLVEEITGSLSGPAKDFYQREFDFFNKITNVSAIIKPYPKGDERKKACLSALSEVKVQPGLRCRSDSEDECSTQEADGQKISWQAAIFKVGDDCRQDMLALQIIDLFKNIFQLVGLDLFVFPYRVVATAPGCGVIECIPDCTSRDQLGRQTDFGMYDYFTRQYGDESTLAFQQARYNFIRSMAAYSLLLFLLQIKDRHNGNIMLDKKGHIIHIDFGFMFESSPGGNLGWEPDIKLTDEMVMIMGGKMEATPFKWFMEMCVRGYLAVRPYMDAVVSLVTLMLDTGLPCFRGQTIKLLKHRFSPNMTEREAANFIMKVIQSCFLSNRSRTYDMIQYYQNDIPY

SEQ ID NO: 914772 - protein, 1727 aa, Homo sapiens
MFKMLRDTLYYMHQDLPTSFVKEIHDFVLEQFNTSQGELQKILHDADRIHNELSPLKLRCQANAACVDLMVWAVKDEQGAENLCIKLSEKLQSKTSSKVIIAHLPLLICCLQGLGRLCERFPVVVHSVTPSLRDFLVIPSPVLVKLYKYHSQYHTVAGNDIKISVTNEHSESTLNVMSGKKSQPSMYEQLRDIAIDNICRCLKAGLTVDPVIVEAFLASLSNRLYISQESDKDAHLIPDHTIRALGHIAVALRDTPKVMEPILQILQQKFCQPPSPLDVLIIDQLGCLVITGNQYIYQEVWNLFQQISVKASSVVYSATKDYKDHGYRHCSLAVINALANIAANIQDEHLVDELLMNLLELFVQLGLEGKRASERASEKGPALKASSSAGNLGVLIPVIAVLTRRLPPIKEAKPRLQKLFRDFWLYSVLMGFAVEGSGLWPEEWYEGVCEIATKSPLLTFPSKEPLRSVLQYNSAMKNDTVTPAELSELRSTIINLLDPPPEVSALINKLDFAMSTYLLSVYRLEYMRVLRSTDPDRFQVMFCYFEDKAIQKDKSGMMQCVIAVADKVFDAFLNMMADKAKTKENEEELERHAQFLLVNFNHIHKRIRRVADKYLSGLVDKFPHLLWSGTVLKTMLDILQTLSLSLSADIHKDQPYYDIPDAPYRITVPDTYEARESIVKDFAARCGMILQEAMKWAPTVTKSHLQEYLNKHQNWVSGLSQHTGLAMATESILHFAGYNKQNTTLGATQLSERPACVKKDYSNFMASLNLRNRYAGEVYGMIRFSGTTGQMSDLNKMMVQDLHSALDRSHPQHYTQAMFKLTAMLISSKDCDPQLLHHLCWGPLRMFNEHGMETALACWEWLLAGKDGVEVPFMREMAGAWHMTVEQKFGLFSAEIKEADPLAASEASQPKPCPPEVTPHYIWIDFLVQRFEIAKYCSSDQVEIFSSLLQRSMSLNIGGAKGSMNRHVAAIGPRFKLLTLGLSLLHADVVPNATIRNVLREKIYSTAFDYFSCPPKFPTQGEKRLREDISIMIKFWTAMFSDKKYLTASQLVPPDNQDTRSNLDITVGSRQQATQGWINTYPLSSGMSTISKKSGMSKKTNRGSQLHKYYMKRRTLLLSLLATEIERLITWYNPLSAPELELDQAGENSVANWRSKYISLSEKQWKDNVNLAWSISPYLAVQLPARFKNTEAIGNEVTRLVRLDPGAVSDVPEAIKFLVTWHTIDADAPELSHVLCWAPTDPPTGLSYFSSMYPPHPLTAQYGVKVLRSFPPDAILFYIPQIVQALRYDKMGYVREYILWAASKSQLLAHQFIWNMKTNIYLDEEGHQKDPDIGDLLDQLVEEITGSLSGPAKDFYQREFDFFNKITNVSAIIKPYPKGDERKKACLSALSEVKVQPGCYLPSNPEAIVLDIDYKSGTPMQSAAKAPYLAKFKVKRCGVSELEKEGLRCRSDSEDECSTQEADGQKISWQAAIFKVGDDCRQDMLALQIIDLFKNIFQLVGLDLFVFPYRVVATAPGCGVIECIPDCTSRDQLGRQTDFGMYDYFTRQYGDESTLAFQQARYNFIRSMAAYSLLLFLLQIKDRHNGNIMLDKKGHIIHIDFGFMFESSPGGNLGWEPDIKLTDEMVMIMGGKMEATPFKWFMEMCVRGYLAVRPYMDAVVSLVTLMLDTGLPCFRGQTIKLLKHRFSPNMTEREAANFIMKVIQSCFLSNRSRTYDMIQYYQNDIPY

SEQ ID NO: 914773 - protein, 1727 aa, Homo sapiens; identical to SEQ ID NO: 914772

SEQ ID NO: 914774 - protein, 375 aa, Homo sapiens
WAVPQQPVPPGDKARISFLFLRPYPKGDERKKACLSALSEVKVQPGCYLPSNPEAIVLDIDYKSGTPMQSAAKAPYLAKFKVKRCGVSELEKEGLRCRSDSEDECSTQEADGQKISWQAAIFKVGDDCRQDMLALQIIDLFKNIFQLVGLDLFVFPYRVVATAPGCGVIECIPDCTSRDQLGRQTDFGMYDYFTRQYGDESTLAFQQARYNFIRSMAAYSLLLFLLQIKDRHNGNIMLDKKGHIIHIDFGFMFESSPGGNLGWEPDIKLTDEMVMIMGGKMEATPFKWFMEMCVRGYLAVRPYMDAVVSLVTLMLDTGLPCFRGQTIKLLKHRFSPNMTEREAANFIMKVIQSCFLSNRSRTYDMIQYYQNDIPY

SEQ ID NO: 914775 - protein, 268 aa, Homo sapiens [sequence omitted]

SEQ ID NO: 914776 - protein, 1347 aa, Homo sapiens
MFKMLRDTLYYMHQDLPTSFVKEIHDFVLEQFNTSQGELQKILHDADRIHNELSPLKLRCQANAACVDLMVWAVKDEQGAENLCIKLSEKLQSKTSSKVIIAHLPLLICCLQGLGRLCERFPVVVHSVTPSLRDFLVIPSPVLVKLYKYHSQYHTVAGNDIKISVTNEHSESTLNVMSGKKSQPSMYEQLRDIAIDNICRCLKAGLTVDPVIVEAFLASLSNRLYISQESDKDAHLIPDHTIRALGHIAVALRDTPKVMEPILQILQQKFCQPPSPLDVLIIDQLGCLVITGNQYIYQEVWNLFQQISVKASSVVYSATKDYKDHGYRHCSLAVINALANIAANIQDEHLVDELLMNLLELFVQLGLEGKRASERASEKGPALKASSSAGNLGVLIPVIAVLTRRLPPIKEAKPRLQKLFRDFWLYSVLMGFAVEGSGLWPEEWYEGVCEIATKSPLLTFPSKEPLRSVLQYNSAMKNDTVTPAELSELRSTIINLLDPPPEVSALINKLDFAMSTYLLSVYRLEYMRVLRSTDPDRFQVMFCYFEDKAIQKDKSGMMQCVIAVADKVFDAFLNMMADKAKTKENEEELERHAQFLLVNFNHIHKRIRRVADKYLSGLVDKFPHLLWSGTVLKTMLDILQTLSLSLSADIHKDQPYYDIPDAPYRITVPDTYEARESIVKDFAARCGMILQEAMKWAPTVTKSHLQEYLNKHQNWVSGLSQHTGLAMATESILHFAGYNKQNTTLGATQLSERPACVKKDYSNFMASLNLRNRYAGEVYGMIRFSGTTGQMSDLNKMMVQDLHSALDRSHPQHYTQAMFKLTAMLISSKDCDPQLLHHLCWGPLRMFNEHGMETALACWEWLLAGKDGVEVPFMREMAGAWHMTVEQKFGLFSAEIKEADPLAASEASQPKPCPPEVTPHYIWIDFLVQRFEIAKYCSSDQVEIFSSLLQRSMSLNIGGAKGSMNRHVAAIGPRFKLLTLGLSLLHADVVPNATIRNVLREKIYSTAFDYFSCPPKFPTQGEKRLREDISIMIKFWTAMFSDKKYLTASQLVPPDNQDTRSNLDITVGSRQQATQGWINTYPLSSGMSTISKKSGMSKKTNRGSQLHKYYMKRRTLLLSLLATEIERLITWYNPLSAPELELDQAGENSVANWRSKYISLSEKQWKDNVNLAWSISPYLAVQLPARFKNTEAIGNEVTRLVRLDPGAVSDVPEAIKFLVTWHTIDADAPELSHVLCWAPTDPPTGLSYFSSMYPPHPLTAQYGVKVLRSFPPDAILFYIPQIVQALRYDKVSLHLHGRPLHSQSVFHTSLCPVCPQPSQAPQSLLRGRAAQQSPCSPYPRPCDCPLI

SEQ ID NO: 914777 - protein, 1059 aa, Homo sapiens
MFKMLRDTLYYMHQDLPTSFVKEIHDFVLEQFNTSQGELQKILHDADRIHNELSPLKLRCQANAACVDLMVWAVKDEQGAENLCIKLSEKLQSKTSSKVIIAHLPLLICCLQGLGRLCERFPVVVHSVTPSLRDFLVIPSPVLVKLYKYHSQYHTVAGNDIKISVTNEHSESTLNVMSGKKSQPSMYEQLRDIAIDNICRCLKAGLTVDPVIVEAFLASLSNRLYISQESDKDAHLIPDHTIRALGHIAVALRDTPKVMEPILQILQQKFCQPPSPLDVLIIDQLGCLVITGNQYIYQEVWNLFQQISVKASSVVYSATKDYKDHGYRHCSLAVINALANIAANIQDEHLVDELLMNLLELFVQLGLEGKRASERASEKGPALKASSSAGNLGVLIPVIAVLTRRLPPIKEAKPRLQKLFRDFWLYSVLMGFAVEGSGLWPEEWYEGVCEIATKSPLLTFPSKEPLRSVLQYNSAMKNDTVTPAELSELRSTIINLLDPPPEVSALINKLDFAMSTYLLSVYRLEYMRVLRSTDPDRFQVMFCYFEDKAIQKDKSGMMQCVIAVADKVFDAFLNMMADKAKTKENEEELERHAQFLLVNFNHIHKRIRRVADKYLSGLVDKFPHLLWSGTVLKTMLDILQTLSLSLSADIHKDQPYYDIPDAPYRITVPDTYEARESIVKDFAARCGMILQEAMKWAPTVTKSHLQEYLNKHQNWVSGLSQHTGLAMATESILHFAGYNKQNTTLGATQLSERPACVKKDYSNFMASLNLRNRYAGEVYGMIRFSGTTGQMSDLNKMMVQDLHSALDRSHPQHYTQAMFKLTAMLISSKDCDPQLLHHLCWGPLRMFNEHGMETALACWEWLLAGKDGVEVPFMREMAGAWHMTVEQKFGLFSAEIKEADPLAASEASQPKPCPPEVTPHYIWIDFLVQRFEIAKYCSSDQVEIFSSLLQRSMSLNIGGAKGSMNRHVAAIGPRFKLLTLGLSLLHADVVPNATIRNVLREKIYSTAFDYFSCPPKFPTQGEKRLREDISIMIKFWTAMFSDKKYLTASQLVPPDNQDT

SEQ ID NO: 914778 - protein, 875 aa, Homo sapiens
MFKMLRDTLYYMHQDLPTSFVKEIHDFVLEQFNTSQGELQKILHDADRIHNELSPLKLRCQANAACVDLMVWAVKDEQGAENLCIKLSEKLQSKTSSKVIIAHLPLLICCLQGLGRLCERFPVVVHSVTPSLRDFLVIPSPVLVKLYKYHSQYHTVAGNDIKISVTNEHSESTLNVMSGKKSQPSMYEQLRDIAIDNICRCLKAGLTVDPVIVEAFLASLSNRLYISQESDKDAHLIPDHTIRALGHIAVALRDTPKVMEPILQILQQKFCQPPSPLDVLIIDQLGCLVITGNQYIYQEVWNLFQQISVKASSVVYSATKDYKDHGYRHCSLAVINALANIAANIQDEHLVDELLMNLLELFVQLGLEGKRASERASEKGPALKASSSAGNLGVLIPVIAVLTRRLPPIKEAKPRLQKLFRDFWLYSVLMGFAVEGSGLWPEEWYEGVCEIATKSPLLTFPSKEPLRSVLQYNSAMKNDTVTPAELSELRSTIINLLDPPPEVSALINKLDFAMSTYLLSVYRLEYMRVLRSTDPDRFQVMFCYFEDKAIQKDKSGMMQCVIAVADKVFDAFLNMMADKAKTKENEEELERHAQFLLVNFNHIHKRIRRVADKYLSGLVDKFPHLLWSGTVLKTMLDILQTLSLSLSADIHKDQPYYDIPDAPYRITVPDTYEARESIVKDFAARCGMILQEAMKWAPTVTKSHLQEYLNKHQNWVSGLSQHTGLAMATESILHFAGYNKQNTTLGATQLSERPACVKKDYSNFMASLNLRNRYAGEVYGMIRFSGTTGQMSDLNKMMVQDLHSALDRSHPQHYTQAMFKLTAMLISSKDCDPQLLHHLCWGPLRMFNEHGMETALACWEWLLAGKDGVEVPVGP

SEQ ID NO: 914779 - protein, 551 aa, Homo sapiens
MFKMLRDTLYYMHQDLPTSFVKEIHDFVLEQFNTSQGELQKILHDADRIHNELSPLKLRCQANAACVDLMVWAVKDEQGAENLCIKLSEKLQSKTSSKVIIAHLPLLICCLQGLGRLCERFPVVVHSVTPSLRDFLVIPSPVLVKLYKYHSQYHTVAGNDIKISVTNEHSESTLNVMSGKKSQPSMYEQLRDIAIDNICRCLKAGLTVDPVIVEAFLASLSNRLYISQESDKDAHLIPDHTIRALGHIAVALRDTPKVMEPILQILQQKFCQPPSPLDVLIIDQLGCLVITGNQYIYQEVWNLFQQISVKASSVVYSATKDYKDHGYRHCSLAVINALANIAANIQDEHLVDELLMNLLELFVQLGLEGKRASERASEKGPALKASSSAGNLGVLIPVIAVLTRRLPPIKEAKPRLQKLFRDFWLYSVLMGFAVEGSGLWPEEWYEGVCEIATKSPLLTFPSKEPLRSVLQYNSAMKNDTVTPAELSELRSTIINLLDPPPEVSALINKLDFAMSTYLLSVYRLEYMRYTCLHHHAHAHPHLSRVFIFVPS

SEQ ID NO: 914780 - protein, 309 aa, Homo sapiens
MFKMLRDTLYYMHQDLPTSFVKEIHDFVLEQFNTSQGELQKILHDADRIHNELSPLKLRCQANAACVDLMVWAVKDEQGAENLCIKLSEKLQSKTSSKVIIAHLPLLICCLQGLGRLCERFPVVVHSVTPSLRDFLVIPSPVLVKLYKYHSQYHTVAGNDIKISVTNEHSESTLNVMSGKKSQPSMYEQLRDIAIDNICRCLKAGLTVDPVIVEAFLASLSNRLYISQESDKDAHLIPDHTIRALGHIAVALRDTPKVMEPILQILQQKFCQPPSPLDVLIIDQLGCLVITGNVREARARTPLTLCKLR

SEQ ID NO: 914781 - protein, 205 aa, Homo sapiens
MSQKSCWGARTPTDRILRLPASQDMLALQIIDLFKNIFQLVGLDLFVFPYRVVATAPGCGVIECIPDCTSRDQLGRQTDFGMYDYFTRQYGDESTLAFQQARYNFIRSMAAYSLLLFLLQIKDRHNGNIMLDKKGHIIHIGQPATAPPSSPFTPGTQGWIGIPTPQRGECPGPPCQECQGPALRSELSATKLFCCRGCLAPAPGS

SEQ ID NO: 914782 - protein, 149 aa, Homo sapiens
GDERKKACLSALSEVKVQPGEQVASGGSDQPLPAGGRRGVKAAALSRHCRMWTQWLGQPHTCLGPRCLVPQDPSPSPESAASERELLVSGCPSSSLLPAVFLEADSDLSSCYSRRGFLGSSITGAGHTDEGMAGPVWDGSGVLGPISTT

SEQ ID NO: 914783 - protein, 2045 aa, Homo sapiens
MCPVDFHGIFQLDERRRDAVIALGIFLIESDLQHKDCVVPYLLRLLKGLPKVYWVEESTARKGRGALPVAESFSFCLVTLLSDVAYRDPSLRDEILEVLLQVLHVLLGMCQALEIQDKEYLCKYAIPCLIGISRAFGRYSNMEESLLSKLFPKIPPHSLRVLEELEGVRRRSFNDFRSILPSNLLTVCQEGTLKRKTSSVSSISQVSPERGMPPPSSPGGSAFHYFEASCLPDGTALEPEYYFSTISSSFSVSPLFNGVTYKEFNIPLEMLRELLNLVKKIVEEAVLKSLDAIVASVMEANPSADLYYTSFSDPLYLTMFKMLRDTLYYMHQDLPTSFVKEIHDFVLEQFNTSQGELQKILHDADRIHNELSPLKLRCQANAACVDLMVWAVKDEQGAENLCIKLSEKLQSKTSSKVIIAHLPLLICCLQGLGRLCERFPVVVHSVTPSLRDFLVIPSPVLVKLYKYHSQYHTVAGNDIKISVTNEHSESTLNVMSGKKSQPSMYEQLRDIAIDNICRCLKAGLTVDPVIVEAFLASLSNRLYISQESDKDAHLIPDHTIRALGHIAVALRDTPKVMEPILQILQQKFCQPPSPLDVLIIDQLGCLVITGNQYIYQEVWNLFQQISVKASSVVYSATKDYKDHGYRHCSLAVINALANIAANIQDEHLVDELLMNLLELFVQLGLEGKRASERASEKGPALKASSSAGNLGVLIPVIAVLTRRLPPIKEAKPRLQKLFRDFWLYSVLMGFAVEGSGLWPEEWYEGVCEIATKSPLLTFPSKEPLRSVLQYNSAMKNDTVTPAELSELRSTIINLLDPPPEVSALINKLDFAMSTYLLSVYRLEYMRVLRSTDPDRFQVMFCYFEDKAIQKDKSGMMQCVIAVADKVFDAFLNMMADKAKTKENEEELERHAQFLLVNFNHIHKRIRRVADKYLSGLVDKFPHLLWSGTVLKTMLDILQTLSLSLSADIHKDQPYYDIPDAPYRITVPDTYEARESIVKDFAARCGMILQEAMKWAPTVTKSHLQEYLNKHQNWVSGLSQHTGLAMATESILHFAGYNKQNTTLGATQLSERPACVKKDYSNFMASLNLRNRYAGEVYGMIRFSGTTGQMSDLNKMMVQDLHSALDRSHPQHYTQAMFKLTAMLISSKDCDPQLLHHLCWGPLRMFNEHGMETALACWEWLLAGKDGVEVPFMREMAGAWHMTVEQKFGLFSAEIKEADPLAASEASQPKPCPPEVTPHYIWIDFLVQRFEIAKYCSSDQVEIFSSLLQRSMSLNIGGAKGSMNRHVAAIGPRFKLLTLGLSLLHADVVPNATIRNVLREKIYSTAFDYFSCPPKFPTQGEKRLREDISIMIKFWTAMFSDKKYLTASQLVPPDNQDTRSNLDITVGSRQQATQGWINTYPLSSGMSTISKKSGMSKKTNRGSQLHKYYMKRRTLLLSLLATEIERLITWYNPLSAPELELDQAGENSVANWRSKYISLSEKQWKDNVNLAWSISPYLAVQLPARFKNTEAIGNEVTRLVRLDPGAVSDVPEAIKFLVTWHTIDADAPELSHVLCWAPTDPPTGLSYFSSMYPPHPLTAQYGVKVLRSFPPDAILFYIPQIVQALRYDKMGYVREYILWAASKSQLLAHQFIWNMKTNIYLDEEGHQKDPDIGDLLDQLVEEITGSLSGPAKDFYQREFDFFNKITNVSAIIKPYPKGDERKKACLSALSEVKVQPGCYLPSNPEAIVLDIDYKSGTPMQSAAKAPYLAKFKVKRCGVSELEKEGLRCRSDSEDECSTQEADGQKISWQAAIFKVGDDCRQDMLALQIIDLFKNIFQLVGLDLFVFPYRVVATAPGCGVIECIPDCTSRDQLGRQTDFGMYDYFTRQYGDESTLAFQQARYNFIRSMAAYSLLLFLLQIKDRHNGNIMLDKKGHIIHIDFGFMFESSPGGNLGWEPDIKLTDEMVMIMGGKMEATPFKWFMEMCVRGYLAVRPYMDAVVSLVTLMLDTGLPCFRGQTIKLLKHRFSPNMTEREAANFIMKVIQSCFLSNRSRTYDMIQYYQNDIPY

SEQ ID NO: 914784 - protein, 1727 aa, Homo sapiens; identical to SEQ ID NO: 914772

SEQ ID NO: 914785 - protein, 1960 aa, Homo sapiens
MFKMLRDTLYYMHQDLPTSFVKEIHDFVLEQFNTSQGELQKILHDADRIHNELSPLKLRCQANAACVDLMVWAVKDEQGAENLCIKLSEKLQSKTSSKVIIAHLPLLICCLQGLGRLCERFPVVVHSVTPSLRDFLVIPSPVLVKLYKYHSQYHTVAGNDIKISVTNEHSESTLNVMSGKKSQPSMYEQLRDIAIDNICRCLKAGLTVDPVIVEAFLASLSNRLYISQESDKDAHLIPDHTIRALGHIAVALRDTPKVMEPILQILQQKFCQPPSPLDVLIIDQLGCLVITGNQYIYQEVWNLFQQISVKASSVVYSATKDYKDHGYRHCSLAVINALANIAANIQDEHLVDELLMNLLELFVQLGLEGKRASERASEKGPALKASSSAGNLGVLIPVIAVLTRRLPPIKEAKPRLQKLFRDFWLYSVLMGFAVEGSGLWPEEWYEGVCEIATKSPLLTFPSKEPLRSVLQYNSAMKNDTVTPAELSELRSTIINLLDPPPEVSALINKLDFAMSTYLLSVYRLEYMRVLRSTDPDRFQVMFCYFEDKAIQKDKSGMMQCVIAVADKVFDAFLNMMADKAKTKENEEELERHAQFLLVNFNHIHKRIRRVADKYLSGLVDKFPHLLWSGTVLKTMLDILQTLSLSLSADIHKDQPYYDIPDAPYRITVPDTYEARESIVKDFAARCGMILQEAMKWAPTVTKSHLQEYLNKHQNWVSGLSQHTGLAMATESILHFAGYNKQNTTLGATQLSERPACVKKDYSNFMASLNLRNRYAGEVYGMIRFSGTTGQMSDLNKMMVQDLHSALDRSHPQHYTQAMFKLTAMLISSKDCDPQLLHHLCWGPLRMFNEHGMETALACWEWLLAGKDGVEVPFMREMAGAWHMTVEQKFGLFSAEIKEADPLAASEASQPKPCPPEVTPHYIWIDFLVQRFEIAKYCSSDQVEIFSSLLQRSMSLNIGGAKGSMNRHVAAIGPRFKLLTLGLSLLHADVVPNATIRNVLREKIYSTAFDYFSCPPKFPTQGEKRLREDISIMIKFWTAMFSDKKYLTASQLVPPDNQDTRSNLDITVGSRQQATQGWINTYPLSSGMSTISKKSGMSKKTNRGSQLHKYYMKRRTLLLSLLATEIERLITWYNPLSAPELELDQAGENSVANWRSKYISLSEKQWKDNVNLAWSISPYLAVQLPARFKNTEAIGNEVTRLVRLDPGAVSDVPEAIKFLVTWHTIDADAPELSHVLCWAPTDPPTGLSYFSSMYPPHPLTAQYGVKVLRSFPPDAILFYIPQIVQALRYDKMGYVREYILWAASKSQLLAHQFIWNMKTNIYLDEEGHQKDPDIGDLLDQLVEEITGSLSGPAKDFYQREFDFFNKITNVSAIIKPYPKGDERKKACLSALSEVKVQPGCYLPSNPEAIVLDIDYKSGTPMQSAAKAPYLAKFKVKRCGVSELEKEGLRCRSDSEDECSTQEADGQKISWQAAIFKVGDDCRQDMLALQIIDLFKNIFQLVGLDLFVFPYRVVATAPGCGVIECIPDCTSRDQLGRQTDFGMYDYFTRQYGDESTLAFQQARYNFIRSMAAYSLLLFLLQIKDRHNGNIMLDKKGHIIHIDFGFMFESSPGGNLGWEPDIKLTDEMVMIMGGKMEATPFKWFMEMCVRGYLAVRLSLGEGQGGGGGGVWNVLRSPLDEGNPVPESEVGASSHLLTYTCPLVTSVCPPVPVNSCSGHLIPTTFPTILPTPSAMGSPFLGIPSTLSPKPEHLPPHRLRAKDGLCPSFIYRSLGQGTVQPGSSPLPCRERQVSVSASHPSAEAMAGSLMWGTGQDTQPVQSACGQPLPGRYGLPSAADRKLPRGCARCGRRGGWQEPTPEAVGISQATGLQAGPPPRLASAHRSLLSLPRPYMDAVVSLVTLMLDTGLPCFRGQTIKLLKHRFSPNMTEREAANFIMKVIQSCFLSNRSRTYDMIQYYQNDIPY

SEQ ID NO: 914786 - protein, 975 aa, Homo sapiens
MFKMLRDTLYYMHQDLPTSFVKEIHDFVLEQFNTSQGELQKILHDADRIHNELSPLKLRCQANAACVDLMVWAVKDEQGAENLCIKLSEKLQSKTSSKVIIAHLPLLICCLQGLGRLCERFPVVVHSVTPSLRDFLVIPSPVLVKLYKYHSQYHTVAGNDIKISVTNEHSESTLNVMSGKKSQPSMYEQLRDIAIDNICRCLKAGLTVDPVIVEAFLASLSNRLYISQESDKDAHLIPDHTIRALGHIAVALRDTPKVMEPILQILQQKFCQPPSPLDVLIIDQLGCLVITGNQYIYQEVWNLFQQISVKASSVVYSATKDYKDHGYRHCSLAVINALANIAANIQDEHLVDELHKYYMKRRTLLLSLLATEIERLITWYNPLSAPELELDQAGENSVANWRSKYISLSEKQWKDNVNLAWSISPYLAVQLPARFKNTEAIGNEVTRLVRLDPGAVSDVPEAIKFLVTWHTIDADAPELSHVLCWAPTDPPTGLSYFSSMYPPHPLTAQYGVKVLRSFPPDAILFYIPQIVQALRYDKMGYVREYILWAASKSQLLAHQFIWNMKTNIYLDEEGHQKDPDIGDLLDQLVEEITGSLSGPAKDFYQREFDFFNKITNVSAIIKPYPKGDERKKACLSALSEVKVQPGCYLPSNPEAIVLDIDYKSGTPMQSAAKAPYLAKFKVKRCGVSELEKEGLRCRSDSEDECSTQEADGQKISWQAAIFKVGDDCRQDMLALQIIDLFKNIFQLVGLDLFVFPYRVVATAPGCGVIECIPDCTSRDQLGRQTDFGMYDYFTRQYGDESTLAFQQARYNFIRSMAAYSLLLFLLQIKDRHNGNIMLDKKGHIIHIDFGFMFESSPGGNLGWEPDIKLTDEMVMIMGGKMEATPFKWFMEMCVRGYLAVRPYMDAVVSLVTLMLDTGLPCFRGQTIKLLKHRFSPNMTEREAANFIMKVIQSCFLSNRSRTYDMIQYYQNDIPY

SEQ ID NO: 914787 - protein, 1727 aa, Homo sapiens; identical to SEQ ID NO: 914772

SEQ ID NO: 914788 - protein, 1664 aa, Homo sapiens
MFKMLRDTLYYMHQDLPTSFVKEIHDFVLEQFNTSQGELQKILHDADRIHNELSPLKLRCQANAACVDLMVWAVKDEQGAENLCIKLSEKLQSKTSSKVIIAHLPLLICCLQGLGRLCERFPVVVHSVTPSLRDFLVIPSPVLVKLYKYHSQYHTVAGNDIKISVTNEHSESTLNVMSGKKSQPSMYEQLRDIAIDNICRCLKAGLTVDPVIVEAFLASLSNRLYISQESDKDAHLIPDHTIRALGHIAVALRDTPKVMEPILQILQQKFCQPPSPLDVLIIDQLGCLVITGNQYIYQEVWNLFQQISVKASSVVYSATKDYKDHGYRHCSLAVINALANIAANIQDEHLVDELLMNLLELFVQLGLEGKRASERASEKGPALKASSSAGNLGVLIPVIAVLTRRLPPIKEAKPRLQKLFRDFWLYSVLMGFAVEGSGLWPEEWYEGVCEIATKSPLLTFPSKEPLRSVLQYNSAMKNDTVTPAELSELRSTIINLLDPPPEVSALINKLDFAMSTYLLSVYRLEYMRVLRSTDPDRFQVMFCYFEDKAIQKDKSGMMQCVIAVADKVFDAFLNMMADKAKTKENEEELERHAQFLLVNFNHIHKRIRRVADKYLSGLVDKFPHLLWSGTVLKTMLDILQTLSLSLSADIHKDQPYYDIPDAPYRITVPDTYEARESIVKDFAARCGMILQEAMKWAPTVTKSHLQEYLNKHQNWVSGLSQHTGLAMATESILHFAGYNKQNTTLGATQLSERPACVKKDYSNFMASLNLRNRYAGEVYGMIRFSGTTGQMSDLNKMMVQDLHSALDRSHPQHYTQAMFKLTAMLISSKDCDPQLLHHLCWGPLRMFNEHGMETALACWEWLLAGKDGVEVPFMREMAGAWHMTVEQKFGLFSAEIKEADPLAASEASQPKPCPPEVTPHYIWIDFLVQRFEIAKYCSSDQVEIFSSLLQRSMSLNIGGAKGSMNRHVAAIGPRFKLLTLGLSLLHADVVPNATIRNVLREKIYSTAFDYFSCPPKFPTQGEKRLREDISIMIKFWTAMFSDKKYLTASQLVPPDNQDTRSNLDITVGSRQQATQGWINTYPLSSGMSTISKKSGMSKKTNRGSQLHKYYMKRRTLLLSLLATEIERLITWYNPLSAPELELDQAGENSVANWRSKYISLSEKQWKDNVNLAWSISPYLAVQLPARFKNTEAIGNEVTRLVRLDPGAVSDVPEAIKFLVTWHTIDADAPELSHVLCWAPTDPPTGLSYFSSMYPPHPLTAQYGVKVLRSFPPDAILFYIPQIVQALRYDKMGYVREYILWAASKSQLLAHQFIWNMKTNIYLDEEGHQKDPDIGDLLDQLVEEITGSLSGPAKDFYQREFDFFNKITNVSAIIKPYPKGDERKKACLSALSEVKVQPGCYLPSNPEAIVLDIDYKSGTPMQSAAKAPYLAKFKVKRCGVSELEKEGLRCRSDSEDECSTQEADGQKISWQAAIFKVGDDCRQDMLALQIIDLFKNIFQLVGLDLFVFPYRVVATAPGCGVIECIPDCTSRDQLGRQTDFGMYDYFTRQYGDESTLAFQQARYNFIRSMAAYSLLLFLLQIKDRHNGNIMLDKKGHIIHIGQPATAPPSSPFTPGTQGWIGIPTPQRGECPGPPCQECQGPALRSELSATKLFCCRGCLAPAPGS

SEQ ID NO: 914789 - protein, 1443 aa, Homo sapiens
MFKMLRDTLYYMHQDLPTSFVKEIHDFVLEQFNTSQGELQKILHDADRIHNELSPLKLRCQANAACVDLMVWAVKDEQGAENLCIKLSEKLQSKTSSKVIIAHLPLLICCLQGLGRLCERFPVVVHSVTPSLRDFLVIPSPVLVKLYKYHSQYHTVAGNDIKISVTNEHSESTLNVMSGKKSQPSMYEQLRDIAIDNICRCLKAGLTVDPVIVEAFLASLSNRLYISQESDKDAHLIPDHTIRALGHIAVALRDTPKVMEPILQILQQKFCQPPSPLDVLIIDQLGCLVITGNQYIYQEVWNLFQQISVKASSVVYSATKDYKDHGYRHCSLAVINALANIAANIQDEHLVDELLMNLLELFVQLGLEGKRASERASEKGPALKASSSAGNLGVLIPVIAVLTRRLPPIKEAKPRLQKLFRDFWLYSVLMGFAVEGSGLWPEEWYEGVCEIATKSPLLTFPSKEPLRSVLQYNSAMKNDTVTPAELSELRSTIINLLDPPPEVSALINKLDFAMSTYLLSVYRLEYMRVLRSTDPDRFQVMFCYFEDKAIQKDKSGMMQCVIAVADKVFDAFLNMMADKAKTKENEEELERHAQFLLVNFNHIHKRIRRVADKYLSGLVDKFPHLLWSGTVLKTMLDILQTLSLSLSADIHKDQPYYDIPDAPYRITVPDTYEARESIVKDFAARCGMILQEAMKWAPTVTKSHLQEYLNKHQNWVSGLSQHTGLAMATESILHFAGYNKQNTTLGATQLSERPACVKKDYSNFMASLNLRNRYAGEVYGMIRFSGTTGQMSDLNKMMVQDLHSALDRSHPQHYTQAMFKLTAMLISSKDCDPQLLHHLCWGPLRMFNEHGMETALACWEWLLAGKDGVEVPFMREMAGAWHMTVEQKFGLFSAEIKEADPLAASEASQPKPCPPEVTPHYIWIDFLVQRFEIAKYCSSDQVEIFSSLLQRSMSLNIGGAKGSMNRHVAAIGPRFKLLTLGLSLLHADVVPNATIRNVLREKIYSTAFDYFSCPPKFPTQGEKRLREDISIMIKFWTAMFSDKKYLTASQLVPPDNQDTRSNLDITVGSRQQATQGWINTYPLSSGMSTISKKSGMSKKTNRGSQLHKYYMKRRTLLLSLLATEIERLITWYNPLSAPELELDQAGENSVANWRSKYISLSEKQWKDNVNLAWSISPYLAVQLPARFKNTEAIGNEVTRLVRLDPGAVSDVPEAIKFLVTWHTIDADAPELSHVLCWAPTDPPTGLSYFSSMYPPHPLTAQYGVKVLRSFPPDAILFYIPQIVQALRYDKMGYVREYILWAASKSQLLAHQFIWNMKTNIYLDEEGHQKDPDIGDLLDQLVEEITGSLSGPAKDFYQREFDFFNKITNVSAIINPATSLPCRHMQWRRGLWPKEPGSASWGSTWVGAALVTPWTAATINGWCCLCTGVSPLFALDIFPTCLIS

SEQ ID NO: 914790 - protein, 1218 aa, Homo sapiens
MFKMLRDTLYYMHQDLPTSFVKEIHDFVLEQFNTSQGELQKILHDADRIHNELSPLKLRCQANAACVDLMVWAVKDEQGAENLCIKLSEKLQSKTSSKVIIAHLPLLICCLQGLGRLCERFPVVVHSVTPSLRDFLVIPSPVLVKLYKYHSQYHTVAGNDIKISVTNEHSESTLNVMSGKKSQPSMYEQLRDIAIDNICRCLKAGLTVDPVIVEAFLASLSNRLYISQESDKDAHLIPDHTIRALGHIAVALRDTPKVMEPILQILQQKFCQPPSPLDVLIIDQLGCLVITGNQYIYQEVWNLFQQISVKASSVVYSATKDYKDHGYRHCSLAVINALANIAANIQDEHLVDELLMNLLELFVQLGLEGKRASERASEKGPALKASSSAGNLGVLIPVIAVLTRRLPPIKEAKPRLQKLFRDFWLYSVLMGFAVEGSGLWPEEWYEGVCEIATKSPLLTFPSKEPLRSVLQYNSAMKNDTVTPAELSELRSTIINLLDPPPEVSALINKLDFAMSTYLLSVYRLEYMRVLRSTDPDRFQVMFCYFEDKAIQKDKSGMMQCVIAVADKVFDAFLNMMADKAKTKENEEELERHAQFLLVNFNHIHKRIRRVADKYLSGLVDKFPHLLWSGTVLKTMLDILQTLSLSLSADIHKDQPYYDIPDAPYRITVPDTYEARESIVKDFAARCGMILQEAMKWAPTVTKSHLQEYLNKHQNWVSGLSQHTGLAMATESILHFAGYNKQNTTLGATQLSERPACVKKDYSNFMASLNLRNRYAGEVYGMIRFSGTTGQMSDLNKMMVQDLHSALDRSHPQHYTQAMFKLTAMLISSKDCDPQLLHHLCWGPLRMFNEHGMETALACWEWLLAGKDGVEVPFMREMAGAWHMTVEQKFGLFSAEIKEADPLAASEASQPKPCPPEVTPHYIWIDFLVQRFEIAKYCSSDQVEIFSSLLQRSMSLNIGGAKGSMNRHVAAIGPRFKLLTLGLSLLHADVVPNATIRNVLREKIYSTAFDYFSCPPKFPTQGEKRLREDISIMIKFWTAMFSDKKYLTASQLVPPDNQDTRSNLDITVGSRQQATQGWINTYPLSSGMSTISKKSGMSKKTNRGSQLHKYYMKRRTLLLSLLATEIERLITWYNPLSAPELELDQAGENSVANWRSKYISLSEKQWKDNVNLAWSISPYLAVQLPARFKNTEAIGNEVTRLVRLDPGAVSDVPEAIKVV

SEQ ID NO: 914791 - protein, 601 aa, Homo sapiens
MFKMLRDTLYYMHQDLPTSFVKEIHDFVLEQFNTSQGELQKILHDADRIHNELSPLKLRCQANAACVDLMVWAVKDEQGAENLCIKLSEKLQSKTSSKVIIAHLPLLICCLQGLGRLCERFPVVVHSVTPSLRDFLVIPSPVLVKLYKYHSQYHTVAGNDIKISVTNEHSESTLNVMSGKKSQPSMYEQLRDIAIDNICRCLKAGLTVDPVIVEAFLASLSNRLYISQESDKDAHLIPDHTIRALGHIAVALRDTPKVMEPILQILQQKFCQPPSPLDVLIIDQLGCLVITGNQYIYQEVWNLFQQISVKASSVVYSATKDYKDHGYRHCSLAVINALANIAANIQDEHLVDELLMNLLELFVQLGLEGKRASERASEKGPALKASSSAGNLGVLIPVIAVLTRRLPPIKEAKPRLQKLFRDFWLYSVLMGFAVEGSGLWPEEWYEGVCEIATKSPLLTFPSKEPLRSVLQYNSAMKNDTVTPAQDSHLIFTMLSVPIRADLFTVIINTCCQPLGPVCPGGCPMSPRMFLSLQAELSELRSTIINLLDPPPEVSALINKLDFAMSTYLLSVYRLEYMRYTCLHHHAHAHPHLSRVFIFVPS

SEQ ID NO: 914792 - protein, 569 aa, Homo sapiens
MFKMLRDTLYYMHQDLPTSFVKEIHDFVLEQFNTSQGELQKILHDADRIHNELSPLKLRCQANAACVDLMVWAVKDEQGAENLCIKLSEKLQSKTSSKVIIAHLPLLICCLQGLGRLCERFPVVVHSVTPSLRDFLVIPSPVLVKLYKYHSQYHTVAGNDIKISVTNEHSESTLNVMSGKKSQPSMYEQLRDIAIDNICRCLKAGLTVDPVIVEAFLASLSNRLYISQESDKDAHLIPDHTIRALGHIAVALRDTPKVMEPILQILQQKFCQPPSPLDVLIIDQLGCLVITGNQYIYQEVWNLFQQISVKASSVVYSATKDYKDHGYRHCSLAVINALANIAANIQDEHLVDELLMNLLELFVQLGLEGKRASERASEKGPALKASSSAGNLGVLIPVIAVLTRRLPPIKEAKPRLQKLFRDFWLYSVLMGFAVEGSGLWPEEWYEGVCEIATKSPLLTFPSKEPLRSVLQYNSAMKNDTVTPAELSELRSTIINLLDPPPEVSALINKLDFAMSTYLLSVYRLEYMRVLRSTDPDRFQVMFCYFEDKAIQKDKSGERLSNNKIETANL

SEQ ID NO: 914793 - protein, 328 aa, Homo sapiens
MFKMLRDTLYYMHQDLPTSFVKEIHDFVLEQFNTSQGELQKILHDADRIHNELSPLKLRCQANAACVDLMVWAVKDEQGAENLCIKLSEKLQSKTSSKVIIAHLPLLICCLQGLGRLCERFPVVVHSVTPSLRDFLVIPSPVLVKLYKYHSQYHTVAGNDIKISVTNEHSESTLNVMSGKKSQPSMYEQLRDIAIDNICRCLKAGLTVDPVIVEAFLASLSNRLYISQESDKDAHLIPDHTIRALGHIAVALRDTPKVMEPILQILQQKFCQPPSPLDVLIIDQLGCLVITGNQYIYQEVWNLFQQISVKASSVVYSATKDYKDHGYR

SEQ ID NO: 914794 - protein, 74 aa, Homo sapiens
SKYISLSEKQWKDNVNLAWSISPYLAVQLPARWAPGHHSLTQASPEVQRRVLASWVMSSQECPAAPFKDSQEVV

SEQ ID NO: 914795 - protein, 979 aa, Homo sapiens
GVPAPPPPVSLAFCQPLSLSLSPLLPLASSLAPERTHLPGPGSLLLSPPSFPARPREPRGCVTAAPPDKMDTAEEDICRVCRSEGTPEKPLYHPCVCTGSIKFIHQECLVQWLKHSRKEYCELCKHRFAFTPIYSPDMPSRLPIQDIFAGLVTSIGTAIRYWFHYTLVAFAWLGVVPLTACRIYKCLFTGSVSSLLTLPLDMLSTENLLADCLQGCFVVTCTLCAFISLVWLREQIVHGGAPIWLEHAAPPFNAAGHHQNEAPAGGNGAENVAADQPANPPAENAVVGENPDAQDDQAEEEEEDNEEEDDAGVEDAADANNGAQDDMNWNALEWDRAAEELTWERMLGLDGSLVFLEHVFWVVSLNTLFILVFAFCPYHIGHFSLVGLGFEEHVQASHFEGLITTIVGYILLAITLIICHGLATLVKFHRSRRLLGVCYIVVKVSLLVVVEIGVFPLICGWWLDICSLEMFDATLKDRELSFQSAPGTTMFLHWLVGMVYVFYFASFILLLREVLRPGVLWFLRNLNDPDFNPVQEMIHLPIYRHLRRFILSVIVFGSIVLLMLWLPIRIIKSVLPNFLPYNVMLYSDAPVSELSLELLLLQVVLPALLEQGHTRQWLKGLVRAWTVTAGYLLDLHSYLLGDQEENENSANQQVNNNQHARNNNAIPVVGEGLHAAHQAILQQGGPVGFQPYRRPLNFPLRIFLLIVFMCITLLIASLICLTLPVFAGRWLMSFWTGTAKIHELYTAACGLYVCWLTIRAVTVMVAWMPQGRRVIFQKVKEWSLMIMKTLIVAVLLAGVVPLLLGLLFELVIVAPLRVPLDQTPLFYPWQDWALGVLHAKIIAAITLMGPQWWLKTVIEQVYANGIRNIDLHYIVRKLAAPVISVLLLSLCVPYVIASGVVPLLGVTAEMQNLVHRRIYPFLLMVVVLMAILSFQVRQFKRLYEHIKNDKYLVGQRLVNYERKSGKQGSSPPPPQSSQE

SEQ ID NO: 914796 - protein, 678 aa, Homo sapiens
MTSSYCYKHAGMEERSYANNGAQDDMNWNALEWDRAAEELTWERMLGLDGSLVFLEHVFWVVSLNTLFILVFAFCPYHIGHFSLVGLGFEEHVQASHFEGLITTIVGYILLAITLIICHGLATLVKFHRSRRLLGVCYIVVKVSLLVVVEIGVFPLICGWWLDICSLEMFDATLKDRELSFQSAPGTTMFLHWLVGMVYVFYFASFILLLREVLRPGVLWFLRNLNDPDFNPVQEMIHLPIYRHLRRFILSVIVFGSIVLLMLWLPIRIIKSVLPNFLPYNVMLYSDAPVSELSLELLLLQVVLPALLEQGHTRQWLKGLVRAWTVTAGYLLDLHSYLLGDQEENENSANQQVNNNQHARNNNAIPVVGEGLHAAHQAILQQGGPVGFQPYRRPLNFPLRIFLLIVFMCITLLIASLICLTLPVFAGRWLMSFWTGTAKIHELYTAACGLYVCWLTIRAVTVMVAWMPQGRRVIFQKVKEWSLMIMKTLIVAVLLAGVVPLLLGLLFELVIVAPLRVPLDQTPLFYPWQDWALGVLHAKIIAAITLMGPQWWLKTVIEQVYANGIRNIDLHYIVRKLAAPVISVLLLSLCVPYVIASGVVPLLGVTAEMQNLVHRRIYPFLLMVVVLMAILSFQVRQFKRLYEHIKNDKYLVGQRLVNYERKSGKQGSSPPPPQSSQE

SEQ ID NO: 914797 - protein, 417 aa, Homo sapiens
GVPAPPPPVSLAFCQPLSLSLSPLLPLASSLAPERTHLPGPGSLLLSPPSFPARPREPRGCVTAAPPDKMDTAEEDICRVCRSEGTPEKPLYHPCVCTGSIKFIHQECLVQWLKHSRKEYCELCKHRFAFTPIYSPDMPSRLPIQDIFAGLVTSIGTAIRYWFHYTLVAFAWLGVVPLTACRIYKCLFTGSVSSLLTLPLDMLSTENLLADCLQGCFVVTCTLCAFISLVWLREQIVHGGAPIWLEHAAPPFNAAGHHQNEAPAGGNGAENVAADQPANPPAENAVVGENPDAQDDQAEEEEEDNEEEDDAGVEDAADANNGAQDDMNWNALEWDRAAEELTWERMLGLDGSLVFLEHVFWVVSLNTLFILVFAFCPYHIGHFSLVGLGFEEHVSIILLQSYFHSLLPNVIINKIVF

SEQ ID NO: 914798 - protein, 417 aa, Homo sapiens; identical to SEQ ID NO: 914797

SEQ ID NO: 914799 - protein, 417 aa, Homo sapiens; identical to SEQ ID NO: 914797

SEQ ID NO: 914800 - protein, 417 aa, Homo sapiens; identical to SEQ ID NO: 914797

SEQ ID NO: 914801 - protein, 417 aa, Homo sapiens; identical to SEQ ID NO: 914797

SEQ ID NO: 914802 - protein, 344 aa, Homo sapiens
GVPAPPPPVSLAFCQPLSLSLSPLLPLASSLAPERTHLPGPGSLLLSPPSFPARPREPRGCVTAAPPDKMDTAEEDICRVCRSEGTPEKPLYHPCVCTGSIKFIHQECLVQWLKHSRKEYCELCKHRFAFTPIYSPDMPSRLPIQDIFAGLVTSIGTAIRYWFHYTLVAFAWLGVVPLTACRIYKCLFTGSVSSLLTLPLDMLSTENLLADCLQGCFVVTCTLCAFISLVWLREQIVHGGAPIWLEHAAPPFNAAGHHQNEAPAGGNGAENVAADQPANPPAENAVVGENPDAQDDQAEEEEEDNEEEDDAGVEDAADANNGAQGNGCLCVLTLQHCKSVLNLH

SEQ ID NO: 914803 - protein, 417 aa, Homo sapiens; identical to SEQ ID NO: 914797

SEQ ID NO: 914804 - protein, 417 aa, Homo sapiens; identical to SEQ ID NO: 914797

SEQ ID NO: 914805 - protein, 417 aa, Homo sapiens; identical to SEQ ID NO: 914797

SEQ ID NO: 914806 - protein, 299 aa, Homo sapiens
GVPAPPPPVSLAFCQPLSLSLSPLLPLASSLAPERTHLPGPGSLLLSPPSFPARPREPRGCVTAAPPDKMDTAEEDICRVCRSEGTPEKPLYHPCVCTGSIKFIHQECLVQWLKHSRKEYCELCKHRFAFTPIYSPDMPSRLPIQDIFAGLVTSIGTAIRYWFHYTLVAFAWLGVVPLTACRIYKCLFTGSVSSLLTLPLDMLSTENLLADCLQGCFVVTCTLCAFISLVWLREQIVHGGAPIWLEHAAPPFNAAGHHQNEAPAGGNGAENVAADQPGHQGFPLITAFSAGGLAELIVD

SEQ ID NO: 914807 - protein, 186 aa, Homo sapiens
GVPAPPPPVSLAFCQPLSLSLSPLLPLASSLAPERTHLPGPGSLLLSPPSFPARPREPRGCVTAAPPDKMDTAEEDICRVCRSEGTPEKPLYHPCVCTGSIKFIHQECLVQWLKHSRKEYCELCKHRFAFTPIYSPDMPSRLPIQDIFAGLVTSIGTAIRYWFHYTLVAFAWLGVVPLTACEYSCL

SEQ ID NO: 914808 - protein, 417 aa, Homo sapiens; identical to SEQ ID NO: 914797

SEQ ID NO: 914809 - protein, 608 aa, Homo sapiens
MGKPGCRTCCKIKFYLLFSYFQVQASHFEGLITTIVGYILLAITLIICHGLATLVKFHRSRRLLGVCYIVVKVSLLVVVEIGVFPLICGWWLDICSLEMFDATLKDRELSFQSAPGTTMFLHWLVGMVYVFYFASFILLLREVLRPGVLWFLRNLNDPDFNPVQEMIHLPIYRHLRRFILSVIVFGSIVLLMLWLPIRIIKSVLPNFLPYNVMLYSDAPVSELSLELLLLQVVLPALLEQGHTRQWLKGLVRAWTVTAGYLLDLHSYLLGDQEENENSANQQVNNNQHARNNNAIPVVGEGLHAAHQAILQQGGPVGFQPYRRPLNFPLRIFLLIVFMCITLLIASLICLTLPVFAGRWLMSFWTGTAKIHELYTAACGLYVCWLTIRAVTVMVAWMPQGRRVIFQKVKEWSLMIMKTLIVAVLLAGVVPLLLGLLFELVIVAPLRVPLDQTPLFYPWQDWALGVLHAKIIAAITLMGPQWWLKTVIEQVYANGIRNIDLHYIVRKLAAPVISVLLLSLCVPYVIASGVVPLLGVTAEMQNLVHRRIYPFLLMVVVLMAILSFQVRQFKRLYEHIKNDKYLVGQRLVNYERKSGKQGSSPPPPQSSQE

SEQ ID NO: 914810 - protein, 417 aa, Homo sapiens; identical to SEQ ID NO: 914797

SEQ ID NO: 914811 - protein, 344 aa, Homo sapiens; identical to SEQ ID NO: 914802

SEQ ID NO: 914812 - protein, 105 aa, Homo sapiens
MCFGNRAKQTSGSKFLGFSVILAPAGGNGAENVAADQPANPPAENAVVGENPDAQDDQAEEEEEDNEEEDDAGVEDAADANNGAQGNGCLCVLTLQHCKSVLNLH

SEQ ID NO: 914813 - protein, 417 aa, Homo sapiens; identical to SEQ ID NO: 914797

SEQ ID NO: 914814 - protein, 417 aa, Homo sapiens; identical to SEQ ID NO: 914797

SEQ ID NO: 914815 - protein, 417 aa, Homo sapiens; identical to SEQ ID NO: 914797

SEQ ID NO: 914816 - protein, 344 aa, Homo sapiens; identical to SEQ ID NO: 914802

SEQ ID NO: 914817 - protein, 106 aa, Homo sapiens [sequence omitted]

SEQ ID NO: 914818 - protein, 715 aa, Homo sapiens
SQILTVQQPAASARESQPLSMEEKPGQPQPQHHHSHHHPHHHPQQQQQQPHHHHHYYFYNHSHNHHHHHHHQQPHQYLQHGAEGSPKAQPKPLKHEQKHTLQQHQETPKKKTGYGELNGNAGEREISLKNLSSDEATNPISRVLNGNQQVVDTSLKQTVKANTFGKAGIKTKNFIQKNSMDKKNGKSYENKSGENQSVDKSDTIPIPNGVVTNNSGYITNGYMGKGADNDGSGSESGYTTPKKRKARRNSAKGCENLNIVQDKIMQQETSVPTLKQGLETFKPDYSEQKGNRVDGSKPIWKYETGPGGTSRGKPAVGDMLRKSSDSKPGVSSKKFDDRPKGKHASAVASKEDSWTLFKPPPVFPVDNSSAKIVPKISYASKVKENLNKTIQNSSVSPTSSSSSSSSTGETQTQSSSRLSQVPMSALKSVTSANFSNGPVLAGTDGNVYPPGGQPLLTTAANTLTPISSGTDSVLQDMSLTSAAVEQIKTSLFIYPSNMQTMLLSTAQVDLPSQTDQQNLGDIFQNQWGLSFINEPSAGPETVTGKSSEHKVMEVTFQGEYPATLVSQGAEIIPSGTEHPVFPKAYELEKRTSPQVLGSILKSGTTSESGALSLEPSHIGDLQKADTSSQGALVFLSKDYEIESQNPLASPTNTLLGSAKEQRYQRGLERNDSWGSFDLRAAIVYHTKEMESIWNLQKQDPKRIITYNEAMDSPDQ

SEQ ID NO: 914819 - protein, 536 aa, Homo sapiens
MDKKNGKSYENKSGENQSVDKSDTIPIPNGVVTNNSGYITNGYMGKGADNDGSGSESGYTTPKKRKARRNSAKGCENLNIVQDKIMQQETSVPTLKQGLETFKPDYSEQKGNRVDGSKPIWKYETGPGGTSRGKPAVGDMLRKSSDSKPGVSSKKFDDRPKGKHASAVASKEDSWTLFKPPPVFPVDNSSAKIVPKISYASKVKENLNKTIQNSSVSPTSSSSSSSSTGETQTQSSSRLSQVPMSALKSVTSANFSNGPVLAGTDGNVYPPGGQPLLTTAANTLTPISSGTDSVLQDMSLTSAAVEQIKTSLFIYPSNMQTMLLSTAQVDLPSQTDQQNLGDIFQNQWGLSFINEPSAGPETVTGKSSEHKVMEVTFQGEYPATLVSQGAEIIPSGTEHPVFPKAYELEKRTSPQVLGSILKSGTTSESGALSLEPSHIGDLQKADTSSQGALVFLSKDYEIESQNPLASPTNTLLGSAKEQRYQRGLERNDSWGSFDLRAAIVYHTKEMESIWNLQKQDPKRIITYNEAMDSPDQ

SEQ ID NO: 914820 - protein, 715 aa, Homo sapiens; identical to SEQ ID NO: 914818

SEQ ID NO: 914821 - protein, 183 aa, Homo sapiens
MWLCPLALNLILMAASGAACEVKDVCVGSPGIPGTPGSHGLPGRDGRDGVKGDPGPPGPMGPPGETPCPPGNNGLPGAPGVPGERGEKGEAGERGPPGLPAHLDEELQATLHDFRHQILQTRGALSLQVLQYWTARQSNGLPRSQLAQFHSTVSWTGHNFPMGTGPLGSPNARAMGPGSRDIP

SEQ ID NO: 914822 - protein, 248 aa, Homo sapiens
MWLCPLALNLILMAASGAACEVKDVCVGSPGIPGTPGSHGLPGRDGRDGVKGDPGPPGPMGPPGETPCPPGNNGLPGAPGVPGERGEKGEAGERGPPGLPAHLDEELQATLHDFRHQILQTRGALSLQGSIMTVGEKVFSSNGQSITFDAIQEACARAGGRIAVPRNPEENEAIASFVKKYNTYAYVGLTEGPSPGDFRYSDGTPVNYTNWYRGEPAGRGKEQCVEMYTDGQWNDRNCLYSRLTICEF

SEQ ID NO: 914823 - protein, 296 aa, Homo sapiens
SELGGRDPSSWRLCVWVADFLEPEKKVTGHMRDRWSESVTGAATGPRAMWLCPLALNLILMAASGAACEVKDVCVGSPGIPGTPGSHGLPGRDGRDGVKGDPGPPGPMGPPGETPCPPGNNGLPGAPGVPGERGEKGEAGERGPPGLPAHLDEELQATLHDFRHQILQTRGALSLQGSIMTVGEKVFSSNGQSITFDAIQEACARAGGRIAVPRNPEENEAIASFVKKYNTYAYVGLTEGPSPGDFRYSDGTPVNYTNWYRGEPAGRGKEQCVEMYTDGQWNDRNCLYSRLTICEF

SEQ ID NO: 914824 - protein, 248 aa, Homo sapiens; identical to SEQ ID NO: 914822

SEQ ID NO: 914825 - protein, 248 aa, Homo sapiens; identical to SEQ ID NO: 914822

SEQ ID NO: 914826 - protein, 248 aa, Homo sapiens; identical to SEQ ID NO: 914822

SEQ ID NO: 914827 - protein, 248 aa, Homo sapiens; identical to SEQ ID NO: 914822

SEQ ID NO: 914828 - protein, 248 aa, Homo sapiens; identical to SEQ ID NO: 914822

SEQ ID NO: 914829 - protein, 248 aa, Homo sapiens; identical to SEQ ID NO: 914822

SEQ ID NO: 914830 - protein, 248 aa, Homo sapiens; identical to SEQ ID NO: 914822

SEQ ID NO: 914831 - protein, 248 aa, Homo sapiens; identical to SEQ ID NO: 914822

SEQ ID NO: 914832 - protein, 248 aa, Homo sapiens; identical to SEQ ID NO: 914822

SEQ ID NO: 914833 - protein, 248 aa, Homo sapiens; identical to SEQ ID NO: 914822

SEQ ID NO: 914834 - protein, 248 aa, Homo sapiens; identical to SEQ ID NO: 914822

SEQ ID NO: 914835 - protein, 182 aa, Homo sapiens
RQRTPIFVVLAIDEYTGKTSTGTVYVRVPDFNDNCPTAVLEKDAVCSSSPSGVVSARTLNNRYTGPYTFALEDQPVKLPAVWSITTLNATSALLRAQEQIPPGVYHISLVLTDSQNHKYRRNITAGHLLMHLIGSATLAISTINLPSTLIIFTILILLTILEIAVALIQAYVFTLLVSLYPP

SEQ ID NO: 914836 - protein, 90 aa, Homo sapiens
MMGLFPRTTGALAIFVVVILVHGELRIETKGQYDEEEMTMQQAKRRQKREWVKFAKPCREGEDNSKRNPIAKITSDYQATQKIYSGRGRA

SEQ ID NO: 914837 - protein, 999 aa, Homo sapiens
MMGLFPRTTGALAIFVVVILVHGELRIETKGQYDEEEMTMQQAKRRQKREWVKFAKPCREGEDNSKRNPIAKITSDYQATQKITYRISGVGIDQPPFGIFVVDKNTGDINITAIVDREETPSFLITCRALNAQGLDVEKPLILTVKILDINDNPPVFSQQIFMGEIEENSASNSLVMILNATDADEPNHLNSKIAFKIVSQEPAGTPMFLLSRNTGEVRTLTNSLDREQASSYRLVVSGADKDGEGLSTQCECNIKVKDVNDNFPMFRDSQYSARIEENILSSELLRFQVTDLDEEYTDNWLAVYFFTSGNEGNWFEIQTDPRTNEGILKVVKALDYEQLQSVKLSIAVKNKAEFHQSVISRYRVQSTPVTIQVINVREGIAFRPASKTFTVQKGISSKKLVDYILGTYQAIDEDTNKAASNVKYVMGRNDGGYLMIDSKTAEIKFVKNMNRDSTFIVNKTITAEVLAIDEYTGKTSTGTVYVRVPDFNDNCPTAVLEKDAVCSSSPSGVVSARTLNNRYTGPYTFALEDQPVKLPAVWSITTLNATSALLRAQEQIPPGVYHISLVLTDSQNNRCEMPRSLTLEVCQCDNRGICGTSYPTTSPGTRYGRPHSGRLGPAAIGLLLLGLLLLLLAPLLLLTCDCGAGSTGGVTGGFIPVPDGSEGTIHQWGIEGAHPEDKEITNICVPPVTANGADFMESSEVCTNTYARGTAVEGTSGMEMTTKLGAATESGGAAGFATGTVSGAASGFGAATGVGICSSGQSGTMRTRHSTGGTNKDYADGAISMNFLDSYFSQKAFACAEEDDGQEANDCLLIYDNEGADATGSPVGSVGCCSFIADDLDDSFLDSLGPKFKKLAEISLGVDGEGKEVQPPSKDSGYGIESCGHPIEVQQTGFVKCQTLSGSQGASALSASGSVQPAVSIPDPLQHGNYLVTETYSASGSLVQPSTAGFDPLLTQNVIVTERVICPISSVPGNLAGPTQLRGSHTMLCTEDPCSRLI

SEQ ID NO: 914838 - protein, 999 aa, Homo sapiens; identical to SEQ ID NO: 914837

SEQ ID NO: 914839 - protein, 459 aa, Homo sapiens
MCFNFTTSALLRAQEQIPPGVYHISLVLTDSQNNRCEMPRSLTLEVCQCDNRGICGTSYPTTSPGTRYGRPHSGRLGPAAIGLLLLGLLLLLLAPLLLLTCDCGAGSTGGVTGGFIPVPDGSEGTIHQWGIEGAHPEDKEITNICVPPVTANGADFMESSEVCTNTYARGTAVEGTSGMEMTTKLGAATESGGAAGFATGTVSGAASGFGAATGVGICSSGQSGTMRTRHSTGGTNKDYADGAISMNFLDSYFSQKAFACAEEDDGQEANDCLLIYDNEGADATGSPVGSVGCCSFIADDLDDSFLDSLGPKFKKLAEISLGVDGEGKEVQPPSKDSGYGIESCGHPIEVQQTGFVKCQTLSGSQGASALSASGSVQPAVSIPDPLQHGNYLVTETYSASGSLVQPSTAGFDPLLTQNVIVTERVICPISSVPGNLAGPTQLRGSHTMLCTEDPCSRLI

SEQ ID NO: 914840 - protein, 153 aa, Homo sapiens
RQRTPIFVVLAIDEYTGKTSTGTVYVRVPDFNDNCPTAVLEKDAVCSSSPSGVVSARTLNNRYTGPYTFALEDQPVKLPAVWSITTLNATSALLRAQEQIPPGVYHISLVLTDSQNTNIAAGDIFLLIFLLVLLILLILIFVLIILTMARPQI

SEQ ID NO: 914841 - protein, 542 aa, Homo sapiens
RQRTPIFVVLAIDEYTGKTSTGTVYVRVPDFNDNCPTAVLEKDAVCSSSPSGVVSARTLNNRYTGPYTFALEDQPVKLPAVWSITTLNATSALLRAQEQIPPGVYHISLVLTDSQNNRCEMPRSLTLEVCQCDNRGICGTSYPTTSPGTRYGRPHSGRLGPAAIGLLLLGLLLLLLAPLLLLTCDCGAGSTGGVTGGFIPVPDGSEGTIHQWGIEGAHPEDKEITNICVPPVTANGADFMESSEVCTNTYARGTAVEGTSGMEMTTKLGAATESGGAAGFATGTVSGAASGFGAATGVGICSSGQSGTMRTRHSTGGTNKDYADGAISMNFLDSYFSQKAFACAEEDDGQEANDCLLIYDNEGADATGSPVGSVGCCSFIADDLDDSFLDSLGPKFKKLAEISLGVDGEGKEVQPPSKDSGYGIESCGHPIEVQQTGFVKCQTLSGSQGASALSASGSVQPAVSIPDPLQHGNYLVTETYSASGSLVQPSTAGFDPLLTQNVIVTERVICPISSVPGNLAGPTQLRGSHTMLCTEDPCSRLI

SEQ ID NO: 914842 - protein, 894 aa, Homo sapiens
MMGLFPRTTGALAIFVVVILVHGELRIETKGQYDEEEMTMQQAKRRQKREWVKFAKPCREGEDNSKRNPIAKITSDYQATQKITYRISGVGIDQPPFGIFVVDKNTGDINITAIVDREETPSFLITCRALNAQGLDVEKPLILTVKILDINDNPPVFSQQIFMGEIEENSASNSLVMILNATDADEPNHLNSKIAFKIVSQEPAGTPMFLLSRNTGEVRTLTNSLDREQASSYRLVVSGADKDGEGLSTQCECNIKVKDVNDNFPMFRDSQYSARIEENILSSELLRFQVTDLDEEYTDNWLAVYFFTSGNEGNWFEIQTDPRTNEGILKVVKALDYEQLQSVKLSIAVKNKAEFHQSVISRYRVQSTPVTIQVINVREGIAFRPASKTFTVQKGISSKKLVDYILGTYQAIDEDTNKAASNVKYVMGRNDGGYLMIDSKTAEIKFVKNMNRDSTFIVNKTITAEVLAIDEYTGKTSTGTVYVRVPDFNDNCPTAVLEKDAVCSSSPSGVVSARTLNNRYTGPYTFALEDQPVKLPAVWSITTLNATSALLRAQEQIPPGVYHISLVLTDSQNNRCEMPRSLTLEVCQCDNRGICGTSYPTTSPGTRYGRPHSGRLGPAAIGLLLLGLLLLLLAPLLLLTCDCGAGSTGGVTGGFIPVPDGSEGTIHQWGIEGAHPEDKEITNICVPPVTANGADFMESSEVCTNTYARGTAVEGTSGMEMTTKLGAATESGGAAGFATGTVSGAASGFGAATGVGICSSGQSGTMRTRHSTGGTNKDYADGAISMNFLDSYFSQKAFACAEEDDGQEANDCLLIYDNEGADATGSPVGSVGCCSFIADDLDDSFLDSLGPKFKKLAEISLGVDGEGKEVQPPSKDSGYGIESCGHPIEVQQTL

SEQ ID NO: 914843 - protein, 445 aa, Homo sapiens
RLLQRPRWLRRPERSRWQRRRRDRQQQQQQQQQPLASCPAALPHEPHEPLTPPFSALPDPAGAPSRRQSRQRPQLSSDSPSAFRASRSHSRNATRSHSHSHSPRHSLRHSPGSGSCGSSSGHRPCADILEVGMLLSKINSLAHLRAAPCNDLHATKLAPGKEKEPLESQYQVGPLLGSGGFGSVYSGIRVSDNLPVAIKHVEKDRISDWGELPNGTRVPMEVVLLKKVSSGFSGVIRLLDWFERPDSFVLILERPEPVQDLFDFITERGALQEELARSFFWQVLEAVRHCHNCGVLHRDIKDENILIDLNRGELKLIDFGSGALLKDTVYTDFDGTRVYSPPEWIRYHRYHGRSAAVWSLGILLYDMVCGDIPFEHDEEIIRGQVFFRQRVSSECQHLIRWCLALRPSDRPTFEEIQNHPWMQDVLLPQETAEIHLHSLSPGPSK

SEQ ID NO: 914844 - protein, 179 aa, Homo sapiens
EERVWVSAPACIGWGGRPPKGHPDLGCCASILAWILSAMRISPGLLGSGECNLRIVYEIPFLVVQTCIPSSFAGGPASQGLKFWVCGQLCLFLGAVHKEFQFMVWASREGPECIALQSGSATIATMAGRRQSGPWGSCCMIWCVEIFLSSMTKRSSGARFSSGRGSLQNVSISLDGAWP

SEQ ID NO: 914845 - protein, 159 aa, Homo sapiens
EERVWVSAPACIGWGGRPPKGHPDLGCCASILAWILSAMRISPGLLGSGTRVYSPPEWIRYHRYHGRSAAVWSLGILLYDMVCGDIPFEHDEEIIRGQVFFRQRVSSECQHLIRWCLALRPSDRPTFEEIQNHPWMQDVLLPQETAEIHLHSLSPGPSK

SEQ ID NO: 914846 - protein, 445 aa, Homo sapiens; identical to SEQ ID NO: 914843

SEQ ID NO: 914847 - protein, 445 aa, Homo sapiens; identical to SEQ ID NO: 914843

SEQ ID NO: 914848 - protein, 455 aa, Homo sapiens
  misc_feature (448)..(448): Xaa can be any naturally occurring amino acid
  misc_feature (454)..(454): Xaa can be any naturally occurring amino acid
RLLQRPRWLRRPERSRWQRRRRDRQQQQQQQQQPLASCPAALPHEPHEPLTPPFSALPDPAGAPSRRQSRQRPQLSSDSPSAFRASRSHSRNATRSHSHSHSPRHSLRHSPGSGSCGSSSGHRPCADILEVGMLLSKINSLAHLRAAPCNDLHATKLAPGKEKEPLESQYQVGPLLGSGGFGSVYSGIRVSDNLPVAIKHVEKDRISDWGELPNGTRVPMEVVLLKKVSSGFSGVIRLLDWFERPDSFVLILERPEPVQDLFDFITERGALQEELARSFFWQVLEAVRHCHNCGVLHRDIKDENILIDLNRGELKLIDFGSGALLKDTVYTDFDGTRVYSPPEWIRYHRYHGRSAAVWSLGILLYDMVCGDIPFEHDEEIIRGQVFFRQRVSSECQHLLLLGLVAHIGILLTHAHHHALVPGAPHDGGEDGPGGIVAREAGLAHAGAXVDDERXD

SEQ ID NO: 914849 - protein, 119 aa, Homo sapiens
PPKGHPDLGCCASILAWILSAMRISPGLLGSGECNLRIVYEIPFLVVQTCIPSSFAGGPASQGLKFWVCGQLCLFLGAVHKEFQFMVWASREVGNALGWRDAVRCASTLLSPEGKMEFT

SEQ ID NO: 914850 - protein, 445 aa, Homo sapiens; identical to SEQ ID NO: 914843

SEQ ID NO: 914851 - protein, 445 aa, Homo sapiens; identical to SEQ ID NO: 914843

SEQ ID NO: 914852 - protein, 445 aa, Homo sapiens; identical to SEQ ID NO: 914843

SEQ ID NO: 914853 - protein, 445 aa, Homo sapiens; identical to SEQ ID NO: 914843

SEQ ID NO: 914854 - protein, 421 aa, Homo sapiens
MGLLLMILASAVLGSFLTLLAQFFLLYRRQPEPPADEAARAGEGFRYIKPVPGLLLREYLYGGGRDEEPSGAAPEGGATPTAAPETPAPPTRETCYFLNATILFLFRELRDTALTRRWVTKKIKVEFEELLQTKTAGRLLEGLSLRDVFLGETVPFIKTIRLVRPVVPSATGEPDGPEGEALPAACPEELAFEAEVEYNGGFHLAIDVDLVFGKSAYLFVKLSRVVGRLRLVFTRVPFTHWFFSFVEDPLIDFEVRSQFEGRPMPQLTSIIVNQLKKIIKRKHTLPNYKIRFKPFFPYQTLQGFEEDEEHIHIQQWALTEGRLKVTLLECSRLLIFGSYDREANVHCTLELSSSVWEEKQRSSIKTVELMEIYKVLDLHFVLSSQLMGMLGTSSLKLWLQTRLLQLQIFSGEIDLSPLEVV

SEQ ID NO: 914855 - protein, 421 aa, Homo sapiens; identical to SEQ ID NO: 914854

SEQ ID NO: 914856 - protein, 193 aa, Homo sapiens
MAHPENEILHPIGVTRRWVTKKIKVEFEELLQTKTAGRLLEGLSLRDVFLGETVPFIKTIRLVRPVVPSATGEPDGPEGEALPAACPEELAFEAEVEYNGGFHLAIDVDLVFGKSAYLFVKLSRVVGRLRLVFTRVPFTHWFFSFVEDPLIDFEVRSQFEGRPMPQLTSIIVNQLKKIIKRKHTLPNYKIRLN

SEQ ID NO: 914857 - protein, 427 aa, Homo sapiens
MGLLLMILASAVLGSFLTLLAQFFLLYRRQPEPPADEAARAGEGFRYIKPVPGLLLREYLYGGGRDEEPSGAAPEGGATPTAAPETPAPPTRETCYFLNATILFLFRELRDTALTRRWVTKKIKVEFEELLQTKTAGRLLEGLSLRDVFLGETVPFIKTIRLVRPVVPSATGEPDGPEGEALPAACPEELAFEAEVEYNGGFHLAIDVDLVFGKSAYLFVKLSRVVGRLRLVFTRVPFTHWFFSFVEDPLIDFEVRSQFEGRPMPQLTSIIVNQLKKIIKRKHTLPNYKIRFKPFFPYQTLQGFEEDEEHIHIQQWALTEGRLKVTLLECSRLLIFGSYDREANVHCTLELSSSVWEEKQRSSIKTVELMEIYKVLDLHFVLSSQLMGMLGTSSLKLWLQTRLLQLQIFSGEIDLSPLEVFKLRDVI

SEQ ID NO: 914858 - protein, 421 aa, Homo sapiens; identical to SEQ ID NO: 914854

SEQ ID NO: 914859 - protein, 421 aa, Homo sapiens; identical to SEQ ID NO: 914854

SEQ ID NO: 914860 - protein, 293 aa, Homo sapiens
MGLLLMILASAVLGSFLTLLAQFFLLYRRQPEPPADEAARAGEGFRYIKPVPGLLLREYLYGGGRDEEPSGAAPEGGATPTAAPETPAPPTRETCYFLNATILFLFRELRDTALTRRWVTKKIKVEFEELLQTKTAGRLLEGLSLRDVFLGETVPFIKTIRLVRPVVPSATGEPDGPEGEALPAACPEELAFEAEVEYNGGFHLAIDVDLVFGKSAYLFVKLSRVVGRLRLVFTRVPFTHWFFSFVEDPLIDFEVRSQFEGRPMPQLTSIIVNQLKKIIKRKHTLPNYKIRLN

SEQ ID NO: 914861 - protein, 164 aa, Homo sapiens
MHVIKRDGRQERVMFDKITSRIQKLCYGLNMDFVDPAQITMKVIQGLYSGVTTVELDTLAAETAATLTTKHPDYAILAARIAVSNLHKETKKVFSDVMEDLYNYINPHNGKHSPMVAKSTLDIVLANKDRLNSAIIYDRDFSYNYFGFKTLERSYLLKINGKVA

SEQ ID NO: 914862 - protein, 125 aa, Homo sapiens
MHVIKRDGRQERVMFDKITSRIQKLCYGLNMDFVDPAQITMKVIQGLYSGVTTVELDTLAAETAATLTTKHPDYAILAARIAVSNLHKETKKVFSEKKKKLFGRLGPWKKFLKPLVGPRGPMRVL

SEQ ID NO: 914863 - protein, 495 aa, Homo sapiens
MHVIKRDGRQERVMFDKITSRIQKLCYGLNMDFVDPAQITMKVIQGLYSGVTTVELDTLAAETAATLTTKHPDYAILAARIAVSNLHKETKKVFSDVMEDLYNYINPHNGKHSPMVAKSTLDIVLANKDRLNSAIIYDRDFSYNYFGFKTLERSYLLKINGKVAERPQHMLMRVSVGIHKEDIDAAIETYNLLSERWFTHASPTLFNAGTNRPQLSSCFLLSMKDDSIEGIYDTLKQCALISKSAGGIGVAVSCIRATGSYIAGTNGNSNGLVPMLRVYNNTARYVDQGGNKRPGAFAIYLEPWHLDIFEFLDLKKNTGKEEQRARDLFFALWIPDLFMKRVETNQDWSLMCPNECPGLDEVWGEEFEKLYASYEKQGRVRKVVKAQQLWYAIIESQTETGTPYMLYKDSCNRKSNQQNLGTIKCSNLCTEIVEYTSKDEVAVCNLASLALNMYVTSEHTYDFKKLAEVTKVVVRNLNKIIDINYYPVPEDEIPF

SEQ ID NO: 914864 - protein, 570 aa, Homo sapiens
MKDDSIEGIYDTLKQCALISKSAGGIGVAVSCIRATGSYIAGTNGNSNGLVPMLRVYNNTARYVDQGGNKRPGAFAIYLEPWHLDIFEFLDLKKNTGKEEQRARDLFFALWIPDLFMKRVETNQDWSLMCPNECPGLDEVWGEEFEKLYASYEKQGRVRKVVKAQQLWYAIIESQTETGTPYMLYKDSCNRKSNQQNLGTIKCSNLCTEIVEYTSKDEVAVCNLASLALNMYVTSEHTYDFKKLAEVTKVVVRNLNKIIDINYYPVPEACLSNKRHRPIGIGVQGLADAFILMRYPFESAEAQLLNKQIFETIYYGALEASCDLAKEQGPYETYEGSPVSKGILQYDMWNVTPTDLWDWKVLKEKIAKYGIRNSLLIAPMPTASTAQILGNNESIEPYTSNIYTRRVLSGEFQIVNPHLLKDLTERGLWHEEMKNQIIACNGSIQSIPEIPDDLKQLYKTVWEISQKTVLKMAAERGAFIDQSQSLNIHIAEPNYGKLTSMHFYGWKQGLKTGMYYLRTRPAANPIQFTLNKEKLKDKEKVSKEEEEKERNTAAMVCSLENRDECLMCGS

SEQ ID NO: 914865 - protein, 442 aa, Homo sapiens [sequence omitted]

SEQ ID NO: 914866 - protein, 181 aa, Homo sapiens
SCSRGSPEAHGNIYTRRVLSGEFQIVNPHLLKDLTERGLWHEEMKNQIIACNGSIQSIPEIPDDLKQLYKTVWEISQKTVLKMAAERGAFIDQSQSLNIHIAEPNYGKLTSMHFYGWKQGLKTGMYYLRTRPAANPIQFTLNKEKLKDKEKVSKEEEEKERNTAAMVCSLENRDECLMCGS

SEQ ID NO: 914867 - protein, 136 aa, Homo sapiens
MLQTLFNYHRYSIPEIPDDLKQLYKTVWEISQKTVLKMAAERGAFIDQSQSLNIHIAEPNYGKLTSMHFYGWKQGLKTGMYYLRTRPAANPIQFTLNKEKLKDKEKVSKEEEEKERNTAAMVCSLENRDECLMCGS

SEQ ID NO: 914868 - protein, 447 aa, Homo sapiens
MHVIKRDGRQERVMFDKITSRIQKLCYGLNMDFVDPAQITMKVIQGLYSGVTTVELDTLAAETAATLTTKHPDYAILAARIAVSNLHKETKKVFSDVMEDLYNYINPHNGKHSPMVAKSTLDIVLANKDRLNSAIIYDRDFSYNYFGFKTLERSYLLKINGKVAERPQHMLMRVSVGIHKEDIDAAIETYNLLSERWFTHASPTLFNAGTNRPQLSSCFLLSMKDDSIEGIYDTLKQCALISKSAGGIGVAVSCIRATGSYIAGTNGNSNGLVPMLRVYNNTARYVDQGGNKRPGAFAIYLEPWHLDIFEFLDLKKNTGKEEQRARDLFFALWIPDLFMKRVETNQDWSLMCPNECPGLDEVWGEEFEKLYASYEKQGRVRKVVKAQQLWYAIIESQTETGTPYMLYKDSCNRKSNQQNLGTIKCSNLCTEIVEYTSKDEVGRKNSS

SEQ ID NO: 914869 - protein, 792 aa, Homo sapiens
MHVIKRDGRQERVMFDKITSRIQKLCYGLNMDFVDPAQITMKVIQGLYSGVTTVELDTLAAETAATLTTKHPDYAILAARIAVSNLHKETKKVFSDVMEDLYNYINPHNGKHSPMVAKSTLDIVLANKDRLNSAIIYDRDFSYNYFGFKTLERSYLLKINGKVAERPQHMLMRVSVGIHKEDIDAAIETYNLLSERWFTHASPTLFNAGTNRPQLSSCFLLSMKDDSIEGIYDTLKQCALISKSAGGIGVAVSCIRATGSYIAGTNGNSNGLVPMLRVYNNTARYVDQGGNKRPGAFAIYLEPWHLDIFEFLDLKKNTGKEEQRARDLFFALWIPDLFMKRVETNQDWSLMCPNECPGLDEVWGEEFEKLYASYEKQGRVRKVVKAQQLWYAIIESQTETGTPYMLYKDSCNRKSNQQNLGTIKCSNLCTEIVEYTSKDEVAVCNLASLALNMYVTSEHTYDFKKLAEVTKVVVRNLNKIIDINYYPVPEACLSNKRHRPIGIGVQGLADAFILMRYPFESAEAQLLNKQIFETIYYGALEASCDLAKEQGPYETYEGSPVSKGILQYDMWNVTPTDLWDWKVLKEKIAKYGIRNSLLIAPMPTASTAQILGNNESIEPYTSNIYTRRVLSGEFQIVNPHLLKDLTERGLWHEEMKNQIIACNGSIQSIPEIPDDLKQLYKTVWEISQKTVLKMAAERGAFIDQSQSLNIHIAEPNYGKLTSMHFYGWKQGLKTGMYYLRTRPAANPIQFTLNKEKLKDKEKVSKEEEEKERNTAAMVCSLENRDECLMCGS

SEQ ID NO: 914870 - protein, 144 aa, Homo sapiens
  misc_feature (130)..(130): Xaa can be any naturally occurring amino acid
  misc_feature (141)..(141): Xaa can be any naturally occurring amino acid
MHVIKRDGRQERVMFDKITSRIQKLCYGLNMDFVDPAQITMKVIQGLYSGVTTVELDTLAAETAATLTTKHPDYAILAARIAVSNLHKETKKVFSDVMEDLYNYINPHNGKHSPMVAKSTLDIVLANKDXPEFWLLTYDRXISP

SEQ ID NO: 914871 - protein, 792 aa, Homo sapiens; identical to SEQ ID NO: 914869

SEQ ID NO: 914872 - protein, 695 aa, Homo sapiens
MEDLYNYINPHNGKHSPMVAKSTLDIVLANKDRLNSAIIYDRDFSYNYFGFKTLERSYLLKINGKVAERPQHMLMRVSVGIHKEDIDAAIETYNLLSERWFTHASPTLFNAGTNRPQLSSCFLLSMKDDSIEGIYDTLKQCALISKSAGGIGVAVSCIRATGSYIAGTNGNSNGLVPMLRVYNNTARYVDQGGNKRPGAFAIYLEPWHLDIFEFLDLKKNTGKEEQRARDLFFALWIPDLFMKRVETNQDWSLMCPNECPGLDEVWGEEFEKLYASYEKQGRVRKVVKAQQLWYAIIESQTETGTPYMLYKDSCNRKSNQQNLGTIKCSNLCTEIVEYTSKDEVAVCNLASLALNMYVTSEHTYDFKKLAEVTKVVVRNLNKIIDINYYPVPEACLSNKRHRPIGIGVQGLADAFILMRYPFESAEAQLLNKQIFETIYYGALEASCDLAKEQGPYETYEGSPVSKGILQYDMWNVTPTDLWDWKVLKEKIAKYGIRNSLLIAPMPTASTAQILGNNESIEPYTSNIYTRRVLSGEFQIVNPHLLKDLTERGLWHEEMKNQIIACNGSIQSIPEIPDDLKQLYKTVWEISQKTVLKMAAERGAFIDQSQSLNIHIAEPNYGKLTSMHFYGWKQGLKTGMYYLRTRPAANPIQFTLNKEKLKDKEKVSKEEEEKERNTAAMVCSLENRDECLMCGS

SEQ ID NO: 914873 - protein, 198 aa, Homo sapiens
SIGSPAEMPTASTAQILGNNESIEPYTSNIYTRRVLSGEFQIVNPHLLKDLTERGLWHEEMKNQIIACNGSIQSIPEIPDDLKQLYKTVWEISQKTVLKMAAERGAFIDQSQSLNIHIAEPNYGKLTSMHFYGWKQGLKTGMYYLRTRPAANPIQFTLNKEKLKDKEKVSKEEEEKERNTAAMVCSLENRDECLMCGS

SEQ ID NO: 914874 - protein, 182 aa, Homo sapiens
KTCVESENKAHCNIYTRRVLSGEFQIVNPHLLKDLTERGLWHEEMKNQIIACNGSIQSIPEIPDDLKQLYKTVWEISQKTVLKMAAERGAFIDQSQSLNIHIAEPNYGKLTSMHFYGWKQGLKTGMYYLRTRPAANPIQFTLNKEKLKDKEKVSKEEEEKERNTAAMVCSLENRDECLMCGS

SEQ ID NO: 914875 - protein, 109 aa, Homo sapiens
MFDKITSRIQKLCYGLNMDFVDPAQITMKVIQGLYSGVTTVELDTLAAETAATLTTKHPDYAILAARIAVSNLHKETKKVFSVSDVWILRKDLEETSMSSVAKLLLEHR

SEQ ID NO: 914876 - protein, 89 aa, Homo sapiens
SFCQVHQIHQVQAVLTTTTFPFVSIMSWKKALRIPGGLRVATVTLMLAMLSTPVAEGRDSPEDFVYQFKGMCYFTNGTERVRLCDQIHL

SEQ ID NO: 914877 - protein, 159 aa, Homo sapiens
SFCQVHQIHQVQAVLTTTTFPFVSIMSWKKALRIPGGLRVATVTLMLAMLSTPVAEGRDSPVEPTVTISPSRTEALNHHNLLVCSVTDFYPAQIKVRWFRNDQEETTGVVSTPLIRNGDWTFQILVMLEMTPQRGDVYTCHVEHPSLQNPITVEWRLLH

SEQ ID NO: 914878 - protein, 89 aa, Homo sapiens; identical to SEQ ID NO: 914876

SEQ ID NO: 914879 - protein, 72 aa, Homo sapiens
MRGANLWGDEDPHLSGGGRQKWGTKPPTKEIRGPQQGDIQTTHGCRPGGTPHSIMHGRRKNRPPKIRDEQLS

SEQ ID NO: 914880 - protein, 89 aa, Homo sapiens; identical to SEQ ID NO: 914876

SEQ ID NO: 914881 - protein, 256 aa, Homo sapiens
MALQIPGGFWAAAVTVMLVMLSTPVAEARDFPKDFLVQFKGMCYFTNGTERVRGVARYIYNREEYGRFDSDVGEFQAVTELGRSIEDWNNYKDFLEQERAAVDKVCRHNYEAELRGILQRRVEPTVTISPSRTEALNHHNLLVCSVTDFYPAQIKVRWFRNDQEETTGVVSTPLIRNGDWTFQILVMLEMTPQRGDVYTCHVEHPSLQNPITVEWRAQSESAQSKMLSGIGGFVLGLIFLGLGLIIHHRSQKGLLH

SEQ ID NO: 914882 - protein, 156 aa, Homo sapiens
PQAGNTDSTTRWRYAGFLQRRVEPTVTISPSRTEALNHHNLLVCSVTDFYPAQIKVRWFRNDQEETTGVVSTPLIRNGDWTFQILVMLEMTPQRGDVYTCHVEHPSLQNPITVEWRAQSESAQSKMLSGIGGFVLGLIFLGLGLIIHHRSQKGLLH

SEQ ID NO: 914883 - protein, 264 aa, Homo sapiens
MALQIPGGFWAAAVTVMLVMLSTPVAEARDFPKDFLVQFKGMCYFTNGTERVRGVARYIYNREEYGRFDSDVGEFQAVTELGRSIEDWNNYKDFLEQERAAVDKVCRHNYEAELRGILQRRVEPTVTISPSRTEALNHHNLLVCSVTDFYPGQIKVRWFRNDQEETAGVVSTPLIRNGDWTFQILVMLEMTPQRGDVYTCHVEHPSLQSPITVEWRAQSESAQSKMLSGVGGFVLGLIFLGLGLIIRHRGQKGPRGPPPAGLLH

SEQ ID NO: 914884 - protein, 89 aa, Homo sapiens; identical to SEQ ID NO: 914876

SEQ ID NO: 914885 - protein, 228 aa, Homo sapiens
MALQIPGGFWAAAVTVMLVMLSTPVAEARDFPKDFLVQFKGMCYFTNGTERVRGVARYIYNREEYGRFDSDVGEFQAVTELGRSIEDWNNYKDFLEQERAAVDKVCRHNYEAELRGILQRRVEPTVTISPSRTEALNHHNLLVCSVTDFYPGQIKVRWFRNDQEETAGVVSTPLIRNGDWTFQILVMLEMTPQRGDVYTCHVEHPSLQSPITVEWRLISLLQDSCTDS

SEQ ID NO: 914886 - protein, 256 aa, Homo sapiens
MALQIPGGFWAAAVTVMLVMLSTPVAEARDFPKDFLVQFKGMCYFTNGTERVRGVARYIYNREEYGRFDSDVGEFQAVTELGRSIEDWNNYKDFLEQERAAVDKVCRHNYEAELRGILQRRVEPTVTISPSRTEALNHHNLLVCSVTDFYPGQIKVRWFRNDQEETAGVVSTPLIRNGDWTFQILVMLEMTPQRGDVYTCHVEHPSLQSPITVEWRAQSESAQSKMLSGIGGFVLGLIFLGLGLIIHHRSQKGLLH

SEQ ID NO: 914887 - protein, 89 aa, Homo sapiens; identical to SEQ ID NO: 914876

SEQ ID NO: 914888 - protein, 89 aa, Homo sapiens; identical to SEQ ID NO: 914876

SEQ ID NO: 914889 - protein, 152 aa, Homo sapiens
AAANTTKFGAVFDGFARMESTEKCEAVIGHFNGKFIKTPPGVSAPTEPLLCKFADGGQKKRQNPNKYIPNGRPWHREGEVRLAGMTLTYDPTTAAIQNGFYPSPYSIATNRMITQTSITPYIASPVSAYQVQSPSWMQPQPYILQHPVSFLS

SEQ ID NO: 914890 - protein, 455 aa, Homo sapiens
GTRGGAAAAAAAAAAAAAAAAAGKGEAGEPETWKPQSVRDPARQLPSSFMGKVWKQQMYPQYATYYYPQYLQAKQSLVPAHPMAPPSPSTTSSNNNSSSSSNSGWDQLSKTNLYIRGLPPHTTDQDLVKLCQPYGKIVSTKAILDKTTNKCKGYGFVDFDSPAAAQKAVSALKASGVQAQMAKQQEQDPTNLYISNLPLSMDEQELENMLKPFGQVISTRILRDSSGTSRGVGFARMESTEKCEAVIGHFNGKFIKTPPGVSAPTEPLLCKFADGGQKKRQNPNKYIPNGRPWHREGEVRLAGMTLTYDPTTAAIQNGFYPSPYSIATNRMITQTSITPYIASPVSAYQVQSPSWMQPQPYILQHPGAVLTPSMEHTMSLQPASMISPLAQQMSHLSLGSTGTYMPATSAMQGAYLPQYAHMQTTAVPVEEASGQQQVAVETSNDHSPYTFQPNK

SEQ ID NO: 914891 - protein, 275 aa, Homo sapiens
MAKQQEQDPTNLYISNLPLSMDEQELENMLKPFGQVISTRILRDSSGTSRGVGFARMESTEKCEAVIGHFNGKFIKTPPGVSAPTEPLLCKFADGGQKKRQNPNKYIPNGRPWHREGEVRLAGMTLTYDPTTAAIQNGFYPSPYSIATNRMITQTSITPYIASPVSAYQVQSPSWMQPQPYILQHPGAVLTPSMEHTMSLQPASMISPLAQQMSHLSLGSTGTYMPATSAMQGAYLPQYAHMQTTAVPVEEASGQQQVAVETSNDHSPYTFQPNK

SEQ ID NO: 914892 - protein, 471 aa, Homo sapiens
GTRGGAAAAAAAAAAAAAAAAAGKGEAGEPETWKPQSVRDPARQLPSSFMGKVWKQQMYPQYATYYYPQYLQAKQSLVPAHPMAPPSPSTTSSNNNSSSSSNSGWDQLSKTNLYIRGLPPHTTDQDLVKLCQPYGKIVSTKAILDKTTNKCKGYGFVDFDSPAAAQKAVSALKASGVQAQMAKQQEQDPTNLYISNLPLSMDEQELENMLKPFGQVISTRILRDSSGTSRGVGFARMESTEKCEAVIGHFNGKFIKTPPGVSAPTEPLLCKFADGGQKKRQNPNKYIPNGRPWHREGEVRLAGMTLTYDPTTAAIQNGFYPSPYSIATNRMITQTSITPYIASPVSAYQVAKETRENKYRGSAIKVQSPSWMQPQPYILQHPGAVLTPSMEHTMSLQPASMISPLAQQMSHLSLGSTGTYMPATSAMQGAYLPQYAHMQTTAVPVEEASGQQQVAVETSNDHSPYTFQPNK

SEQ ID NO: 914893 - protein, 273 aa, Homo sapiens
VDSRHPPTNLYISNLPLSMDEQELENMLKPFGQVISTRILRDSSGTSRGVGFARMESTEKCEAVIGHFNGKFIKTPPGVSAPTEPLLCKFADGGQKKRQNPNKYIPNGRPWHREGEVRLAGMTLTYDPTTAAIQNGFYPSPYSIATNRMITQTSITPYIASPVSAYQVQSPSWMQPQPYILQHPGAVLTPSMEHTMSLQPASMISPLAQQMSHLSLGSTGTYMPATSAMQGAYLPQYAHMQTTAVPVEEASGQQQVAVETSNDHSPYTFQPNK

SEQ ID NO: 914894 - protein, 249 aa, Homo sapiens
MLSTISPTVLLARYYLIPVVNVLAWKGFARMESTEKCEAVIGHFNGKFIKTPPGVSAPTEPLLCKFADGGQKKRQNPNKYIPNGRPWHREGEVRLAGMTLTYDPTTAAIQNGFYPSPYSIATNRMITQTSITPYIASPVSAYQVQSPSWMQPQPYILQHPGAVLTPSMEHTMSLQPASMISPLAQQMSHLSLGSTGTYMPATSAMQGAYLPQYAHMQTTAVPVEEASGQQQVAVETSNDHSPYTFQPNK

SEQ ID NO: 914895 - protein, 491 aa, Homo sapiens
ARGVEQRQQQQPPPPPPLPPPPERERQESPRLGNPKVSATLHGSSLPASWAKCGNSRCTLSTPPTITPSICKPSLEGIREYQVKRKSEEQKNVSGMANTVNIAVSVGQKNQSLVPAHPMAPPSPSTTSSNNNSSSSSNSGWDQLSKTNLYIRGLPPHTTDQDLVKLCQPYGKIVSTKAILDKTTNKCKGYGFVDFDSPAAAQKAVSALKASGVQAQMAKQQEQDPTNLYISNLPLSMDEQELENMLKPFGQVISTRILRDSSGTSRGVGFARMESTEKCEAVIGHFNGKFIKTPPGVSAPTEPLLCKFADGGQKKRQNPNKYIPNGRPWHREGEVRLAGMTLTYDPTTAAIQNGFYPSPYSIATNRMITQTSITPYIASPVSAYQVQSPSWMQPQPYILQHPGAVLTPSMEHTMSLQPASMISPLAQQMSHLSLGSTGTYMPATSAMQGAYLPQYAHMQTTAVPVEEASGQQQVAVETSNDHSPYTFQPNK

SEQ ID NO: 914896 - protein, 367 aa, Homo sapiens
ARGVEQRQQQQPPPPPPLPPPPERERQESPRLGNPKVSATLHGSSLPASWAKCGNSRCTLSTPPTITPSICKPSLEGIREYQVKRKSEEQKNVSGMANTVNIAVSVGQKNQSLVPAHPMAPPSPSTTSSNNNSSSSSNSGWDQLSKTNLYIRGLPPHTTDQDLVKLCQPYGKIVSTKAILDKTTNKCKGYGFVDFDSPAAAQKAVSALKASGVQAQMAKQQEQDPTNLYISNLPLSMDEQELENMLKPFGQVISTRILRDSSGTSRGVGFARMESTEKCEAVIGHFNGKFIKTPPGVSAPTEPLLCKFADGGQKKRQNPNKYIPNGRPWHREGEVRLAGMTLTYDPTTAAIQNGFYPSPYVTHTWPV

SEQ ID NO: 914897 - protein, 455 aa, Homo sapiens; identical to SEQ ID NO: 914890

SEQ ID NO: 914898 - protein, 455 aa, Homo sapiens; identical to SEQ ID NO: 914890

SEQ ID NO: 914899 - protein, 507 aa, Homo sapiens
ARGVEQRQQQQPPPPPPLPPPPERERQESPRLGNPKVSATLHGSSLPASWAKCGNSRCTLSTPPTITPSICKPSLEGIREYQVKRKSEEQKNVSGMANTVNIAVSVGQKNQSLVPAHPMAPPSPSTTSSNNNSSSSSNSGWDQLSKTNLYIRGLPPHTTDQDLVKLCQPYGKIVSTKAILDKTTNKCKGYGFVDFDSPAAAQKAVSALKASGVQAQMAKQQEQDPTNLYISNLPLSMDEQELENMLKPFGQVISTRILRDSSGTSRGVGFARMESTEKCEAVIGHFNGKFIKTPPGVSAPTEPLLCKFADGGQKKRQNPNKYIPNGRPWHREGEVRLAGMTLTYDPTTAAIQNGFYPSPYSIATNRMITQTSITPYIASPVSAYQVAKETRENKYRGSAIKVQSPSWMQPQPYILQHPGAVLTPSMEHTMSLQPASMISPLAQQMSHLSLGSTGTYMPATSAMQGAYLPQYAHMQTTAVPVEEASGQQQVAVETSNDHSPYTFQPNK

SEQ ID NO: 914900 - protein, 455 aa, Homo sapiens; identical to SEQ ID NO: 914890

SEQ ID NO: 914901 - protein, 455 aa, Homo sapiens; identical to SEQ ID NO: 914890

SEQ ID NO: 914902 - protein, 407 aa, Homo sapiens
ARGVEQRQQQQPPPPPPLPPPPERERQESPRLGNPKVSATLHGSSLPASWAKCGNSRCTLSTPPTITPSICKPSLEGIREYQVKRKSEEQKNVSGMANTVNIAVSVGQKNQSLVPAHPMAPPSPSTTSSNNNSSSSSNSGWDQLSKTNLYIRGLPPHTTDQDLVKLCQPYGKIVSTKAILDKTTNKCKGYGFVDFDSPAAAQKAVSALKASGVQAQMAKQQEQDPTNLYISNLPLSMDEQELENMLKPFGQVISTRILRDSSGTSRGVGFARMESTEKCEAVIGHFNGKFIKTPPGVSAPTEPLLCKFADGGQKKRQNPNKYIPNGRPWHREGEVRLAGMTLTYDPTTAAIQNGFYPSPYSIATNRMITQTSITPYIASPVSAYQVQSPSWMQPQPYILQHPVSFLS

SEQ ID NO: 914903 - protein, 2725 aa, Homo sapiens
MMNNSGYSDAGLGLGDETDEMPSTEKDLAEDAPWKKIQQNTFTRWCNEHLKCVGKRLTDLQRDLSDGLRLIALLEVLSQKRMYRKFHPRPNFRQMKLENVSVALEFLEREHIKLVSIDSKAIVDGNLKLILGLIWTLILHYSISMPMWEDEDDEDARKQTPKQRLLGWIQNKVPQLPITNFNRDWQDGKALGALVDNCAPGLCPDWEAWDPNQPVENAREAMQQADDWLGVPQVIAPEEIVDPNVDEHSVMTYLSQFPKAKLKPGAPVRSKQLNPKKAIAYGPGIEPQGNTVLQPAHFTVQTVDAGVGEVLVYIEDPEGHTEEAKVVPNNDKDRTYAVSYVPKVAGLHKVTVLFAGQNIERSPFEVNVGMALGDANKVSARGPGLEPVGNVANKPTYFDIYTAGAGTGDVAVVIVDPQGRRDTVEVALEDKGDSTFRCTYRPAMEGPHTVHVAFAGAPITRSPFPVHVSEACNPNACRASGRGLQPKGVRVKEVADFKVFTKGAGSGELKVTVKGPKGTEEPVKVREAGDGVFECEYYPVVPGKYVVTITWGGYAIPRSPFEVQVSPEAGVQKVRAWGPGLETGQVGKSADFVVEAIGTEVGTLGFSIEGPSQAKIECDDKGDGSCDVRYWPTEPGEYAVHVICDDEDIRDSPFIAHILPAPPDCFPDKVKAFGPGLEPTGCIVDKPAEFTIDARAAGKGDLKLYAQDADGCPIDIKVIPNGDGTFRCSYVPTKPIKHTIIISWGGVNVPKSPFRVNVGEGSHPERVKVYGPGVEKTGLKANEPTYFTVDCSEAGQGDVSIGIKCAPGVVGPAEADIDFDIIKNDNDTFTVKYTPPGAGRYTIMVLFANQEIPASPFHIKVDPSHDASKVKAEGPGLNRTGVEVGKPTHFTVLTKGAGKAKLDVQFAGTAKGEVVRDFEIIDNHDYSYTVKYTAVQQGNMAVTVTYGGDPVPKSPFVVNVAPPLDLSKIKVQGLNSKVAVGQEQAFSVNTRGAGGQGQLDVRMTSPSRRPIPCKLEPGGGAEAQAVRYMPPEEGPYKVDITYDGHPVPGSPFAVEGVLPPDPSKVCAYGPGLKGGLVGTPAPFSIDTKGAGTGGLGLTVEGPCEAKIECQDNGDGSCAVSYLPTEPGEYTINILFAEAHIPGSPFKATIRPVFDPSKVRASGPGLERGKVGEAATFTVDCSEAGEAELTIEILSDAGVKAEVLIHNNADGTYHITYSPAFPGTYTITIKYGGHPVPKFPTRVHVQPAVDTSGVKVSGPGVEPHGVLREVTTEFTVDARSLTATGGNHVTARVLNPSGAKTDTYVTDNGDGTYRVQYTAYEEGVHLVEVLYDEVAVPKSPFRVGVTEGCDPTRVRAFGPGLEGGLVNKANRFTVETRGAGTGGLGLAIEGPSEAKMSCKDNKDGSCTVEYIPFTPGDYDVNITFGGRPIPGSPFRVPVKDVVDPGKVKCSGPGLGAGVRARVPQTFTVDCSQAGRAPLQVAVLGPTGVAEPVEVRDNGDGTHTVHYTPATDGPYTVAVKYADQEVPRSPFKIKVLPAHDASKVRASGPGLNASGIPASLPVEFTIDARDAGEGLLTVQILDPEGKPKKANIRDNGDGTYTVSYLPDMSGRYTITIKYGGDEIPYSPFRIHALPTGDASKCLVTVSIGGHGLGACLGPRIQIGQETVITVDAKAAGEGKVTCTVSTPDGAELDVDVVENHDGTFDIYYTAPEPGKYVITIRFGGEHIPNSPFHVLACDPLPHEEEPSEVPQLRQPYAPPRPGARPTHWATEEPVVPVEPMESMLRPFNLVIPFAVQKGELTGEVRMPSGKTARPNITDNKDGTITVRYAPTEKGLHQMGIKYDGNHIPGSPLQFYVDAINSRHVSAYGPGLSHGMVNKPATFTIVTKDAGEGGLSLAVEGPSKAEITCKDNKDGTCTVSYLPTAPGDYSIIVRFDDKHIPGSPFTAKITGDDSMRTSQLNVGTSTDVSLKITESDLSQLTASIRAPSGNEEPCLLKRLPNRHIGISFTPKEVGEHVVSVRKSGKHVTNSPFKILVGPSEIGDASKVRVWGKGLSEGHTFQVAEFIVDTRNAGYGGLGLSIEGPSKVDINCEDMEDGTCKVTYCPTEPGTYIINIKFADKHVPGSPFTVKVTGEGRMKESITRRRQAPSIATIGSTCDLNLKIPGNWFQMVSAQERLTRTFTRSSHTYTRTERTEISKTRGGETKREVRVEESTQVGGDPFPAVFGDFLGRERLGSFGSITRQQEGEASSQDMTAQVTSPSGKVEAAEIVEGEDSAYSVRFVPQEMGPHTVAVKYRGQHVPGSPFQFTVGPLGEGGAHKVRAGGTGLERGVAGVPAEFSIWTREAGAGGLSIAVEGPSKAEIAFEDRKDGSCGVSYVVQEPGDYEVSIKFNDEHIPDSPFVVPVASLSDDARRLTVTSLQETGLKVNQPASFAVQLNGARGVIDARVHTPSGAVEECYVSELDSDKHTIRFIPHENGVHSIDVKFNGAHIPGSPFKIRVGEQSQAGDPGLVSAYGPGLEGGTTGVSSEFIVNTLNAGSGALSVTIDGPSKVQLDCRECPEGHVVTYTPMAPGNYLIAIKYGGPQHIVGSPFKAKVTGPRLSGGHSLHETSTVLVETVTKSSSSRGSSYSSIPKFSSDASKVVTRGPGLSQAFVGQKNSFTVDCSKAGTNMMMVGVHGPKTPCEEVYVKHMGNRVYNVTYTVKEKGDYILIVKWGDESVPGSPFKVKVP

SEQ ID NO: 914904 - protein, 2692 aa, Homo sapiens
MMNNSGYSDAGLGLGDETDEMPSTEKDLAEDAPWKKIQQNTFTRWCNEHLKCVGKRLTDLQRDLSDGLRLIALLEVLSQKRMYRKFHPRPNFRQMKLENVSVALEFLEREHIKLVSIDSKAIVDGNLKLILGLIWTLILHYSISMPMWEDEDDEDARKQTPKQRLLGWIQNKVPQLPITNFNRDWQDGKALGALVDNCAPGLCPDWEAWDPNQPVENAREAMQQADDWLGVPQVIAPEEIVDPNVDEHSVMTYLSQFPKAKLKPGAPVRSKQLNPKKAIAYGPGIEPQGNTVLQPAHFTVQTVDAGVGEVLVYIEDPEGHTEEAKVVPNNDKDRTYAVSYVPKVAGLHKVTVLFAGQNIERSPFEVNVGMALGDANKVSARGPGLEPVGNVANKPTYFDIYTAGAGTGDVAVVIVDPQGRRDTVEVALEDKGDSTFRCTYRPAMEGPHTVHVAFAGAPITRSPFPVHVSEACNPNACRASGRGLQPKGVRVKEVADFKVFTKGAGSGELKVTVKGPKGTEEPVKVREAGDGVFECEYYPVVPGKYVVTITWGGYAIPRSPFEVQVSPEAGVQKVRAWGPGLETGQVGKSADFVVEAIGTEVGTLGFSIEGPSQAKIECDDKGDGSCDVRYWPTEPGEYAVHVICDDEDIRDSPFIAHILPAPPDCFPDKVKAFGPGLEPTGCIVDKPAEFTIDARAAGKGDLKLYAQDADGCPIDIKVIPNGDGTFRCSYVPTKPIKHTIIISWGGVNVPKSPFRVNVGEGSHPERVKVYGPGVEKTGLKANEPTYFTVDCSEAGQGDVSIGIKCAPGVVGPAEADIDFDIIKNDNDTFTVKYTPPGAGRYTIMVLFANQEIPASPFHIKVDPSHDASKVKAEGPGLNRTGVEVGKPTHFTVLTKGAGKAKLDVQFAGTAKGEVVRDFEIIDNHDYSYTVKYTAVQQGNMAVTVTYGGDPVPKSPFVVNVAPPLDLSKIKVQGLNSKVAVGQEQAFSVNTRGAGGQGQLDVRMTSPSRRPIPCKLEPGGGAEAQAVRYMPPEEGPYKVDITYDGHPVPGSPFAVEGVLPPDPSKVCAYGPGLKGGLVGTPAPFSIDTKGAGTGGLGLTVEGPCEAKIECQDNGDGSCAVSYLPTEPGEYTINILFAEAHIPGSPFKATIRPVFDPSKVRASGPGLERGKVGEAATFTVDCSEAGEAELTIEILSDAGVKAEVLIHNNADGTYHITYSPAFPGTYTITIKYGGHPVPKFPTRVHVQPAVDTSGVKVSGPGVEPHGVLREVTTEFTVDARSLTATGGNHVTARVLNPSGAKTDTYVTDNGDGTYRVQYTAYEEGVHLVEVLYDEVAVPKSPFRVGVTEGCDPTRVRAFGPGLEGGLVNKANRFTVETRGAGTGGLGLAIEGPSEAKMSCKDNKDGSCTVEYIPFTPGDYDVNITFGGRPIPGSPFRVPVKDVVDPGKVKCSGPGLGAGVRARVPQTFTVDCSQAGRAPLQVAVLGPTGVAEPVEVRDNGDGTHTVHYTPATDGPYTVAVKYADQEVPRSPFKIKVLPAHDASKVRASGPGLNASGIPASLPVEFTIDARDAGEGLLTVQILDPEGKPKKANIRDNGDGTYTVSYLPDMSGRYTITIKYGGDEIPYSPFRIHALPTGDASKCLVTVSIGGHGLGACLGPRIQIGQETVITVDAKAAGEGKVTCTVSTPDGAELDVDVVENHDGTFDIYYTAPEPGKYVITIRFGGEHIPNSPFHVLATEEPVVPVEPMESMLRPFNLVIPFAVQKGELTGEVRMPSGKTARPNITDNKDGTITVRYAPTEKGLHQMGIKYDGNHIPGSPLQFYVDAINSRHVSAYGPGLSHGMVNKPATFTIVTKDAGEGGLSLAVEGPSKAEITCKDNKDGTCTVSYLPTAPGDYSIIVRFDDKHIPGSPFTAKITGDDSMRTSQLNVGTSTDVSLKITESDLSQLTASIRAPSGNEEPCLLKRLPNRHIGISFTPKEVGEHVVSVRKSGKHVTNSPFKILVGPSEIGDASKVRVWGKGLSEGHTFQVAEFIVDTRNAGYGGLGLSIEGPSKVDINCEDMEDGTCKVTYCPTEPGTYIINIKFADKHVPGSPFTVKVTGEGRMKESITRRRQAPSIATIGSTCDLNLKIPGNWFQMVSAQERLTRTFTRSSHTYTRTERTEISKTRGGETKREVRVEESTQVGGDPFPAVFGDFLGRERLGSFGSITRQQEGEASSQDMTAQVTSPSGKVEAAEIVEGEDSAYSVRFVPQEMGPHTVAVKYRGQHVPGSPFQFTVGPLGEGGAHKVRAGGTGLERGVAGVPAEFSIWTREAGAGGLSIAVEGPSKAEIAFEDRKDGSCGVSYVVQEPGDYEVSIKFNDEHIPDSPFVVPVASLSDDARRLTVTSLQETGLKVNQPASFAVQLNGARGVIDARVHTPSGAVEECYVSELDSDKHTIRFIPHENGVHSIDVKFNGAHIPGSPFKIRVGEQSQAGDPGLVSAYGPGLEGGTTGVSSEFIVNTLNAGSGALSVTIDGPSKVQLDCRECPEGHVVTYTPMAPGNYLIAIKYGGPQHIVGSPFKAKVTGPRLSGGHSLHETSTVLVETVTKSSSSRGSSYSSIPKFSSDASKVVTRGPGLSQAFVGQKNSFTVDCSKAGTNMMMVGVHGPKTPCEEVYVKHMGNRVYNVTYTVKEKGDYILIVKWGDESVPGSPFKVKVP

SEQ ID NO: 914905 - protein, 2219 aa, Homo sapiens
MMNNSGYSDAGLGLGDETDEMPSTEKDLAEDAPWKKIQQNTFTRWCNEHLKCVGKRLTDLQRDLSDGLRLIALLEVLSQKRMYRKFHPRPNFRQMKLENVSVALEFLEREHIKLVSIDSKAIVDGNLKLILGLIWTLILHYSISMPMWEDEDDEDARKQTPKQRLLGWIQNKVPQLPITNFNRDWQDGKALGALVDNCAPGLCPDWEAWDPNQPVENAREAMQQADDWLGVPQVIAPEEIVDPNVDEHSVMTYLSQFPKAKLKPGAPVRSKQLNPKKAIAYGPGIEPQGNTVLQPAHFTVQTVDAGVGEVLVYIEDPEGHTEEAKVVPNNDKDRTYAVSYVPKVAGLHKVTVLFAGQNIERSPFEVNVGMALGDANKVSARGPGLEPVGNVANKPTYFDIYTAGAGTGDVAVVIVDPQGRRDTVEVALEDKGDSTFRCTYRPAMEGPHTVHVAFAGAPITRSPFPVHVSEACNPNACRASGRGLQPKGVRVKEVADFKVFTKGAGSGELKVTVKGPKGTEEPVKVREAGDGVFECEYYPVVPGKYVVTITWGGYAIPRSPFEVQVSPEAGVQKVRAWGPGLETGQVGKSADFVVEAIGTEVGTLGFSIEGPSQAKIECDDKGDGSCDVRYWPTEPGEYAVHVICDDEDIRDSPFIAHILPAPPDCFPDKVKAFGPGLEPTGCIVDKPAEFTIDARAAGKGDLKLYAQDADGCPIDIKVIPNGDGTFRCSYVPTKPIKHTIIISWGGVNVPKSPFRVNVGEGSHPERVKVYGPGVEKTGLKANEPTYFTVDCSEAGQGDVSIGIKCAPGVVGPAEADIDFDIIKNDNDTFTVKYTPPGAGRYTIMVLFANQEIPASPFHIKVDPSHDASKVKAEGPGLNRTGVEVGKPTHFTVLTKGAGKAKLDVQFAGTAKGEVVRDFEIIDNHDYSYTVKYTAVQQGNMAVTVTYGGDPVPKSPFVVNVAPPLDLSKIKVQGLNSKVAVGQEQAFSVNTRGAGGQGQLDVRMTSPSRRPIPCKLEPGGGAEAQAVRYMPPEEGPYKVDITYDGHPVPGSPFAVEGVLPPDPSKVCAYGPGLKGGLVGTPAPFSIDTKGAGTGGLGLTVEGPCEAKIECQDNGDGSCAVSYLPTEPGEYTINILFAEAHIPGSPFKATIRPVFDPSKVRASGPGLERGKVGEAATFTVDCSEAGEAELTIEILSDAGVKAEVLIHNNADGTYHITYSPAFPGTYTITIKYGGHPVPKFPTRVHVQPAVDTSGVKVSGPGVEPHGVLREVTTEFTVDARSLTATGGNHVTARVLNPSGAKTDTYVTDNGDGTYRVQYTAYEEGVHLVEVLYDEVAVPKSPFRVGVTEGCDPTRVRAFGPGLEGGLVNKANRFTVETRGAGTGGLGLAIEGPSEAKMSCKDNKDGSCTVEYIPFTPGDYDVNITFGGRPIPGSPFRVPVKDVVDPGKVKCSGPGLGAGVRARVPQTFTVDCSQAGRAPLQVAVLGPTGVAEPVEVRDNGDGTHTVHYTPATDGPYTVAVKYADQEVPRSPFKIKVLPAHDASKVRASGPGLNASGIPASLPVEFTIDARDAGEGLLTVQILDPEGKPKKANIRDNGDGTYTVSYLPDMSGRYTITIKYGGDEIPYSPFRMKESITRRRQAPSIATIGSTCDLNLKIPGNWFQMVSAQERLTRTFTRSSHTYTRTERTEISKTRGGETKREVRVEESTQVGGDPFPAVFGDFLGRERLGSFGSITRQQEGEASSQDMTAQVTSPSGKVEAAEIVEGEDSAYSVRFVPQEMGPHTVAVKYRGQHVPGSPFQFTVGPLGEGGAHKVRAGGTGLERGVAGVPAEFSIWTREAGAGGLSIAVEGPSKAEIAFEDRKDGSCGVSYVVQEPGDYEVSIKFNDEHIPDSPFVVPVASLSDDARRLTVTSLQETGLKVNQPASFAVQLNGARGVIDARVHTPSGAVEECYVSELDSDKHTIRFIPHENGVHSIDVKFNGAHIPGSPFKIRVGEQSQAGDPGLVSAYGPGLEGGTTGVSSEFIVNTLNAGSGALSVTIDGPSKVQLDCRECPEGHVVTYTPMAPGNYLIAIKYGGPQHIVGSPFKAKVTGPRLSGGHSLHETSTVLVETVTKSSSSRGSSYSSIPKFSSDASKVVTRGPGLSQAFVGQKNSFTVDCSKAGTNMMMVGVHGPKTPCEEVYVKHMGNRVYNVTYTVKEKGDYILIVKWGDESVPGSPFKVKVP

SEQ ID NO: 914906 - protein, 573 aa, Homo sapiens
DAWATHASEGNWFQMVSAQERLTRTFTRSSHTYTRTERTEISKTRGGETKREVRVEESTQVGGDPFPAVFGDFLGRERLGSFGSITRQQEGEASSQDMTAQVTSPSGKVEAAEIVEGEDSAYSVRFVPQEMGPHTVAVKYRGQHVPGSPFQFTVGPLGEGGAHKVRAGGTGLERGVAGVPAEFSIWTREAGAGGLSIAVEGPSKAEIAFEDRKDGSCGVSYVVQEPGDYEVSIKFNDEHIPDSPFVVPVASLSDDARRLTVTSLQETGLKVNQPASFAVQLNGARGVIDARVHTPSGAVEECYVSELDSDKHTIRFIPHENGVHSIDVKFNGAHIPGSPFKIRVGEQSQAGDPGLVSAYGPGLEGGTTGVSSEFIVNTLNAGSGALSVTIDGPSKVQLDCRECPEGHVVTYTPMAPGNYLIAIKYGGPQHIVGSPFKAKVTGPRLSGGHSLHETSTVLVETVTKSSSSRGSSYSSIPKFSSDASKVVTRGPGLSQAFVGQKNSFTVDCSKAGTNMMMVGVHGPKTPCEEVYVKHMGNRVYNVTYTVKEKGDYILIVKWGDESVPGSPFKVKVP

SEQ ID NO: 914907 - protein, 2658 aa, Homo sapiens
MMNNSGYSDAGLGLGDETDEMPSTEKDLAEDAPWKKIQQNTFTRWCNEHLKCVGKRLTDLQRDLSDGLRLIALLEVLSQKRMYRKFHPRPNFRQMKLENVSVALEFLEREHIKLVSIDSKAIVDGNLKLILGLIWTLILHYSISMPMWEDEDDEDARKQTPKQRLLGWIQNKVPQLPITNFNRDWQDGKALGALVDNCAPGLCPDWEAWDPNQPVENAREAMQQADDWLGVPQVIAPEEIVDPNVDEHSVMTYLSQFPKAKLKPGAPVRSKQLNPKKAIAYGPGIEPQGNTVLQPAHFTVQTVDAGVGEVLVYIEDPEGHTEEAKVVPNNDKDRTYAVSYVPKVAGLHKVTVLFAGQNIERSPFEVNVGMALGDANKVSARGPGLEPVGNVANKPTYFDIYTAGAGTGDVAVVIVDPQGRRDTVEVALEDKGDSTFRCTYRPAMEGPHTVHVAFAGAPITRSPFPVHVSEACNPNACRASGRGLQPKGVRVKEVADFKVFTKGAGSGELKVTVKGPKGTEEPVKVREAGDGVFECEYYPVVPGKYVVTITWGGYAIPRSPFEVQVSPEAGVQKVRAWGPGLETGQVGKSADFVVEAIGTEVGTLGFSIEGPSQAKIECDDKGDGSCDVRYWPTEPGEYAVHVICDDEDIRDSPFIAHILPAPPDCFPDKVKAFGPGLEPTGCIVDKPAEFTIDARAAGKGDLKLYAQDADGCPIDIKVIPNGDGTFRCSYVPTKPIKHTIIISWGGVNVPKSPFRVNVGEGSHPERVKVYGPGVEKTGLKANEPTYFTVDCSEAGQGDVSIGIKCAPGVVGPAEADIDFDIIKNDNDTFTVKYTPPGAGRYTIMVLFANQEIPASPFHIKVDPSHDASKVKAEGPGLNRTGVEVGKPTHFTVLTKGAGKAKLDVQFAGTAKGEVVRDFEIIDNHDYSYTVKYTAVQQGNMAVTVTYGGDPVPKSPFVVNVAPPLDLSKIKVQGLNSKVAVGQEQAFSVNTRGAGGQGQLDVRMTSPSRRPIPCKLEPGGGAEAQAVRYMPPEEGPYKVDITYDGHPVPGSPFAVEGVLPPDPSKVCAYGPGLKGGLVGTPAPFSIDTKGAGTGGLGLTVEGPCEAKIECQDNGDGSCAVSYLPTEPGEYTINILFAEAHIPGSPFKATIRPVFDPSKVRASGPGLERGKVGEAATFTVDCSEAGEAELTIEILSDAGVKAEVLIHNNADGTYHITYSPAFPGTYTITIKYGGHPVPKFPTRVHVQPAVDTSGVKVSGPGVEPHGVLREVTTEFTVDARSLTATGGNHVTARVLNPSGAKTDTYVTDNGDGTYRVQYTAYEEGVHLVEVLYDEVAVPKSPFRVGVTEGCDPTRVRAFGPGLEGGLVNKANRFTVETRGAGTGGLGLAIEGPSEAKMSCKDNKDGSCTVEYIPFTPGDYDVNITFGGRPIPGSPFRVPVKDVVDPGKVKCSGPGLGAGVRARVPQTFTVDCSQAGRAPLQVAVLGPTGVAEPVEVRDNGDGTHTVHYTPATDGPYTVAVKYADQEVPRSPFKIKVLPAHDASKVRASGPGLNASGIPASLPVEFTIDARDAGEGLLTVQILDPEGKPKKANIRDNGDGTYTVSYLPDMSGRYTITIKYGGDEIPYSPFRIHALPTGDASKCLVTVSIGGHGLGACLGPRIQIGQETVITVDAKAAGEGKVTCTVSTPDGAELDVDVVENHDGTFDIYYTAPEPGKYVITIRFGGEHIPNSPFHVLATEEPVVPVEPMESMLRPFNLVIPFAVQKGELTGEVRMPSGKTARPNITDNKDGTITVRYAPTEKGLHQMGIKYDGNHIPGSPLQFYVDAINSRHVSAYGPGLSHGMVNKPATFTIVTKDAGEGGLSLAVEGPSKAEITCKDNKDGTCTVSYLPTAPGDYSIIVRFDDKHIPGSPFTAKITGDDSMRTSQLNVGTSTDVSLKITESDLSQLTASIRAPSGNEEPCLLKRLPNRHIGISFTPKEVGEHVVSVRKSGKHVTNSPFKILVGPSEIGDASKVRVWGKGLSEGHTFQVAEFIVDTRNAGYGGLGLSIEGPSKVDINCEDMEDGTCKVTYCPTEPGTYIINIKFADKHVPGSPFTVKVTGEGRMKESITRRRQAPSIATIGSTCDLNLKIPGNWFQMVSAQERLTRTFTRSSHTYTRTERTEISKTRGGETKREVRVEESTQVGGDPFPAVFGDFLGRERLGSFGSITRQQEGEASSQDMTAQVTSPSGKVEAAEIVEGEDSAYSVRFVPQEMGPHTVAVKYRGQHVPGSPFQFTVGPLGEGGAHKVRAGGTGLERGVAGVPAEFSIWTREAGAGGLSIAVEGPSKAEIAFEDRKDGSCGVSYVVQEPGDYEVSIKFNDEHIPDSPFVVPVASLSDDARRLTVTSLQETGLKVNQPASFAVQLNGARGVIDARVHTPSGAVEECYVSELDSDKHTIRFIPHENGVHSIDVKFNGAHIPGSPFKIRVGEQSQAGDPGLVSAYGPGLEGGTTGVSSEFIVNTLNAGSGALSVTIDGPSKVQLDCRECPEGHVVTYTPMAPGNYLIAIKYGGPQHIVGSPFKAKVTGPRLSGGHSLHETSLVWSLWWLQPQSFKDLERKAQSEKKTAPEPAGVAWHMDRPERCALHPSQAPRGPDFSLTVSFFKMVARLCPMGGLFYTLRGPAF

SEQ ID NO: 914908 - protein, 2346 aa, Homo sapiens
MMNNSGYSDAGLGLGDETDEMPSTEKDLAEDAPWKKIQQNTFTRWCNEHLKCVGKRLTDLQRDLSDGLRLIALLEVLSQKRMYRKFHPRPNFRQMKLENVSVALEFLEREHIKLVSIDSKAIVDGNLKLILGLIWTLILHYSISMPMWEDEDDEDARKQTPKQRLLGWIQNKVPQLPITNFNRDWQDGKALGALVDNCAPGLCPDWEAWDPNQPVENAREAMQQADDWLGVPQVIAPEEIVDPNVDEHSVMTYLSQFPKAKLKPGAPVRSKQLNPKKAIAYGPGIEPQGNTVLQPAHFTVQTVDAGVGEVLVYIEDPEGHTEEAKVVPNNDKDRTYAVSYVPKVAGLHKVTVLFAGQNIERSPFEVNVGMALGDANKVSARGPGLEPVGNVANKPTYFDIYTAGAGTGDVAVVIVDPQGRRDTVEVALEDKGDSTFRCTYRPAMEGPHTVHVAFAGAPITRSPFPVHVSEACNPNACRASGRGLQPKGVRVKEVADFKVFTKGAGSGELKVTVKGPKGTEEPVKVREAGDGVFECEYYPVVPGKYVVTITWGGYAIPRSPFEVQVSPEAGVQKVRAWGPGLETGQVGKSADFVVEAIGTEVGTLGFSIEGPSQAKIECDDKGDGSCDVRYWPTEPGEYAVHVICDDEDIRDSPFIAHILPAPPDCFPDKVKAFGPGLEPTGCIVDKPAEFTIDARAAGKGDLKLYAQDADGCPIDIKVIPNGDGTFRCSYVPTKPIKHTIIISWGGVNVPKSPFRVNVGEGSHPERVKVYGPGVEKTGLKANEPTYFTVDCSEAGQGDVSIGIKCAPGVVGPAEADIDFDIIKNDNDTFTVKYTPPGAGRYTIMVLFANQEIPASPFHIKVDPSHDASKVKAEGPGLNRTGVEVGKPTHFTVLTKGAGKAKLDVQFAGTAKGEVVRDFEIIDNHDYSYTVKYTAVQQGNMAVTVTYGGDPVPKSPFVVNVAPPLDLSKIKVQGLNSKVAVGQEQAFSVNTRGAGGQGQLDVRMTSPSRRPIPCKLEPGGGAEAQAVRYMPPEEGPYKVDITYDGHPVPGSPFAVEGVLPPDPSKVCAYGPGLKGGLVGTPAPFSIDTKGAGTGGLGLTVEGPCEAKIECQDNGDGSCAVSYLPTEPGEYTINILFAEAHIPGSPFKATIRPVFDPSKVRASGPGLERGKVGEAATFTVDCSEAGEAELTIEILSDAGVKAEVLIHNNADGTYHITYSPAFPGTYTITIKYGGHPVPKFPTRVHVQPAVDTSGVKVSGPGVEPHGVLREVTTEFTVDARSLTATGGNHVTARVLNPSGAKTDTYVTDNGDGTYRVQYTAYEEGVHLVEVLYDEVAVPKSPFRVGVTEGCDPTRVRAFGPGLEGGLVNKANRFTVETRGAGTGGLGLAIEGPSEAKMSCKDNKDGSCTVEYIPFTPGDYDVNITFGGRPIPGSPFRVPVKDVVDPGKVKCSGPGLGAGVRARVPQTFTVDCSQAGRAPLQVAVLGPTGVAEPVEVRDNGDGTHTVHYTPATDGPYTVAVKYADQEVPRSPFKIKVLPAHDASKVRASGPGLNASGIPASLPVEFTIDARDAGEGLLTVQILDPEGKPKKANIRDNGDGTYTVSYLPDMSGRYTITIKYGGDEIPYSPFRIHALPTGDASKCLVTVSIGGHGLGACLGPRIQIGQETVITVDAKAAGEGKVTCTVSTPDGAELDVDVVENHDGTFDIYYTAPEPGKYVITIRFGGEHIPNSPFHVLATEEPVVPVEPMESMLRPFNLVIPFAVQKGELTGEVRMPSGKTARPNITDNKDGTITVRYAPTEKGLHQMGIKYDGNHIPGSPLQFYVDAINSRHVSAYGPGLSHGMVNKPATFTIVTKDAGEGGLSLAVEGPSKAEITCKDNKDGTCTVSYLPTAPGDYSIIVRFDDKHIPGSPFTAKITGDDSMRTSQLNVGTSTDVSLKITESDLSQLTASIRAPSGNEEPCLLKRLPNRHIGISFTPKEVGEHVVSVRKSGKHVTNSPFKILVGPSEIGDASKVRVWGKGLSEGHTFQVAEFIVDTRNAGYGGLGLSIEGPSKVDINCEDMEDGTCKVTYCPTEPGTYIINIKFADKHVPGSPFTVKVTGEGRMKESITRRRQAPSIATIGSTCDLNLKIPGNWFQMVSAQERLTRTFTRSSHTYTRTERTEISKTRGGETKREVRVEESTQVGGDPFPAVFGDFLGRERLGSFGSITRQQEGEASSQDMTAQVTSPSGKVEAAEIVEGEDSAYSVRFVPQEMGPHTVAVKYRGQHVPGSPFQFTVGPLGEGGAHKVRAGGTGLERGVAGVPAEFSIWTREAGAGGLSIAVEGPSKAEIAFEDSQRWLLRRLLCRPGTR

SEQ ID NO: 914909 - protein, 548 aa, Homo sapiens
MMNNSGYSDAGLGLGDETDEMPSTEKDLAEDAPWKKIQQNTFTRWCNEHLKCVGKRLTDLQRDLSDGLRLIALLEVLSQKRMYRKFHPRPNFRQMKLENVSVALEFLEREHIKLVSIDSKAIVDGNLKLILGLIWTLILHYSISMPMWEDEDDEDARKQTPKQRLLGWIQNKVPQLPITNFNRDWQDGKALGALVDNCAPGLCPDWEAWDPNQPVENAREAMQQADDWLGVPQVIAPEEIVDPNVDEHSVMTYLSQFPKAKLKPGAPVRSKQLNPKKAIAYGPGIEPQGNTVLQPAHFTVQTVDAGVGEVLVYIEDPEGHTEEAKVVPNNDKDRTYAVSYVPKVAGLHKVTVLFAGQNIERSPFEVNVGMALGDANKVSARGPGLEPVGNVANKPTYFDIYTAGAGTGDVAVVIVDPQGRRDTVEVALEDKGDSTFRCTYRPAMEGPHTVHVAFAGAPITRSPFPVHVSEACNPNACRASGRGLQPKGVRVKEVADFKVFTKGAGSGELKVTVKGPKGTEEPALLRPCPQTCTVPEEVGRWRPSIPRR

SEQ ID NO: 914910 - protein, 92 aa, Homo sapiens
GLSEGHTFQVAEFIVDTRNAGTSCPREPPFQRVPPTGTCPRPAQHPLGRTLSSLKLPDQSASGFAFWGPLRESEWPRISSLPFKRKLSCPEF

SEQ ID NO: 914911 - protein, 2692 aa, Homo sapiens; identical to SEQ ID NO: 914904

SEQ ID NO: 914912 - protein, 2722 aa, Homo sapiens
MMNNSGYSDAGLGLGDETDEMPSTEKDLAEDAPWKKIQQNTFTRWCNEHLKCVGKRLTDLQRDLSDGLRLIALLEVLSQKRMYRKFHPRPNFRQMKLENVSVALEFLEREHIKLVSIDSKAIVDGNLKLILGLIWTLILHYSISMPMWEDEDDEDARKQTPKQRLLGWIQNKVPQLPITNFNRDWQDGKALGALVDNCAPGLCPDWEAWDPNQPVENAREAMQQADDWLGVPQVIAPEEIVDPNVDEHSVMTYLSQFPKAKLKPGAPVRSKQLNPKKAIAYGPGIEPQGNTVLQPAHFTVQTVDAGVGEVLVYIEDPEGHTEEAKVVPNNDKDRTYAVSYVPKVAGLHKVTVLFAGQNIERSPFEVNVGMALGDANKVSARGPGLEPVGNVANKPTYFDIYTAGAGTGDVAVVIVDPQGRRDTVEVALEDKGDSTFRCTYRPAMEGPHTVHVAFAGAPITRSPFPVHVSEACNPNACRASGRGLQPKGVRVKEVADFKVFTKGAGSGELKVTVKGPKGTEEPVKVREAGDGVFECEYYPVVPGKYVVTITWGGYAIPRSPFEVQVSPEAGVQKVRAWGPGLETGQVGKSADFVVEAIGTEVGTLGFSIEGPSQAKIECDDKGDGSCDVRYWPTEPGEYAVHVICDDEDIRDSPFIAHILPAPPDCFPDKVWSQLTHTCPGGGASWFSSPPQLSLLPSAQVKAFGPGLEPTGCIVDKPAEFTIDARAAGKGDLKLYAQDADGCPIDIKVIPNGDGTFRCSYVPTKPIKHTIIISWGGVNVPKSPFRVNVGEGSHPERVKVYGPGVEKTGLKANEPTYFTVDCSEAGQGDVSIGIKCAPGVVGPAEADIDFDIIKNDNDTFTVKYTPPGAGRYTIMVLFANQEIPASPFHIKVDPSHDASKVKAEGPGLNRTGVEVGKPTHFTVLTKGAGKAKLDVQFAGTAKGEVVRDFEIIDNHDYSYTVKYTAVQQGNMAVTVTYGGDPVPKSPFVVNVAPPLDLSKIKVQGLNSKVAVGQEQAFSVNTRGAGGQGQLDVRMTSPSRRPIPCKLEPGGGAEAQAVRYMPPEEGPYKVDITYDGHPVPGSPFAVEGVLPPDPSKVCAYGPGLKGGLVGTPAPFSIDTKGAGTGGLGLTVEGPCEAKIECQDNGDGSCAVSYLPTEPGEYTINILFAEAHIPGSPFKATIRPVFDPSKVRASGPGLERGKVGEAATFTVDCSEAGEAELTIEILSDAGVKAEVLIHNNADGTYHITYSPAFPGTYTITIKYGGHPVPKFPTRVHVQPAVDTSGVKVSGPGVEPHGVLREVTTEFTVDARSLTATGGNHVTARVLNPSGAKTDTYVTDNGDGTYRVQYTAYEEGVHLVEVLYDEVAVPKSPFRVGVTEGCDPTRVRAFGPGLEGGLVNKANRFTVETRGAGTGGLGLAIEGPSEAKMSCKDNKDGSCTVEYIPFTPGDYDVNITFGGRPIPGSPFRVPVKDVVDPGKVKCSGPGLGAGVRARVPQTFTVDCSQAGRAPLQVAVLGPTGVAEPVEVRDNGDGTHTVHYTPATDGPYTVAVKYADQEVPRSPFKIKVLPAHDASKVRASGPGLNASGIPASLPVEFTIDARDAGEGLLTVQILDPEGKPKKANIRDNGDGTYTVSYLPDMSGRYTITIKYGGDEIPYSPFRIHALPTGDASKCLVTVSIGGHGLGACLGPRIQIGQETVITVDAKAAGEGKVTCTVSTPDGAELDVDVVENHDGTFDIYYTAPEPGKYVITIRFGGEHIPNSPFHVLATEEPVVPVEPMESMLRPFNLVIPFAVQKGELTGEVRMPSGKTARPNITDNKDGTITVRYAPTEKGLHQMGIKYDGNHIPGSPLQFYVDAINSRHVSAYGPGLSHGMVNKPATFTIVTKDAGEGGLSLAVEGPSKAEITCKDNKDGTCTVSYLPTAPGDYSIIVRFDDKHIPGSPFTAKITGDDSMRTSQLNVGTSTDVSLKITESDLSQLTASIRAPSGNEEPCLLKRLPNRHIGISFTPKEVGEHVVSVRKSGKHVTNSPFKILVGPSEIGDASKVRVWGKGLSEGHTFQVAEFIVDTRNAGYGGLGLSIEGPSKVDINCEDMEDGTCKVTYCPTEPGTYIINIKFADKHVPGSPFTVKVTGEGRMKESITRRRQAPSIATIGSTCDLNLKIPGNWFQMVSAQERLTRTFTRSSHTYTRTERTEISKTRGGETKREVRVEESTQVGGDPFPAVFGDFLGRERLGSFGSITRQQEGEASSQDMTAQVTSPSGKVEAAEIVEGEDSAYSVRFVPQEMGPHTVAVKYRGQHVPGSPFQFTVGPLGEGGAHKVRAGGTGLERGVAGVPAEFSIWTREAGAGGLSIAVEGPSKAEIAFEDRKDGSCGVSYVVQEPGDYEVSIKFNDEHIPDSPFVVPVASLSDDARRLTVTSLQETGLKVNQPASFAVQLNGARGVIDARVHTPSGAVEECYVSELDSDKHTIRFIPHENGVHSIDVKFNGAHIPGSPFKIRVGEQSQAGDPGLVSAYGPGLEGGTTGVSSEFIVNTLNAGSGALSVTIDGPSKVQLDCRECPEGHVVTYTPMAPGNYLIAIKYGGPQHIVGSPFKAKVTGPRLSGGHSLHETSTVLVETVTKSSSSRGSSYSSIPKFSSDASKVVTRGPGLSQAFVGQKNSFTVDCSKAGTNMMMVGVHGPKTPCEEVYVKHMGNRVYNVTYTVKEKGDYILIVKWGDESVPGSPFKVKVP

SEQ ID NO: 914913 - protein, 820 aa, Homo sapiens
KLNKTPIPQTKFETTGLEEGVEYEFRVAAENIVGIGKPVAKISDDSMRTSQLNVGTSTDVSLKITESDLSQLTASIRAPSGNEEPCLLKRLPNRHIGISFTPKEVGEHVVSVRKSGKHVTNSPFKILVGPSEIGDASKVRVWGKGLSEGHTFQVAEFIVDTRNAGYGGLGLSIEGPSKVDINCEDMEDGTCKVTYCPTEPGTYIINIKFADKHVPGSPFTVKVTGEGRMKESITRRRQAPSIATIGSTCDLNLKIPGNWFQMVSAQERLTRTFTRSSHTYTRTERTEISKTRGGETKREVRVEESTQVGGDPFPAVFGDFLGRERLGSFGSITRQQEGEASSQDMTAQVTSPSGKVEAAEIVEGEDSAYSVRFVPQEMGPHTVAVKYRGQHVPGSPFQFTVGPLGEGGAHKVRAGGTGLERGVAGVPAEFSIWTREAGAGGLSIAVEGPSKAEIAFEDRKDGSCGVSYVVQEPGDYEVSIKFNDEHIPDSPFVVPVASLSDDARRLTVTSLQETGLKVNQPASFAVQLNGARGVIDARVHTPSGAVEECYVSELDSDKHTIRFIPHENGVHSIDVKFNGAHIPGSPFKIRVGEQSQAGDPGLVSAYGPGLEGGTTGVSSEFIVNTLNAGSGALSVTIDGPSKVQLDCRECPEGHVVTYTPMAPGNYLIAIKYGGPQHIVGSPFKAKVTGPRLSGGHSLHETSTVLVETVTKSSSSRGSSYSSIPKFSSDASKVVTRGPGLSQAFVGQKNSFTVDCSKAGTNMMMVGVHGPKTPCEEVYVKHMGNRVYNVTYTVKEKGDYILIVKWGDESVPGSPFKVKVP

SEQ ID NO: 914914 - protein, 156 aa, Homo sapiens
GRVGRPTRPKPQHIVGSPFKAKVTGPRLSGGHSLHETSTVLVETVTKSSSSRGSSYSSIPKFSSDASKVVTRGPGLSQAFVGQKNSFTVDCSKAGTNMMMVGVHGPKTPCEEVYVKHMGNRVYNVTYTVKEKGDYILIVKWGDESVPGSPFKVKVP

SEQ ID NO: 914915 - protein, 99 aa, Homo sapiens
GGDLEDPFSDEVVTRGPGLSQAFVGQKNSFTVDCSKAGTNMMMVGVHGPKTPCEEVYVKHMGNRVYNVTYTVKEKGDYILIVKWGDESVPGSPFKVKVP

SEQ ID NO: 914916 - protein, 2465 aa, Homo sapiens
MMNNSGYSDAGLGLGDETDEMPSTEKDLAEDAPWKKIQQNTFTRWCNEHLKCVGKRLTDLQRDLSDGLRLIALLEVLSQKRMYRKFHPRPNFRQMKLENVSVALEFLEREHIKLVSIDSKAIVDGNLKLILGLIWTLILHYSISMPMWEDEDDEDARKQTPKQRLLGWIQNKVPQLPITNFNRDWQDGKALGALVDNCAPGLCPDWEAWDPNQPVENAREAMQQADDWLGVPQVIAPEEIVDPNVDEHSVMTYLSQFPKAKLKPGAPVRSKQLNPKKAIAYGPGIEPQGNTVLQPAHFTVQTVDAGVGEVLVYIEDPEGHTEEAKVVPNNDKDRTYAVSYVPKVAGLHKVTVLFAGQNIERSPFEVNVGMALGDANKVSARGPGLEPVGNVANKPTYFDIYTAGAGTGDVAVVIVDPQGRRDTVEVALEDKGDSTFRCTYRPAMEGPHTVHVAFAGAPITRSPFPVHVSEACNPNACRASGRGLQPKGVRVKEVADFKVFTKGAGSGELKVTVKGPKGTEEPVKVREAGDGVFECEYYPVVPGKYVVTITWGGYAIPRSPFEVQVSPEAGVQKVRAWGPGLETGQVGKSADFVVEAIGTEVGTLGFSIEGPSQAKIECDDKGDGSCDVRYWPTEPGEYAVHVICDDEDIRDSPFIAHILPAPPDCFPDKVKAFGPGLEPTGCIVDKPAEFTIDARAAGKGDLKLYAQDADGCPIDIKVIPNGDGTFRCSYVPTKPIKHTIIISWGGVNVPKSPFRVNVGEGSHPERVKVYGPGVEKTGLKANEPTYFTVDCSEAGQGDVSIGIKCAPGVVGPAEADIDFDIIKNDNDTFTVKYTPPGAGRYTIMVLFANQEIPASPFHIKVDPSHDASKVKAEGPGLNRTGVEVGKPTHFTVLTKGAGKAKLDVQFAGTAKGEVVRDFEIIDNHDYSYTVKYTAVQQGNMAVTVTYGGDPVPKSPFVVNVAPPLDLSKIKVQGLNSKVAVGQEQAFSVNTRGAGGQGQLDVRMTSPSRRPIPCKLEPGGGAEAQAVRYMPPEEGPYKVDITYDGHPVPGSPFAVEGVLPPDPSKVCAYGPGLKGGLVGTPAPFSIDTKGAGTGGLGLTVEGPCEAKIECQDNGDGSCAVSYLPTEPGEYTINILFAEAHIPGSPFKATIRPVFDPSKVRASGPGLERGKVGEAATFTVDCSEAGEAELTIEILSDAGVKAEVLIHNNADGTYHITYSPAFPGTYTITIKYGGHPVPKFPTRVHVQPAVDTSGVKVSGPGVEPHGVLREVTTEFTVDARSLTATGGNHVTARVLNPSGAKTDTYVTDNGDGTYRVQYTAYEEGVHLVEVLYDEVAVPKSPFRVGVTEGCDPTRVRAFGPGLEGGLVNKANRFTVETRGAGTGGLGLAIEGPSEAKMSCKDNKDGSCTVEYIPFTPGDYDVNITFGGRPIPGSPFRVPVKDVVDPGKVKCSGPGLGAGVRARVPQTFTVDCSQAGRAPLQVAVLGPTGVAEPVEVRDNGDGTHTVHYTPATDGPYTVAVKYADQEVPRSPFKIKVLPAHDASKVRASGPGLNASGIPASLPVEFTIDARDAGEGLLTVQILDPEGKPKKANIRDNGDGTYTVSYLPDMSGRYTITIKYGGDEIPYSPFRIHALPTGDASKCLVTVSIGGHGLGACLGPRIQIGQETVITVDAKAAGEGKVTCTVSTPDGAELDVDVVENHDGTFDIYYTAPEPGKYVITIRFGGEHIPNSPFHVLATEEPVVPVEPMESMLRPFNLVIPFAVQKGELTGEVRMPSGKTARPNITDNKDGTITVRYAPTEKGLHQMGIKYDGNHIPGSPLQFYVDAINSRHVSAYGPGLSHGMVNKPATFTIVTKDAGEGGLSLAVEGPSKAEITCKDNKDGTCTVSYLPTAPGDYSIIVRFDDKHIPGSPFTAKITGDDSMRTSQLNVGTSTDVSLKITESDLSQLTASIRAPSGNEEPCLLKRLPNRHIGISFTPKEVGEHVVSVRKSGKHVTNSPFKILVGPSEIGDASKVRVWGKGLSEGHTFQVAEFIVDTRNAGYGGLGLSIEGPSKVDINCEDMEDGTCKVTYCPTEPGTYIINIKFADKHVPGSPFTVKVTGEGRMKESITRRRQAPSIATIGSTCDLNLKIPGNWFQMVSAQERLTRTFTRSSHTYTRTERTEISKTRGGETKREVRVEESTQVGGDPFPAVFGDFLGRERLGSFGSITRQQEGEASSQDMTAQVTSPSGKVEAAEIVEGEDSAYSVRFVPQEMGPHTVAVKYRGQHVPGSPFQFTVGPLGEGGAHKVRAGGTGLERGVAGVPAEFSIWTREAGAGGLSIAVEGPSKAEIAFEDRKDGSCGVSYVVQEPGDYEVSIKFNDEHIPDSPFVVPVASLSDDARRLTVTSLQETGLKVNQPASFAVQLNGARGVIDARVHTPSGAVEECYVSELDSDKHTIRFIPHENGVHSIDVKFNGPMGGLFYTLRGPAF

SEQ ID NO: 914917 - protein, 561 aa, Homo sapiens
MCGIWALFGSDDCLSVQCLSAMKIAHRGPDAFRFENVNGYTNCCFGFHRLAVVDPLFGMQPIRVKKYPYLWLCYNGEIYNHKKMQQHFEFEYQTKVDGEIILHLYDKGGIEQTICMLDGVFAFVLLDTANKKVFLGRDTYGVRPLFKAMTEDGFLAVCSEAKGLVTLKHSATPFLKVEPFLPGHYEVLDLKPNGKVASVEMVKYHHCRDEPLHALYDNVEKLFPGFEIETVKNNLRILFNNAVKKRLMTDRRIGCLLSGGLDSSLVAATLLKQLKEAQVQYPLQTFAIGMEDSPDLLAARKVADHIGSEHYEVLFNSEEGIQALDEVIFSLETYDITTVRASVGMYLISKYIRKNTDSVVIFSGEGSDELTQGYIYFHKAPSPEKAEEESERLLRELYLFDVLRADRTTAAHGLELRVPFLDHRFSSYYLSLPPEMRIPKNGIEKHLLRETFEDSNLIPKEILWRPKEAFSDGITSVKNSWFKILQEYVEHQVDDAMMANAAQKFPFNTPKTKEGYYYRQVFERHYPGRADWLSHYWMPKWINATDPSARTLTHYKSAVKA

SEQ ID NO: 914918 - protein, 258 aa, Homo sapiens
MVKYHHCRDEPLHALYDNVEKLFPGFEIETVKNNLRILFNNAVKKRLMTDRRIGCLLSGGLDSSLVAATLLKQLKEAQVQYPLQTFAIGMEDSPDLLAARKVADHIGSEHYEVLFNSEEGIQALDEVIFSLETYDITTVRASVGMYLISKYIRKNTDSVVIFSGEGSDELTQGYIYFHKAPSPEKAEEESERLLRELYLFDVLRADRTTAAHGLELRVPFLDHRFSSYYLSLPPEMRIPKRNGILRWGEPLGGAWGAP

SEQ ID NO: 914919 - protein, 102 aa, Homo sapiens
RAEFGRTKEAFSDGITSVKNSWFKILQEYVEHQVDDAMMANAAQKFPFNTPKTKEGYYYRQVFERHYPGRADWLSHYWMPKWINATDPSARTLTHYKSAVKA

SEQ ID NO: 914920 - protein, 561 aa, Homo sapiens; identical to SEQ ID NO: 914917

SEQ ID NO: 914921 - protein, 561 aa, Homo sapiens; identical to SEQ ID NO: 914917

SEQ ID NO: 914922 - protein, 561 aa, Homo sapiens; identical to SEQ ID NO: 914917

SEQ ID NO: 914923 - protein, 540 aa, Homo sapiens
MKIAHRGPDAFRFENVNGYTNCCFGFHRLAVVDPLFGMQPIRVKKYPYLWLCYNGEIYNHKKMQQHFEFEYQTKVDGEIILHLYDKGGIEQTICMLDGVFAFVLLDTANKKVFLGRDTYGVRPLFKAMTEDGFLAVCSEAKGLVTLKHSATPFLKVEPFLPGHYEVLDLKPNGKVASVEMVKYHHCRDEPLHALYDNVEKLFPGFEIETVKNNLRILFNNAVKKRLMTDRRIGCLLSGGLDSSLVAATLLKQLKEAQVQYPLQTFAIGMEDSPDLLAARKVADHIGSEHYEVLFNSEEGIQALDEVIFSLETYDITTVRASVGMYLISKYIRKNTDSVVIFSGEGSDELTQGYIYFHKAPSPEKAEEESERLLRELYLFDVLRADRTTAAHGLELRVPFLDHRFSSYYLSLPPEMRIPKNGIEKHLLRETFEDSNLIPKEILWRPKEAFSDGITSVKNSWFKILQEYVEHQVDDAMMANAAQKFPFNTPKTKEGYYYRQVFERHYPGRADWLSHYWMPKWINATDPSARTLTHYKSAVKA

SEQ ID NO: 914924 - protein, 458 aa, Homo sapiens
MCGIWALFGSDDCLSVQCLSAMKIAHRGPDAFRFENVNGYTNCCFGFHRLAVVDPLFGMQPIRVKKYPYLWLCYNGEIYNHKKMQQHFEFEYQTKVDGEIILHLYDKGGIEQTICMLDGVFAFVLLDTANKKVFLGRDTYGVRPLFKAMTEDGFLAVCSEAKGLVTLKHSATPFLKVEPFLPGHYEVLDLKPNGKVASVEMVKYHHCRDEPLHALYDNVEKLFPGFEIETVKNNLRILFNNAVKKRLMTDRRIGCLLSGGLDSSLVAATLLKQLKEAQVQYPLQTFAIGMEDSPDLLAARKVADHIGSEHYEVLFNSEEGIQALDEVIFSLETYDITTVRASVGMYLISKYIRKNTDSVVIFSGEGSDELTQGYIYFHKAPSPEKAEEESERLLRELYLFDVLRADRTTAAHGLELRVPFLDHRFSSYYLSLPPEMRIPKRNGILRWGEPLGGAWGAP

SEQ ID NO: 914925 - protein, 493 aa, Homo sapiens
MRGYEEVVSYTDRKNMQQHFEFEYQTKVDGEIILHLYDKGGIEQTICMLDGVFAFVLLDTANKKVFLGRDTYGVRPLFKAMTEDGFLAVCSEAKGLVTLKHSATPFLKVEPFLPGHYEVLDLKPNGKVASVEMVKYHHCRDEPLHALYDNVEKLFPGFEIETVKNNLRILFNNAVKKRLMTDRRIGCLLSGGLDSSLVAATLLKQLKEAQVQYPLQTFAIGMEDSPDLLAARKVADHIGSEHYEVLFNSEEGIQALDEVIFSLETYDITTVRASVGMYLISKYIRKNTDSVVIFSGEGSDELTQGYIYFHKAPSPEKAEEESERLLRELYLFDVLRADRTTAAHGLELRVPFLDHRFSSYYLSLPPEMRIPKNGIEKHLLRETFEDSNLIPKEILWRPKEAFSDGITSVKNSWFKILQEYVEHQVDDAMMANAAQKFPFNTPKTKEGYYYRQVFERHYPGRADWLSHYWMPKWINATDPSARTLTHYKSAVKA

SEQ ID NO: 914926 - protein, 380 aa, Homo sapiens
KLTARYEAGVVKGKVASVEMVKYHHCRDEPLHALYDNVEKLFPGFEIETVKNNLRILFNNAVKKRLMTDRRIGCLLSGGLDSSLVAATLLKQLKEAQVQYPLQTFAIGMEDSPDLLAARKVADHIGSEHYEVLFNSEEGIQALDEVIFSLETYDITTVRASVGMYLISKYIRKNTDSVVIFSGEGSDELTQGYIYFHKAPSPEKAEEESERLLRELYLFDVLRADRTTAAHGLELRVPFLDHRFSSYYLSLPPEMRIPKNGIEKHLLRETFEDSNLIPKEILWRPKEAFSDGITSVKNSWFKILQEYVEHQVDDAMMANAAQKFPFNTPKTKEGYYYRQVFERHYPGRADWLSHYWMPKWINATDPSARTLTHYKSAVKA

SEQ ID NO: 914927 - protein, 361 aa, Homo sapiens
MVKYHHCRDEPLHALYDNVEKLFPGFEIETVKNNLRILFNNAVKKRLMTDRRIGCLLSGGLDSSLVAATLLKQLKEAQVQYPLQTFAIGMEDSPDLLAARKVADHIGSEHYEVLFNSEEGIQALDEVIFSLETYDITTVRASVGMYLISKYIRKNTDSVVIFSGEGSDELTQGYIYFHKAPSPEKAEEESERLLRELYLFDVLRADRTTAAHGLELRVPFLDHRFSSYYLSLPPEMRIPKNGIEKHLLRETFEDSNLIPKEILWRPKEAFSDGITSVKNSWFKILQEYVEHQVDDAMMANAAQKFPFNTPKTKEGYYYRQVFERHYPGRADWLSHYWMPKWINATDPSARTLTHYKSAVKA

SEQ ID NO: 914928 - protein, 281 aa, Homo sapiens
MCGIWALFGSDDCLSVQCLSAMKIAHRGPDAFRFENVNGYTNCCFGFHRLAVVDPLFGMQPIRVKKYPYLWLCYNGEIYNHKKMQQHFEFEYQTKVDGEIILHLYDKGGIEQTICMLDGVFAFVLLDTANKKVFLGRDTYGVRPLFKAMTEDGFLAVCSEAKGLVTLKHSATPFLKVEPFLPGHYEVLDLKPNGKVASVEMVKYHHCRDEPLHALYDNVEKLFPGFEIETVKNNLRILFNNAVKKRLMTDRRIGCLLSGGLDSSLVAATLLKQLKEAQERS

SEQ ID NO: 914929 - protein, 190 aa, Homo sapiens
IQSNGDSHAPSPEKAEEESERLLRELYLFDVLRADRTTAAHGLELRVPFLDHRFSSYYLSLPPEMRIPKNGIEKHLLRETFEDSNLIPKEILWRPKEAFSDGITSVKNSWFKILQEYVEHQVDDAMMANAAQKFPFNTPKTKEGYYYRQVFERHYPGRADWLSHYWMPKWINATDPSARTLTHYKSAVKA

SEQ ID NO: 914930 - protein, 163 aa, Homo sapiens
VRRRLSQDYVFAAHGLELRVPFLDHRFSSYYLSLPPEMRIPKNGIEKHLLRETFEDSNLIPKEILWRPKEAFSDGITSVKNSWFKILQEYVEHQVDDAMMANAAQKFPFNTPKTKEGYYYRQVFERHYPGRADWLSHYWMPKWINATDPSARTLTHYKSAVKA

SEQ ID NO: 914931 - protein, 332 aa, Homo sapiens
  misc_feature (332)..(332): Xaa can be any naturally occurring amino acid
MQQHFEFEYQTKVDGEIILHLYDKGGIEQTICMLDGVFAFVLLDTANKKVFLGRDTYGVRPLFKAMTEDGFLAVCSEAKGLVTLKHSATPFLKVEPFLPGHYEVLDLKPNGKVASVEMVKYHHCRDEPLHALYDNVEKLFPGFEIETVKNNLRILFNNAVKKRLMTDRRIGCLLSGGLDSSLVAATLLKQLKEAQVQYPLQTFAIGMEDSPDLLAARKVADHIGSEHYEVLFNSEEGIQALDEVIFSLETYDITTVRASVGMYLISKYIRKNTDSVVIFSGEGSDELTQGYIYFHKAPSPEKAEEESERLLRELYLFDVLRADRTTAAHGLX

SEQ ID NO: 914932 - protein, 561 aa, Homo sapiens; identical to SEQ ID NO: 914917

SEQ ID NO: 914933 - protein, 171 aa, Homo sapiens
CNDGKCSPENLFGYQIELTAAHGLELRVPFLDHRFSSYYLSLPPEMRIPKNGIEKHLLRETFEDSNLIPKEILWRPKEAFSDGITSVKNSWFKILQEYVEHQVDDAMMANAAQKFPFNTPKTKEGYYYRQVFERHYPGRADWLSHYWMPKWINATDPSARTLTHYKSAVKA

SEQ ID NO: 914934 - protein, 240 aa, Homo sapiens
MCGIWALFGSDDCLSVQCLSAMKIAHRGPDAFRFENVNGYTNCCFGFHRLAVVDPLFGMQPIRVKKYPYLWLCYNGEIYNHKKMQQHFEFEYQTKVDGEIILHLYDKGGIEQTICMLDGVFAFVLLDTANKKVFLGRDTYGVRPLFKAMTEDGFLAVCSEAKGLVTLKHSATPFLKVEPFLPGHYEVLDLKPNGKVASVEMVKYHHCRDEPLHALYDNVEKLFPGLGYKLCRATQDPLKA

SEQ ID NO: 914935 - protein, 401 aa, Homo sapiens [sequence omitted]

SEQ ID NO: 914936 - protein, 493 aa, Homo sapiens
MCGIWALFGSDDCLSVQCLSAMKIAHRGPDAFRFENVNGYTNCCFGFHRLAVVDPLFGMQPIRVKKYPYLWLCYNGEIYNHKKMQQHFEFEYQTKVDGEIILHLYDKGGIEQTICMLDGVFAFVLLDTANKKVFLGRDTYGVRPLFKAMTEDGFLAVCSEAKGLVTLKHSATPFLKVEPFLPGHYEVLDLKPNGKVASVEMVKYHHCRDEPLHALYDNVEKLFPGFEIETVKNNLRILFNNAVKKRLMTDRRIGCLLSGGLDSSLVAATLLKQLKEAQVQYPLQTFAIGMEDSPDLLAARKVADHIGSEHYEVLFNSEEGIQALDEVIFSLETYDITTVRASVGMYLISKYIRKNTDSVVIFSGEGSDELTQGYIYFHKAPSPEKAEEESERLLRELYLFDVLRADRTTAAHGLELRVPFLDHRFSSYYLSLPPEMRIPKNGIEKHLLRETFEDSNLIPKEILWRPKEAFSDGITSVKNSWFKILQEYVEHQV

SEQ ID NO: 914937 - protein, 540 aa, Homo sapiens; identical to SEQ ID NO: 914923

SEQ ID NO: 914938 - protein, 452 aa, Homo sapiens
MCGIWALFGSDDCLSVQCLSAMKIAHRGPDAFRFENVNGYTNCCFGFHRLAVVDPLFGMQPIRVKKYPYLWLCYNGEIYNHKKMQQHFEFEYQTKVDGEIILHLYDKGGIEQTICMLDGVFAFVLLDTANKKVFLGRDTYGVRPLFKAMTEDGFLAVCSEAKGLVTLKHSATPFLKVEPFLPGHYEVLDLKPNGKVASVEMVKYHHCRDEPLHALYDNVEKLFPGFEIETVKNNLRILFNNAVKKRLMTDRRIGCLLSGGLDSSLVAATLLKQLKEAQVQYPLQTFAIGMEDSPDLLAARKVADHIGSEHYEVLFNSEEGIQALDEVIFSLETYDITTVRASVGMYLISKYIRKNTDSVVIFSGEGSDELTQGYIYFHKAPSPEKAEEESERLLRELYLFDVLRADRTTAAHGLELRVPFLDHRFSSYYLSLPPEMRIPKVISSQDPVKMTT

SEQ ID NO: 914939 - protein, 395 aa, Homo sapiens [sequence omitted]

SEQ ID NO: 914940 - protein, 362 aa, Homo sapiens
RVYKLLYPTSFGRVGRPTRPGETLSRFEIETVKNNLRILFNNAVKKRLMTDRRIGCLLSGGLDSSLVAATLLKQLKEAQVQYPLQTFAIGMEDSPDLLAARKVADHIGSEHYEVLFNSEEGIQALDEVIFSLETYDITTVRASVGMYLISKYIRKNTDSVVIFSGEGSDELTQGYIYFHKAPSPEKAEEESERLLRELYLFDVLRADRTTAAHGLELRVPFLDHRFSSYYLSLPPEMRIPKNGIEKHLLRETFEDSNLIPKEILWRPKEAFSDGITSVKNSWFKILQEYVEHQVDDAMMANAAQKFPFNTPKTKEGYYYRQVFERHYPGRADWLSHYWMPKWINATDPSARTLTHYKSAVKA

SEQ ID NO: 914941 - protein, 274 aa, Homo sapiens
MCGIWALFGSDDCLSVQCLSAMKIAHRGPDAFRFENVNGYTNCCFGFHRLAVVDPLFGMQPIRVKKYPYLWLCYNGEIYNHKKMQQHFEFEYQTKVDGEIILHLYDKGGIEQTICMLDGVFAFVLLDTANKKVFLGRDTYGVRPLFKAMTEDGFLAVCSEAKGLVTLKHSATPFLKVEPFLPGHYEVLDLKPNGKVASVEMVKYHHCRDEPLHALYDNVEKLFPGLGLHRAEAPRGPFLLCRTLWCPTGGRSPGGTPRCGPVPLTAVLPSVDAL

SEQ ID NO: 914942 - protein, 161 aa, Homo sapiens
IRYSIDRTTAVHGLELRVPFLDHRFSSYYLSLPPEMRIPKNGIEKHLLRETFEDSNLIPKEILWRPKEAFSDGITSVKNSWFKILQEYVEHQVDDAMMANAAQKFPFNTPKTKEGYYYRQVFERHYPGRADWLSHYWMPKWINATDPSARTLTHYKSAVKA

SEQ ID NO: 914943 - protein, 435 aa, Homo sapiens
MEMEKEFEQIDKSGSWAAIYQDIRHEASDFPCRVAKLPKNKNRNRYRDVSPFDHSRIKLHQEDNDYINASLIKMEEAQRSYILTQGPLPNTCGHFWEMVWEQKSRGVVMLNRVMEKGSLKCAQYWPQKEEKEMIFEDTNLKLTLISEDIKSYYTVRQLELENLTTQETREILHFHYTTWPDFGVPESPASFLNFLFKVRESGSLSPEHGPVVVHCSAGIGRSGTFCLADTCLLLMDKRKDPSSVDIKKVLLEMRKFRMGLIQTADQLRFSYLAVIEGAKFIMGDSSVQDQWKELSHEDLEPPPEHIPPPPRPPKRILEPHNGKCREFFPNHQWVKEETQEDKDCPIKEEKGSPLNAAPYGIESMSQDTEVRSRVVGGSLRGAQAASPAKGEPSLPEKDEDHALSYWKPFLVNMCVATVLTAGAYLCYRFLFNSNT

SEQ ID NO: 914944 - protein, 432 aa, Homo sapiens
MEMEKEFEQIDKSGSWAAIYQDIRHEASDFPCRVAKLPKNKNRNRYRDVSPFDHSRIKLHQEDNDYINASLIKMEEAQRSYILTQGPLPNTCGHFWEMVWEQKSRGVVMLNRVMEKGSLKCAQYWPQKEEKEMIFEDTNLKLTLISEDIKSYYTVRQLELENLTTQETREILHFHYTTWPDFGVPESPASFLNFLFKVRESGSLSPEHGPVVVHCSAGIGRSGTFCLADTCLLLMDKRKDPSSVDIKKVLLEMRKFRMGLIQTADQLRFSYLAVIEGAKFIMGDSSVQDQWKELSHEDLEPPPEHIPPPPRPPKRILEPHNGKCREFFPNHQWVKEETQEDKDCPIKEEKGSPLNAAPYGIESMSQDTEVRSRVVGGSLRGAQAASPAKGEPSLPEKDEDHALSYWKPFLVNMCVATVLTAGAYLCYRVCFH

SEQ ID NO: 914945 - protein, 432 aa, Homo sapiens; identical to SEQ ID NO: 914944

SEQ ID NO: 914946 - protein, 435 aa, Homo sapiens; identical to SEQ ID NO: 914943

SEQ ID NO: 914947 - protein, 432 aa, Homo sapiens; identical to SEQ ID NO: 914944

SEQ ID NO: 914948 - protein, 426 aa, Homo sapiens
VDSEESQFDGDSDIRHEASDFPCRVAKLPKNKNRNRYRDVSPFDHSRIKLHQEDNDYINASLIKMEEAQRSYILTQGPLPNTCGHFWEMVWEQKSRGVVMLNRVMEKGSLKCAQYWPQKEEKEMIFEDTNLKLTLISEDIKSYYTVRQLELENLTTQETREILHFHYTTWPDFGVPESPASFLNFLFKVRESGSLSPEHGPVVVHCSAGIGRSGTFCLADTCLLLMDKRKDPSSVDIKKVLLEMRKFRMGLIQTADQLRFSYLAVIEGAKFIMGDSSVQDQWKELSHEDLEPPPEHIPPPPRPPKRILEPHNGKCREFFPNHQWVKEETQEDKDCPIKEEKGSPLNAAPYGIESMSQDTEVRSRVVGGSLRGAQAASPAKGEPSLPEKDEDHALSYWKPFLVNMCVATVLTAGAYLCYRFLFNSNT

SEQ ID NO: 914949 - protein, 117 aa, Homo sapiens [sequence omitted]

SEQ ID NO: 914950 - protein, 682 aa, Homo sapiens
HPYGYVARPGVDEGDRETTIRGKATPAEEEKTGKVKYSRLAKYFFNKEGDFNNLTAAAFHKKSHLLVTGFASGIFHLHELPEFNLIHSLSISDQSIASVAINSSGDWIAFGCSGLGQLLVWEWQSESYVLKQQGHFNSMVALAYSPDGQYIVTGGDDGKVKVWNTLSGFCFVTFTEHSSGVTGVTFTATGYVVVTSSMDGTVRAFDLHRYRNFRTFTSPRPTQFSCVAVDASGEIVSAGAQDSFEIFVWSMQTGRLLDVLSGHEGPISGLCFNPMKSVLASASWDKTVRLWDMFDSWRTKETLALTSDALAVTFRPDGAELAVATLNSQITFWDPENAVQTGSIEGRHDLKTGRKELDKITAKHAAKGKAFTALCYSADGHSILAGGMSKFVCIYHVREQILMKRFEISCNLSLDAMEEFLNRRKMTEFGNLALIDQDAGQEDGVAIPLPGVRKGDMSSRHFKPEIRVTSLRFSPTGRCWAATTTEGLLIYSLDTRVLFDPFELDTSVTPGRVREALRQQDFTRAILMALRLNESKLVQEALEAVPRGEIEVVTSSLPELYVEKVLEFLASSFEVSRHLEFYLLWTHKLLMLHGQKLKSRAGTLLPVIQFLQKSIQRHLDDLSKLCSWNHYNMQYALAVSKQRGTKRSLDPLGSEEEAEASEDDSLHLLGGGGRDSEEEMLA

SEQ ID NO: 914951 - protein, 529 aa, Homo sapiens
ACCGRCRADPREVSLWAAAGLSCGTRATAVMKFAYRFSNLLGTVYRRGNLNFTCNGNSVISPVGNRVTVFDLKNNKSDTLPLATRYNVKCVGLSPDGRLAIIVDEGGDALLVSLVCRSVLHHFHFKGSVHSVSFSPDGRKFVVTKGNIAQMYHAPGKKREFNAFVLDKTYFGPYDETTCIDWTDDSRCFVVGSKDMSTWVFGAERWDNLIYYALGGHKDAIVACFFESNSLDLYSLSQDGVLCMWQCDTPPEGLRLKPPAGWKADLLQREEEEEEEEDQEGDRETTIRGKATPAEEEKTGKVKYSRLAKYFFNKEGDFNNLTAAAFHKKSHLLVTGFASGIFHLHELPEFNLIHSLSISDQSIASVAINSSGDWIAFGCSGLGQLLVWEWQSESYVLKQQGHFNSMVALAYSPDGQYIVTGGDDGKVKVWNTLSGFCFVTFTEHSSGVTGVTFTATGYVVVTSSMDGTVRAFDLHRYRNFRTFTSPRPTQFSCVAVDASGEIVSAGAQDSFEIFVWSMQTGRLLDLLGP

SEQ ID NO: 914952 - protein, 625 aa, Homo sapiens
NVRLRYEAGCDGFASGIFHLHELPEFNLIHSLSISDQSIASVAINSSGDWIAFGCSGLGQLLVWEWQSESYVLKQQGHFNSMVALAYSPDGQYIVTGGDDGKVKVWNTLSGFCFVTFTEHSSGVTGVTFTATGYVVVTSSMDGTVRAFDLHRYRNFRTFTSPRPTQFSCVAVDASGEIVSAGAQDSFEIFVWSMQTGRLLDVLSGHEGPISGLCFNPMKSVLASASWDKTVRLWDMFDSWRTKETLALTSDALAVTFRPDGAELAVATLNSQITFWDPENAVQTGSIEGRHDLKTGRKELDKITAKHAAKGKAFTALCYSADGHSILAGGMSKFVCIYHVREQILMKRFEISCNLSLDAMEEFLNRRKMTEFGNLALIDQDAGQEDGVAIPLPGVRKGDMSSRHFKPEIRVTSLRFSPTGRCWAATTTEGLLIYSLDTRVLFDPFELDTSVTPGRVREALRQQDFTRAILMALRLNESKLVQEALEAVPRGEIEVVTSSLPELYVEKVLEFLASSFEVSRHLEFYLLWTHKLLMLHGQKLKSRAGTLLPVIQFLQKSIQRHLDDLSKLCSWNHYNMQYALAVSKQRGTKRSLDPLGSEEEAEASEDDSLHLLGGGGRDSEEEMLA

SEQ ID NO: 914953 - protein, 676 aa, Homo sapiens
ACCGRCRADPREVSLWAAAGLSCGTRATAVMKFAYRFSNLLGTVYRRGNLNFTCNGNSVISPVGNRVTVFDLKNNKSDTLPLATRYNVKCVGLSPDGRLAIIVDEGGDALLVSLVCRSVLHHFHFKGSVHSVSFSPDGRKFVVTKGNIAQMYHAPGKKREFNAFVLDKTYFGPYDETTCIDWTDDSRCFVVGSKDMSTWVFGAERWDNLIYYALGGHKDAIVACFFESNSLDLYSLSQDGVLCMWQCDTPPEGLRLKPPAGWKADLLQREEEEEEEEDQEGDRETTIRGKATPAEEEKTGKVKYSRLAKYFFNKEGDFNNLTAAAFHKKSHLLVTGFASGIFHLHELPEFNLIHSLSISDQSIASVAINSSGDWIAFGCSGLGQLLVWEWQSESYVLKQQGHFNSMVALAYSPDGQYIVTGGDDGKVKVWNTLSGFCFVTFTEHSSGVTGVTFTATGYVVVTSSMDGTVRAFDLHRYRNFRTFTSPRPTQFSCVAVDASGEIVSAGAQDSFEIFVWSMQTGRLLDVLSGHEGPISGLCFNPMKSVLASASWDKTVRLWDMFDSWRTKETLALTSDALAVTFRPDGAELAVATLNSQITFWDPENAVQTGSIEGRHDLKTGRKELDKITAKHAAKGKAFTALCYSADGHSILAGGMSKFVCIYHVREQILMKRFENS

SEQ ID NO: 914954 - protein, 949 aa, Homo sapiens
ACCGRCRADPREVSLWAAAGLSCGTRATAVMKFAYRFSNLLGTVYRRGNLNFTCNGNSVISPVGNRVTVFDLKNNKSDTLPLATRYNVKCVGLSPDGRLAIIVDEGGDALLVSLVCRSVLHHFHFKGSVHSVSFSPDGRKFVVTKGNIAQMYHAPGKKREFNAFVLDKTYFGPYDETTCIDWTDDSRCFVVGSKDMSTWVFGAERWDNLIYYALGGHKDAIVACFFESNSLDLYSLSQDGVLCMWQCDTPPEGLRLKPPAGWKADLLQREEEEEEEEDQEGDRETTIRGKATPAEEEKTGKVKYSRLAKYFFNKEGDFNNLTAAAFHKKSHLLVTGFASGIFHLHELPEFNLIHSLSISDQSIASVAINSSGDWIAFGCSGLGQLLVWEWQSESYVLKQQGHFNSMVALAYSPDGQYIVTGGDDGKVKVWNTLSGFCFVTFTEHSSGVTGVTFTATGYVVVTSSMDGTVRAFDLHRYRNFRTFTSPRPTQFSCVAVDASGEIVSAGAQDSFEIFVWSMQTGRLLDVLSGHEGPISGLCFNPMKSVLASASWDKTVRLWDMFDSWRTKETLALTSDALAVTFRPDGAELAVATLNSQITFWDPENAVQTGSIEGRHDLKTGRKELDKITAKHAAKGKAFTALCYSADGHSILAGGMSKFVCIYHVREQILMKRFEISCNLSLDAMEEFLNRRKMTEFGNLALIDQDAGQEDGVAIPLPGVRKGDMSSRHFKPEIRVTSLRFSPTGRCWAATTTEGLLIYSLDTRVLFDPFELDTSVTPGRVREALRQQDFTRAILMALRLNESKLVQEALEAVPRGEIEVVTSSLPELYVEKVLEFLASSFEVSRHLEFYLLWTHKLLMLHGQKLKSRAGTLLPVIQFLQKSIQRHLDDLSKLCSWNHYNMQYALAVSKQRGTKRSLDPLGSEEEAEASEDDSLHLLGGGGRDSEEEMLA

SEQ ID NO: 914955 - protein, 988 aa, Homo sapiens
ACCGRCRADPREVSLWAAAGLSCGTRATAVMKFAYRFSNLLGTVYRRGNLNFTCNGNSVISPVGNRVTVFDLKNNKSDTLPLATRYNVKCVGLSPDGRLAIIVDEGGDALLVSLVCRSVLHHFHFKGSVHSVSFSPDGRKFVVTKGNIAQMYHAPGKKREFNAFVLDKTYFGPYDETTCIDWTDDSRCFVVGSKDMSTWVFGAERWDNLIYYALGGHKDAIVACFFESNSLDLYSLSQDGVLCMWQCDTPPEGLRLKPPAGWKADLLQREEEEEEEEDQEGDRETTIRGKATPAEEEKTGKVKYSRLAKYFFNKEGDFNNLTAAAFHKKSHLLVTGFASGIFHLHELPEFNLIHSLSISDQSIASVAINSSGDWIAFGCSGLGQLLVWEWQSESYVLKQQGHFNSMVALAYSPDGQYIVTGGDDGKVKVWNTLSGFCFVTFTEHSSGVTGVTFTATGYVVVTSSMDGTVRAFDLHRYRNFRTFTSPRPTQFSCVAVDASGEIVSAGAQDSFEIFVWSMQTGRLLDVLSGHEGPISGLCFNPMKSVLASASWDKTVRLWDMFDSWRTKETLALTSDALAVTFRPDGAELAVATLNSQITFWDPENAVQTGSIEGRHDLKTGRKELDKITAKHAAKGKAFTALCYSADGHSILAGGMSKFVCIYHVREQILMKRFEISCNLSLDAMEEFLNRRKMTEFGNLALIDQDAGQEDGVAIPLPGVRKGDMSSRHFKPEIRVTSLRFSPTVIRAALSGAAETTGPAELKTPELDRRLGWLPASREETHAWRCWAATTTEGLLIYSLDTRVLFDPFELDTSVTPGRVREALRQQDFTRAILMALRLNESKLVQEALEAVPRGEIEVVTSSLPELYVEKVLEFLASSFEVSRHLEFYLLWTHKLLMLHGQKLKSRAGTLLPVIQFLQKSIQRHLDDLSKLCSWNHYNMQYALAVSKQRGTKRSLDPLGSEEEAEASEDDSLHLLGGGGRDSEEEMLA

SEQ ID NO: 914956 - protein, 721 aa, Homo sapiens
MEIQLSVPWAIESLYLTLKTTNLTRCPWPLGTTSSAWGCPRMAASLSSSMKEGDRETTIRGKATPAEEEKTGKVKYSRLAKYFFNKEGDFNNLTAAAFHKKSHLLVTGFASGIFHLHELPEFNLIHSLSISDQSIASVAINSSGDWIAFGCSGLGQLLVWEWQSESYVLKQQGHFNSMVALAYSPDGQYIVTGGDDGKVKVWNTLSGFCFVTFTEHSSGVTGVTFTATGYVVVTSSMDGTVRAFDLHRYRNFRTFTSPRPTQFSCVAVDASGEIVSAGAQDSFEIFVWSMQTGRLLDVLSGHEGPISGLCFNPMKSVLASASWDKTVRLWDMFDSWRTKETLALTSDALAVTFRPDGAELAVATLNSQITFWDPENAVQTGSIEGRHDLKTGRKELDKITAKHAAKGKAFTALCYSADGHSILAGGMSKFVCIYHVREQILMKRFEISCNLSLDAMEEFLNRRKMTEFGNLALIDQDAGQEDGVAIPLPGVRKGDMSSRHFKPEIRVTSLRFSPTGRCWAATTTEGLLIYSLDTRVLFDPFELDTSVTPGRVREALRQQDFTRAILMALRLNESKLVQEALEAVPRGEIEVVTSSLPELYVEKVLEFLASSFEVSRHLEFYLLWTHKLLMLHGQKLKSRAGTLLPVIQFLQKSIQRHLDDLSKLCSWNHYNMQYALAVSKQRGTKRSLDPLGSEEEAEASEDDSLHLLGGGGRDSEEEMLA

SEQ ID NO: 914957 - protein, 380 aa, Homo sapiens
MRAVRSSLQGRRTPLRFSCGPCRQAGSLIFWDPENAVQTGSIEGRHDLKTGRKELDKITAKHAAKGKAFTALCYSADGHSILAGGMSKFVCIYHVREQILMKRFEISCNLSLDAMEEFLNRRKMTEFGNLALIDQDAGQEDGVAIPLPGVRKGDMSSRHFKPEIRVTSLRFSPTGRCWAATTTEGLLIYSLDTRVLFDPFELDTSVTPGRVREALRQQDFTRAILMALRLNESKLVQEALEAVPRGEIEVVTSSLPELYVEKVLEFLASSFEVSRHLEFYLLWTHKLLMLHGQKLKSRAGTLLPVIQFLQKSIQRHLDDLSKLCSWNHYNMQYALAVSKQRGTKRSLDPLGSEEEAEASEDDSLHLLGGGGRDSEEEMLA

SEQ ID NO: 914958 - protein, 755 aa, Homo sapiens
QCCAGRHHHHSRRRWPGCWTRRARRPPRQLRHPLQPSLSPPRPVPMEEMEEELKCPVCGSFYREPIILPCSHNLCQACARNILVQTPESESPQSHRAAGSGVSDYDYLDLDKMSLYSEADSGYGSYGGFASAPTTPCQKSPNGVRVFPPAMPPPATHLSPALAPVPRNSCITCPQCHRSLILDDRGLRGFPKNRVLEGVIDRYQQSKAAALKCQLCEKAPKEATVMCEQCDVFYCDPCRLRCHPPRGPLAKHRLVPPAQGRVSRRLSPRKVSTCTDHELENHSMYCVQCKMPVCYQCLEEGKHSSHEVKALGAMWKLHKSQLSQALNGLSDRAKEAKEFLVQLRNMVQQIQENSVEFEACLVAQCDALIDALNRRKAQLLARVNKEHEHKLKVVRDQISHCTVKLRQTTGLMEYCLEVIKENDPSGFLQISDALIRRVHLTEDQWGKGTLTPRMTTDFDLSLDNSPLLQSIHQLDFVQVKASSPVPATPILQLEECCTHNNSATLSWKQPPLSTVPADGYILELDDGNGGQFREVYVGKETMCTVDGLHFNSTYNARVKAFNKTGVSPYSKTLVLQTSEVAWFAFDPGSAHSDIILSNDNLTVTCSSYDDRVVLGKTGFSKGIHYWELTVDRYDNHPDPAFGVARMDVMKDVMLGKDDKAWAMYVDNNRSWFMHNNSHTNRTEGGITKGATIGVLLDFNRKNLTFFINDEQQGPIAFDNVEGLFFPAVSLNRNVQVTLHTGLPVPDFYSSRASIA

SEQ ID NO: 914959 - protein, 177 aa, Homo sapiens
MEEMEEELKCPVCGSFYREPIILPCSHNLCQACARNILVQTPESESPQSHRAAGSGVSDYDYLDLDKMSLYSEADSGYGSYGGFASAPTTPCQKSPNGVRVFPPAMPPPATHLSPALAPVPRNSCITCPQCHRSLILDDRGLRGFPKNRVLEGVIDRYQQSKAAALKCQLCEKAPKE

SEQ ID NO: 914960 - protein, 595 aa, Homo sapiens
QCCAGRHHHHSRRRWPGCWTRRARRPPRQLRHPLQPSLSPPRPVPMEEMEEELKCPVCGSFYREPIILPCSHNLCQACARNILVQTPESESPQSHRAAGSGVSDYDYLDLDKMSLYSEADSGYGSYGGFASAPTTPCQKSPNGVRVFPPAMPPPATHLSPALAPVPRNSCITCPQCHRSLILDDRGLRGFPKNRVLEGVIDRYQQSKAAALKCQLCEKAPKEATVMCEQCDVFYCDPCRLRCHPPRGPLAKHRLVPPAQGRVSRRLSPRKVSTCTDHELENHSMYCVQCKMPVCYQCLEEGKHSSHEVKALGAMWKLHKSQLSQALNGLSDRAKEAKEFLVQLRNMVQQIQENSVEFEACLVAQCDALIDALNRRKAQLLARVNKEHEHKLKVVRDQISHCTVKLRQTTGLMEYCLEVIKENDPSGFLQISDALIRRVHLTEDQWGKGTLTPRMTTDFDLSLDNSPLLQSIHQLDFVQVKASSPVPATPILQLEECCTHNNSATLSWKQPPLSTVPADGYILELDDGNGGQFREVYVGKETMCTVDGLHFNSTYNARVKAFNKTGVSPYSKTLVLQTSEGKALQQYPSERELRGI

SEQ ID NO: 914961 - protein, 274 aa, Homo sapiens
MAAERGAGQQQSQEMMEEEHELPVDMETINLDRDAEDVDLNHYRIGKIEGFEVLKKVKTLCLRQNLIKCIENLEELQSLRELDLYDNQIKKIENLEALTELEILDISFNLLRNIEGVDKLTRLKKLFLVNNKISKIENLSNLHQLQMLELGSNRIRAIENIDTLTNLESLFLGKNKITKLQNLDALTNLTVLSMQSNRLTKIEGLQNLVNLRELYLSHNGIEVIEGLENNNKLTMLDIASNRIKKIENISHLTELQEFWMNDNLLDGRVAHGDP

SEQ ID NO: 914962 - protein, 262 aa, Homo sapiens
AHATPHTHPNTRQRTNWHVSEAAWAMERGEEDPEEEHELPVDMETINLDRDAEDVDLNHYRIGKIEGFEVLKKVKTLCLRQNLIKCIENLEELQSLRELDLYDNQIKKIENLEALTELEILDISFNLLRNIEGVDKLTRLKKLFLVNNKISKIENLSNLHQLQMLELGSNRIRAIENIDTLTNLESLFLGKNKITKLQNLDALTNLTVLSMQSNRLTKIEGLQNLVNLRELYLSHNGIEVIEGLENNNKLRMWDMGSNRSTD

SEQ ID NO: 914963 - protein, 99 aa, Homo sapiens
PPPHPQFLFKFFSSFAASAIENIDTLTNLESLFLGKNKITKLQNLDALTNLTVLSMQSNRLTKIEGLQNLVNLRELYLSHNGIEVIEGLENNVQDSLTY

SEQ ID NO: 914964 - protein, 360 aa, Homo sapiens
MAAERGAGQQQSQEMMEVDRRVESEESGDEEGKKHSSGIVADLSEQSLKDGEERGEEDPEEEHELPVDMETINLDRDAEDVDLNHYRIGKIEGFEVLKKVKTLCLRQNLIKCIENLEELQSLRELDLYDNQIKKIENLEALTELEILDISFNLLRNIEGVDKLTRLKKLFLVNNKISKIENLSNLHQLQMLELGSNRIRAIENIDTLTNLESLFLGKNKITKLQNLDALTNLTVLSMQSNRLTKIEGLQNLVNLRELYLSHNGIEVIEGLENNNKLTMLDIASNRIKKIENISHLTELQEFWMNDNLLESWSDLDELKGARSLETVYLERNPLQKDPQYRRKVMLALPSVRQIDATFVRF

SEQ ID NO: 914965 - protein, 371 aa, Homo sapiens
EYLEGNEVGDRVREKSKNHSRRRKLLSKVDRRVESEESGDEEGKKHSSGIVADLSEQSLKDGEERGEEDPEEEHELPVDMETINLDRDAEDVDLNHYRIGKIEGFEVLKKVKTLCLRQNLIKCIENLEELQSLRELDLYDNQIKKIENLEALTELEILDISFNLLRNIEGVDKLTRLKKLFLVNNKISKIENLSNLHQLQMLELGSNRIRAIENIDTLTNLESLFLGKNKITKLQNLDALTNLTVLSMQSNRLTKIEGLQNLVNLRELYLSHNGIEVIEGLENNNKLTMLDIASNRIKKIENISHLTELQEFWMNDNLLESWSDLDELKGARSLETVYLERNPLQKDPQYRRKVMLALPSVRQIDATFVRF

SEQ ID NO: 914966 - protein, 317 aa, Homo sapiens
MAAERGAGQQQSQEMMEEEHELPVDMETINLDRDAEDVDLNHYRIGKIEGFEVLKKVKTLCLRQNLIKCIENLEELQSLRELDLYDNQIKKIENLEALTELEILDISFNLLRNIEGVDKLTRLKKLFLVNNKISKIENLSNLHQLQMLELGSNRIRAIENIDTLTNLESLFLGKNKITKLQNLDALTNLTVLSMQSNRLTKIEGLQNLVNLRELYLSHNGIEVIEGLENNNKLTMLDIASNRIKKIENISHLTELQEFWMNDNLLESWSDLDELKGARSLETVYLERNPLQKDPQYRRKVMLALPSVRQIDATFVRF

SEQ ID NO: 914967 - protein, 292 aa, Homo sapiens
METINLDRDAEDVDLNHYRIGKIEGFEVLKKVKTLCLRQNLIKCIENLEELQSLRELDLYDNQIKKIENLEALTELEILDISFNLLRNIEGVDKLTRLKKLFLVNNKISKIENLSNLHQLQMLELGSNRIRAIENIDTLTNLESLFLGKNKITKLQNLDALTNLTVLSMQSNRLTKIEGLQNLVNLRELYLSHNGIEVIEGLENNNKLTMLDIASNRIKKIENISHLTELQEFWMNDNLLESWSDLDELKGARSLETVYLERNPLQKDPQYRRKVMLALPSVRQIDATFVRF

SEQ ID NO: 914968 - protein, 360 aa, Homo sapiens; identical to SEQ ID NO: 914964

SEQ ID NO: 914969 - protein, 280 aa, Homo sapiens
MAAERGAGQQQSQEMMEVDRRVESEESGDEEGKKHSSGIVADLSEQSLKDGEERGEEDPEEEHELPVDMETINLDRDAEDVDLNHYRIGKIEGFEVLKKVKTLCLRQNLIKCIENLEELQSLRELDLYDNQIKKIENLEALTELEILDISFNLLRNIEGVDKLTRLKKLFLVNNKISKIENLSNLHQLQMLELGSNRIRAIENIDTLTNLESLFLGKNKITKLQNLDALTNLTVLSMQSNRLTKIEGLQNLVNLRELYLSHNGIEVIEGLENNVQDSLTY

SEQ ID NO: 914970 - protein, 310 aa, Homo sapiens
MAAERGAGQQQSQEMMEVDRRVESEESGDEEGKKHSSGIVADLSEQSLKDGEERGEEDPEEEHELPVDMETINLDRDAEDVDLNHYRIGKIEGFEVLKKVKTLCLRQNLIKCIENLEELQSLRELDLYDNQIKKIENLEALTELEILDISFNLLRNIEGVDKLTRLKKLFLVNNKISKIENLSNLHQLQMLELGSNRIRAIENIDTLTNLESLFLGKNKITKLQNLDALTNLTVLSMQSNRLTKIEGLQNLVNLRELYLSHNGIEVIEGLENNNKLTMLDIASNRIKKIENISHLTELQEFWVSLIHAGV

SEQ ID NO: 914971 - protein, 317 aa, Homo sapiens
MAAERGAGQQQSQEMMEVDRRVESEESGDEEGKKHSSGIVADLSEQSLKDGEERGEEDPEEEHELPVDMETINLDRDAEDVDLNHYRIGKIEGFEVLKKVKTLCLRQNLIKCIENLEELQSLRELDLYDNQIKKIENLEALTELEILDISFNLLRNIEGVDKLTRLKKLFLVNNKISKIENLSNLHQLQMLELGSNRIRAIENIDTLTNLESLFLGKNKITKLQNLDALTNLTVLSMQSNRLTKIEGLQNLVNLRELYLSHNGIEVIEGLENNNKLTMLDIASNRIKKIENISHLTELQEFWMNDNLLDGRVAHGDP

SEQ ID NO: 914972 - protein, 140 aa, Homo sapiens
MKKGRNTAVASWPTSVNRSNRLTKIEGLQNLVNLRELYLSHNGIEVIEGLENNNKLTMLDIASNRIKKIENISHLTELQEFWMNDNLLESWSDLDELKGARSLETVYLERNPLQKDPQYRRKVMLALPSVRQIDATFVRF

SEQ ID NO: 914973 - protein, 237 aa, Homo sapiens
MAAERGAGQQQSQEMMEEEHELPVDMETINLDRDAEDVDLNHYRIGKIEGFEVLKKVKTLCLRQNLIKCIENLEELQSLRELDLYDNQIKKIENLEALTELEILDISFNLLRNIEGVDKLTRLKKLFLVNNKISKIENLSNLHQLQMLELGSNRIRAIENIDTLTNLESLFLGKNKITKLQNLDALTNLTVLSMQSNRLTKIEGLQNLVNLRELYLSHNGIEVIEGLENNVQDSLTY

SEQ ID NO: 914974 - protein, 104 aa, Homo sapiens
MAAERGAGQQQSQEMMEVDRRVESEESGDEEGKKHSSGIVADLSEQSLKDGEERGEEDPEEEHELPVDMEKSGGCVGSIHRIPGISVQPPLKPSSLVFINRSPV

SEQ ID NO: 914975 - protein, 280 aa, Homo sapiens; identical to SEQ ID NO: 914969

SEQ ID NO: 914976 - protein, 274 aa, Homo sapiens
MEEHELPVDMETINLDRDAEDVDLNHYRIGKIEGFEVLKKVKTLCLRQNLIKCIENLEELQSLRELDLYDNQIKKIENLEALTELEILDISFNLLRNIEGVDKLTRLKKLFLVNNKISKIENLSNLHQLQMLELGSNRIRAIENIDTLTNLESLFLGKNKITKLQNLDALTNLTVLSMQSNRLTKIEGLQNLVNLRELYLSHNGIEVIEGLENNNKLTMLDIASNRIKKIENISHLTELQEFWITKTLKGGRTRRVMEQNLTQARKETIRKPQY

SEQ ID NO: 914977 - protein, 127 aa, Homo sapiens
STRPALRVARDAPNTPTALRRSQRNNGRLRPRAGQMRFPPDSRSKWVSSAELASWRPLSEGGGRWGGSFMGRVAPQGRRRLQRPHWAGNDLQGEPSWRPGASQLASGPTSASAPHLPACSERQEKAA

SEQ ID NO: 914978 - protein, 360 aa, Homo sapiens; identical to SEQ ID NO: 914964

SEQ ID NO: 914979 - protein, 344 aa, Homo sapiens
MVDRRVESEESGDEEGKKHSSGIVADLSEQSLKDGEERGEEDPEEEHELPVDMETINLDRDAEDVDLNHYRIGKIEGFEVLKKVKTLCLRQNLIKCIENLEELQSLRELDLYDNQIKKIENLEALTELEILDISFNLLRNIEGVDKLTRLKKLFLVNNKISKIENLSNLHQLQMLELGSNRIRAIENIDTLTNLESLFLGKNKITKLQNLDALTNLTVLSMQSNRLTKIEGLQNLVNLRELYLSHNGIEVIEGLENNNKLTMLDIASNRIKKIENISHLTELQEFWMNDNLLESWSDLDELKGARSLETVYLERNPLQKDPQYRRKVMLALPSVRQIDATFVRF

SEQ ID NO: 914980 - protein, 334 aa, Homo sapiens
AHATPHTHPNTRQRTNWHVSEAAWAMERGEEDPEEEHELPVDMETINLDRDAEDVDLNHYRIGKIEGFEVLKKVKTLCLRQNLIKCIENLEELQSLRELDLYDNQIKKIENLEALTELEILDISFNLLRNIEGVDKLTRLKKLFLVNNKISKIENLSNLHQLQMLELGSNRIRAIENIDTLTNLESLFLGKNKITKLQNLDALTNLTVLSMQSNRLTKIEGLQNLVNLRELYLSHNGIEVIEGLENNNKLTMLDIASNRIKKIENISHLTELQEFWMNDNLLESWSDLDELKGARSLETVYLERNPLQKDPQYRRKVMLALPSVRQIDATFVRF

SEQ ID NO: 914981 - protein, 354 aa, Homo sapiens
MAAERGAGQQQSQEMMEVDRRVESEESGDEEGKKHSSGIVADLSEQSLKDGEERGEEDPEEEHELPVDMETINLDRDAEDVDLNHYRIGKIEGFETLCLRQNLIKCIENLEELQSLRELDLYDNQIKKIENLEALTELEILDISFNLLRNIEGVDKLTRLKKLFLVNNKISKIENLSNLHQLQMLELGSNRIRAIENIDTLTNLESLFLGKNKITKLQNLDALTNLTVLSMQSNRLTKIEGLQNLVNLRELYLSHNGIEVIEGLENNNKLTMLDIASNRIKKIENISHLTELQEFWMNDNLLESWSDLDELKGARSLETVYLERNPLQKDPQYRRKVMLALPSVRQIDATFVRF

SEQ ID NO: 914982 - protein, 171 aa, Homo sapiens
MLELGSNRIRAIENIDTLTNLESLFLGKNKITKLQNLDALTNLTVLSMQSNRLTKIEGLQNLVNLRELYLSHNGIEVIEGLENNNKLTMLDIASNRIKKIENISHLTELQEFWMNDNLLESWSDLDELKGARSLETVYLERNPLQKDPQYRRKVMLALPSVRQIDATFVRF

SEQ ID NO: 914983 - protein, 177 aa, Homo sapiens
MRDASIKLPLTFFTELEKNYFKFHMEPKKNPYSQDSPKQRTNLDALTNLTVLSMQSNRLTKIEGLQNLVNLRELYLSHNGIEVIEGLENNNKLTMLDIASNRIKKIENISHLTELQEFWMNDNLLESWSDLDELKGARSLETVYLERNPLQKDPQYRRKVMLALPSVRQIDATFVRF

SEQ ID NO: 914984 - protein, 375 aa, Homo sapiens
  misc_feature (240)..(240): Xaa can be any naturally occurring amino acid
  misc_feature (253)..(253): Xaa can be any naturally occurring amino acid
  misc_feature (273)..(273): Xaa can be any naturally occurring amino acid
  misc_feature (291)..(292): Xaa can be any naturally occurring amino acid
  misc_feature (294)..(294): Xaa can be any naturally occurring amino acid
  misc_feature (298)..(298): Xaa can be any naturally occurring amino acid
  misc_feature (310)..(314): Xaa can be any naturally occurring amino acid
  misc_feature (317)..(317): Xaa can be any naturally occurring amino acid
  misc_feature (322)..(322): Xaa can be any naturally occurring amino acid
  misc_feature (350)..(351): Xaa can be any naturally occurring amino acid
  misc_feature (359)..(359): Xaa can be any naturally occurring amino acid
MAAERGAGQQQSQEMMEVDRRVESEESGDEEGKKHSSGIVADLSEQSLKDGEERGEEDPEEEHELPVDMETINLDRDAEDVDLNHYRIGKIEGFEVLKKVKTLCLRQNLIKCIENLEELQSLRELDLYDNQIKKIENLEALTELEILDISFNLLRNIEGVDKLTRLKKLFLVNNKISKIENLSNLHQLQMLELGSNRIRAIENIDTLTNLESLFLGKNKITKLQNLDALTNLTVLSMQPXQPPHQHPPSPQPXQLPHLYLTHNPIHLIHPLHXNHTLTIFHIPSNTIKNIXXLXHLTXLQHFSINHNLLXXXXXLHXLNPPXTLHTLYLHPNPFHNHPHYPPNLILPLPXXPHIHPTFXTFSLLLALLISSLSSP

SEQ ID NO: 914985 - protein, 274 aa, Homo sapiens
MAAERGAGQQQSQEMMEVDRRVESEESGDEEGKKHSSGIVADLSEQSLKDGEERGEEDPEEEHELPVDMETINLDRDAEDVDLNHYRIGKIEGFETLCLRQNLIKCIENLEELQSLRELDLYDNQIKKIENLEALTELEILDISFNLLRNIEGVDKLTRLKKLFLVNNKISKIENLSNLHQLQMLELGSNRIRAIENIDTLTNLESLFLGKNKITKLQNLDALTNLTVLSMQSNRLTKIEGLQNLVNLRELYLSHNGIEVIEGLENNVQDSLTY

SEQ ID NO: 914986 - protein, 207 aa, Homo sapiens
MQSGTHWRVLGLCLLSVGVWGQDGNEEMGGITQTPYKVSISGTTVILTCPQYPGSEILWQHNDKNIGGDEDDKNIGSDEDHLSLKEFSELEQSGYYVCYPRGSKPEDANFYLYLRARVCENCMEMDVMSVATIVIVDICITGGLLLLVYYWSKNRKAKAKPVTRGAGAGGRQRGQNKERPPPVPNPDYEPIRKGQRDLYSGLNQRRI

SEQ ID NO: 914987 - protein, 187 aa, Homo sapiens
MGWVINNENIQIIKKPFPFLPGNTVILTCPQYPGSEILWQHNDKNIGGDEDDKNIGSDEDHLSLKEFSELEQSGYYVCYPRGSKPEDANFYLYLRARVCENCMEMDVMSVATIVIVDICITGGLLLLVYYWSKNRKAKAKPVTRGAGAGGRQRGQNKERPPPVPNPDYEPIRKGQRDLYSGLNQRRI

SEQ ID NO: 914988 - protein, 207 aa, Homo sapiens; identical to SEQ ID NO: 914986

SEQ ID NO: 914989 - protein, 207 aa, Homo sapiens; identical to SEQ ID NO: 914986

SEQ ID NO: 914990 - protein, 97 aa, Homo sapiens
GDLEDAFMCENCMEMDVMSVATIVIVDICITGGLLLLVYYWSKNRKAKAKPVTRGAGAGGRQRGQNKERPPPVPNPDYEPIRKGQRDLYSGLNQRRI

SEQ ID NO: 914991 - protein, 732 aa, Homo sapiens
MTENYTEAAFTLLLYCELLQWEDRPLREFLHYPSQTEWQRKEGLCRKIIHYFNKGKSWEFGIPLCRELACQYESLYDYQSLSWIRKMEASYYDNIMEQQRLEPEFFRVGFYGRKFPFFLRNKEYVCRGHDYERLEAFQQRMLSEFPQAVAMQHPNHPDDAILQCDAQYLQIYAVTPIPDYVDVLQMDRVPDRVKSFYRVNNVRKFRYDRPFHKGPKDKENEFKSLWIERTTLTLTHSLPGISRWFEVERRELVEVSPLENAIQVVENKNQELRSLISQYQHKQVHGNINLLSMCLNGVIDAAVNGGIARYQEAFFDKDYINKHPGDAEKITQLKELMQEQVHVLGVGLAVHEKFVHPEMRPLHKKLIDQFQMMRASLYHEFPGLDKLSPACSGTSTPRGNVLASHSPMSPESIKMTHRHSEAGNMVMLGDGSMGDAPEDLYHHMQLAYPNPRYQGSVTNVSVLSSSQASPSSSSLSSTHSAPSQMITSAPSSARGSPSLPDKYRHAREMMLLLPTYRDRPSSAMYPAAILENGQPPNFQRALFQQVVGACKPCSDPNLSVAEKVSSPPYPSLPHKPPVRSGRQQLYLSGSASSGVSSLSESNFGHSSEAPPRTDTMDSMPSQAWNADEDLEPPYLPVHYSLSESAVLDSIKAQPCRSHSAPGCVIPQDPMDPPALPPKPYHPRLPALEHDEGVLLREETERPRGLHRKAPLPPGSAKEEQARMAWEHGRGEQ

SEQ ID NO: 914992 - protein, 732 aa, Homo sapiens; identical to SEQ ID NO: 914991

SEQ ID NO: 914993 - protein, 181 aa, Homo sapiens
HRGSPYGYADKGCCCVKRLRGLEACTARLHCLLGALRRSRPAWPGSTAEGSSEGQRGGWDAALSKQLANHSRSEKQVPQPHPREPERLALRREPPPSLRSTAVNSCVAMYRGHSSMKGCGFPFYFFTFPFLWVFLSFLYAVDAFFLLQFWTMWSYMEKLHRQNHFATLQGPGVGAQALPPG

SEQ ID NO: 914994 - protein, 1907 aa, Homo sapiens
DLRRQLLSGHLTQDQVREVKRHITVRLDWGNEHLGLDLVPRKDFEVVDSDQISVSDLYKMHLSSRQSVQQSTSQVDTMRPRHGETCRMPVPHHFFLSLKSFTYNTIGEDTDVFFSLYDMREGKQISERFLVRLNKNGGPRNPEKIERMCALFTDLSSKDMKRDLYIVAHVIRIGRMLLNDSKKGPPHLHYRRPYGCAVLSILDVLQSLTEVKEEKDFVLKVYTCNNESEWSQIHENIIRKSSAKYSAPSASHGLIISLQLLRGDMEQIRRENPMIFNRGLAITRKLGFPDVIMPGDIRNDLYLTLEKGDFERGGKSVQKNIEVTMYVLYADGEILKDCISLGSGEPNRSSYHSFVLYHSNSPRWGEIIKLPIPIDRFRGSHLRFEFRHCSTKDKGEKKLFGFAFSTLMRDDGTTLSDDIHELYVYKCDENSTFNNHALYLGLPCCKEDYNGCPNIPSSLIFQRSTKESFFISTQLSSTKLTQNVDLLALLKWKAFPDRIMDVLGRLRHVSGEEIVKFLQDILDTLFVILDDNTEKYGLLVFQSLVFIINLLRDIKYFHFRPVMDTYIQKHFAGALAYKELIRCLKWYMDCSAELIRQDHIQEAMRALEYLFKFIVQSRILYSRATCGMEEEQFRSSIQELFQSIRFVLSLDSRNSETLLFTQAALLNSFPTIFDELLQMFTVQEVAEFVRGTLGSMPSTVHIGQSMDVVKLQSIARTVDSRLFSFSESRRILLPVVLHHIHLHLRQQKELLICSGILGSIFSIVKTSSLEADVMEEVEMMVESLLDVLLQTLLTIMSKSHAQEAVRGQRCPQCTAEITGEYVSCLLSLLRQMCDTHFQHLLDNFQSKDELKEFLLKIFCVFRNLMKMSVFPRDWMVMRLLTSNIIVTTVQYLSSALHKNFTETDFDFKVWNSYFSLAVLFINQPSLQLEIITSAKRKKILDKYGDMRVMMAYELFSMWQNLGEHKIHFIPGMIGPFLGVTLVPQPEVRNIMIPIFHDMMDWEQRKNGNFKQVEAELIDKLDSMVSEGKGDESYRELFSLLTQLFGPYPSLLEKVEQETWRETGISFVTSVTRLMERLLDYRDCMKGEETENKKIGCTVNLMNFYKSEINKEEMYIRYIHKLCDMHLQAENYTEAAFTLLLYCELLQWEDRPLREFLHYPSQTEWQRKEGLCRKIIHYFNKGKSWEFGIPLCRELACQYESLYDYQSLSWIRKMEASYYDNIMEQQRLEPEFFRVGFYGRKFPFFLRNKEYVCRGHDYERLEAFQQRMLSEFPQAVAMQHPNHPDDAILQCDAQYLQIYAVTPIPDYVDVLQMDRVPDRVKSFYRVNNVRKFRYDRPFHKGPKDKENEFKSLWIERTTLTLTHSLPGISRWFEVERRELVEVSPLENAIQVVENKNQELRSLISQYQHKQVHGNINLLSMCLNGVIDAAVNGGIARYQEAFFDKDYINKHPGDAEKITQLKELMQEQVHVLGVGLAVHEKFVHPEMRPLHKKLIDQFQMMRASLYHEFPGLDKLSPACSGTSTPRGNVLASHSPMSPESIKMTHRHSPMNLMGTGRHSSSSLSSHASSEAGNMVMLGDGSMGDAPEDLYHHMQLAYPNPRYQGSVTNVSVLSSSQASPSSSSLSSTHSAPSQMITSAPSSARGSPSLPDKYRHAREMMLLLPTYRDRPSSAMYPAAILENGQPPNFQRALFQQVVGACKPCSDPNLSVAEKGHYSLHFDAFHHPLGDTPPALPARTLRKSPLHPIPASPTSPQSGLDGSNSTLSGSASSGVSSLSESNFGHSSEAPPRTDTMDSMPSQAWNADEDLEPPYLPVHYSLSESAVLDSIKAQPCRSHSAPGCVIPQDPMDPPALPPKPYHPRLPALEHDEGVLLREETERPRGLHRKAPLPPGSAKEEQARMAWEHGRGEQ

SEQ ID NO: 914995 - protein, 1544 aa, Homo sapiens
MCNNESEWSQIHENIIRKSSAKYSAPSASHGLIISLQLLRGDMEQIRRENPMIFNRGLAITRKLGFPDVIMPGDIRNDLYLTLEKGDFERGGKSVQKNIEVTMYVLYADGEILKDCISLGSGEPNRSSYHSFVLYHSNSPRWGEIIKLPIPIDRFRGSHLRFEFRHCSTKDKGEKKLFGFAFSTLMRDDGTTLSDDIHELYVYKCDENSTFNNHALYLGLPCCKEDYNGCPNIPSSLIFQRSTKESFFISTQLSSTKLTQNVDLLALLKWKAFPDRIMDVLGRLRHVSGEEIVKFLQDILDTLFVILDDNTEKYGLLVFQSLVFIINLLRDIKYFHFRPVMDTYIQKHFAGALAYKELIRCLKWYMDCSAELIRQDHIQEAMRALEYLFKFIVQSRILYSRATCGMEEEQFRSSIQELFQSIRFVLSLDSRNSETLLFTQAALLNSFPTIFDELLQMFTVQEVAEFVRGTLGSMPSTVHIGQSMDVVKLQSIARTVDSRLFSFQGEYVSCLLSLLRQMCDTHFQHLLDNFQSKDELKEFLLKIFCVFRNLMKMSVFPRDWMVMRLLTSNIIVTTVQYLSSALHKNFTETDFDFKVWNSYFSLAVLFINQPSLQLEIITSAKRKKILDKYGDMRVMMAYELFSMWQNLGEHKIHFIPGMIGPFLGVTLVPQPEVRNIMIPIFHDMMDWEQRKNGNFKQVEAELIDKLDSMVSEGKGDESYRELFSLLTQLFGPYPSLLEKVEQETWRETGISFVTSVTRLMERLLDYRDCMKGEETENKKIGCTVNLMNFYKSEINKEEMYIRYIHKLCDMHLQAENYTEAAFTLLLYCELLQWEDRPLREFLHYPSQTEWQRKEGLCRKIIHYFNKGKSWEFGIPLCRELACQYESLYDYQSLSWIRKMEASYYDNIMEQQRLEPEFFRVGFYGRKFPFFLRNKEYVCRGHDYERLEAFQQRMLSEFPQAVAMQHPNHPDDAILQCDAQYLQIYAVTPIPDYVDVLQMDRVPDRVKSFYRVNNVRKFRYDRPFHKGPKDKENEFKSLWIERTTLTLTHSLPGISRWFEVERRELVEVSPLENAIQVVENKNQELRSLISQYQHKQVHGNINLLSMCLNGVIDAAVNGGIARYQEAFFDKDYINKHPGDAEKITQLKELMQEQVHVLGVGLAVHEKFVHPEMRPLHKKLIDQFQMMRASLYHEFPGLDKLSPACSGTSTPRGNVLASHSPMSPESIKMTHRHSEAGNMVMLGDGSMGDAPEDLYHHMQLAYPNPRYQGSVTNVSVLSSSQASPSSSSLSSTHSAPSQMITSAPSSARGSPSLPDKYRHAREMMLLLPTYRDRPSSAMYPAAILENGQPPNFQRALFQQVVGACKPCSDPNLSVAEKVSSPPYPSLPHKPPVRSGRQQLYLSGSASSGVSSLSESNFGHSSEAPPRTDTMDSMPSQAWNADEDLEPPYLPVHYSLSESAVLDSIKAQPCRSHSAPGCVIPQDPMDPPALPPKPYHPRLPALEHDEGVLLREETERPRGLHRKAPLPPGSAKEEQARMAWEHGRGEQ

SEQ ID NO: 914996 - protein, 33 aa, Homo sapiens
MYIRYIHKLCDMHLQAENYTGKWGEERAMPDHE

SEQ ID NO: 914997 - protein, 119 aa, Homo sapiens
ALGRVGSECIPEPGARRTAQAAGLRSVSGAANTKVRELKHFRFLGLLRSCRSEMEVDAPGVDGRDGLRERRGFSEGGRQNFDVRPQSGANGLPKHSYWLDLWLFILFDVVVFLFVYFLP

SEQ ID NO: 914998 - protein, 119 aa, Homo sapiens; identical to SEQ ID NO: 914997

SEQ ID NO: 914999 - protein, 119 aa, Homo sapiens; identical to SEQ ID NO: 914997

SEQ ID NO: 915000 - protein, 119 aa, Homo sapiens; identical to SEQ ID NO: 914997

SEQ ID NO: 915001 - protein, 119 aa, Homo sapiens; identical to SEQ ID NO: 914997

SEQ ID NO: 915002 - protein, 119 aa, Homo sapiens; identical to SEQ ID NO: 914997

SEQ ID NO: 915003 - protein, 119 aa, Homo sapiens; identical to SEQ ID NO: 914997

SEQ ID NO: 915004 - protein, 119 aa, Homo sapiens; identical to SEQ ID NO: 914997

SEQ ID NO: 915005 - protein, 119 aa, Homo sapiens; identical to SEQ ID NO: 914997

SEQ ID NO: 915006 - protein, 119 aa, Homo sapiens; identical to SEQ ID NO: 914997

SEQ ID NO: 915007 - protein, 119 aa, Homo sapiens; identical to SEQ ID NO: 914997

SEQ ID NO: 915008 - protein, 66 aa, Homo sapiens
ALRGSPEYTARDGLRERRGFSEGGRQNFDVRPQSGANGLPKHSYWLDLWLFILFDVVVFLFVYFLP

SEQ ID NO: 915009 - protein, 119 aa, Homo sapiens; identical to SEQ ID NO: 914997

SEQ ID NO: 915010 - protein, 261 aa, Homo sapiens
MAAACRSVKGLVAVITGGASGLGLATAERLVGQGASAVLLDLPNSGGEAQAKKLGNNCVFAPADVTSEKDVQTALALAKGKFGRVDVAVNCAGIAVASKTYNLKKGQTHTLEDFQRVLDVNLMGTFNVIRLVAGEMGQNEPDQGGQRGVIINTASVAAFEGQVGQAAYSASKGGIVGMTLPIARDLAPIGIRVMTIAPGLFGTPLLTSLPEKVCNFLASQVPFPSRLGDPAEYAHLVQAIIENPFLNGEVIRLDGAIRMQP

SEQ ID NO: 915011 - protein, 252 aa, Homo sapiens
MAAACRSVKGLVAVITGGASGLGLATAERLVGQGASAVLLDLPNSGGEAQAKKLGNNCVFAPADVTSEKDVQTALALAKGKFGRVDVAVNCAGIAVASKTYNLKKGQTHTLEDFQRVLDVNLMGTFNVIRLVAGEMGQNEPDQGGQRGVIINTASVAAFEGQVGQAAYSASKGGIVGMTLPIARDLAPIGLFGTPLLTSLPEKVCNFLASQVPFPSRLGDPAEYAHLVQAIIENPFLNGEVIRLDGAIRMQP

SEQ ID NO: 915012 - protein, 261 aa, Homo sapiens; identical to SEQ ID NO: 915010

SEQ ID NO: 915013 - protein, 163 aa, Homo sapiens
MAAACRSVKGLVAVITGGASGLGLATAERLVGQGASAVLLDLPNSGGEAQAKKLGNNCVFAPADVTSEKDVQTALALAKGKFGRVDVAVNCAGIAVASKTYNLKKGQTHTLEDFQRVLDVNLMGTFNVIRLVAGEMGQNEPDQGGPPKQQQPFIFGPQRSTKK

SEQ ID NO: 915014 - protein, 208 aa, Homo sapiens
MAAACRSVKGLVAVITGGASGLGLATAERLVGQGASAVLLDLPNSGGEAQAKKLGNNCVFAPADVTSEKDVQTALALAKGKFGRVDVAVNCAGIAVASKTYNLKKGQTHTLEDFQRVLDVNLMGTFNVIRLVAGEMGQNEPDQGGRLFGTPLLTSLPEKVCNFLASQVPFPSRLGDPAEYAHLVQAIIENPFLNGEVIRLDGAIRMQP

SEQ ID NO: 915015 - protein, 186 aa, Homo sapiens
MAAACRSVKGLVAVITGGASGLGLATAERLVGQGASAVLLDLPNSGGEAQAKKLGNNCVFAPADVTSEKDVQTALALAKGKFGRVDVAVNCAGIAVASKTYNLKKGQTHTLEDFQRVLDVNLMGTFNVIRLVAGEMGQNEPDQGGQRGVIINTASVAAFEGQTRSSALPFPGVLLSSLGGSPVAIL

SEQ ID NO: 915016 - protein, 115 aa, Homo sapiens
MAAACRSVKGLVAVITGGASGLGLATAERLVGQGASAVLLDLPNSGGEAQAKKLGNNCVFAPADVTSEKDVQTALALAKGKFGPAEYAHLVQAIIENPFLNGEVIRLDGAIRMQP

SEQ ID NO: 915017 - protein, 261 aa, Homo sapiens; identical to SEQ ID NO: 915010

SEQ ID NO: 915018 - protein, 130 aa, Homo sapiens
MAAACRSVKGLVAVITGGASGLGLATAERLVGQGASAVLLDLPNSGGEAQAKKLGNNCVFAPADVTSEKDVQTALALAKGKFGRVDVAVNCAGIAVASKTYNLKKGQTHTLEDFQRVLDVKSSMGPPFQW

SEQ ID NO: 915019 - protein, 253 aa, Homo sapiens
MGLVAVITGGASGLGLATAERLVGQGASAVLLDLPNSGGEAQAKKLGNNCVFAPADVTSEKDVQTALALAKGKFGRVDVAVNCAGIAVASKTYNLKKGQTHTLEDFQRVLDVNLMGTFNVIRLVAGEMGQNEPDQGGQRGVIINTASVAAFEGQVGQAAYSASKGGIVGMTLPIARDLAPIGIRVMTIAPGLFGTPLLTSLPEKVCNFLASQVPFPSRLGDPAEYAHLVQAIIENPFLNGEVIRLDGAIRMQP

SEQ ID NO: 915020 - protein, 217 aa, Homo sapiens
MAAACRSVKGLVAVITGGASGLGLATAERLVGQGASAVLLDLPNSGGEAQAKKLGNNCVFAPADVTSEKDVQTALALAKGKFGRVDVAVNCAGIAVASKTYNLKKGQTHTLEDFQRVLDVNLMGTFNVIRLVAGEMGQNEPDQGGQRGVIINTASVAAFEGQVGQAAYSASKGGIVGMTLPIARDLAPIGIRVMTIAPGRHIPSLHHTWDWVGSMDS

SEQ ID NO: 915021 - protein, 169 aa, Homo sapiens
MAAACRSVKGLVAVITGGASGLGLATAERLVGQGASAVLLDLPNSGGEAQAKKLGNNCVFAPADVTSEKDVQTALALAKGKFGRVDVAVNCAGIAVASKTYNLKKGQTHTLEDFQRVLDVNLMGTFNVIRLVAGEMGQNEPDQGGQRGVIINTASVAAFEGQVCLAPHC

SEQ ID NO: 915022 - protein, 137 aa, Homo sapiens
GSGSHRYPGDDHVPQVCLAKGKFGRVDVAVNCAGIAVASKTYNLKKGQTHTLEDFQRVLDVNLMGTFNVIRLVAGEMGQNEPDQGGQKVCNFLASQVPFPSRLGDPAEYAHLVQAIIENPFLNGEVIRLDGAIRMQP

SEQ ID NO: 915023 - protein, 138 aa, Homo sapiens
PSAFGLKDWDDDEIQASVLAVSQQENLDSRRRKGPGKRRGPTIKISGVQVNVKSIIQHEEEFEMLHKSIPVDPEEKKKYCLTCRVKAAHFDVEWGVEDDSRLLLGIYEHGYGNWELIKTDPELKLTDKLPRSPPLLKC

SEQ ID NO: 915024 - protein, 1738 aa, Homo sapiens
MRNKDKSQEEDSSLHSNASSHSASEEASGSDSGSQSESEQGSDPGSGHGSESNSSSESSESQSESESESAGSKSQPVLPEAKEKPASKKERIADVKKMWEEYPDVYGVRRSNRSRQEPSRFNIKEEASSGSESGSPKRRGQRQLKKQEKWKQEPSEDEQEQGTSAESEPEQKKVKARRPVPRRTVPKPRVKKQPKTQRGKRKKQDSSDEDDDDDEAPKRQTRRRAAKNVSYKEDDDFETDSDDLIEMTGEGVDEQQDNSETIEKVLDSRLGKKGATGASTTVYAIEANGDPSGDFDTEKDEGEIQYLIKWKGWSYIHSTWESEESLQQQKVKGLKKLENFKKKEDEIKQWLGKVSPEDVEYFNCQQELASELNKQYQIVERVIAVKTSKSTLGQTDFPAHSRKPAPSNEPEYLCKWMGLPYSECSWEDEALIGKKFQNCIDSFHSRNNSKTIPTRECKALKQRPRFVALKKQPAYLGGENLELRDYQLEGLNWLAHSWCKNNSVILADEMGLGKTIQTISFLSYLFHQHQLYGPFLIVVPLSTLTSWQREFEIWAPEINVVVYIGDLMSRNTIREYEWIHSQTKRLKFNALITTYEILLKDKTVLGSINWAFLGVDEAHRLKNDDSLLYKTLIDFKSNHRLLITGTPLQNSLKELWSLLHFIMPEKFEFWEDFEEDHGKGRENGYQSLHKVLEPFLLRRVKKDVEKSLPAKVEQILRVEMSALQKQYYKWILTRNYKALAKGTRGSTSGFLNIVMELKKCCNHCYLIKPPEENERENGQEILLSLIRSSGKLILLDKLLTRLRERGNRVLIFSQMVRMLDILAEYLTIKHYPFQRLDGSIKGEIRKQALDHFNADGSEDFCFLLSTRAGGLGINLASADTVVIFDSDWNPQNDLQAQARAHRIGQKKQVNIYRLVTKGTVEEEIIERAKKKMVLDHLVIQRMDTTGRTILENNSGRSNSNPFNKEELTAILKFGAEDLFKELEGEESEPQEMDIDEILRLAETRENEVSTSATDELLSQFKVANFATMEDEEELEERPHKDWDEIIPEEQRKKVEEEERQKELEEIYMLPRIRSSTKKAQTNDSDSDTESKRQAQRSSASESETEDSDDDKKPKRRGRPRSVRKDLVEGFTDAEIRRFIKAYKKFGLPLERLECIARDAELVDKSVADLKRLGELIHNSCVSAMQEYEEQLKENASEGKGPGKRRGPTIKISGVQVNVKSIIQHEEEFEMLHKSIPVDPEEKKKYCLTCRVKAAHFDVEWGVEDDSRLLLGIYEHGYGNWELIKTDPELKLTDKILPVETDKKPQGKQLQTRADYLLKLLRKGLEKKGAVTGGEEAKLKKRKPRVKKENKVPRLKEEHGIELSSPRHSDNPSEEGEVKDDGLEKSPMKKKQKKKENKENKEKQMSSRKDKEGDKERKKSKDKKEKPKSGDAKSSSKSKRSQGPVHITAGSEPVPIGEDEDDDLDQETFSICKERMRPVKKALKQLDKPDKGLNVQEQLEHTRNCLLKIGDRIAECLKAYSDQEHIKLWRRNLWIFVSKFTEFDARKLHKLYKMAHKKRSQEEEEQKKKDDVTGGKKPFRPEASGSSRDSLISQSHTSHNLHPQKPHLPASHGPQMHGHPRDNYNHPNKRHFSNADRGDWQRERKFNYGGGNNNPPWGSDRHHQYEQHWYKDHHYGDRRHMDAHRSGSYRPNNMSRKRPYDQYSSDRDHRGHRDYYDRYAKGCETPGANLCQELFLGRK

SEQ ID NO: 915025 - protein, 1445 aa, Homo sapiens
MRNKDKSQEEDSSLHSNASSHSASEEASGSDSGSQSESEQGSDPGSGHGSESNSSSESSESQSESESESAGSKSQPVLPEAKEKPASKKERIADVKKMWEEYPDVYGVRRSNRSRQEPSRFNIKEEASSGSESGSPKRRGQRQLKKQEKWKQEPSEDEQEQGTSAESEPEQKKVKARRPVPRRTVPKPRVKKQPKTQRGKRKKQDSSDEDDDDDEAPKRQTRRRAAKNVSYKEDDDFETDSDDLIEMTGEGVDEQQDNSETIEKVLDSRLGKKGATGASTTVYAIEANGDPSGDFDTEKDEGEIQYLIKWKGWSYIHSTWESEESLQQQKVKGLKKLENFKKKEDEIKQWLGKVSPEDVEYFNCQQELASELNKQYQIVERVIAVKTSKSTLGQTDFPAHSRKPAPSNEPEYLCKWMGLPYSECSWEDEALIGKKFQNCIDSFHSRNNSKTIPTRECKALKQRPRFVALKKQPAYLGGENLELRDYQLEGLNWLAHSWCKNNSVILADEMGLGKTIQTISFLSYLFHQHQLYGPFLIVVPLSTLTSWQREFEIWAPEINVVVYIGDLMSRNTIREYEWIHSQTKRLKFNALITTYEILLKDKTVLGSINWAFLGVDEAHRLKNDDSLLYKTLIDFKSNHRLLITGTPLQNSLKELWSLLHFIMPEKFEFWEDFEEDHGKGRENGYQSLHKVLEPFLLRRVKKDVEKSLPAKVEQILRVEMSALQKQYYKWILTRNYKALAKGTRGSTSGFLNIVMELKKCCNHCYLIKPPEENERENGQEILLSLIRSSGKLILLDKLLTRLRERGNRVLIFSQMVRMLDILAEYLTIKHYPFQRLDGSIKGEIRKQALDHFNADGSEDFCFLLSTRAGGLGINLASADTVVIFDSDWNPQNDLQAQARAHRIGQKKQVNIYRLVTKGTVEEEIIERAKKKMVLDHLVIQRMDTTGRTILENNSGRSNSNPFNKEELTAILKFGAEDLFKELEGEESEPQEMDIDEILRLAETRENEVSTSATDELLSQFKVANFATMEDEEELEERPHKDWDEIIPEEQRKKVEEEERQKELEEIYMLPRIRSSTKKAQTNDSDSDTESKRQAQRSSASESETEDSDDDKKPKRRGRPRSVRKDLVEGFTDAEIRRFIKAYKKFGLPLERLECIARDAELVDKSVADLKRLGELIHNSCVSAMQEYEEQLKENASEGKGPGKRRGPTIKISGVQVNVKSIIQHEEEFEMLHKSIPVDPEEKKKYCLTCRVKAAHFDVEWGVEDDSRLLLGIYEHGYGNWELIKTDPELKLTDKILPVETDKKPQGKQLQTRADYLLKLLRKGLEKKGAVTGGEEAKLKKRKPRVKKENKVPRLKEEHGIELSSPRHSDNPSEEGEVKDDGLEKSPMKKKQKKKENKENKEKQMSSRKDKEGDKERKKSKDKKEKVMMPFCSCRYPQPLQFAIWI

SEQ ID NO: 915026 - protein, 1602 aa, Homo sapiens
MRNKDKSQEEDSSLHSNASSHSASEEASGSDSGSQSESEQGSDPGSGHGSESNSSSESSESQSESESESAGSKSQPVLPEAKEKPASKKERIADVKKMWEEYPDVYGVRRSNRSRQEPSRFNIKEEASSGSESGSPKRRGQRQLKKQEKWKQEPSEDEQEQGTSAESEPEQKKVKARRPVPRRTVPKPRVKKQPKTQRGKRKKQDSSDEDDDDDEAPKRQTRRRAAKNVSYKEDDDFETDSDDLIEMTGEGVDEQQDNSETIEKVLDSRLGKKGATGASTTVYAIEANGDPSGDFDTEKDEGEIQYLIKWKGWSYIHSTWESEESLQQQKVKGLKKLENFKKKEDEIKQWLGKVSPEDVEYFNCQQELASELNKQYQIVERVIAVKTSKSTLGQTDFPAHSRKPAPSNEPEYLCKWMGLPYSECSWEDEALIGKKFQNCIDSFHSRNNSKTIPTRECKALKQRPRFVALKKQPAYLGGENLELRDYQLEGLNWLAHSWCKNNSVILADEMGLGKTIQTISFLSYLFHQHQLYGPFLIVVPLSTLTSWQREFEIWAPEINVVVYIGDLMSRNTIREYEWIHSQTKRLKFNALITTYEILLKDKTVLGSINWAFLGVDEAHRLKNDDSLLYKTLIDFKSNHRLLITGTPLQNSLKELWSLLHFIMPEKFEFWEDFEEDHGKGRENGYQSLHKVLEPFLLRRVKKDVEKSLPAKVEQILRVEMSALQKQYYKWILTRNYKALAKGTRGSTSGFLNIVMELKKCCNHCYLIKPPEENERENGQEILLSLIRSSGKLILLDKLLTRLRERGNRVLIFSQMVRMLDILAEYLTIKHYPFQRLDGSIKGEIRKQALDHFNADGSEDFCFLLSTRAGGLGINLASADTVVIFDSDWNPQNDLQAQARAHRIGQKKQVNIYRLVTKGTVEEEIIERAKKKMVLDHLVIQRMDTTGRTILENNSGRSNSNPFNKEELTAILKFGAEDLFKELEGEESEPQEMDIDEILRLAETRENEVSTSATDELLSQFKVANFATMEDEEELEERPHKDWDEIIPEEQRKKVEEEERQKELEEIYMLPRIRSSTKKAQTNDSDSDTESKRQAQRSSASESETEDSDDDKKPKRRGRPRSVRKDLVEGFTDAEIRRFIKAYKKFGLPLERLECIARDAELVDKSVADLKRLGELIHNSCVSAMQEYEEQLKENASEGKGPGKRRGPTIKISGVQVNVKSIIQHEEEFEMLHKSIPVDPEEKKKYCLTCRVKAAHFDVEWGVEDDSRLLLGIYEHGYGNWELIKTDPELKLTDKILPVETDKKPQGKQLQTRADYLLKLLRKGLEKKGAVTGGEEAKLKKRKPRVKKENKVPRLKEEHGIELSSPRHSDNPSEEGEVKDDGLEKSPMKKKQKKKENKENKEKQMSSRKDKEGDKERKKSKDKKEKPKSGDAKSSSKSKRSQGPVHITAGSEPVPIGEDEDDDLDQETFSICKERMRPVKKALKQLDKPDKGLNVQEQLEHTRNCLLKIGDRIAECLKAYSDQEHIKLWRRNLWIFVSKFTEFDARKLHKLYKMAHKKRSQEEEVKYKFSPNSYKQIPIPQKNLLIFVFPWGDDHRIMGYCWC

SEQ ID NO: 915027 - protein, 1738 aa, Homo sapiens; identical to SEQ ID NO: 915024

SEQ ID NO: 915028 - protein, 1445 aa, Homo sapiens
MRNKDKSQEEDSSLHSNASSHSASEEASGSDSGSQSESEQGSDPGSGHGSESNSSSESSESQSESESESAGSKSQPVLPEAKEKPASKKERIADVKKMWEEYPDVYGVRRSNRSRQEPSRFNIKEEASSGSESGSPKRRGQRQLKKQEKWKQEPSEDEQEQGTSAESEPEQKKVKARRPVPRRTVPKPRVKKQPKTQRGKRKKQDSSDEDDDDDEAPKRQTRRRAAKNVSYKEDDDFETDSDDLIEMTGEGVDEQQDNSETIEKVLDSRLGKKGATGASTTVYAIEANGDPSGDFDTEKDEGEIQYLIKWKGWSYIHSTWESEESLQQQKVKGLKKLENFKKKEDEIKQWLGKVSPEDVEYFNCQQELASELNKQYQIVERVIAVKTSKSTLGQTDFPAHSRKPAPSNEPEYLCKWMGLPYSECSWEDEALIGKKFQNCIDSFHSRNNSKTIPTRECKALKQRPRFVALKKQPAYLGGENLELRDYQLEGLNWLAHSWCKNNSVILADEMGLGKTIQTISFLSYLFHQHQLYGPFLIVVPLSTLTSWQREFEIWAPEINVVVYIGDLMSRNTIREYEWIHSQTKRLKFNALITTYEILLKDKTVLGSINWAFLGVDEAHRLKNDDSLLYKTLIDFKSNHRLLITGTPLQNSLKELWSLLHFIMPEKFEFWEDFEEDHGKGRENGYQSLHKVLEPFLLRRVKKDVEKSLPAKVEQILRVEMSALQKQYYKWILTRNYKALAKGTRGSTSGFLNIVMELKKCCNHCYLIKPPEENERENGQEILLSLIRSSGKLILLDKLLTRLRERGNRVLIFSQMVRMLDILAEYLTIKHYPFQRLDGSIKGEIRKQALDHFNADGSEDFCFLLSTRAGGLGINLASADTVVIFDSDWNPQNDLQAQARAHRIGQKKQVNIYRLVTKGTVEEEIIERAKKKMVLDHLVIQRMDTTGRTILENNSGRSNSNPFNKEELTAILKFGAEDLFKELEGEESEPQEMDIDEILRLAETRENEVSTSATDELLSQFKVANFATMEDEEELEERPHKDWDEIIPEEQRKKVEEEERQKELEEIYMLPRIRSSTKKAQTNDSDSDTESKRQAQRSSASESETEDSDDDKKPKRRGRPRSVRKDLVEGFTDAEIRRFIKAYKKFGLPLERLECIARDAELVDKSVADLKRLGELIHNSCVSAMQEYEEQLKENASEGKGPGKRRGPTIKISGVQVNVKSIIQHEEEFEMLHKSIPVDPEEKKKYCLTCRVKAAHFDVEWGVEDDSRLLLGIYEHGYGNWELIKTDPELKLTDKILPVETDKKPQGKQLQTRADYLLKLLRKGLEKKGAVTGGEEAKLKKRKPRVKKENKVPRLKEEHGIELSSPRHSDNPSEEGEVKDDGLEKSPMKKKQKKKENKENKEKQMSSRKDKEGDKERKKSKDKKEKEKDQGKGEVQQSRYPEFRLM

SEQ ID NO: 915029 - protein, 1425 aa, Homo sapiens
MRNKDKSQEEDSSLHSNASSHSASEEASGSDSGSQSESEQGSDPGSGHGSESNSSSESSESQSESESESAGSKSQPVLPEAKEKPASKKERIADVKKMWEEYPDVYGVRRSNRSRQEPSRFNIKEEASSGSESGSPKRRGQRQLKKQEKWKQEPSEDEQEQGTSAESEPEQKKVKARRPVPRRTVPKPRVKKQPKTQRGKRKKQDSSDEDDDDDEAPKRQTRRRAAKNVSYKEDDDFETDSDDLIEMTGEGVDEQQDNSETIEKVLDSRLGKKGATGASTTVYAIEANGDPSGDFDTEKDEGEIQYLIKWKGWSYIHSTWESEESLQQQKVKGLKKLENFKKKEDEIKQWLGKVSPEDVEYFNCQQELASELNKQYQIVERVIAVKTSKSTLGQTDFPAHSRKPAPSNEPEYLCKWMGLPYSECSWEDEALIGKKFQNCIDSFHSRNNSKTIPTRECKALKQRPRFVALKKQPAYLGGENLELRDYQLEGLNWLAHSWCKNNSVILADEMGLGKTIQTISFLSYLFHQHQLYGPFLIVVPLSTLTSWQREFEIWAPEINVVVYIGDLMSRNTIREYEWIHSQTKRLKFNALITTYEILLKDKTVLGSINWAFLGVDEAHRLKNDDSLLYKTLIDFKSNHRLLITGTPLQNSLKELWSLLHFIMPEKFEFWEDFEEDHGKGRENGYQSLHKVLEPFLLRRVKKDVEKSLPAKVEQILRVEMSALQKQYYKWILTRNYKALAKGTRGSTSGFLNIVMELKKCCNHCYLIKPPEENERENGQEILLSLIRSSGKLILLDKLLTRLRERGNRVLIFSQMVRMLDILAEYLTIKHYPFQRLDGSIKGEIRKQALDHFNADGSEDFCFLLSTRAGGLGINLASADTVVIFDSDWNPQNDLQAQARAHRIGQKKQVNIYRLVTKGTVEEEIIERAKKKMVLDHLVIQRMDTTGRTILENNSGRSNSNPFNKEELTAILKFGAEDLFKELEGEESEPQEMDIDEILRLAETRENEVSTSATDELLSQFKVANFATMEDEEELEERPHKDWDEIIPEEQRKKVEEEERQKELEEIYMLPRIRSSTKKAQTNDSDSDTESKRQAQRSSASESETEDSDDDKKPKRRGRPRSVRKDLVEGFTDAEIRRFIKAYKKFGLPLERLECIARDAELVDKSVADLKRLGELIHNSCVSAMQEYEEQLKENASEGKGPGKRRGPTIKISGVQVNVKSIIQHEEEFEMLHKSIPVDPEEKKKYCLTCRVKAAHFDVEWGVEDDSRLLLGIYEHGYGNWELIKTDPELKLTDKILPVETDKKPQGKQLQTRADYLLKLLRKGLEKKGAVTGGEEAKLKKRKPRVKKENKVPRLKEEHGIELSSPRHSDNPSEEGEVKDDGLEKSPMKKKQKKKENKEGGEGREGKGGRGRKGGEGKGGEGKEGK

SEQ ID NO: 915030 - protein, 1641 aa, Homo sapiens
MWEEYPDVYGVRRSNRSRQEPSRFNIKEEASSGSESGSPKRRGQRQLKKQEKWKQEPSEDEQEQGTSAESEPEQKKVKARRPVPRRTVPKPRVKKQPKTQRGKRKKQDSSDEDDDDDEAPKRQTRRRAAKNVSYKEDDDFETDSDDLIEMTGEGVDEQQDNSETIEKVLDSRLGKKGATGASTTVYAIEANGDPSGDFDTEKDEGEIQYLIKWKGWSYIHSTWESEESLQQQKVKGLKKLENFKKKEDEIKQWLGKVSPEDVEYFNCQQELASELNKQYQIVERVIAVKTSKSTLGQTDFPAHSRKPAPSNEPEYLCKWMGLPYSECSWEDEALIGKKFQNCIDSFHSRNNSKTIPTRECKALKQRPRFVALKKQPAYLGGENLELRDYQLEGLNWLAHSWCKNNSVILADEMGLGKTIQTISFLSYLFHQHQLYGPFLIVVPLSTLTSWQREFEIWAPEINVVVYIGDLMSRNTIREYEWIHSQTKRLKFNALITTYEILLKDKTVLGSINWAFLGVDEAHRLKNDDSLLYKTLIDFKSNHRLLITGTPLQNSLKELWSLLHFIMPEKFEFWEDFEEDHGKGRENGYQSLHKVLEPFLLRRVKKDVEKSLPAKVEQILRVEMSALQKQYYKWILTRNYKALAKGTRGSTSGFLNIVMELKKCCNHCYLIKPPEENERENGQEILLSLIRSSGKLILLDKLLTRLRERGNRVLIFSQMVRMLDILAEYLTIKHYPFQRLDGSIKGEIRKQALDHFNADGSEDFCFLLSTRAGGLGINLASADTVVIFDSDWNPQNDLQAQARAHRIGQKKQVNIYRLVTKGTVEEEIIERAKKKMVLDHLVIQRMDTTGRTILENNSGRSNSNPFNKEELTAILKFGAEDLFKELEGEESEPQEMDIDEILRLAETRENEVSTSATDELLSQFKVANFATMEDEEELEERPHKDWDEIIPEEQRKKVEEEERQKELEEIYMLPRIRSSTKKAQTNDSDSDTESKRQAQRSSASESETEDSDDDKKPKRRGRPRSVRKDLVEGFTDAEIRRFIKAYKKFGLPLERLECIARDAELVDKSVADLKRLGELIHNSCVSAMQEYEEQLKENASEGKGPGKRRGPTIKISGVQVNVKSIIQHEEEFEMLHKSIPVDPEEKKKYCLTCRVKAAHFDVEWGVEDDSRLLLGIYEHGYGNWELIKTDPELKLTDKILPVETDKKPQGKQLQTRADYLLKLLRKGLEKKGAVTGGEEAKLKKRKPRVKKENKVPRLKEEHGIELSSPRHSDNPSEEGEVKDDGLEKSPMKKKQKKKENKENKEKQMSSRKDKEGDKERKKSKDKKEKPKSGDAKSSSKSKRSQGPVHITAGSEPVPIGEDEDDDLDQETFSICKERMRPVKKALKQLDKPDKGLNVQEQLEHTRNCLLKIGDRIAECLKAYSDQEHIKLWRRNLWIFVSKFTEFDARKLHKLYKMAHKKRSQEEEEQKKKDDVTGGKKPFRPEASGSSRDSLISQSHTSHNLHPQKPHLPASHGPQMHGHPRDNYNHPNKRHFSNADRGDWQRERKFNYGGGNNNPPWGSDRHHQYEQHWYKDHHYGDRRHMDAHRSGSYRPNNMSRKRPYDQYSSDRDHRGHRDYYDRYAKGCETPGANLCQELFLGRK

SEQ ID NO: 915031 - protein, 1267 aa, Homo sapiens
MRNKDKSQEEDSSLHSNASSHSASEEASGSDSGSQSESEQGSDPGSGHGSESNSSSESSESQSESESESAGSKSQPVLPEAKEKPASKKERIADVKKMWEEYPDVYGVRRSNRSRQEPSRFNIKEEASSGSESGSPKRRGQRQLKKQEKWKQEPSEDEQEQGTSAESEPEQKKVKARRPVPRRTVPKPRVKKQPKTQRGKRKKQDSSDEDDDDDEAPKRQTRRRAAKNVSYKEDDDFETDSDDLIEMTGEGVDEQQDNSETIEKVLDSRLGKKGATGASTTVYAIEANGDPSGDFDTEKDEGEIQYLIKWKGWSYIHSTWESEESLQQQKVKGLKKLENFKKKEDEIKQWLGKVSPEDVEYFNCQQELASELNKQYQIVERVIAVKTSKSTLGQTDFPAHSRKPAPSNEPEYLCKWMGLPYSECSWEDEALIGKKFQNCIDSFHSRNNSKTIPTRECKALKQRPRFVALKKQPAYLGGENLELRDYQLEGLNWLAHSWCKNNSVILADEMGLGKTIQTISFLSYLFHQHQLYGPFLIVVPLSTLTSWQREFEIWAPEINVVVYIGDLMSRNTIREYEWIHSQTKRLKFNALITTYEILLKDKTVLGSINWAFLGVDEAHRLKNDDSLLYKTLIDFKSNHRLLITGTPLQNSLKELWSLLHFIMPEKFEFWEDFEEDHGKGRENGYQSLHKVLEPFLLRRVKKDVEKSLPAKVEQILRVEMSALQKQYYKWILTRNYKALAKGTRGSTSGFLNIVMELKKCCNHCYLIKPPEENERENGQEILLSLIRSSGKLILLDKLLTRLRERGNRVLIFSQMVRMLDILAEYLTIKHYPFQRLDGSIKGEIRKQALDHFNADGSEDFCFLLSTRAGGLGINLASADTVVIFDSDWNPQNDLQAQARAHRIGQKKQVNIYRLVTKGTVEEEIIERAKKKMVLDHLVIQRMDTTGRTILENNSGRSNSNPFNKEELTAILKFGAEDLFKELEGEESEPQEMDIDEILRLAETRENEVSTSATDELLSQFKVANFATMEDEEELEERPHKDWDEIIPEEQRKKVEEEERQKELEEIYMLPRIRSSTKKAQTNDSDSDTESKRQAQRSSASESETEDSDDDKKPKRRGRPRSVRKDLVEGFTDAEIRRFIKAYKKFGLPLERLECIARDAELVDKSVADLKRLGELIHNSCVSAMQEYEEQLKENASEGKGPGKRRGPTIKISGVQVNVKSIIQHEEEFEMLHKSIPVDPEEKKKYCLTCRVKAAHFDVEWGVEEVDC

SEQ ID NO: 915032 - protein, 1379 aa, Homo sapiens
MRNKDKSQEEDSSLHSNASSHSASEEASGSDSGSQSESEQGSDPGSGHGSESNSSSESSESQSESESESAGSKSQPVLPEAKEKPASKKERIADVKKMWEEYPDVYGVRRSNRSRQEPSRFNIKEEASSGSESGSPKRRGQRQLKKQEKWKQEPSEDEQEQGTSAESEPEQKKVKARRPVPRRTVPKPRVKKQPKTQRGKRKKQDSSDEDDDDDEAPKRQTRRRAAKNVSYKEDDDFETDSDDLIEMTGEGVDEQQDNSETIEKVLDSRLGKKGATGASTTVYAIEANGDPSGDFDTEKDEGEIQYLIKWKGWSYIHSTWESEESLQQQKVKGLKKLENFKKKEDEIKQWLGKVSPEDVEYFNCQQELASELNKQYQIVERVIAVKTSKSTLGQTDFPAHSRKPAPSNEPEYLCKWMGLPYSECSWEDEALIGKKFQNCIDSFHSRNNSKTIPTRECKALKQRPRFVALKKQPAYLGGENLELRDYQLEGLNWLAHSWCKNNSVILADEMGLGKTIQTISFLSYLFHQHQLYGPFLIVVPLSTLTSWQREFEIWAPEINVVVYIGDLMSRNTIREYEWIHSQTKRLKFNALITTYEILLKDKTVLGSINWAFLGVDEAHRLKNDDSLLYKTLIDFKSNHRLLITGTPLQNSLKELWSLLHFIMPEKFEFWEDFEEDHGKGRENGYQSLHKVLEPFLLRRVKKDVEKSLPAKVEQILRVEMSALQKQYYKWILTRNYKALAKGTRGSTSGFLNIVMELKKCCNHCYLIKPPEENERENGQEILLSLIRSSGKLILLDKLLTRLRERGNRVLIFSQMVRMLDILAEYLTIKHYPFQRLDGSIKGEIRKQALDHFNADGSEDFCFLLSTRAGGLGINLASADTVVIFDSDWNPQNDLQAQARAHRIGQKKQVNIYRLVTKGTVEEEIIERAKKKMVLDHLVIQRMDTTGRTILENNSGRSNSNPFNKEELTAILKFGAEDLFKELEGEESEPQEMDIDEILRLAETRENEVSTSATDELLSQFKVANFATMEDEEELEERPHKDWDEIIPEEQRKKVEEEERQKELEEIYMLPRIRSSTKKAQTNDSDSDTESKRQAQRSSASESETEDSDDDKKPKRRGRPRSVRKDLVEGFTDAEIRRFIKAYKKFGLPLERLECIARDAELVDKSVADLKRLGELIHNSCVSAMQEYEEQLKENASEGKGPGKRRGPTIKISGVQVNVKSIIQHEEEFEMLHKSIPVDPEEKKKYCLTCRVKAAHFDVEWGVEDDSRLLLGIYEHGYGNWELIKTDPELKLTDKILPVETDKKPQGKQLQTRADYLLKLLRKGLEKKGAVTGGEEAKLKKRKPRVKKENKVPRLKEEHGIELSSPRHSDNPSEEGEVKV

SEQ ID NO: 915033 - protein, 500 aa, Homo sapiens [sequence omitted]

SEQ ID NO: 915034 - protein, 458 aa, Homo sapiens
MRNKDKSQEEDSSLHSNASSHSASEEASGSDSGSQSESEQGSDPGSGHGSESNSSSESSESQSESESESAGSKSQPVLPEAKEKPASKKERIADVKKMWEEYPDVYGVRRSNRSRQEPSRFNIKEEASSGSESGSPKRRGQRQLKKQEKWKQEPSEDEQEQGTSAESEPEQKKVKARRPVPRRTVPKPRVKKQPKTQRGKRKKQDSSDEDDDDDEAPKRQTRRRAAKNVSYKEDDDFETDSDDLIEMTGEGVDEQQDNSETIEKVLDSRLGKKGATGASTTVYAIEANGDPSGDFDTEKDEGEIQYLIKWKGWSYIHSTWESEESLQQQKVKGLTTHTYENFTHTHEDAPQTNGSGTSFSLKTVELCTTWPNQRRSGFTDVRHLNHGSPIRYHTNVTSRDTHTSNPTLEVTPRYSSSHTPEPGTLNNKPTNTTVHYGMRTPIIQKSHPCDNNTHTNWH

SEQ ID NO: 915035 - protein, 352 aa, Homo sapiens
MKKKQKKKENKENKEKQMSSRKDKEGDKERKKSKDKKEKPKSGDAKSSSKSKRSQGPVHITAGSEPVPIGEDEDDDLDQETFSICKERMRPVKKALKQLDKPDKGLNVQEQLEHTRNCLLKIGDRIAECLKAYSDQEHIKLWRRNLWIFVSKFTEFDARKLHKLYKMAHKKRSQEEEEQKKKDDVTGGKKPFRPEASGSSRDSLISQSHTSHNLHPQKPHLPASHGPQMHGHPRDNYNHPNKRHFSNADRGDWQRERKFNYGGGNNNPPWGSDRHHQYEQHWYKDHHYGDRRHMDAHRSGSYRPNNMSRKRPYDQYSSDRDHRGHRDYYDRYAKGCETPGANLCQELFLGRK

SEQ ID NO: 915036 - protein, 124 aa, Homo sapiens
MHGHPRDNYNHPNKRHFSNADRGDWQRERKFNYGGGNNNPPWGSDRHHQYEQHWYKDHHYGDRRHMDAHRSGSYRPNNMSRKRPYDQYSSDRDHRGHRDYYDRYAKGCETPGANLCQELFLGRK

SEQ ID NO: 915037 - protein, 102 aa, Homo sapiens
LFQVEVFWCFIHKGSLQIIAFLGSFLISGVIYSLSSVLNPFAATGASTTVYAIEANGDPSGDFDTEKDEGEIQYLIKWKGWSYIHSTWESEESLQQQKVKGL

SEQ ID NO: 915038 - protein, 500 aa, Homo sapiens [sequence omitted]

SEQ ID NO: 915039 - protein, 1779 aa, Homo sapiens
MRNKDKSQEEDSSLHSNASSHSASEEASGSDSGSQSESEQGSDPGSGHGSESNSSSESSESQSESESESAGSKSQPVLPEAKEKPASKKERIADVKKMWEEYPDVYGVRRSNRSRQEPSRFNIKEEASSGSESGSPKRRGQRQLKKQEKWKQEPSEDEQEQGTSAESEPEQKKVKARRPVPRRTVPKPRVKKQPKTQRGKRKKQDSSDEDDDDDEAPKRQTRRRAAKNVSYKEDDDFETDSDDLIEMTGEGVDEQQDNSETIEKVLDSRLGKKGATGASTTVYAIEANGDPSGDFDTEKDEGEIQYLIKWKGWSYIHSTWESEESLQQQKVKGLKKLENFKKKEDEIKQWLGKVSPEDVEYFNCQQELASELNKQYQIVERVIAVKTSKSTLGQTDFPAHSRKPAPSNEPEYLCKWMGLPYSECSWEDEALIGKKFQNCIDSFHSRNNSKTIPTRECKALKQRPRFVALKKQPAYLGGENLELRDYQLEGLNWLAHSWCKNNSVILADEMGLGKTIQTISFLSYLFHQHQLYGPFLIVVPLSTLTSWQREFEIWAPEINVVVYIGDLMSRNTIREYEWIHSQTKRLKFNALITTYEILLKDKTVLGSINWAFLGVDEAHRLKNDDSLLYKTLIDFKSNHRLLITGTPLQNSLKELWSLLHFIMPEKFEFWEDFEEDHGKGRENGYQSLHKVLEPFLLRRVKKDVEKSLPAKVEQILRVEMSALQKQYYKWILTRNYKALAKGTRGSTSGFLNIVMELKKCCNHCYLIKPPEENERENGQEILLSLIRSSGKLILLDKLLTRLRERGNRVLIFSQMVRMLDILAEYLTIKHYPFQRLDGSIKGEIRKQALDHFNADGSEDFCFLLSTRAGGLGINLASADTVVIFDSDWNPQNDLQAQARAHRIGQKKQVNIYRLVTKGTVEEEIIERAKKKMVLDHLVIQRMDTTGRTILENNSGRSNSNPFNKEELTAILKFGAEDLFKELEGEESEPQEMDIDEILRLAETRENEVSTSATDELLSQFKVANFATMEDEEELEERPHKDWDEIIPEEQRKKVEEEERQKELEEIYMLPRIRSSTKKAQTNDSDSDTESKRQAQRSSASESETEDSDDDKKPKRRGRPRSVRKDLVEGFTDAEIRRFIKAYKKFGLPLERLECIARDAELVDKSVADLKRLGELIHNSCVSAMQEYEEQLKENASEGKGPGKRRGPTIKISGVQVNVKSIIQHEEEFEMLHKSIPVDPEEKKKYCLTCRVKAAHFDVEWGVEDDSRLLLGIYEHGYGNWELIKTDPELKLTDKLNLAPGIPCSWKEEIHDGWDALADEATSPSYLSCSTLLTAQILPVETDKKPQGKQLQTRADYLLKLLRKGLEKKGAVTGGEEAKLKKRKPRVKKENKVPRLKEEHGIELSSPRHSDNPSEEGEVKDDGLEKSPMKKKQKKKENKENKEKQMSSRKDKEGDKERKKSKDKKEKPKSGDAKSSSKSKRSQGPVHITAGSEPVPIGEDEDDDLDQETFSICKERMRPVKKALKQLDKPDKGLNVQEQLEHTRNCLLKIGDRIAECLKAYSDQEHIKLWRRNLWIFVSKFTEFDARKLHKLYKMAHKKRSQEEEEQKKKDDVTGGKKPFRPEASGSSRDSLISQSHTSHNLHPQKPHLPASHGPQMHGHPRDNYNHPNKRHFSNADRGDWQRERKFNYGGGNNNPPWGSDRHHQYEQHWYKDHHYGDRRHMDAHRSGSYRPNNMSRKRPYDQYSSDRDHRGHRDYYDRYAKGCETPGANLCQELFLGRK

SEQ ID NO: 915040 - protein, 1586 aa, Homo sapiens
MRNKDKSQEEDSSLHSNASSHSASEEASGSDSGSQSESEQGSDPGSGHGSESNSSSESSESQSESESESAGSKSQPVLPEAKEKPASKKERIADVKKMWEEYPDVYGVRRSNRSRQEPSRFNIKEEASSGSESGSPKRRGQRQLKKQEKWKQEPSEDEQEQGTSAESEPEQKKVKARRPVPRRTVPKPRVKKQPKTQRGKRKKQDSSDEDDDDDEAPKRQTRRRAAKNVSYKEDDDFETDSDDLIEMTGEGVDEQQDNSETIEKVLDSRLGKKGATGASTTVYAIEANGDPSGDFDTEKDEGEIQYLIKWKGWSYIHSTWESEESLQQQKVKGLKKLENFKKKEDEIKQWLGKVSPEDVEYFNCQQELASELNKQYQIVERVIAVKTSKSTLGQTDFPAHSRKPAPSNEPEYLCKWMGLPYSECSWEDEALIGKKFQNCIDSFHSRNNSKTIPTRECKALKQRPRFVALKKQPAYLGGENLELRDYQLEGLNWLAHSWCKNNSVILADEMGLGKTIQTISFLSYLFHQHQLYGPFLIVVPLSTLTSWQREFEIWAPEINVVVYIGDLMSRNTIREYEWIHSQTKRLKFNALITTYEILLKDKTVLGSINWAFLGVDEAHRLKNDDSLLYKTLIDFKSNHRLLITGTPLQNSLKELWSLLHFIMPEKFEFWEDFEEDHGKGRENGYQSLHKVLEPFLLRRVKKDVEKSLPAKVEQILRVEMSALQKQYYKWILTRNYKALAKGTRGSTSGFLNIVMELKKCCNHCYLIKPPEENERENGQEILLSLIRSSGKLILLDKLLTRLRERGNRVLIFSQMVRMLDILAEYLTIKHYPFQRLDGSIKGEIRKQALDHFNADGSEDFCFLLSTRAGGLGINLASADTVVIFDSDWNPQNDLQAQARAHRIGQKKQVNIYRLVTKGTVEEEIIERAKKKMVLDHLVIQRMDTTGRTILENNSGRSNSNPFNKEELTAILKFGAEDLFKELEGEESEPQEMDIDEILRLAETRENEVSTSATDELLSQFKVANFATMEDEEELEERPHKDWDEIIPEEQRKKVEEEERQKELEEIYMLPRIRSSTKKAQTNDSDSDTESKRQAQRSSASESETEDSDDDKKPKRRGRPRSVRKDLVEGFTDAEIRRFIKAYKKFGLPLERLECIARDAELVDKSVADLKRLGELIHNSCVSAMQEYEEQLKENASEGKGPGKRRGPTIKISGVQVNVKSIIQHEEEFEMLHKSIPVDPEEKKKYCLTCRVKAAHFDVEWGVEDDSRLLLGIYEHGYGNWELIKTDPELKLTDKILPVETDKKPQGKQLQTRADYLLKLLRKGLEKKGAVTGGEEAKLKKRKPRVKKENKVPRLKEEHGIELSSPRHSDNPSEEGEVKDDGLEKSPMKKKQKKKENKENKEKQMSSRKDKEGDKERKKSKDKKEKPKSGDAKSSSKSKRSQGPVHITAGSEPVPIGEDEDDDLDQETFSICKERMRPVKKALKQLDKPDKGLNVQEQLEHTRNCLLKIGDRIAECLKAYSDQEHIKLWRRNLWIFVSKFTEFDARKLHKLYKMAHKKRSQEEEEQKKKDTPISGFTGILCTTMPTN

SEQ ID NO: 915041 - protein, 1530 aa, Homo sapiens
MRNKDKSQEEDSSLHSNASSHSASEEASGSDSGSQSESEQGSDPGSGHGSESNSSSESSESQSESESESAGSKSQPVLPEAKEKPASKKERIADVKKMWEEYPDVYGVRRSNRSRQEPSRFNIKEEASSGSESGSPKRRGQRQLKKQEKWKQEPSEDEQEQGTSAESEPEQKKVKARRPVPRRTVPKPRVKKQPKTQRGKRKKQDSSDEDDDDDEAPKRQTRRRAAKNVSYKEDDDFETDSDDLIEMTGEGVDEQQDNSETIEKVLDSRLGKKGATGASTTVYAIEANGDPSGDFDTEKDEGEIQYLIKWKGWSYIHSTWESEESLQQQKVKGLKKLENFKKKEDEIKQWLGKVSPEDVEYFNCQQELASELNKQYQIVERVIAVKTSKSTLGQTDFPAHSRKPAPSNEPEYLCKWMGLPYSECSWEDEALIGKKFQNCIDSFHSRNNSKTIPTRECKALKQRPRFVALKKQPAYLGGENLELRDYQLEGLNWLAHSWCKNNSVILADEMGLGKTIQTISFLSYLFHQHQLYGPFLIVVPLSTLTSWQREFEIWAPEINVVVYIGDLMSRNTIREYEWIHSQTKRLKFNALITTYEILLKDKTVLGSINWAFLGVDEAHRLKNDDSLLYKTLIDFKSNHRLLITGTPLQNSLKELWSLLHFIMPEKFEFWEDFEEDHGKGRENGYQSLHKVLEPFLLRRVKKDVEKSLPAKVEQILRVEMSALQKQYYKWILTRNYKALAKGTRGSTSGFLNIVMELKKCCNHCYLIKPPEENERENGQEILLSLIRSSGKLILLDKLLTRLRERGNRVLIFSQMVRMLDILAEYLTIKHYPFQRLDGSIKGEIRKQALDHFNADGSEDFCFLLSTRAGGLGINLASADTVVIFDSDWNPQNDLQAQARAHRIGQKKQVNIYRLVTKGTVEEEIIERAKKKMVLDHLVIQRMDTTGRTILENNSGRSNSNPFNKEELTAILKFGAEDLFKELEGEESEPQEMDIDEILRLAETRENEVSTSATDELLSQFKVANFATMEDEEELEERPHKDWDEIIPEEQRKKVEEEERQKELEEIYMLPRIRSSTKKAQTNDSDSDTESKRQAQRSSASESETEDSDDDKKPKRRGRPRSVRKDLVEGFTDAEIRRFIKAYKKFGLPLERLECIARDAELVDKSVADLKRLGELIHNSCVSAMQEYEEQLKENASEGKGPGKRRGPTIKISGVQVNVKSIIQHEEEFEMLHKSIPVDPEEKKKYCLTCRVKAAHFDVEWGVEDDSRLLLGIYEHGYGNWELIKTDPELKLTDKILPVETDKKPQGKQLQTRADYLLKLLRKGLEKKGAVTGGEEAKLKKRKPRVKKENKVPRLKEEHGIELSSPRHSDNPSEEGEVKDDGLEKSPMKKKQKKKENKENKEKQMSSRKDKEGDKERKKSKDKKEKPKSGDAKSSSKSKRSQGPVHITAGSEPVPIGEDEDDDLDQETFSICKERMRPVKKALKQLDKPDKGLNVQEQLEHTRNCLLKIGDRIAECLKAYSDQEHIKLWRR

SEQ ID NO: 915042 - protein, 1414 aa, Homo sapiens
MRNKDKSQEEDSSLHSNASSHSASEEASGSDSGSQSESEQGSDPGSGHGSESNSSSESSESQSESESESAGSKSQPVLPEAKEKPASKKERIADVKKMWEEYPDVYGVRRSNRSRQEPSRFNIKEEASSGSESGSPKRRGQRQLKKQEKWKQEPSEDEQEQGTSAESEPEQKKVKARRPVPRRTVPKPRVKKQPKTQRGKRKKQDSSDEDDDDDEAPKRQTRRRAAKNVSYKEDDDFETDSDDLIEMTGEGVDEQQDNSETIEKVLDSRLGKKGATGASTTVYAIEANGDPSGDFDTEKDEGEIQYLIKWKGWSYIHSTWESEESLQQQKVKGLKKLENFKKKEDEIKQWLGKVSPEDVEYFNCQQELASELNKQYQIVERVIAVKTSKSTLGQTDFPAHSRKPAPSNEPEYLCKWMGLPYSECSWEDEALIGKKFQNCIDSFHSRNNSKTIPTRECKALKQRPRFVALKKQPAYLGGENLELRDYQLEGLNWLAHSWCKNNSVILADEMGLGKTIQTISFLSYLFHQHQLYGPFLIVVPLSTLTSWQREFEIWAPEINVVVYIGDLMSRNTIREYEWIHSQTKRLKFNALITTYEILLKDKTVLGSINWAFLGVDEAHRLKNDDSLLYKTLIDFKSNHRLLITGTPLQNSLKELWSLLHFIMPEKFEFWEDFEEDHGKGRENGYQSLHKVLEPFLLRRVKKDVEKSLPAKVEQILRVEMSALQKQYYKWILTRNYKALAKGTRGSTSGFLNIVMELKKCCNHCYLIKPPEENERENGQEILLSLIRSSGKLILLDKLLTRLRERGNRVLIFSQMVRMLDILAEYLTIKHYPFQRLDGSIKGEIRKQALDHFNADGSEDFCFLLSTRAGGLGINLASADTVVIFDSDWNPQNDLQAQARAHRIGQKKQVNIYRLVTKGTVEEEIIERAKKKMVLDHLVIQRMDTTGRTILENNSGRSNSNPFNKEELTAILKFGAEDLFKELEGEESEPQEMDIDEILRLAETRENEVSTSATDELLSQFKVANFATMEDEEELEERPHKDWDEIIPEEQRKKVEEEERQKELEEIYMLPRIRSSTKKAQTNDSDSDTESKRQAQRSSASESETEDSDDDKKPKRRGRPRSVRKDLVEGFTDAEIRRFIKAYKKFGLPLERLECIARDAELVDKSVADLKRLGELIHNSCVSAMQEYEEQLKENASEGKGPGKRRGPTIKISGVQVNVKSIIQHEEEFEMLHKSIPVDPEEKKKYCLTCRVKAAHFDVEWGVEDDSRLLLGIYEHGYGNWELIKTDPELKLTDKILPVETDKKPQGKQLQTRADYLLKLLRKGLEKKGAVTGGEEAKLKKRKPRVKKENKVPRLKEEHGIELSSPRHSDNPSEEGEVKDDGLEKSPMKKKQKKKENKENKEKQMSSRKDKRLKN

SEQ ID NO: 915043 - protein, 1482 aa, Homo sapiens
MRNKDKSQEEDSSLHSNASSHSASEEASGSDSGSQSESEQGSDPGSGHGSESNSSSESSESQSESESESAGSKSQPVLPEAKEKPASKKERIADVKKMWEEYPDVYGVRRSNRSRQEPSRFNIKEEASSGSESGSPKRRGQRQLKKQEKWKQEPSEDEQEQGTSAESEPEQKKVKARRPVPRRTVPKPRVKKQPKTQRGKRKKQDSSDEDDDDDEAPKRQTRRRAAKNVSYKEDDDFETDSDDLIEMTGEGVDEQQDNSETIEKVLDSRLGKKGATGASTTVYAIEANGDPSGDFDTEKDEGEIQYLIKWKGWSYIHSTWESEESLQQQKVKGLKKLENFKKKEDEIKQWLGKVSPEDVEYFNCQQELASELNKQYQIVERVIAVKTSKSTLGQTDFPAHSRKPAPSNEPEYLCKWMGLPYSECSWEDEALIGKKFQNCIDSFHSRNNSKTIPTRECKALKQRPRFVALKKQPAYLGGENLELRDYQLEGLNWLAHSWCKNNSVILADEMGLGKTIQTISFLSYLFHQHQLYGPFLIVVPLSTLTSWQREFEIWAPEINVVVYIGDLMSRNTIREYEWIHSQTKRLKFNALITTYEILLKDKTVLGSINWAFLGVDEAHRLKNDDSLLYKTLIDFKSNHRLLITGTPLQNSLKELWSLLHFIMPEKFEFWEDFEEDHGKGRENGYQSLHKVLEPFLLRRVKKDVEKSLPAKVEQILRVEMSALQKQYYKWILTRNYKALAKGTRGSTSGFLNIVMELKKCCNHCYLIKPPEENERENGQEILLSLIRSSGKLILLDKLLTRLRERGNRVLIFSQMVRMLDILAEYLTIKHYPFQRLDGSIKGEIRKQALDHFNADGSEDFCFLLSTRAGGLGINLASADTVVIFDSDWNPQNDLQAQARAHRIGQKKQVNIYRLVTKGTVEEEIIERAKKKMVLDHLVIQRMDTTGRTILENNSGRSNSNPFNKEELTAILKFGAEDLFKELEGEESEPQEMDIDEILRLAETRENEVSTSATDELLSQFKVANFATMEDEEELEERPHKDWDEIIPEEQRKKVEEEERQKELEEIYMLPRIRSSTKKAQTNDSDSDTESKRQAQRSSASESETEDSDDDKKPKRRGRPRSVRKDLVEGFTDAEIRRFIKAYKKFGLPLERLECIARDAELVDKSVADLKRLGELIHNSCVSAMQEYEEQLKENASEGKGPGKRRGPTIKISGVQVNVKSIIQHEEEFEMLHKSIPVDPEEKKKYCLTCRVKAAHFDVEWGVEDDSRLLLGIYEHGYGNWELIKTDPELKLTDKLNLAPGIPCSWKEEIHDGWDALADEATSPSYLSCSTLLTAQILPVETDKKPQGKQLQTRADYLLKLLRKGLEKKGAVTGGEEAKLKKRKPRVKKENKVPRLKEEHGIELSSPRHSDNPSEEGEVKDDGLEKSPMKKKQKKKENKENKEKQMSSRKDKEGDKERKKSKDKKEKPKVVMPNLRFDAFGIL

SEQ ID NO: 915044 - protein, 1299 aa, Homo sapiens
MRNKDKSQEEDSSLHSNASSHSASEEASGSDSGSQSESEQGSDPGSGHGSESNSSSESSESQSESESESAGSKSQPVLPEAKEKPASKKERIADVKKMWEEYPDVYGVRRSNRSRQEPSRFNIKEEASSGSESGSPKRRGQRQLKKQEKWKQEPSEDEQEQGTSAESEPEQKKVKARRPVPRRTVPKPRVKKQPKTQRGKRKKQDSSDEDDDDDEAPKRQTRRRAAKNVSYKEDDDFETDSDDLIEMTGEGVDEQQDNSETIEKVLDSRLGKKGATGASTTVYAIEANGDPSGDFDTEKDEGEIQYLIKWKGWSYIHSTWESEESLQQQKVKGLKKLENFKKKEDEIKQWLGKVSPEDVEYFNCQQELASELNKQYQIVERVIAVKTSKSTLGQTDFPAHSRKPAPSNEPEYLCKWMGLPYSECSWEDEALIGKKFQNCIDSFHSRNNSKTIPTRECKALKQRPRFVALKKQPAYLGGENLELRDYQLEGLNWLAHSWCKNNSVILADEMGLGKTIQTISFLSYLFHQHQLYGPFLIVVPLSTLTSWQREFEIWAPEINVVVYIGDLMSRNTIREYEWIHSQTKRLKFNALITTYEILLKDKTVLGSINWAFLGVDEAHRLKNDDSLLYKTLIDFKSNHRLLITGTPLQNSLKELWSLLHFIMPEKFEFWEDFEEDHGKGRENGYQSLHKVLEPFLLRRVKKDVEKSLPAKVEQILRVEMSALQKQYYKWILTRNYKALAKGTRGSTSGFLNIVMELKKCCNHCYLIKPPEENERENGQEILLSLIRSSGKLILLDKLLTRLRERGNRVLIFSQMVRMLDILAEYLTIKHYPFQRLDGSIKGEIRKQALDHFNADGSEDFCFLLSTRAGGLGINLASADTVVIFDSDWNPQNDLQAQARAHRIGQKKQVNIYRLVTKGTVEEEIIERAKKKMVLDHLVIQRMDTTGRTILENNSGRSNSNPFNKEELTAILKFGAEDLFKELEGEESEPQEMDIDEILRLAETRENEVSTSATDELLSQFKVANFATMEDEEELEERPHKDWDEIIPEEQRKKVEEEERQKELEEIYMLPRIRSSTKKAQTNDSDSDTESKRQAQRSSASESETEDSDDDKKPKRRGRPRSVRKDLVEGFTDAEIRRFIKAYKKFGLPLERLECIARDAELVDKSVADLKRLGELIHNSCVSAMQEYEEQLKENASEGKGPGKRRGPTIKISGVQVNVKSIIQHEEEFEMLHKSIPVDPEEKKKYCLTCRVKAAHFDVEWGVEDDSRLLLGIYEHGYGNWELIKTDPELKLTDKVTLPC

SEQ ID NO: 915045 - protein, 1738 aa, Homo sapiens; identical to SEQ ID NO: 915024

SEQ ID NO: 915046 - protein, 1036 aa, Homo sapiens
MRNKDKSQEEDSSLHSNASSHSASEEASGSDSGSQSESEQGSDPGSGHGSESNSSSESSESQSESESESAGSKSQPVLPEAKEKPASKKERIADVKKMWEEYPDVYGVRRSNRSRQEPSRFNIKEEASSGSESGSPKRRGQRQLKKQEKWKQEPSEDEQEQGTSAESEPEQKKVKARRPVPRRTVPKPRVKKQPKTQRGKRKKQDSSDEDDDDDEAPKRQTRRRAAKNVSYKEDDDFETDSDDLIEMTGEGVDEQQDNSETIEKVLDSRLGKKGATGASTTVYAIEANGDPSGDFDTEKDEGEIQYLIKWKGWSYIHSTWESEESLQQQKVKGLKKLENFKKKEDEIKQWLGKVSPEDVEYFNCQQELASELNKQYQIVERVIAVKTSKSTLGQTDFPAHSRKPAPSNEPEYLCKWMGLPYSECSWEDEALIGKKFQNCIDSFHSRNNSKTIPTRECKALKQRPRFVALKKQPAYLGGENLELRDYQLEGLNWLAHSWCKNNSVILADEMGLGKTIQTISFLSYLFHQHQLYGPFLIVVPLSTLTSWQREFEIWAPEINVVVYIGDLMSRNTIREYEWIHSQTKRLKFNALITTYEILLKDKTVLGSINWAFLGVDEAHRLKNDDSLLYKTLIDFKSNHRLLITGTPLQNSLKELWSLLHFIMPEKFEFWEDFEEDHGKGRENGYQSLHKVLEPFLLRRVKKDVEKSLPAKVEQILRVEMSALQKQYYKWILTRNYKALAKGTRGSTSGFLNIVMELKKCCNHCYLIKPPEENERENGQEILLSLIRSSGKLILLDKLLTRLRERGNRVLIFSQMVRMLDILAEYLTIKHYPFQRLDGSIKGEIRKQALDHFNADGSEDFCFLLSTRAGGLGINLASADTVVIFDSDWNPQNDLQAQARAHRIGQKKQVNIYRLVTKGTVEEEIIERAKKKMVLDHLVIQRMDTTGRTILENNSGRSNSNPFNKEELTAILKFGAEDLFKELEGEESEPQEMDIDEILRLAETRENEVSTSATDELLSQFKVANFATWIQKRRRDP

SEQ ID NO: 915047 - protein, 466 aa, Homo sapiens
GFSVTGSHGHEIGSEALSIFWVILPVETDKKPQGKQLQTRADYLLKLLRKGLEKKGAVTGGEEAKLKKRKPRVKKENKVPRLKEEHGIELSSPRHSDNPSEEGEVKDDGLEKSPMKKKQKKKENKENKEKQMSSRKDKEGDKERKKSKDKKEKPKSGDAKSSSKSKRSQGPVHITAGSEPVPIGEDEDDDLDQETFSICKERMRPVKKALKQLDKPDKGLNVQEQLEHTRNCLLKIGDRIAECLKAYSDQEHIKLWRRNLWIFVSKFTEFDARKLHKLYKMAHKKRSQEEEEQKKKDDVTGGKKPFRPEASGSSRDSLISQSHTSHNLHPQKPHLPASHGPQMHGHPRDNYNHPNKRHFSNADRGDWQRERKFNYGGGNNNPPWGSDRHHQYEQHWYKDHHYGDRRHMDAHRSGSYRPNNMSRKRPYDQYSSDRDHRGHRDYYDRYAKGCETPGANLCQELFLGRK

SEQ ID NO: 915048 - protein, 42 aa, Homo sapiens
DKKPQGKQLQTRADYLLKLLRKGLEKKGAVTGGEEVSTLPAG

SEQ ID NO: 915049 - protein, 248 aa, Homo sapiens
VIPGSSPYNSARPRPPAPPAPQQNSAQRSRAPGSERPAAQSGGETDRSADRDSGRDSGETRVCERAGPSGPRSGSAAQRAPSANMSVDPLSSKALKIKRELSENTPHLSDEALMGLSVRELNRHLRGLSAEEVTRLKQRRRTLKNRGYAASCRVKRVCQKEELQKQKSELEREVDKLARENAAMRLELDALRGKCEALQGFARSVAAARGPATLVAPASVITIVKSTPGSGSGPAHGPDPAHGPASCS

SEQ ID NO: 915050 - protein, 248 aa, Homo sapiens; identical to SEQ ID NO: 915049

SEQ ID NO: 915051 - protein, 541 aa, Homo sapiens
MVINLCLPQFRPRIHCNKISADGYEVENLISEDLTKRSHGFRTEYFIKPPVYVTVSFPFNVEICRINIDLTAGGGQNVTGLEMYTSASSSRVSWNTPQCRTLGPAEPSVPDKEAFTLVGKVLLKNQSQVVFSHRGFKARPPFGAMEATLPSPAVVAQELWNKGALSLSHVAHLRICITHVTGGGIPCIKRLEVWGQPAKTCSQEVIDSILLVTSENLPQDVALQAPALPMESDCDPGDQPESQQAPSSLQKLAEIIQDVPEEFLDPITLEIMPCPMLLPSGKVIDQSTLEKCNRSEATWGRVPSDPFTGVAFTPHSQPLPHPSLKARIDHFLLQHSIPGCHLLGRAQTALAVIPSSIVLPSQKRKIEQAEHVPDSNFGVNASCFSATSPLVLPTTSEHTAKKMKATNEPSLTHMDCSTGPLSHEQKLSQSLEIALASTLGSMPSFTARLTRGQLQHLGTRGSNTSWRPGTGSEQPGSILGPECASCKRVFSPYFKKEPVYQLPCGHLLCRPCLGEKQRSLPMTCTACQRPVASQDVLRVHF

SEQ ID NO: 915052 - protein, 521 aa, Homo sapiens
MVINLCLPQFRPRIHCNKISADGYEVENLISEDLTKRSHGFRTEYFIKPPVYVTVSFPFNVEICRINIDLTAGGGQNVTGLEMYTSASSSRVSWNTPQCRTLGPAEPSVPDKEAFTLVGKVLLKNQSQVVFSHRGFKARPPFGAMEATLPSPAVVAQELWNKGALSLSHVAHLRICITHVTGGGIPCIKRLEVWGQPAKTCSQEVIDSILLVTSENLPQDVALQAPALPMESDCDPGDQPESQQAPSSLQKLAEIIQDVPEEFLDPITLEIMPCPMLLPSGKVIDQSTLEKCNRSEATWGRVPSDPFTGVAFTPHSQPLPHPSLKARIDHFLLQHSIPGCHLLGRAQTALAVIPSSIVLPSQKRKIEQAEHVPDSNFGVNASCFSATSPLVLPTTSEHTAKKMKATNEPSLTHMDCSTGPLSHEQKLSQSLEIALASTLGSMPSFTARLTRGQLQHLGTRGSNTSWRPGTGSEQPGSILGPECASCKRVFSPYFKKEPVYQLPAATSCADPAWVRSNAPCP

SEQ ID NO: 915053 - protein, 650 aa, Homo sapiens
MRVFLQLRPEYRVHSYNASETSQLLSVSEGELILHKVRVNQNNLQAQVIVDYLCKLSSLPAEQHPVLLGSTSFALLCQLSVKKIQLFDTQDLINVLKAFVILGIPHSHSMLDVYETKCCHQVWEMNMDQLLLVADLWRYLGRKVPRFLNIFSSYLNLHWKDLSLSQLVHLIYVIGENRQVSQDLMQKLESLILKYIDLINLEEVGTICLGFFKSSTNLSEFVMRKIGDLACANIQHLSSRSLVNIVKMFRFTHVDHINFMKQIGEIAPQRIPSLGVQGVMHLTLYCSALRFLNEGVMNAVAASLPPRVAHCRSKDVAKILWSFGTLNYKPPNAEEFYSSLISEIHRKMPEFNQYPEHLPTCLLGLAFLEYFPVELIDFALSPGFVRLAQERTKFDLLKELYTLDGTVGIECPDYRGNRLSTHLQQEGSELLWYLAEKDMNSKPEFLETVFLLETMLGGPQYVKHHMILPHTRSSDLEVQLDVNLKPLPFNREATPAENVAKLRLEHVGVSLTDDLMNKLLKGKARGHFQGKTESEPGQQPMELENKAAVPLGGFLCNVADKSGAMEMAGLCPAACMQTPRMKLAVQFTNRNQYCYGSRDLLGLHNMKRRQLARLGYRVVELSYWEWLPLLKRTRLEKLAFLHEKVFTSAL

SEQ ID NO: 915054 - protein, 764 aa, Homo sapiens
MAATLKSLKLVRYRAFCSPSAFGAVRSVSYWNVSSTQHGGQDPPEHISLCHSAKKVKNICSTFSSRRILTTSSAHPGLEFSKTSSSKASTLQLGSPRATGVDEEDVEVFDSFENMRVFLQLRPEYRVHSYNASETSQLLSVSEGELILHKVRVNQNNLQAQVIVDYLCKLSSLPAEQHPVLLGSTSFALLCQLSVKKIQLFDTQDLINVLKAFVILGIPHSHSMLDVYETKCCHQVWEMNMDQLLLVADLWRYLGRKVPRFLNIFSSYLNLHWKDLSLSQLVHLIYVIGENRQVSQDLMQKLESLILKYIDLINLEEVGTICLGFFKSSTNLSEFVMRKIGDLACANIQHLSSRSLVNIVKMFRFTHVDHINFMKQIGEIAPQRIPSLGVQGVMHLTLYCSALRFLNEGVMNAVAASLPPRVAHCRSKDVAKILWSFGTLNYKPPNAEEFYSSLISEIHRKMPEFNQYPEHLPTCLLGLAFLEYFPVELIDFALSPGFVRLAQERTKFDLLKELYTLDGTVGIECPDYRGNRLSTHLQQEGSELLWYLAEKDMNSKPEFLETVFLLETMLGGPQYVKHHMILPHTRSSDLEVQLDVNLKPLPFNREATPAENVAKLRLEHVGVSLTDDLMNKLLKGKARGHFQGKTESEPGQQPMELENKAAVPLGGFLCNVADKSGAMEMAGLCPAACMQTPRMKLAVQFTNRNQYCYGSRDLLGLHNMKRRQLARLGYRVVELSYWEWLPLLKRTRLEKLAFLHEKVFTSAL

SEQ ID NO: 915055 - protein, 764 aa, Homo sapiens; identical to SEQ ID NO: 915054

SEQ ID NO: 915056 - protein, 487 aa, Homo sapiens
MVINLCLPQFRPRIHCNKISADGYEVENLISEDLTKRSHGFRTEYFIKPPVYVTVSFPFNVEICRINIDLTAGGGQNVTGLEMYTSASSSRVSWNTPQCRTLGPAEPSVPDKEAFTLVGKVLLKNQSQVVFSHRGFKARPPFGAMEATLPSPAVVAQELWNKGALSLSHVAHLRICITHVTGGGIPCIKRLEVWGQPAKTCSQEVIDSILLVTSENLPQDVALQAPALPMESDCDPGDQPESQQAPSSLQKLAEIIQDVPEEFLDPITLEIMPCPMLLPSGKVIDQSTLEKCNRSEATWGRVPSDPFTGVAFTPHSQPLPHPSLKARIDHFLLQHSIPGCHLLGRAQTALAVIPSSIVLPSQKRKIEQAEHVPDSNFGVNASCFSATSPLVLPTTSEHTAKKMKATNEPSLTHMDCSTEQPGSILGPECASCKRVFSPYFKKEPVYQLPCGHLLCRPCLGEKQRSLPMTCTACQRPVASQDVLRVHF

SEQ ID NO: 915057 - protein, 82 aa, Homo sapiens
MATFPPATSAPQQPPGPEDEDSSLDESDLYSLAHSYLGGGGRKGRTKREAAANTNRPSPGGHERKLVTKLQNSERKKRGARR

SEQ ID NO: 915058 - protein, 82 aa, Homo sapiens; identical to SEQ ID NO: 915057

SEQ ID NO: 915059 - protein, 172 aa, Homo sapiens [sequence omitted]

SEQ ID NO: 915060 - protein, 82 aa, Homo sapiens; identical to SEQ ID NO: 915057

SEQ ID NO: 915061 - protein, 67 aa, Homo sapiens
SRGSRLPSNFPSDLYSLAHSYLGGGGRKGRTKREAAANTNRPSPGGHERKLVTKLQNSERKKRGARR

SEQ ID NO: 915062 - protein, 82 aa, Homo sapiens; identical to SEQ ID NO: 915057

SEQ ID NO: 915063 - protein, 82 aa, Homo sapiens; identical to SEQ ID NO: 915057

SEQ ID NO: 915064 - protein, 82 aa, Homo sapiens; identical to SEQ ID NO: 915057

SEQ ID NO: 915065 - protein, 190 aa, Homo sapiens
MNPQIRNPMKAMYPGTFYFQFKNLWEANDRNETWLCFTVEGIKRRSVVSWKTGVFRNQVDSETHCHAERCFLSWFCDDILSPNTKYQVTWYTSWSPCPDCAGEVAEFLARHSNVNLTIFTARLYYFQYPCYQEGLRSLSQEGVAVEIMDYEDFKYCWENFVYNDNEPFKPWKGLKTNFRLLKRRLRESLQ

SEQ ID NO: 915066 - protein, 190 aa, Homo sapiens; identical to SEQ ID NO: 915065

SEQ ID NO: 915067 - protein, 190 aa, Homo sapiens; identical to SEQ ID NO: 915065

SEQ ID NO: 915068 - protein, 189 aa, Homo sapiens
MNPQIRNPMKAMYPGTFYFQFKNLWEANDRNETWLCFTVEGIKRRSVVSWKTGVFRNQVDSETHCHAERCFLSWFCDDILSPNTKYQVTWYTSWSPCPDCAGEVAEFLARHSNVNLTIFTARLYYFQYPCYQEGLRSLSQEGVAVEIMDYEDFKYCWENFVYNDNEPFKPWKGLKTNFRLLLLNVCLWC

SEQ ID NO: 915069 - protein, 172 aa, Homo sapiens
MNPQIRNPMKAMYPGTFYFQFKNLWEANDRNETWLCFTVEGIKRRSVVSWKTGVFRNQVDSETHCHAERCFLSWFCDDILSPNTKYQVTWYTSWSPCPDCAGEVAEFLARHSNVNLTIFTARLYYFQYPCYQEGLRSLSQEGVAVEIMDYEAGWDHMFHTCLFNKHGLQPPT

SEQ ID NO: 915070 - protein, 172 aa, Homo sapiens
MNPQIRNPMKAMYPGTFYFQFKSIKRRSVVSWKTGVFRNQVDSETHCHAERCFLSWFCDDILSPNTKYQVTWYTSWSPCPDCAGEVAEFLARHSNVNLTIFTARLYYFQYPCYQEGLRSLSQEGVAVEIMDYEDFKYCWENFVYNDNEPFKPWKGLKTNFRLLKRRLRESLQ

SEQ ID NO: 915071 - protein, 125 aa, Homo sapiens
MEKVEEEGEEENEEENKQGGERYREEGEEYGKGGAEKIQRKGVSGPQSGILKARENKAQSRRGSRDRIWMCQVIVVPLMAKGPWHSARVPQSADRSCELFLQRLLSASMAIHPPPQTPFLQPACP

SEQ ID NO: 915072 - protein, 177 aa, Homo sapiens
MNPQIRNPMKAMYPGTFYFQFKNLWEANDRNETWLCFTVEGIKRRSVVSWKTGVFRNQVDSETHCHAERCFLSWFCDDILSPNTKYQVTWYTSWSPCPDCAGEVAEFLARHSNVNLTIFTARLYYFQYPCYQEGLRSLSQEGVAVEIMDYEDFKYCWENFVYNDNELLDGYLAGCHP

SEQ ID NO: 915073 - protein, 206 aa, Homo sapiens
MLPCAAGARGRGAMVVLRAGKKTFLPALCRAFACRGCQLAPERGAERRDTAPSGVSRFCPPRKSCHDWIGPPDKYSNLRPVHFYIPENESPLEQKLRKLRQETQEWNQQFWANQNLTFSKEKEEFIHSRLKTKGLGLRTESGQKATLNAEEMADFYKEFLSKNFQKHMYYNRDWYKRNFAITFFMGKVALERIWNKLKQKQKKRSN

SEQ ID NO: 915074 - protein, 120 aa, Homo sapiens
RNAAVRRGSQGAWGHGGLAGGEEDLSPRSLPRLRLPRLSTRSGARRRAQGYGAQRGQKATLNAEEMADFYKEFLSKNFQKHMYYNRDWYKRNFAITFFMGKVALERIWNKLKQKQKKRSN

SEQ ID NO: 915075 - protein, 161 aa, Homo sapiens [sequence omitted]

SEQ ID NO: 915076 - protein, 201 aa, Homo sapiens
MLPCAAGARGRGAMVVLRAGKKTFLPALCRAFACRGCQLAPERGAERRDTAPSGVSRFCPPRKSCHDWIGPPDKYSNLRPVHFYIPENESPLEQKLRKLRQETQEWNQQFWANQNLTFSKEKEEFIHSRLKTKGLGLRTESDGVSLCHPGWSAVARSRLTANSASWFKRFSCLSLLSSWDYRSESNIECRRNGGLLQGIFK

SEQ ID NO: 915077 - protein, 89 aa, Homo sapiens
GRQTRASGPLPVLHSRLRPLSRCSRVLSRTVPQPRGSRINALSRMGLRVPPPPRRGLLTARTFKRNRVTWSESNIECRRNGGLLQGIFK

SEQ ID NO: 915078 - protein, 102 aa, Homo sapiens
MLPCAAGARGRGAMVVLRAGKKTFLPALCRAFACRGCQLAPERGAERRDTAPSGPPQAFVQVLSRPIPNSPAAPRLPHQRPQSDGTEGAAATTPGTVDSQNL

SEQ ID NO: 915079 - protein, 125 aa, Homo sapiens
MLPCAAGARGRGAMVVLRAGKKTFLPALCRAFACRGCQLAPERGAERRDTAPSGVSRFCPPRKSCHDWIGPPDKYSNLRPVHFYIPENESPLEQKLRKLRQETQEWNQQFWANQNLTFSKVRKQH

SEQ ID NO: 915080 - protein, 102 aa, Homo sapiens; identical to SEQ ID NO: 915078

SEQ ID NO: 915081 - protein, 84 aa, Homo sapiens
GRQTRASGPLPVLHSRLRPLSRCSRVLSRTVPQPRGSRINALSRMGLRVPPPPRRGLLTARTFKRNRVTWSQDSALQESLAMIG

SEQ ID NO: 915082 - protein, 201 aa, Homo sapiens; identical to SEQ ID NO: 915076

SEQ ID NO: 915083 - protein, 146 aa, Homo sapiens
MLPCAAGARGRGAMVVLRAGKKTFLPALCRAFACRGCQLAPERGAERRDTAPSGVSRFCPPRKSCHDWIGPPDKYSNLRPVHFYIPENESPLEQKLRKLRQETQEWNQQFWANQNLTFSKEKEEFIHSRLKTKGLGLRTESGGYDG

SEQ ID NO: 915084 - protein, 217 aa, Homo sapiens
MSSDFEGYEQDFAVLTAEITSKIARVPRLPPDEKKQMVANVEKQLEEAKELLEQMDLEVREIPPQSRGMYSNRMRSYKQEMGKLETDFKRSRIAYSDEVRNELLGDDGNSSENQRAHLLDNTERLERSSRRLEAGYQIAVETEQIGQEMLENLSHDREKIQRARERLRETDANLGKSSRILTGMLRRIIQNRILLVILGIIVVITILMAITFSVRRH

SEQ ID NO: 915085 - protein, 215 aa, Homo sapiens
MSSDFEGYEQDFAVLTAEITSKIARVPRLPPDEKKQMVANVEKQLEEAKELLEQMDLEVREIPPQSRGMYSNRMRSYKQEMGKLETDFKRSRIAYSDEVRNELLGDDGNSSENQRAHLLDNTERLERSSRRLEAGYQIAVETEQIGQEMLENLSHDREKIQRARERLRETDANLGKSSRILTGMLRRCCIQQGIYIQIRFDYRKDRKPNTTCSHS

SEQ ID NO: 915086 - protein, 191 aa, Homo sapiens
MSSDFEGYEQDFAVLTAEITSKIARVPRLPPDEKKQMVANVEKQLEEAKELLEQMDLEVREIPPQSRGMYSNRMRSYKQEMGKLETDFKRSRIAYSDEVRNELLGDDGNSSENQRAHLLDNTERLERSSRRLEAGYQIAVETEQIGQEMLENLSHDREKIQRARERLRETDANLGKSSRILTGMLRRGVVL

SEQ ID NO: 915087 - protein, 95 aa, Homo sapiens
  misc_feature (20)..(20): Xaa can be any naturally occurring amino acid
GTVWSVAVLNRRRSQKKIVXEQIGQEMLENLSHDREKIQRARERLRETDANLGKSSRILTGMLRRIIQNRILLVILGIIVVITILMAITFSVRRH

SEQ ID NO: 915088 - protein, 224 aa, Homo sapiens
MSSDFEGYEQDFAVLTAEITSKIARVPRLPPDEKKQMVANVEKQLEEAKELLEQMDLEVREIPPQSRGMYSNRMRSYKQEMGKLETDFKRSRIAYSDEVRNELLGDDGNSSENQLIKLREERAHLLDNTERLERSSRRLEAGYQIAVETEQIGQEMLENLSHDREKIQRARERLRETDANLGKSSRILTGMLRRIIQNRILLVILGIIVVITILMAITFSVRRH

SEQ ID NO: 915089 - protein, 201 aa, Homo sapiens
MSSDFEGYEQDFAVLTAEITSKIARVPRLPPDEKKQMVANVEKQLEEAKELLEQMDLEVREIPPQSRGMYSNRMRSYKQEMGKLETDFKRSRIAYSDEVRNELLGDDGNSSENQRAHLLDNTERLERSSRRLEAGYQIAVETEQIGQEMLENLSHDREKIQRARERLRETDANLGKSSRILTGMLRSKSKVGTYLSLCVFF

SEQ ID NO: 915090 - protein, 143 aa, Homo sapiens
VQNEKLQQRTRTDFKRSRIAYSDEVRNELLGDDGNSSENQRAHLLDNTERLERSSRRLEAGYQIAVETEQIGQEMLENLSHDREKIQRARERLRETDANLGKSSRILTGMLRRIIQNRILLVILGIIVVITILMAITFSVRRH

SEQ ID NO: 915091 - protein, 198 aa, Homo sapiens
MSSDFEGYEQDFAVLTAEITSKIARVPRLPPDEKKQMVANVEKQLEEAKELLEQMDLEVREIPPQSRGMYSNRMRSYKQEMGKLETDFKRSRIAYSDEVRNELLGDDGNSSENQRAHLLDNTERLERSSRRLEAGYQIAVETEQIGQEMLENLSHDREKIQRARERLRETDANLGKSSRILTGMLRRLASAGKISSAI

SEQ ID NO: 915092 - protein, 151 aa, Homo sapiens
MSSDFEGYEQDFAVLTAEITSKIARVPRLPPDEKKQMVANVEKQLEEAKELLEQMDLEVREIPPQSRGMYSNRMRSYKQEMGKLETDFKRSRIAYSDEVRNELLGDDGNSSENQRAHLLDNTERLERSSRRLEAGYQIAVETGKNSESEQI

SEQ ID NO: 915093 - protein, 881 aa, Homo sapiens
MAAPGAPAEYGYIRTVLGQQILGQLDSSSLALPSEAKLKLAGSSGRGGQTVKSLRIQEQVQQTLARKGRSSVGNGNLHRTSSVPEYVYNLHLVENDFVGGRSPVPKTYDMLKAGTTATYEGRWGRGTAQYSSQKSVEERSLRHPLRRLEISPDSSPERAHYTHSDYQYSQRSQAGHTLHHQESRRAALLVPPRYARSEIVGVSRAGTTSRQRHFDTYHRQYQHGSVSDTVFDSIPANPALLTYPRPGTSRSMGNLLEKENYLTAGLTVGQVRPLVPLQPVTQNRASRSSWHQSSFHSTRTLREAGPSVAVDSSGRRAHLTVGQAAAGGSGNLLTERSTFTDSQLGNADMEMTLERAVSMLEADHMLPSRISAAATFIQHECFQKSEARKRVNQLRGILKLLQLLKVQNEDVQRAVCGALRNLVFEDNDNKLEVAELNGVPRLLQVLKQTRDLETKKQITDHTVNLRSRNGWPGAVAHACNPSTLGGQGGRITRSGVRDQPDQHGLLWNLSSNDKLKNLMITEALLTLTENIIIPFSGWPEGDYPKANGLLDFDIFYNVTGCLRNMSSAGADGRKAMRRCDGLIDSLVHYVRGTIADYQPDDKATENCVCILHNLSYQLEAELPEKYSQNIYIQNRNIQTDNNKSIGCFGSRSRKVKEQYQDVPMPEEKSNPKGVEWLWHSIVIRMYLSLIAKSVRNYTQEASLGALQNLTAGSGPMPTSVAQTVVQKESGLQHTRKMLHVGDPSVKKTAISLLRNLSRNLSLQNEIAKETLPDLVSIIPDTVPSTDLLIETTASACYTLNNIIQNSYQNARDLLNTGGIQKIMAISAGDAYASNKASKAASVLLYSLWAHTELHHAYKKAQFKKTDFVNSRTAKAYHSLKD

SEQ ID NO: 915094 - protein, 117 aa, Homo sapiens
GAGPDSSGAGLAPAPPAPWRLRPRVQRQASSSVAPTGPMAAPGAPAEYGYIRTVLGQQILGQLDSSSLALPSEAKLKLAGSSGRGGQTVKSLRIQEQVQQTLARKGRSSVGNGPVLN

SEQ ID NO: 915095 - protein, 818 aa, Homo sapiens
MAAPGAPAEYGYIRTVLGQQILGQLDSSSLALPSEAKLKLAGSSGRGGQTVKSLRIQEQVQQTLARKGRSSVGNGNLHRTSSVPEYVYNLHLVENDFVGGRSPVPKTYDMLKAGTTATYEGRWGRGTAQYSSQKSVEERSLRHPLRRLEISPDSSPERAHYTHSDYQYSQRSQAGHTLHHQESRRAALLVPPRYARSEIVGVSRAGTTSRQRHFDTYHRQYQHGSVSDTVFDSIPANPALLTYPRPGTSRSMGNLLEKENYLTAGLTVGQVRPLVPLQPVTQNRASRSSWHQSSFHSTRTLREAGPSVAVDSSGRRAHLTVGQAAAGGSGNLLTERSTFTDSQLGNADMEMTLERAVSMLEADHMLPSRISAAATFIQHECFQKSEARKRVNQLRGILKLLQLLKVQNEDVQRAVCGALRNLVFEDNDNKLEVAELNGVPRLLQVLKQTRDLETKKQITGLLWNLSSNDKLKNLMITEALLTLTENIIIPFSGWPEGDYPKANGLLDFDIFYNVTGCLRNMSSAGADGRKAMRRCDGLIDSLVHYVRGTIADYQPDDKATENCVCILHNLSYQLEAELPEKYSQNIYIQNRNIQTDNNKSIGCFGSRSRKVKEQYQDVPMPEEKSNPKGVEWLWHSIVIRMYLSLIAKSVRNYTQEASLGALQNLTAGSGPMPTSVAQTVVQKESGLQHTRKMLHVGDPSVKKTAISLLRNLSRNLSLQNEIAKETLPDLVSIIPDTVPSTDLLIETTASACYTLNNIIQNSYQNARDLLNTGGIQKIMAISAGDAYASNKASKAASVLLYSLWAHTELHHAYKKVRT

SEQ ID NO: 915096 - protein, 887 aa, Homo sapiens
MAAPGAPAEYGYIRTVLGQQILGQLDSSSLALPSEAKLKLAGSSGRGGQTVKSLRIQEQVQQTLARKGRSSVGNGNLHRTSSVPEYVYNLHLVENDFVGGRSPVPKTYDMLKAGTTATYEGRWGRGTAQYSSQKSVEERSLRHPLRRLEISPDSSPERAHYTHSDYQYSQRSQAGHTLHHQESRRAALLVPPRYARSEIVGVSRAGTTSRQRHFDTYHRQYQHGSVSDTVFDSIPANPALLTYPRPGTSRSMGNLLEKENYLTAGLTVGQVRPLVPLQPVTQNRASRSSWHQSSFHSTRTLREAGPSVAVDSSGRRAHLTVGQAAAGGSGNLLTERSTFTDSQLGNADMEMTLERAVSMLEADHMLPSRISAAATFIQHECFQKSEARKRVNQLRGILKLLQLLKVQNEDVQRAVCGALRNLVFEDNDNKLEVAELNGVPRLLQVLKQTRDLETKKQITGLLWNLSSNDKLKNLMITEALLTLTENIIIPFSGWPEGDYPKANGLLDFDIFYNVTGCLRNMSSAGADGRKAMRRCDGLIDSLVHYVRGTIADYQPDDKATENCVCILHNLSYQLEAELPEKYSQNIYIQNRNIQTDNNKSIGCFGSRSRKVKEQYQDVPMPEEKSNPKGVEWLWHSIVIRMYLSLIAKSVRNYTQEASLGALQNLTAGSGPMPTSVAQTVVQKESGLQHTRKMLHVGDPSVKKTAISLLRNLSRNLSLQNEIAKETLPDLVSIIPDTVPSTDLLIETTASACYTLNNIIQNSYQNARDLLNTGGIQKIMAISAGDAYASNKASKETFFSVFAIFFPAATGILAGANISGDLADPQSAIPKGTLLAILITTLVYVGIAVSVGSCVVRDATGNVNDTIVTELTNCTFAARQIKLGFFIL

SEQ ID NO: 915097 - protein, 837 aa, Homo sapiens
MAAPGAPAEYGYIRTVLGQQILGQLDSSSLALPSEAKLKLAGSSGRGGQTVKSLRIQEQVQQTLARKGRSSVGNGNLHRTSSVPEYVYNLHLVENDFVGGRSPVPKTYDMLKAGTTATYEGRWGRGTAQYSSQKSVEERSLRHPLRRLEISPDSSPERAHYTHSDYQYSQRSQAGHTLHHQESRRAALLVPPRYARSEIVGVSRAGTTSRQRHFDTYHRQYQHGSVSDTVFDSIPANPALLTYPRPGTSRSMGNLLEKENYLTAGLTVGQVRPLVPLQPVTQNRASRSSWHQSSFHSTRTLREAGPSVAVDSSGRRAHLTVGQAAAGGSGNLLTERSTFTDSQLGNADMEMTLERAVSMLEADHMLPSRISAAATFIQHECFQKSEARKRVNQLRGILKLLQLLKVQNEDVQRAVCGALRNLVFEDNDNKLEVAELNGVPRLLQVLKQTRDLETKKQITGLLWNLSSNDKLKNLMITEALLTLTENIIIPFSGWPEGDYPKANGLLDFDIFYNVTGCLRNMSSAGADGRKAMRRCDGLIDSLVHYVRGTIADYQPDDKATENCVCILHNLSYQLEAELPEKYSQNIYIQNRNIQTDNNKSIGCFGSRSRKVKEQYQDVPMPEEKSNPKGVEWLWHSIVIRMYLSLIAKSVRNYTQEASLGALQNLTAGSGPMPTSVAQTVVQKESGLQHTRKMLHVGDPSVKKTAISLLRNLSRNLSLQNEIAKETLPDLVSIIPDTVPSTDLLIETTASACYTLNNIIQNSYQNARDLLNTGGIQKIMAISAGDAYASNKASKAASVLLYSLWAHTELHHAYKKAQFKKTDFVNSRTAKAYHSLKD

SEQ ID NO: 915098 - protein, 218 aa, Homo sapiens
MPEEKSNPKGVEWLWHSIVIRMYLSLIAKSVRNYTQEASLGALQNLTAGSGPMPTSVAQTVVQKESGLQHTRKMLHVGDPSVKKTAISLLRNLSRNLSLQNEIAKETLPDLVSIIPDTVPSTDLLIETTASACYTLNNIIQNSYQNARDLLNTGGIQKIMAISAGDAYASNKASKAASVLLYSLWAHTELHHAYKKAQFKKTDFVNSRTAKAYHSLKD

SEQ ID NO: 915099 - protein, 686 aa, Homo sapiens
MAAPGAPAEYGYIRTVLGQQILGQLDSSSLALPSEAKLKLAGSSGRGGQTVKSLRIQEQVQQTLARKGRSSVGNGNLHRTSSVPEYVYNLHLVENDFVGGRSPVPKTYDMLKAGTTATYEGRWGRGTAQYSSQKSVEERSLRHPLRRLEISPDSSPERAHYTHSDYQYSQRSQAGHTLHHQESRRAALLVPPRYARSEIVGVSRAGTTSRQRHFDTYHRQYQHGSVSDTVFDSIPANPALLTYPRPGTSRSMGNLLEKENYLTAGLTVGQVRPLVPLQPVTQNRASRSSWHQSSFHSTRTLREAGPSVAVDSSGRRAHLTVGQAAAGGSGNLLTERSTFTDSQLGNADMEMTLERAVSMLEADHMLPSRISAAATFIQHECFQKSEARKRVNQLRGILKLLQLLKVQNEDVQRAVCGALRNLVFEDNDNKLEVAELNGVPRLLQVLKQTRDLETKKQITGLLWNLSSNDKLKNLMITEALLTLTENIIIPFSGWPEGDYPKANGLLDFDIFYNVTGCLRNMSSAGADGRKAMRRCDGLIDSLVHYVRGTIADYQPDDKATENCVCILHNLSYQLEAELPEKYSQNIYIQNRNIQTDNNKSIGCFGSRSRKVKEQYQDVPMPEEKSNPKGVEWLWHSIVIRMYLSLIAKSVRNYTQEASLGALQNLTAGSGPVSIGPDFLLFKIMIL

SEQ ID NO: 915100 - protein, 127 aa, Homo sapiens
MSDNEDNFDGDDFDDVEEDEGLDDLENAEEEGQENVEILPSGERPQANQKRITTPYMTKYERARVLGTRALQIAMCAPVMVELEGETDPLLIAMKELKARKIPIIIRRYLPDGSYEDWGVDELIITD

SEQ ID NO: 915101 - protein, 127 aa, Homo sapiens; identical to SEQ ID NO: 915100

SEQ ID NO: 915102 - protein, 127 aa, Homo sapiens; identical to SEQ ID NO: 915100

SEQ ID NO: 915103 - protein, 127 aa, Homo sapiens; identical to SEQ ID NO: 915100

SEQ ID NO: 915104 - protein, 142 aa, Homo sapiens
MSFDGDDFDDVEEDEGLDDLENAEEVSIQPQAPTSAAQAAKSSDREGQENVEILPSGERPQANQKRITTPYMTKYERARVLGTRALQIAMCAPVMVELEGETDPLLIAMKELKARKIPIIIRRYLPDGSYEDWGVDELIITD

SEQ ID NO: 915105 - protein, 167 aa, Homo sapiens
MGAMKTGGWTSSSSPTELESSSCPCPMPNFHSHFICVNNKIFNFPTTPFPSAYLQCHHLLLPRYRHAAWSMHLFQWPCDCQLLKKHQGPLAPLDPPHPSLHLPVPQSKGCCRGDTSAAFQADRQVFVPRELVATETPNFLSSGDWLQGLLPSQEYHRAGLIKPPIVS

SEQ ID NO: 915106 - protein, 109 aa, Homo sapiens
MSFDGDDFDDVEEDEGLDDLENAEEVSIQPQVPPLQPKLPNRLTGRPGECRALQIAMCAPVMVELEGETDPLLIAMKELKARKIPIIIRRYLPDGSYEDWGVDELIITD

SEQ ID NO: 915107 - protein, 127 aa, Homo sapiens; identical to SEQ ID NO: 915100

SEQ ID NO: 915108 - protein, 122 aa, Homo sapiens
MSFDGDDFDDVEEDEGLDDLENAEEEGQENVEILPSGERPQANQKRITTPYMTKYERARVLGTRALQIAMCAPVMVELEGETDPLLIAMKELKARKIPIIIRRYLPDGSYEDWGVDELIITD

SEQ ID NO: 915109 - protein, 109 aa, Homo sapiens; identical to SEQ ID NO: 915106

SEQ ID NO: 915110 - protein, 283 aa, Homo sapiens
MAGNFWQSSHYLQWILDKQDLLKERQKDLKFLSEEEYWKLQIFFTNVIQALGEHLKLRQQVIATATVYFKRFYARYSLKSIDPVLMAPTCVFLASKVEEFGVVSNTRLIAAATSVLKTRFSYAFPKEFPYRMNHILECEFYLLELMDCCLIVYHPYRPLLQYVQDMGQEDMLLPLAWRIVNDTYRTDLCLLYPPFMIALACLHVACVVQQKDARQWFAELSVDMEKILEIIRVILKLYEQWKNFDERKEMATILSKMPKPKPPPNSEGEQGPNGSQNSSYSQS

SEQ ID NO: 915111 - protein, 283 aa, Homo sapiens; identical to SEQ ID NO: 915110

SEQ ID NO: 915112 - protein, 283 aa, Homo sapiens; identical to SEQ ID NO: 915110

SEQ ID NO: 915113 - protein, 283 aa, Homo sapiens; identical to SEQ ID NO: 915110

SEQ ID NO: 915114 - protein, 198 aa, Homo sapiens
MAPTCVFLASKVEEFGVVSNTRLIAAATSVLKTRFSYAFPKEFPYRMNHILECEFYLLELMDCCLIVYHPYRPLLQYVQDMGQEDMLLPLAWRIVNDTYRTDLCLLYPPFMIALACLHVACVVQQKDARQWFAELSVDMEKILEIIRVILKLYEQWKNFDERKEMATILSKMPKPKPPPNSEGEQGPNGSQNSSYSQS

SEQ ID NO: 915115 - protein, 119 aa, Homo sapiens
MAGNFWQSSHYLQWILDKQDLLKERQKDLKFLSEEEYWKLQIFFTNVIQALGEHLKLRQQVIATATVYFKRFYARYSLKSIDPVLMAPTCVFLASKVEEFGVVSNTRLIAAATSVYIRM

SEQ ID NO: 915116 - protein, 137 aa, Homo sapiens
MAGNFWQSSHYLQWILDKQDLLKERQKDLKFLSEEEYWKLQIFFTNVIQALGEHLKLRQQVIATATVYFKRFYARYSLKSIDPVLMAPTCVFLASKVEEFGVVSNTRLIAAATSVLKTRFSYAFPKEFPYRMNHVSI

SEQ ID NO: 915117 - protein, 283 aa, Homo sapiens; identical to SEQ ID NO: 915110

SEQ ID NO: 915118 - protein, 282 aa, Homo sapiens
MAGNFWQSSHYLQWILDKQDLLKERQKDLKFLSEEEYWKLQIFFTNVIQALGEHLKLRQQVIATATVYFKRFYARYSLKSIDPVLMAPTCVFLASKVEEFGVVSNTRLIAAATSVLKTRFSYAFPKEFPYRMNHILECEFYLLELMDCCLIVYHPYRPLLQYVQDMGQEDMLLPLAWRIVNDTYRTDLCLLYPPFMIALACLHVACVVQQKDARQWFAELSVDMEKILEIIRVILKLYEQWKNFDERKEMATILSKMPKPKPPPNRNSLSDSPLVAGPEAAR

SEQ ID NO: 915119 - protein, 330 aa, Homo sapiens
MAGNFWQSSHYPKRRDHFALLKSLEQSWSFLSGKGNECGRQDNSGKTNEKIMKGHCLSLQWILDKQDLLKERQKDLKFLSEEEYWKLQIFFTNVIQALGEHLKLRQQVIATATVYFKRFYARYSLKSIDPVLMAPTCVFLASKVEEFGVVSNTRLIAAATSVLKTRFSYAFPKEFPYRMNHILECEFYLLELMDCCLIVYHPYRPLLQYVQDMGQEDMLLPLAWRIVNDTYRTDLCLLYPPFMIALACLHVACVVQQKDARQWFAELSVDMEKILEIIRVILKLYEQWKNFDERKEMATILSKMPKPKPPPNSEGEQGPNGSQNSSYSQS

SEQ ID NO: 915120 - protein, 198 aa, Homo sapiens; identical to SEQ ID NO: 915114

SEQ ID NO: 915121 - protein, 282 aa, Homo sapiens; identical to SEQ ID NO: 915118

SEQ ID NO: 915122 - protein, 159 aa, Homo sapiens
MAGNFWQSSHYLQWILDKQDLLKERQKDLKFLSEEEYWKLQIFFTNVIQALGEHLKLRQQVIATATVYFKRFYARYSLKSIDPVLMAPTCVFLASKVEEFGVVSNTRLIAAATSVLKTRFSYAFPKEFPYRMNHILECEFYLLELMVSKSSVINRLKHF

SEQ ID NO: 915123 - protein, 88 aa, Homo sapiens
MAGNFWQSSHYLQWILDKQDLLKERQKDLKFLSEEEYWKLQIFFTNVIQALGEHLKNDNKNNKINDNKKHKFPVNVQLHIINIIELSP

SEQ ID NO: 915124 - protein, 395 aa, Homo sapiens
MGVKTFTHSSSSHSQEMLGKLNMLRNDGHFCDITIRVQDKIFRAHKVVLAACSDFFRTKLVGQAEDENKNVLDLHHVTVTGFIPLLEYAYTATLSINTENIIDVLAAASYMQMFSVASTCSEFMKSSILWNTPNSQPEKGLDAGQENNSNCNFTSRDGSISPVSSECSVVERTIPVCRESRRKRKSYIVMSPESPVKCGTQTSSPQVLNSSASYSENRNQPVDSSLAFPWTFPFGIDRRIQPEKVKQAENTRTLELPGPSETGRRMADYVTCESTKTTLPLGTEEDVRVKVERLSDEEVHEEVSQPVSASQSSLSDQQTVPGSEQVQEDLLISPQSSSIGSVDEGVSEGLPTLQSTSSTNAPPDDDDRVSTNIAFRYLLRVEFTTPNSSISSQEL

SEQ ID NO: 915125 - protein, 453 aa, Homo sapiens
MGVKTFTHSSSSHSQEMLGKLNMLRNDGHFCDITIRVQDKIFRAHKVVLAACSDFFRTKLVGQAEDENKNVLDLHHVTVTGFIPLLEYAYTATLSINTENIIDVLAAASYMQMFSVASTCSEFMKSSILWNTPNSQPEKGLDAGQENNSNCNFTSRDGSISPVSSECSVVERTIPVCRESRRKRKSYIVMSPESPVKCGTQTSSPQVLNSSASYSENRNQPVDSSLAFPWTFPFGIDRRIQPEKVKQAENTRTLELPGPSETGRRMADYVTCESTKTTLPLGTEEDVRVKVERLSDEEVHEEVSQPVSASQSSLSDQQTVPGSEQVQEDLLISPQSSSIGSVDEGVSEGLPTLQSTSSTNAPPDDDDRLENVQYPYQLYIAPSTSSTERPSPNGPDRPFQCPTCGVRFTRIQNLKQHMLIHSGIKPFQCDRCGKKFTRAYSLKMHRLKHEVIS

SEQ ID NO: 915126 - protein, 616 aa, Homo sapiens
MGVKTFTHSSSSHSQEMLGKLNMLRNDGHFCDITIRVQDKIFRAHKVVLAACSDFFRTKLVGQAEDENKNVLDLHHVTVTGFIPLLEYAYTATLSINTENIIDVLAAASYMQMFSVASTCSEFMKSSILWNTPNSQPEKGLDAGQENNSNCNFTSRDGSISPVSSECSVVERTIPVCRESRRKRKSYIVMSPESPVKCGTQTSSPQVLNSSASYSENRNQPVDSSLAFPWTFPFGIDRRIQPEKVKQAENTRTLELPGPSETGRRMADYVTCESTKTTLPLGTEEDVRVKVERLSDEEVHEEVSQPVSASQSSLSDQQTVPGSEQVQEDLLISPQSSSIGSVDEGVSEGLPTLQSTSSTNAPPDDDDRLENVQYPYQLYIAPSTSSTERPSPNGPDRPFQCPTCGVRFTRIQNLKQHMLIHSGIKPFQCDRCGKKFTRAYSLKMHRLKHEGKRCFRCQICSATFTSFGEYKHHMRVSRHIIRKPRIYECKTCGAMFTNSGNLIVHLRSLNHEASELANYFQSSDFLVPDYLNQEQEETLVQYDLGEHGFESNSSVQMPVISQVSSTQNCESTFPLGSLGGLAEKEEEVPEQPKSSACAEATRDDPPKSELSSITIE

SEQ ID NO: 915127 - protein, 453 aa, Homo sapiens; identical to SEQ ID NO: 915125

SEQ ID NO: 915128 - protein, 474 aa, Homo sapiens
MGVKTFTHSSSSHSQEMLGKLNMLRNDGHFCDITIRVQDKIFRAHKVVLAACSDFFRTKLVGQAEDENKNVLDLHHVTVTGFIPLLEYAYTATLSINTENIIDVLAAASYMQMFSVASTCSEFMKSSILWNTPNSQPEKGLDAGQENNSNCNFTSRDGSISPVSSECSVVERTIPVCRESRRKRKSYIVMSPESPVKCGTQTSSPQVLNSSASYSENRNQPVDSSLAFPWTFPFGIDRRIQPEKVKQAENTRTLELPGPSETGRRMADYVTCESTKTTLPLGTEEDVRVKVERLSDEEVHEEVSQPVSASQSSLSDQQTVPGSEQVQEDLLISPQSSSIGSVDEGVSEGLPTLQSTSSTNAPPDDDDRLENVQYPYQLYIAPSTSSTERPSPNGPDRPFQCPTCGVRFTRIQNLKQHMLIHSGIKPFQCDRCGKKFTRAYSLKMHRLKHEVPLQRQGTMIDNSQAVDEMTRNGE

SEQ ID NO: 915129 - protein, 383 aa, Homo sapiens
MGVKTFTHSSSSHSQEMLGKLNMLRNDGHFCDITIRVQDKIFRAHKVVLAACSDFFRTKLVGQAEDENKNVLDLHHVTVTGFIPLLEYAYTATLSINTENIIDVLAAASYMQMFSVASTCSEFMKSSILWNTPNSQPEKGLDAGQENNSNCNFTSRDGSISPVSSECSVVERTIPVCRESRRKRKSYIVMSPESPVKCGTQTSSPQVLNSSASYSENRNQPVDSSLAFPWTFPFGIDRRIQPEKVKQAENTRTLELPGPSETGRRMADYVTCESTKTTLPLGTEEDVRVKVERLSDEEVHEEVSQPVSASQSSLSDQQTVPGSEQVQEDLLISPQSSSIGSVDEGVSEGLPTLQSTSSTNAPPDDDDRLENVQYPQERLSLQC

SEQ ID NO: 915130 - protein, 82 aa, Homo sapiens
LKMHRLKHEGKRCFRCQICSATFTSFGEYKHHMRVSRHIIRKPRIYECKTCGAMFTNSGNLIVHLRSLNHEASELANYFQSR

SEQ ID NO: 915131 - protein, 474 aa, Homo sapiens; identical to SEQ ID NO: 915128

SEQ ID NO: 915132 - protein, 436 aa, Homo sapiens
MGVKTFTHSSSSHSQEMLGKLNMLRNDGHFCDITIRVQDKIFRAHKVVLAACSDFFRTKLVGQAEDENKNVLDLHHVTVTGFIPLLEYAYTATLSINTENIIDVLAAASYMQMFSVASTCSEFMKSSILWNTPNSQPEKGLDAGQENNSNCNFTSRDGSISPVSSECSVVERTIPVCRESRRKRKSYIVMSPESPVKCGTQTSSPQVLNSSASYSENRNQPVDSSLAFPWTFPFGIDRRIQPEKVKQAENTRTLELPGPSETGRRMADYVTCESTKTTLPLGTEEDVRVKVERLSDEEVHEEVSQPVSASQSSLSDQQTVPGSEQVQEDLLISPQSSSIGSVDEGVSEGLPTLQSTSSTNAPPDDDDRSTERPSPNGPDRPFQCPTCGVRFTRIQNLKQHMLIHSGIKPFQCDRCGKKFTRAYSLKMHRLKHEVIS

SEQ ID NO: 915133 - protein, 467 aa, Homo sapiens
MGVKTFTHSSSSHSQEMLGKLNMLRNDGHFCDITIRVQDKIFRAHKVVLAACSDFFRTKLVGQAEDENKNVLDLHHVTVTGFIPLLEYAYTATLSINTENIIDVLAAASYMQMFSVASTCSEFMKSSILWNTPNSQPEKGLDAGQENNSNCNFTSRDGSISPVSSECSVVERTIPVCRESRRKRKSYIVMSPESPVKCGTQTSSPQVLNSSASYSENRNQPVDSSLAFPWTFPFGIDRRIQPEKVKQAENTRTLELPGPSETGRRMADYVTCESTKTTLPLGTEEDVRVKVERLSDEEVHEEVSQPVSASQSSLSDQQTVPGSEQVQEDLLISPQSSSIGSVDEGVSEGLPTLQSTSSTNAPPDDDDRLENVQYPYQLYIAPSTSSTERPSPNGPDRPFQCPTCGVRFTRIQNLKQHMLIHSGIKPFQCDRCGKKFTRAYSLKMHRLKHEGHPRKSASRSSSATNCC

SEQ ID NO: 915134 - protein, 453 aa, Homo sapiens; identical to SEQ ID NO: 915125

SEQ ID NO: 915135 - protein, 100 aa, Homo sapiens
MKKIRIVYRNSLQNRNALLNTSFVRSHCPAGKDSPSLVYQKTIVHFSSSDTFVSVTLTSTVFTAESFESCRRDTSPLRVSCSSEAFSSPGPLDILFPDWK

SEQ ID NO: 915136 - protein, 465 aa, Homo sapiens
DKPTRHKTYLSSSWAKMAAAEGPVGDGELWQTWLPNHVVFLRLREGLKNQSPTEAEKPASSSLPSSPPPQLLTRNVVFGLGGELFLWDGEDSSFLVVRLRGPSGGGEEPALSQYQRLLCINPPLFEIYQVLLSPTQHHVALIGIKGLMVLELPKRWGKNSEFEGGKSTVNCSTTPVAERFFTSSTSLTLKHAAWYPSEILDPHVVLLTSDNVIRIYSLREPQTPTNVIILSEAEEESLVLNKGRAYTASLGETAVAFDFGPLAAVPKTLFGQNGKDEVVAYPLYILYENGETFLTYISLLHSPGNIGKLLGPLPMHPAAEDNYGYDACAVLCLPCVPNILVIATESGMLYHCVVLEGEEEDDHTSEKSWDSRIDLIPSLYVFECVELELALKLASGEDDPFDSDFSCPVKLHRDPKCPSRYHCTHEAGVHSVGLTWIHKLHKFLGSGSQLQFEDFGLYLTFWDPR

SEQ ID NO: 915137 - protein, 443 aa, Homo sapiens
MHPAAEDNYGYDACAVLCLPCVPNILVIATESGMLYHCVVLEGEEEDDHTSEKSWDSRIDLIPSLYVFECVELELALKLASGEDDPFDSDFSCPVKLHRDPKCPSRYHCTHEAGVHSVGLTWIHKLHKFLGSDEEDKDSLQELSTEQKCFVEHILCTKPLPCRQPAPIRGFWIVPDILGPTMICITSTYECLIWPLLSTVHPASPPLLCTREDVEVAESPLRVLAETPDSFEKHIRSILQRSVANPAFLKASEKDIAPPPEECLQLLSRATQVFREQYILKQDLAKEEIQRRVKLLCDQKKKQLEDLSYCREERKSLREMAERLADKYEEAKEKQEDIMNRMKKLLHSFHSELPVLSDSERDMKKELQLIPDQLRHLGNAIKQVTMKKDYQQQKMEKVLSLPKPTIILSAYQRKCIQSILKEEGEHIREMVKQINDIRNHVNF

SEQ ID NO: 915138 - protein, 610 aa, Homo sapiens
MVLELPKRWGKNSEFEGGKSTVNCSTTPVAERFFTSSTSLTLKHAAWYPSEILDPHVVLLTSDNVIRIYSLREPQTPTNVIILSEAEEESLVLNKGRAYTASLGETAVAFDFGPLAAVPKTLFGQNGKDEVVAYPLYILYENGETFLTYISLLHSPGNIGKLLGPLPMHPAAEDNYGYDACAVLCLPCVPNILVIATESGMLYHCVVLEGEEEDDHTSEKSWDSRIDLIPSLYVFECVELELALKLASGEDDPFDSDFSCPVKLHRDPKCPSRYHCTHEAGVHSVGLTWIHKLHKFLGSDEEDKDSLQELSTEQKCFVEHILCTKPLPCRQPAPIRGFWIVPDILGPTMICITSTYECLIWPLLSTVHPASPPLLCTREDVEVAESPLRVLAETPDSFEKHIRSILQRSVANPAFLKASEKDIAPPPEECLQLLSRATQVFREQYILKQDLAKEEIQRRVKLLCDQKKKQLEDLSYCREERKSLREMAERLADKYEEAKEKQEDIMNRMKKLLHSFHSELPVLSDSERDMKKELQLIPDQLRHLGNAIKQVTMKKDYQQQKMEKVLSLPKPTIILSAYQRKCIQSILKEEGEHIREMVKQINDIRNHVNF

SEQ ID NO: 915139 - protein, 757 aa, Homo sapiens
DKPTRHKTYLSSSWAKMAAAEGPVGDGELWQTWLPNHVVFLRLREGLKNQSPTEAEKPASSSLPSSPPPQLLTRNVVFGLGGELFLWDGEDSSFLVVRLRGPSGGGEEPALSQYQRLLCINPPLFEIYQVLLSPTQHHVALIGIKGLMVLELPKRWGKNSEFEGGKSTVNCSTTPVAERFFTSSTSLTLKHAAWYPSEILDPHVVLLTSDNVIRIYSLREPQTPTNVIILSEAEEESLVLNKGRAYTASLGETAVAFDFGPLAAVPKTLFGQNGKDEVVAYPLYILYENGETFLTYISLLHSPGNIGKLLGPLPMHPAAEDNYGYDACAVLCLPCVPNILVIATESGMLYHCVVLEGEEEDDHTSEKSWDSRIDLIPSLYVFECVELELALKLASGEDDPFDSDFSCPVKLHRDPKCPSRYHCTHEAGVHSVGLTWIHKLHKFLGSDEEDKDSLQELSTEQKCFVEHILCTKPLPCRQPAPIRGFWIVPDILGPTMICITSTYECLIWPLLSTVHPASPPLLCTREDVEVAESPLRVLAETPDSFEKHIRSILQRSVANPAFLKASEKDIAPPPEECLQLLSRATQVFREQYILKQDLAKEEIQRRVKLLCDQKKKQLEDLSYCREERKSLREMAERLADKYEEAKEKQEDIMNRMKKLLHSFHSELPVLSDSERDMKKELQLIPDQLRHLGNAIKQVTMKKDYQQQKMEKVLSLPKPTIILSAYQRKCIQSILKEEGEHIREMVKQINDIRNHVNF

SEQ ID NO: 915140 - protein, 739 aa, Homo sapiens
DKPTRHKTYLSSSWAKMAAAEGPVGDGELWQTWLPNHVVFLRLREGLKNQSPTEAEKPASSSLPSSPPPQLLTRNVVFGLGGELFLWDGEDSSFLVVRLRGPSGGGEEPALSQYQRLLCINPPLFEIYQVLLSPTQHHVALIGIKGLMVLELPKRWGKNSEFEGGSTSLTLKHAAWYPSEILDPHVVLLTSDNVIRIYSLREPQTPTNVIILSEAEEESLVLNKGRAYTASLGETAVAFDFGPLAAVPKTLFGQNGKDEVVAYPLYILYENGETFLTYISLLHSPGNIGKLLGPLPMHPAAEDNYGYDACAVLCLPCVPNILVIATESGMLYHCVVLEGEEEDDHTSEKSWDSRIDLIPSLYVFECVELELALKLASGEDDPFDSDFSCPVKLHRDPKCPSRYHCTHEAGVHSVGLTWIHKLHKFLGSDEEDKDSLQELSTEQKCFVEHILCTKPLPCRQPAPIRGFWIVPDILGPTMICITSTYECLIWPLLSTVHPASPPLLCTREDVEVAESPLRVLAETPDSFEKHIRSILQRSVANPAFLKASEKDIAPPPEECLQLLSRATQVFREQYILKQDLAKEEIQRRVKLLCDQKKKQLEDLSYCREERKSLREMAERLADKYEEAKEKQEDIMNRMKKLLHSFHSELPVLSDSERDMKKELQLIPDQLRHLGNAIKQVTMKKDYQQQKMEKVLSLPKPTIILSAYQRKCIQSILKEEGEHIREMVKQINDIRNHVNF

SEQ ID NO: 915141 - protein, 757 aa, Homo sapiens; identical to SEQ ID NO: 915139

SEQ ID NO: 915142 - protein, 262 aa, Homo sapiens [sequence omitted]

SEQ ID NO: 915143 - protein, 657 aa, Homo sapiens
DKPTRHKTYLSSSWAKMAAAEGPVGDGELWQTWLPNHVVFLRLREGLKNQSPTEAEKPASSSLPSSPPPQLLTRNVVFGLGGELFLWDGEDSSFLVVRLRGPSGGGEEPALSQYQRLLCINPPLFEIYQVLLSPTQHHVALIGIKGLMVLELPKRWGKNSEFEGGKSTVNCSTTPVAERFFTSSTSLTLKHAAWYPSEILDPHVVLLTSDNVIRIYSLREPQTPTNVIILSEAEEESLVLNKGRAYTASLGETAVAFDFGPLAAVPKTLFGQNGKDEVVAYPLYILYENGETFLTYISLLHSPGNIGKLLGPLPMHPAAEDNYGYDACAVLCLPCVPNILVIATESGMLYHCVVLEGEEEDDHTSEKSWDSRIDLIPSLYVFECVELELALKLASGEDDPFDSDFSCPVKLHRDPKCPSRYHCTHEAGVHSVGLTWIHKLHKFLGSDEEDKDSLQELSTEQKCFVEHILCTKPLPCRQPAPIRGFWIVPDILGPTMICITSTYECLIWPLLSTVHPASPPLLCTREDVEVAESPLRVLAETPDSFEKHIRSILQRSVANPAFLKASEKDIAPPPEECLQLLSRATQVFREQYILKQDLAKEEIQRRVKLLCDQKKKQLEDLSYCREERKSLREMAERLADKYEEAKEKQEDIMNSSL

SEQ ID NO: 915144 - protein, 753 aa, Homo sapiens
DKPTRHKTYLSSSWAKMAAAEGPVGDGELWQTWLPNHVVFLRLREGLKNQSPTEAEKPASSSLPSSPPPQLLTRNVVFGLGGELFLWDGEDSSFLVVRLRGPSGGGEEPALSQYQRLLCINPPLFEIYQVLLSPTQHHVALIGIKGLMVLELPKRWGKNSEFEGGKSTVNCSTTPVAERFFTSSTSLTLKHAAWYPSEILDPHVVLLTSDNVIRIYSLREPQTPTNVIILSEAEEESLVLNKGRAYTASLGETAVAFDFGPLAAVPKTLFGQNGKDEVVAYPLYILYENGETFLTYISLLHSPGNIGKLLGPLPMHPAAEDNYGYDACAVLCLPCVPNILVIATESGMLYHCVVLEGEEEDDHTSEKSWDSRIDLIPSLYVFECVELELALKLASGEDDPFDSDFSCPVKLHRDPKCPSRYHCTHEAGVHSVGLTWIHKLHKFLGSDEEDKDSLQELSTEQKCFVEHILCTKPLPCRQPAPIRGFWIVPDILGPTMICITSTYECLIWPLLSTVHPASPPLLCTREDVEVAESPLRVLAETPDSFEKHIRSILQRSVANPAFLNCFTQLRKIKVETLFLASEKDIAPPPEECLQLLSRATQVFREQYILKQDLAKEEIQRRVKLLCDQKKKQLEDLSYCREERKSLREMAERLADKYEEAKEKQEDIMNRMKKLLHSFHSELPVLSDSERDMKKELQLIPDQLRHLGNAIKQVTMKKDYQQQKMEKVLSLPKPTIILSAYQRKCIQSILKEDE

SEQ ID NO: 915145 - protein, 573 aa, Homo sapiens
DKPTRHKTYLSSSWAKMAAAEGPVGDGELWQTWLPNHVVFLRLREGLKNQSPTEAEKPASSSLPSSPPPQLLTRNVVFGLGGELFLWDGEDSSFLVVRLRGPSGGGEEPALSQYQRLLCINPPLFEIYQVLLSPTQHHVALIGIKGLMVLELPKRWGKNSEFEGGKSTVNCSTTPVAERFFTSSTSLTLKHAAWYPSEILDPHVVLLTSDNVIRIYSLREPQTPTNVIILSEAEEESLVLNKGRAYTASLGETAVAFDFGPLAAVPKTLFGQNGKDEVVAYPLYILYENGETFLTYISLLHSPGNIGKLLGPLPMHPAAEDNYGYDACAVLCLPCVPNILVIATESGMLYHCVVLEGEEEDDHTSEKSWDSRIDLIPSLYVFECVELELALKLASGEDDPFDSDFSCPVKLHRDPKCPSRYHCTHEAGVHSVGLTWIHKLHKFLGSDEEDKDSLQELSTEQKCFVEHILCTKPLPCRQPAPIRGFWIVPDILGPTMICITSTYECLIWPLLSTVHPASPPLLCTREDVEVAESPLRVLAETPDSFEKHIRSILQRSVANPAFLKYATLGIAVL

SEQ ID NO: 915146 - protein, 535 aa, Homo sapiens
DKPTRHKTYLSSSWAKMAAAEGPVGDGELWQTWLPNHVVFLRLREGLKNQSPTEAEKPASSSLPSSPPPQLLTRNVVFGLGGELFLWDGEDSSFLVVRLRGPSGGGEEPALSQYQRLLCINPPLFEIYQVLLSPTQHHVALIGIKGLMVLELPKRWGKNSEFEGGKSTVNCSTTPVAERFFTSSTSLTLKHAAWYPSEILDPHVVLLTSDNVIRIYSLREPQTPTNVIILSEAEEESLVLNKGRAYTASLGETAVAFDFGPLAAVPKTLFGQNGKDEVVAYPLYILYENGETFLTYISLLHSPGNIGKLLGPLPMHPAAEDNYGYDACAVLCLPCVPNILVIATESGMLYHCVVLEGEEEDDHTSEKSWDSRIDLIPSLYVFECVELELALKLASGEDDPFDSDFSCPVKLHRDPKCPSRYHCTHEAGVHSVGLTWIHKLHKFLGSDEEDKDSLQELSTEQKCFVEHILCTKPLPCRQPAPIRGFWIVPDILGPTMICITSTYECLIWPLLYVPFYILHTALVNSAISKLGKCTQ

SEQ ID NO: 915147 - protein, 420 aa, Homo sapiens
DKPTRHKTYLSSSWAKMAAAEGPVGDGELWQTWLPNHVVFLRLREGLKNQSPTEAEKPASSSLPSSPPPQLLTRNVVFGLGGELFLWDGEDSSFLVVRLRGPSGGGEEPALSQYQRLLCINPPLFEIYQVLLSPTQHHVALIGIKGLMVLELPKRWGKNSEFEGGKSTVNCSTTPVAERFFTSSTSLTLKHAAWYPSEILDPHVVLLTSDNVIRIYSLREPQTPTNVIILSEAEEESLVLNKGRAYTASLGETAVAFDFGPLAAVPKTLFGQNGKDEVVAYPLYILYENGETFLTYISLLHSPGNIGKLLGPLPMHPAAEDNYGYDACAVLCLPCVPNILVIATESGMLYHCVVLEGEEEDDHTSEKSWDSRIDLIPSLYVFECVELELALKLASGEDDPFDSDFSCPVKLHRGKLFNKC

SEQ ID NO: 915148 - protein, 123 aa, Homo sapiens
DKPTRHKTYLSSSWAKMAAAEGPVGDGELWQTWLPNHVVFLRLREGLKNQSPTEAEKPASSSLPSSPPPQLLTRNVVFGLGGELFLWDGEDSSFLVVRLRGPSGGGEEPALSQYQVMPGRSWK

SEQ ID NO: 915149 - protein, 757 aa, Homo sapiens; identical to SEQ ID NO: 915139

SEQ ID NO: 915150 - protein, 757 aa, Homo sapiens; identical to SEQ ID NO: 915139

SEQ ID NO: 915151 - protein, 724 aa, Homo sapiens
DKPTRHKTYLSSSWAKMAAAEGPVGDGELWQTWLPNHVVFLRLREGLKNQSPTEAEKPASSSLPSSPPPQLLTRNVVFGLGGELFLWDGEDSSFLVVRLRGPSGGGEEPALSQYQRLLCINPPLFEIYQVLLSPTQHHVALIGIKGLMVLELPKRWGKNSEFEGGKSTVNCSTTPVAERFFTSSTSLTLKHAAWYPSEILDPHVVLLTSDNVIRIYSLREPQTPTNVIILSEAEEESLVLNKGRAYTASLGETAVAFDFGPLAAVPKTLFGQNGKDEVVAYPLYILYENGETFLTYISLLHSPGNIGKLLGPLPMHPAAEDNYGYDACAVLCLPCVPNILVIATESGMLYHCVVLEGEEEDDHTSEKSWDSRIDLIPSLYVFECVELELALKLASGEDDPFDSDFSCPVKLHRDEEDKDSLQELSTEQKCFVEHILCTKPLPCRQPAPIRGFWIVPDILGPTMICITSTYECLIWPLLSTVHPASPPLLCTREDVEVAESPLRVLAETPDSFEKHIRSILQRSVANPAFLKASEKDIAPPPEECLQLLSRATQVFREQYILKQDLAKEEIQRRVKLLCDQKKKQLEDLSYCREERKSLREMAERLADKYEEAKEKQEDIMNRMKKLLHSFHSELPVLSDSERDMKKELQLIPDQLRHLGNAIKQVTMKKDYQQQKMEKVLSLPKPTIILSAYQRKCIQSILKEEGEHIREMVKQINDIRNHVNF

SEQ ID NO: 915152 - protein, 757 aa, Homo sapiens; identical to SEQ ID NO: 915139

SEQ ID NO: 915153 - protein, 799 aa, Homo sapiens
DKPTRHKTYLSSSWAKMAAAEGPVGDGELWQTWLPNHVVFLRLREGLKNQSPTEAEKPASSSLPSSPPPQLLTRNVVFGLGGELFLWDGEDSSFLVVRLRGPSGGGEEPALSQYQMEFRSCCPGWSAMAPSRLTATSTFQFQAILLPQPPRRELGLQRLLCINPPLFEIYQVLLSPTQHHVALIGIKGLMVLELPKRWGKNSEFEGGKSTVNCSTTPVAERFFTSSTSLTLKHAAWYPSEILDPHVVLLTSDNVIRIYSLREPQTPTNVIILSEAEEESLVLNKGRAYTASLGETAVAFDFGPLAAVPKTLFGQNGKDEVVAYPLYILYENGETFLTYISLLHSPGNIGKLLGPLPMHPAAEDNYGYDACAVLCLPCVPNILVIATESGMLYHCVVLEGEEEDDHTSEKSWDSRIDLIPSLYVFECVELELALKLASGEDDPFDSDFSCPVKLHRDPKCPSRYHCTHEAGVHSVGLTWIHKLHKFLGSDEEDKDSLQELSTEQKCFVEHILCTKPLPCRQPAPIRGFWIVPDILGPTMICITSTYECLIWPLLSTVHPASPPLLCTREDVEVAESPLRVLAETPDSFEKHIRSILQRSVANPAFLKASEKDIAPPPEECLQLLSRATQVFREQYILKQDLAKEEIQRRVKLLCDQKKKQLEDLSYCREERKSLREMAERLADKYEEAKEKQEDIMNRMKKLLHSFHSELPVLSDSERDMKKELQLIPDQLRHLGNAIKQVTMKKDYQQQKMEKVLSLPKPTIILSAYQRKCIQSILKEEGEHIREMVKQINDIRNHVNF

SEQ ID NO: 915154 - protein, 757 aa, Homo sapiens; identical to SEQ ID NO: 915139

SEQ ID NO: 915155 - protein, 737 aa, Homo sapiens
DKPTRHKTYLSSSWAKMAAAEGPVGDGELWQTWLPNHVVFLRLREGLKNQSPTEAEKPASSSLPSSPPPQLLTRNVVFGLGGELFLWDGEDSSFLVVRLRGPSGGGEEPALSQYQRLLCINPPLFEIYQVLLSPTQHHVALIGIKGLMVLELPKRWGKNSEFEGGKSTVNCSTTPVAERFFTSSTSLTLKHAAWYPSEILDPHVVLLTSDNVIRIYSLREPQTPTNVIILSEAEEESLVLNKGRAYTASLGETAVAFDFGPLAAVPKTLFGQNGKDEVVAYPLYILYENGETFLTYISLLHSPGNIGKLLGPLPMHPAAEDNYGYDACAVLCLPCVPNILVIATESGMLYHCVVLEGEEEDDHTSEKSWDSRIDLIPSLYVFECVELELALKLASGEDDPFDSDFSCPVKLHRDPKCPSRYHCTHEAGVHSVGLTWIHKLHKFLGSDEEDKDSLQELSTEQKCFVEHILCTKPLPCRQPAPIRGFWIVPDILGPTMICITSTYECLIWPLLSTVHPASPPLLCTREDVEVAESPLRVLAETPDSFEKHIRSILQRSVANPAFLKASEKDIAPPPEECLQLLSRATQVFREQYILKQDLAKEEIQRRVKLLCDQKKKQLEDLSYCREERKSLREMAERLADKYEEAKEKQEDIMNRMKKLLHSFHSELPVLSDSERDMKKELQLIPDQLRHLGNAIKQVTMKKDYQQQKMEKVLSLPKPTIILSAYQRKCIQSILKEE

SEQ ID NO: 915156 - protein, 248 aa, Homo sapiens
PSSRVQSRGGDAGWTREDVEVAESPLRVLAETPDSFEKHIRSILQRSVANPAFLKASEKDIAPPPEECLQLLSRATQVFREQYILKQDLAKEEIQRRVKLLCDQKKKQLEDLSYCREERKSLREMAERLADKYEEAKEKQEDIMNRMKKLLHSFHSELPVLSDSERDMKKELQLIPDQLRHLGNAIKQVTMKKDYQQQKMEKVLSLPKPTIILSAYQRKCIQSILKEEGEHIREMVKQINDIRNHVNF

SEQ ID NO: 915157 - protein, 277 aa, Homo sapiens
MICITSTYECLIWPLLSTVHPASPPLLCTREDVEVAESPLRVLAETPDSFEKHIRSILQRSVANPAFLNCFTQLRKIKVETLFLASEKDIAPPPEECLQLLSRATQVFREQYILKQDLAKEEIQRRVKLLCDQKKKQLEDLSYCREERKSLREMAERLADKYEEAKEKQEDIMNRMKKLLHSFHSELPVLSDSERDMKKELQLIPDQLRHLGNAIKQVTMKKDYQQQKMEKVLSLPKPTIILSAYQRKCIQSILKEEGEHIREMVKQINDIRNHVNF

SEQ ID NO: 915158 - protein, 557 aa, Homo sapiens
DKPTRHKTYLSSSWAKMAAAEGPVGDGELWQTWLPNHVVFLRLREGLKNQSPTEAEKPASSSLPSSPPPQLLTRNVVFGLGGELFLWDGEDSSFLVVRLRGPSGGGEEPALSQYQRLLCINPPLFEIYQVLLSPTQHHVALIGIKGLMVLELPKRWGKNSEFEGGKSTVNCSTTPVAERFFTSSTSLTLKHAAWYPSEILDPHVVLLTSDNVIRIYSLREPQTPTNVIILSEAEEESLVLNKGRAYTASLGETAVAFDFGPLAAVPKTLFGQNGKDEVVAYPLYILYENGETFLTYISLLHSPGNIGKLLGPLPMHPAAEDNYGYDACAVLCLPCVPNILVIATESGMLYHCVVLEGEEEDDHTSEKSWDSRIDLIPSLYVFECVELELALKLASGEDDPFDSDFSCPVKLHRDEEDKDSLQELSTEQKCFVEHILCTKPLPCRQPAPIRGFWIVPDILGPTMICITSTYECLIWPLLSTVHPASPPLLCTREDVEVAESPLRVLAETPDSFEKHIRSILQRSVANPAFLKASEKDIAPPLEDTRVFLQDVTRRREI

SEQ ID NO: 915159 - protein, 395 aa, Homo sapiens
DKPTRHKTYLSSSWAKMAAAEGPVGDGELWQTWLPNHVVFLRLREGLKNQSPTEAEKPASSSLPSSPPPQLLTRNVVFGLGGELFLWDGEDSSFLVVRLRGPSGGGEEPALSQYQRLLCINPPLFEIYQVLLSPTQHHVALIGIKGLMVLELPKRWGKNSEFEGGKSTVNCSTTPVAERFFTSSTSLTLKHAAWYPSEILDPHVVLLTSDNVIRIYSLREPQTPTNVIILSEAEEESLVLNKGRAYTASLGETAVAFDFGPLAAVPKTLFGQNGKDEVVAYPLYILYENGETFLTYISLLHSPGNIGKLLGPLPMHPAAEDNYGYDACAVLCLPCVPNILVIATESGMLYHCVVLEGEEEDDHTNETPTHTHMHTHTHTAHTQKIYCKEREKIKS

SEQ ID NO: 915160 - protein, 471 aa, Homo sapiens
MVLDSGAQAYDQAPPSPPTSPPSLRHRLKPSDRDGPPLYPWSQSLALPLALAVPPALQPQPEQQPFSQMLLGHRGHMRRSESTYSVNSTGRRGRGTLGRPPPGRGRNPGGGTLRPAASLPHIAKTQRDAGHIASKSPCMLVALRPTNMDRERDKFFQSHYTYNPQFEYQEPMPTAVLEKYCEASGQFIHQAVGIIEAVLEKFGTYEHFEAATGGQLLTKCQIWSIVRKYMQKEGCAGEVVVQLSEDLLSQAVMMVENSRPTLAINLTGARQYWLEGMLRHEIGTHYLRGVNNARQPWHNAEGRLRYGLRPANPTEEGLASLHSVLFRKQPFLWRAALLYYTIHRAARMSFRQLFQDLERYVQDADVRWEYCVRAKRGQTDTSLPGCFSKDQVYLDGIVRILRHRQTIDFPLLTSLGKVSYEDVDHLRPHGVLDNTRVPHFMQDLARYRQQLEHIMATNRLDEAELGRLLPD

SEQ ID NO: 915161 - protein, 471 aa, Homo sapiens; identical to SEQ ID NO: 915160

SEQ ID NO: 915162 - protein, 333 aa, Homo sapiens [sequence omitted]

SEQ ID NO: 915163 - protein, 471 aa, Homo sapiens; identical to SEQ ID NO: 915160

SEQ ID NO: 915164 - protein, 471 aa, Homo sapiens; identical to SEQ ID NO: 915160

SEQ ID NO: 915165 - protein, 488 aa, Homo sapiens
MPGTRSAESRCSRSLPSNTCPTRWRRRVWTTEGHAGLGLGPEAVVLLGPAPQCLSCSWTGRLQGPWLQWKLRWTSCRGGSTAWCWRRCRRSSSPCSRICPRANGCRALSSCKVCVNRTGRFCRDFWRVRNPTVQLLLAEAERAVVLQYLSALMQGRLVCRGADERTQAAERLRHDAAQLQQLFLSLVRASWAGRRARVSVAGWERGAGARPYPDVLQGLEENAHCAPVLLALRELLNLRDPALLGLEVAGLRQQFPDVSEDHVSALLGLRGDLSREQHLAALSSLQAALPPSPRASRRVLFSLVPAPALRRPPACPRGPAPEPCCSQNKPRLPDARVCVCWGRWDGIKVPRGLREFLQSDTLKVSWLPSWYTGCAPPMQASALCADCVPEAAGYAPTSPRPGREQESPPPWPPGAPEAQQLAVALGRGRAQDHEHRPLNPAWLRSQWPRGRAAAETDAKPHAFVRACARPRTYVIGDGSRRLGVRWPV

SEQ ID NO: 915166 - protein, 488 aa, Homo sapiens; identical to SEQ ID NO: 915165

SEQ ID NO: 915167 - protein, 471 aa, Homo sapiens; identical to SEQ ID NO: 915160

SEQ ID NO: 915168 - protein, 471 aa, Homo sapiens; identical to SEQ ID NO: 915160

SEQ ID NO: 915169 - protein, 205 aa, Homo sapiens
GPRTPRPAPPPLAFPAGTHYLRGVNNARQPWHNAEGRLRYGLRPANPTEEGLASLHSVLFRKQPFLWRAALLYYTIHRAARMSFRQLFQDLERYVQDADVRWEYCVRAKRGQTDTSLPGCFSKDQVYLDGIVRILRHRQTIDFPLLTSLGKVSYEDVDHLRPHGVLDNTRVPHFMQDLARYRQQLEHIMATNRLDEAELGRLLPD

SEQ ID NO: 915170 - protein, 471 aa, Homo sapiens; identical to SEQ ID NO: 915160

SEQ ID NO: 915171 - protein, 105 aa, Homo sapiens
LRKTNLGWVRGSVFNRPRGCFSKDQVYLDGIVRILRHRQTIDFPLLTSLGKVSYEDVDHLRPHGVLDNTRVPHFMQDLARYRQQLEHIMATNRLDEAELGRLLPD

SEQ ID NO: 915172 - protein, 183 aa, Homo sapiens
MLDRLSGKILHIDFGDCFEVAMTREKFPEKIPFRLTRMLTNAMEVTGLDGNYRITCHTVMEVLREHKDSVMAVLEAFVYDPLLNWRLMDTNTKGNKRSRTRTDSYSAGQSVGVQKENVRYSGRLKKHRKHYRIDHNLREIVREQETLPWSLRVLSCGVGLWRFRKGDFTVNRSCEESTWVGGI

SEQ ID NO: 915173 - protein, 2549 aa, Homo sapiens
MLGTGPAAATTAATTSSNVSVLQQFASGLKSRNEETRAKAAKELQHYVTMELREMSQEESTRFYDQLNHHIFELVSSSDANERKGGILAIASLIGVEGGNATRIGRFANYLRNLLPSNDPVVMEMASKAIGRLAMAGDTFTAEYVEFEVKRALEWLGADRNEGRRHAAVLVLRELAISVPTFFFQQVQPFFDNIFVAVWDPKQAIREGAVAALRACLILTTQREPKEMQKPQWYRHTFEEAEKGFDETLAKEKGMNRDDRIHGALLILNELVRISSMEGERLREEMEEITQQQLVHDKYCKDLMGFGTKPRHITPFTSFQAVQPQQSNALVGLLGYSSHQGLMGFGTSPSPAKSTLVESRCCRDLMEEKFDQVCQWVLKCRNSKNSLIQMTILNLLPRLAAFRPSAFTDTQYLQDTMNHVLSCVKKEKERTAAFQALGLLSVAVRSEFKVYLPRVLDIIRAALPPKDFAHKRQKAMQVDATVFTCISMLARAMGPGIQQDIKELLEPMLAVGLSPALTAVLYDLSRQIPQLKKDIQDGLLKMLSLVLMHKPLRHPGMPKGLAHQLASPGLTTLPEASDVGSITLALRTLGSFEFEGHSLTQFVRHCADHFLNSEHKEIRMEAARTCSRLLTPSIHLISGHAHVVSQTAVQVVADVLSKLLVVGITDPDPDIRYCVLASLDERFDAHLAQAENLQALFVALNDQVFEIRELAICTVGRLSSMNPAFVMPFLRKMLIQILTELEHSGIGRIKEQSARMLGHLVSNAPRLIRPYMEPILKALILKLKDPDPDPNPGVINNVLATIGELAQVSGLEMRKWVDELFIIIMDMLQDSSLLAKRQVALWTLGQLVASTGYVVEPYRKYPTLLEVLLNFLKTEQNQGTRREAIRVLGLLGALDPYKHKVNIGMIDQSRDASAVSLSESKSSQDSSDYSTSEMLVNMGNLPLDEFYPAVSMVALMRIFRDQSLSHHHTMVVQAITFIFKSLGLKCVQFLPQVMPTFLNVIRVCDGAIREFLFQQLGMLVSFVKSHIRPYMDEIVTLMREFWVMNTSIQSTIILLIEQIVVALGGEFKLYLPQLIPHMLRVFMHDNSPGRIVSIKLLAAIQLFGANLDDYLHLLLPPIVKLFDAPEAPLPSRKAALETVDRLTESLDFTDYASRIIHPIVRTLDQSPELRSTAMDTLSSLVFQLGKKYQIFIPMVNKVLVRHRINHQRYDVLICRIVKGYTLADEEEDPLIYQHRMLRSGQGDALASGPVETGPMKKLHVSTINLQKAWGAARRVSKDDWLEWLRRLSLELLKDSSSPSLRSCWALAQAYNPMARDLFNAAFVSCWSELNEDQQDELIRSIELALTSQDIAEVTQTLLNLAEFMEHSDKGPLPLRDDNGIVLLGERAAKCRAYAKALHYKELEFQKGPTPAILESLISINNKLQQPEAAAGVLEYAMKHFGELEIQATWYEKLHEWEDALVAYDKKMDTNKDDPELMLGRMRCLEALGEWGQLHQQCCEKWTLVNDETQAKMARMAAAAAWGLGQWDSMEEYTCMIPRDTHDGAFYRAVLALHQDLFSLAQQCIDKARDLLDAELTAMAGESYSRAYGAMVSCHMLSELEEVIQYKLVPERREIIRQIWWERLQGCQRIVEDWQKILMVRSLVVSPHEDMRTWLKYASLCGKSGRLALAHKTLVLLLGVDPSRQLDHPLPTVHPQVTYAYMKNMWKSARKIDAFQHMQHFVQTMQQQAQHAIATEDQQHKQELHKLMARCFLKLGEWQLNLQGINESTIPKVLQYYSAATEHDRSWYKAWHAWAVMNFEAVLHYKHQNQARDEKKKLRHASGANITNATTAATTAATATTTASTEGSNSESEAESTENSPTPSPLQKKVTEDLSKTLLMYTVPAVQGFFRSISLSRGNNLQDTLRVLTLWFDYGHWPDVNEALVEGVKAIQIDTWLQVIPQLIARIDTPRPLVGRLIHQLLTDIGRYHPQALIYPLTVASKSTTTARHNAANKILKNMCEHSNTLVQQAMMVSEELIRVAILWHEMWHEGLEEASRLYFGERNVKGMFEVLEPLHAMMERGPQTLKETSFNQAYGRDLMEAQEWCRKYMKSGNVKDLTQAWDLYYHVFRRISKQLPQLTSLELQYVSPKLLMCRDLELAVPGTYDPNQPIIRIQSIAPSLQVITSKQRPRKLTLMGSNGHEFVFLLKGHEDLRQDERVMQLFGLVNTLLANDPTSLRKNLSIQRYAVIPLSTNSGLIGWVPHCDTLHALIRDYREKKKILLNIEHRIMLRMAPDYDHLTLMQKVEVFEHAVNNTAGDDLAKLLWLKSPSSEVWFDRRTNYTRSLAVMSMVGYILGLGDRHPSNLMLDRLSGKILHIDFGDCFEVAMTREKFPEKIPFRLTRMLTNAMEVTGLDGNYRITCHTVMEVLREHKDSVMAVLEAFVYDPLLNWRLMDTNTKGNKRSRTRTDSYSAGQSVEILDGVELGEPAHKKTGTTVPESIHSFIGDGLVKPEALNKKAIQIINRVRDKLTGRDFSHDDTLDVPTQVELLIKQATSHENLCQCYIGWCPFW

SEQ ID NO: 915174 - protein, 205 aa, Homo sapiens
MLDRLSGKILHIDFGDCFEVAMTREKFPEKIPFRLTRMLTNAMEVTGLDGNYRITCHTVMEVLREHKDSVMAVLEAFVYDPLLNWRLMDTNTKGNKRSRTRTDSYSAGQSVEILDGVELGEPAHKKTGTTVPESIHSFIGDGLVKPEALNKKAIQIINRVRDKLTGRDFSHDDTLDVPTQVELLIKQATSHENLCQCYIGWCPFW

SEQ ID NO: 915175 - protein, 2278 aa, Homo sapiens
MLGTGPAAATTAATTSSNVSVLQQFASGLKSRNEETRAKAAKELQHYVTMELREMSQEESTRFYDQLNHHIFELVSSSDANERKGGILAIASLIGVEGGNATRIGRFANYLRNLLPSNDPVVMEMASKAIGRLAMAGDTFTAEYVEFEVKRALEWLGADRNEGRRHAAVLVLRELAISVPTFFFQQVQPFFDNIFVAVWDPKQAIREGAVAALRACLILTTQREPKEMQKPQWYRHTFEEAEKGFDETLAKEKGMNRDDRIHGALLILNELVRISSMEGERLREEMEEITQQQLVHDKYCKDLMGFGTKPRHITPFTSFQAVQPQQSNALVGLLGYSSHQGLMGFGTSPSPAKSTLVESRCCRDLMEEKFDQVCQWVLKCRNSKNSLIQMTILNLLPRLAAFRPSAFTDTQYLQDTMNHVLSCVKKEKERTAAFQALGLLSVAVRSEFKVYLPRVLDIIRAALPPKDFAHKRQKAMQVDATVFTCISMLARAMGPGIQQDIKELLEPMLAVGLSPALTAVLYDLSRQIPQLKKDIQDGLLKMLSLVLMHKPLRHPGMPKGLAHQLASPGLTTLPEASDVGSITLALRTLGSFEFEGHSLTQFVRHCADHFLNSEHKEIRMEAARTCSRLLTPSIHLISGHAHVVSQTAVQVVADVLSKLLVVGITDPDPDIRYCVLASLDERFDAHLAQAENLQALFVALNDQVFEIRELAICTVGRLSSMNPAFVMPFLRKMLIQILTELEHSGIGRIKEQSARMLGHLVSNAPRLIRPYMEPILKALILKLKDPDPDPNPGVINNVLATIGELAQVSGLEMRKWVDELFIIIMDMLQDSSLLAKRQVALWTLGQLVASTGYVVEPYRKYPTLLEVLLNFLKTEQNQGTRREAIRVLGLLGALDPYKHKVNIGMIDQSRDASAVSLSESKSSQDSSDYSTSEMLVNMGNLPLDEFYPAVSMVALMRIFRDQSLSHHHTMVVQAITFIFKSLGLKCVQFLPQVMPTFLNVIRVCDGAIREFLFQQLGMLVSFVKSHIRPYMDEIVTLMREFWVMNTSIQSTIILLIEQIVVALGGEFKLYLPQLIPHMLRVFMHDNSPGRIVSIKLLAAIQLFGANLDDYLHLLLPPIVKLFDAPEAPLPSRKAALETVDRLTESLDFTDYASRIIHPIVRTLDQSPELRSTAMDTLSSLVFQLGKKYQIFIPMVNKVLVRHRINHQRYDVLICRIVKGYTLADEEEDPLIYQHRMLRSGQGDALASGPVETGPMKKLHVSTINLQKAWGAARRVSKDDWLEWLRRLSLELLKDSSSPSLRSCWALAQAYNPMARDLFNAAFVSCWSELNEDQQDELIRSIELALTSQDIAEVTQTLLNLAEFMEHSDKGPLPLRDDNGIVLLGERAAKCRAYAKALHYKELEFQKGPTPAILESLISINNKLQQPEAAAGVLEYAMKHFGELEIQATWYEKLHEWEDALVAYDKKMDTNKDDPELMLGRMRCLEALGEWGQLHQQCCEKWTLVNDETQAKMARMAAAAAWGLGQWDSMEEYTCMIPRDTHDGAFYRAVLALHQDLFSLAQQCIDKARDLLDAELTAMAGESYSRAYGAMVSCHMLSELEEVIQYKLVPERREIIRQIWWERLQGCQRIVEDWQKILMVRSLVVSPHEDMRTWLKYASLCGKSGRLALAHKTLVLLLGVDPSRQLDHPLPTVHPQVTYAYMKNMWKSARKIDAFQHMQHFVQTMQQQAQHAIATEDQQHKQELHKLMARCFLKLGEWQLNLQGINESTIPKVLQYYSAATEHDRSWYKAWHAWAVMNFEAVLHYKHQNQARDEKKKLRHASGANITNATTAATTAATATTTASTEGSNSESEAESTENSPTPSPLQKKVTEDLSKTLLMYTVPAVQGFFRSISLSRGNNLQDTLRVLTLWFDYGHWPDVNEALVEGVKAIQIDTWLQVIPQLIARIDTPRPLVGRLIHQLLTDIGRYHPQALIYPLTVASKSTTTARHNAANKILKNMCEHSNTLVQQAMMVSEELIRVAILWHEMWHEGLEEASRLYFGERNVKGMFEVLEPLHAMMERGPQTLKETSFNQAYGRDLMEAQEWCRKYMKSGNVKDLTQAWDLYYHVFRRISKQLPQLTSLELQYVSPKLLMCRDLELAVPGTYDPNQPIIRIQSIAPSLQVITSKQRPRKLTLMGSNGHEFVFLLKGHEDLRQDERVMQLFGLVNTLLANDPTSLRKNLSIQRYAVIPLSTNSGLIGWLGYMFLAQPIQGPGTSEVLGKHIAALRCELGSCFEIRRH

SEQ ID NO: 915176 - protein, 1949 aa, Homo sapiens
MLGTGPAAATTAATTSSNVSVLQQFASGLKSRNEETRAKAAKELQHYVTMELREMSQEESTRFYDQLNHHIFELVSSSDANERKGGILAIASLIGVEGGNATRIGRFANYLRNLLPSNDPVVMEMASKAIGRLAMAGDTFTAEYVEFEVKRALEWLGADRNEGRRHAAVLVLRELAISVPTFFFQQVQPFFDNIFVAVWDPKQAIREGAVAALRACLILTTQREPKEMQKPQWYRHTFEEAEKGFDETLAKEKGMNRDDRIHGALLILNELVRISSMEGERLREEMEEITQQQLVHDKYCKDLMGFGTKPRHITPFTSFQAVQPQQSNALVGLLGYSSHQGLMGFGTSPSPAKSTLVESRCCRDLMEEKFDQVCQWVLKCRNSKNSLIQMTILNLLPRLAAFRPSAFTDTQYLQDTMNHVLSCVKKEKERTAAFQALGLLSVAVRSEFKVYLPRVLDIIRAALPPKDFAHKRQKAMQVDATVFTCISMLARAMGPGIQQDIKELLEPMLAVGLSPALTAVLYDLSRQIPQLKKDIQDGLLKMLSLVLMHKPLRHPGMPKGLAHQLASPGLTTLPEASDVGSITLALRTLGSFEFEGHSLTQFVRHCADHFLNSEHKEIRMEAARTCSRLLTPSIHLISGHAHVVSQTAVQVVADVLSKLLVVGITDPDPDIRYCVLASLDERFDAHLAQAENLQALFVALNDQVFEIRELAICTVGRLSSMNPAFVMPFLRKMLIQILTELEHSGIGRIKEQSARMLGHLVSNAPRLIRPYMEPILKALILKLKDPDPDPNPGVINNVLATIGELAQVSGLEMRKWVDELFIIIMDMLQDSSLLAKRQVALWTLGQLVASTGYVVEPYRKYPTLLEVLLNFLKTEQNQGTRREAIRVLGLLGALDPYKHKVNIGMIDQSRDASAVSLSESKSSQDSSDYSTSEMLVNMGNLPLDEFYPAVSMVALMRIFRDQSLSHHHTMVVQAITFIFKSLGLKCVQFLPQVMPTFLNVIRVCDGAIREFLFQQLGMLVSFVKSHIRPYMDEIVTLMREFWVMNTSIQSTIILLIEQIVVALGGEFKLYLPQLIPHMLRVFMHDNSPGRIVSIKLLAAIQLFGANLDDYLHLLLPPIVKLFDAPEAPLPSRKAALETVDRLTESLDFTDYASRIIHPIVRTLDQSPELRSTAMDTLSSLVFQLGKKYQIFIPMVNKVLVRHRINHQRYDVLICRIVKGYTLADEEEDPLIYQHRMLRSGQGDALASGPVETGPMKKLHVSTINLQKAWGAARRVSKDDWLEWLRRLSLELLKDSSSPSLRSCWALAQAYNPMARDLFNAAFVSCWSELNEDQQDELIRSIELALTSQDIAEVTQTLLNLAEFMEHSDKGPLPLRDDNGIVLLGERAAKCRAYAKALHYKELEFQKGPTPAILESLISINNKLQQPEAAAGVLEYAMKHFGELEIQATWYEKLHEWEDALVAYDKKMDTNKDDPELMLGRMRCLEALGEWGQLHQQCCEKWTLVNDETQAKMARMAAAAAWGLGQWDSMEEYTCMIPRDTHDGAFYRAVLALHQDLFSLAQQCIDKARDLLDAELTAMAGESYSRAYGAMVSCHMLSELEEVIQYKLVPERREIIRQIWWERLQGCQRIVEDWQKILMVRSLVVSPHEDMRTWLKYASLCGKSGRLALAHKTLVLLLGVDPSRQLDHPLPTVHPQVTYAYMKNMWKSARKIDAFQHMQHFVQTMQQQAQHAIATEDQQHKQELHKLMARCFLKLGEWQLNLQGINESTIPKVLQYYSAATEHDRSWYKAWHAWAVMNFEAVLHYKHQNQARDEKKKLRHASGANITNATTAATTAATATTTASTEGSNSESEAESTENSPTPSPLQKKVTEDLSKTLLMYTVPAVQGFFRSISLSRGNNLQDTLRVLTLWFDYGHWPDVNEALVEGVKAIQIDTWLQVIHQLIARIDVL

SEQ ID NO: 915177 - protein, 1707 aa, Homo sapiens
MLGTGPAAATTAATTSSNVSVLQQFASGLKSRNEETRAKAAKELQHYVTMELREMSQEESTRFYDQLNHHIFELVSSSDANERKGGILAIASLIGVEGGNATRIGRFANYLRNLLPSNDPVVMEMASKAIGRLAMAGDTFTAEYVEFEVKRALEWLGADRNEGRRHAAVLVLRELAISVPTFFFQQVQPFFDNIFVAVWDPKQAIREGAVAALRACLILTTQREPKEMQKPQWYRHTFEEAEKGFDETLAKEKGMNRDDRIHGALLILNELVRISSMEGERLREEMEEITQQQLVHDKYCKDLMGFGTKPRHITPFTSFQAVQPQQSNALVGLLGYSSHQGLMGFGTSPSPAKSTLVESRCCRDLMEEKFDQVCQWVLKCRNSKNSLIQMTILNLLPRLAAFRPSAFTDTQYLQDTMNHVLSCVKKEKERTAAFQALGLLSVAVRSEFKVYLPRVLDIIRAALPPKDFAHKRQKAMQVDATVFTCISMLARAMGPGIQQDIKELLEPMLAVGLSPALTAVLYDLSRQIPQLKKDIQDGLLKMLSLVLMHKPLRHPGMPKGLAHQLASPGLTTLPEASDVGSITLALRTLGSFEFEGHSLTQFVRHCADHFLNSEHKEIRMEAARTCSRLLTPSIHLISGHAHVVSQTAVQVVADVLSKLLVVGITDPDPDIRYCVLASLDERFDAHLAQAENLQALFVALNDQVFEIRELAICTVGRLSSMNPAFVMPFLRKMLIQILTELEHSGIGRIKEQSARMLGHLVSNAPRLIRPYMEPILKALILKLKDPDPDPNPGVINNVLATIGELAQVSGLEMRKWVDELFIIIMDMLQDSSLLAKRQVALWTLGQLVASTGYVVEPYRKYPTLLEVLLNFLKTEQNQGTRREAIRVLGLLGALDPYKHKVNIGMIDQSRDASAVSLSESKSSQDSSDYSTSEMLVNMGNLPLDEFYPAVSMVALMRIFRDQSLSHHHTMVVQAITFIFKSLGLKCVQFLPQVMPTFLNVIRVCDGAIREFLFQQLGMLVSFVKSHIRPYMDEIVTLMREFWVMNTSIQSTIILLIEQIVVALGGEFKLYLPQLIPHMLRVFMHDNSPGRIVSIKLLAAIQLFGANLDDYLHLLLPPIVKLFDAPEAPLPSRKAALETVDRLTESLDFTDYASRIIHPIVRTLDQSPELRSTAMDTLSSLVFQLGKKYQIFIPMVNKVLVRHRINHQRYDVLICRIVKGYTLADEEEDPLIYQHRMLRSGQGDALASGPVETGPMKKLHVSTINLQKAWGAARRVSKDDWLEWLRRLSLELLKDSSSPSLRSCWALAQAYNPMARDLFNAAFVSCWSELNEDQQDELIRSIELALTSQDIAEVTQTLLNLAEFMEHSDKGPLPLRDDNGIVLLGERAAKCRAYAKALHYKELEFQKGPTPAILESLISINNKLQQPEAAAGVLEYAMKHFGELEIQATWYEKLHEWEDALVAYDKKMDTNKDDPELMLGRMRCLEALGEWGQLHQQCCEKWTLVNDETQAKMARMAAAAAWGLGQWDSMEEYTCMIPRDTHDGAFYRAVLALHQDLFSLAQQCIDKARDLLDAELTAMAGESYSRAYGAMVSCHMLSELEEVIQYKLVPERREIIRQIWWERLQGCQRIVEDWQKILMVRSLVVSPHEDMRTWLKYASLCGKSGRLGSENRNTVMEVLNTGKVWYILEIMSRTNTQLNAQSIKCSHV

SEQ ID NO: 915178 - protein, 2549 aa, Homo sapiens; identical to SEQ ID NO: 915173

SEQ ID NO: 915179 - protein, 754 aa, Homo sapiens
MNFEAVLHYKHQNQARDEKKKLRHASGANITNATTAATTAATATTTASTEGSNSESEAESTENSPTPSPLQKKVTEDLSKTLLMYTVPAVQGFFRSISLSRGNNLQDTLRVLTLWFDYGHWPDVNEALVEGVKAIQIDTWLQVIPQLIARIDTPRPLVGRLIHQLLTDIGRYHPQALIYPLTVASKSTTTARHNAANKILKNMCEHSNTLVQQAMMVSEELIRVAILWHEMWHEGLEEASRLYFGERNVKGMFEVLEPLHAMMERGPQTLKETSFNQAYGRDLMEAQEWCRKYMKSGNVKDLTQAWDLYYHVFRRISKQLPQLTSLELQYVSPKLLMCRDLELAVPGTYDPNQPIIRIQSIAPSLQVITSKQRPRKLTLMGSNGHEFVFLLKGHEDLRQDERVMQLFGLVNTLLANDPTSLRKNLSIQRYAVIPLSTNSGLIGWVPHCDTLHALIRDYREKKKILLNIEHRIMLRMAPDYDHLTLMQKVEVFEHAVNNTAGDDLAKLLWLKSPSSEVWFDRRTNYTRSLAVMSMVGYILGLGDRHPSNLMLDRLSGKILHIDFGDCFEVAMTREKFPEKIPFRLTRMLTNAMEVTGLDGNYRITCHTVMEVLREHKDSVMAVLEAFVYDPLLNWRLMDTNTKGNKRSRTRTDSYSAGQSVEILDGVELGEPAHKKTGTTVPESIHSFIGDGLVKPEALNKKAIQIINRVRDKLTGRDFSHDDTLDVPTQVELLIKQATSHENLCQCYIGWCPFW

SEQ ID NO: 915180 - protein, 146 aa, Homo sapiens
MEVLREHKDSVMAVLEAFVYDPLLNWRLMDTNTKGNKRSRTRTDSYSAGQSVEILDGVELGEPAHKKTGTTVPESIHSFIGDGLVKPEALNKKAIQIINRVRDKLTGRDFSHDDTLDVPTQVELLIKQATSHENLCQCYIGWCPFW

SEQ ID NO: 915181 - protein, 1944 aa, Homo sapiens
MLGTGPAAATTAATTSSNVSVLQQFASGLKSRNEETRAKAAKELQHYVTMELREMSQEESTRFYDQLNHHIFELVSSSDANERKGGILAIASLIGVEGGNATRIGRFANYLRNLLPSNDPVVMEMASKAIGRLAMAGDTFTAEYVEFEVKRALEWLGADRNEGRRHAAVLVLRELAISVPTFFFQQVQPFFDNIFVAVWDPKQAIREGAVAALRACLILTTQREPKEMQKPQWYRHTFEEAEKGFDETLAKEKGMNRDDRIHGALLILNELVRISSMEGERLREEMEEITQQQLVHDKYCKDLMGFGTKPRHITPFTSFQAVQPQQSNALVGLLGYSSHQGLMGFGTSPSPAKSTLVESRCCRDLMEEKFDQVCQWVLKCRNSKNSLIQMTILNLLPRLAAFRPSAFTDTQYLQDTMNHVLSCVKKEKERTAAFQALGLLSVAVRSEFKVYLPRVLDIIRAALPPKDFAHKRQKAMQVDATVFTCISMLARAMGPGIQQDIKELLEPMLAVGLSPALTAVLYDLSRQIPQLKKDIQDGLLKMLSLVLMHKPLRHPGMPKGLAHQLASPGLTTLPEASDVGSITLALRTLGSFEFEGHSLTQFVRHCADHFLNSEHKEIRMEAARTCSRLLTPSIHLISGHAHVVSQTAVQVVADVLSKLLVVGITDPDPDIRYCVLASLDERFDAHLAQAENLQALFVALNDQVFEIRELAICTVGRLSSMNPAFVMPFLRKMLIQILTELEHSGIGRIKEQSARMLGHLVSNAPRLIRPYMEPILKALILKLKDPDPDPNPGVINNVLATIGELAQVSGLEMRKWVDELFIIIMDMLQDSSLLAKRQVALWTLGQLVASTGYVVEPYRKYPTLLEVLLNFLKTEQNQGTRREAIRVLGLLGALDPYKHKVNIGMIDQSRDASAVSLSESKSSQDSSDYSTSEMLVNMGNLPLDEFYPAVSMVALMRIFRDQSLSHHHTMVVQAITFIFKSLGLKCVQFLPQVMPTFLNVIRVCDGAIREFLFQQLGMLVSFVKSHIRPYMDEIVTLMREFWVMNTSIQSTIILLIEQIVVALGGEFKLYLPQLIPHMLRVFMHDNSPGRIVSIKLLAAIQLFGANLDDYLHLLLPPIVKLFDAPEAPLPSRKAALETVDRLTESLDFTDYASRIIHPIVRTLDQSPELRSTAMDTLSSLVFQLGKKYQIFIPMVNKVLVRHRINHQRYDVLICRIVKGYTLADEEEDPLIYQHRMLRSGQGDALASGPVETGPMKKLHVSTINLQKAWGAARRVSKDDWLEWLRRLSLELLKDSSSPSLRSCWALAQAYNPMARDLFNAAFVSCWSELNEDQQDELIRSIELALTSQDIAEVTQTLLNLAEFMEHSDKGPLPLRDDNGIVLLGERAAKCRAYAKALHYKELEFQKGPTPAILESLISINNKLQQPEAAAGVLEYAMKHFGELEIQATWYEKLHEWEDALVAYDKKMDTNKDDPELMLGRMRCLEALGEWGQLHQQCCEKWTLVNDETQAKMARMAAAAAWGLGQWDSMEEYTCMIPRDTHDGAFYRAVLALHQDLFSLAQQCIDKARDLLDAELTAMAGESYSRAYGAMVSCHMLSELEEVIQYKLVPERREIIRQIWWERLQGCQRIVEDWQKILMVRSLVVSPHEDMRTWLKYASLCGKSGRLALAHKTLVLLLGVDPSRQLDHPLPTVHPQVTYAYMKNMWKSARKIDAFQHMQHFVQTMQQQAQHAIATEDQQHKQELHKLMARCFLKLGEWQLNLQGINESTIPKVLQYYSAATEHDRSWYKAWHAWAVMNFEAVLHYKHQNQARDEKKKLRHASGANITNATTAATTAATATTTASTEGSNSESEAESTENSPTPSPLQKKVTEDLSKTLLMYTVPAVQGFFRSISLSRGNNLQDTLRVLTLWFDYGHWPDVNEALVEGVKAIQIDTWLQVRILGYR

SEQ ID NO: 915182 - protein, 101 aa, Homo sapiens
MLCLKSRHAMCSSNTLCCFVLADYSTSEMLVNMGNLPLDEFYPAVSMVALMRIFRDQSLSHHHTMVVQAITFIFKSLGLKCVQFLPQVMPTFLNVIRVCDG

SEQ ID NO: 915183 - protein, 338 aa, Homo sapiens
MDPETRGQEIIKVTPLQQMLASCTGAILTSVIVTPLDVVKIRLQAQNNPLPKGKCFVYSNGLMDHLCVCEEGGNKLWYKKPGNFQGTLDAFFKIIRNEGIKSLWSGLPPTLVMAVPATVIYFTCYDQLSALLRSKLGENETCIPIVAGIVARFGAVTVISPLELIRTKMQSKKFSYVELHRFVSKKVSEDGWISLWRGWAPTVLRDVPFSAMYWYNYEILKKWLCEKSGLYEPTFMINFTSGALSGSFAAVATLPFDVVKTQKQTQLWTYESHKISMPLHMSTWIIMKNIVAKNGFSGLFSGLIPRLIKIAPACAIMISTYEFGKAFFQKQNVRRQQY

SEQ ID NO: 915184 - protein, 248 aa, Homo sapiens
MDPETRGQEIIKVTPLQQMLASCTGAILTSVIVTPLDVVKIRLQAQNNPLPKGKCFVYSNGLMDHLCVCEEGGNKLWYKKPGNFQGTLDAFFKIIRNEGIKSLWSGLPPTLVMAVPATVIYFTCYDQLSALLRSKLGENETCIPIVAGIVARFGAVTVISPLELIRTKMQSKKFSYVELHRFVSKKVSEDGWISLWRGWAPTVLRDVPFSAMYWYNYEILKKWLCEKSGLYEPTFMINFTSGALSGSE

SEQ ID NO: 915185 - protein, 338 aa, Homo sapiens; identical to SEQ ID NO: 915183

SEQ ID NO: 915186 - protein, 338 aa, Homo sapiens; identical to SEQ ID NO: 915183

SEQ ID NO: 915187 - protein, 167 aa, Homo sapiens
MDPETRGQEIIKVTPLQQMLASCTGAILTSVIVTPLDVVKIRLQAQNNPLPKGKCFVYSNGLMDHLCVCEEGGNKLWYKKPGNFQGTLDAFFKIIRNEGIKSLWSGLPPTLVMAVPATVIYFTCYDQLSALLRSKLGENETCIPIVAGIVARFFLRGTASICQQESI

SEQ ID NO: 915188 - protein, 338 aa, Homo sapiens; identical to SEQ ID NO: 915183

SEQ ID NO: 915189 - protein, 323 aa, Homo sapiens
MDPETRGQEIIKVTPLQQMLASCTGAILTSVIVTPLDVVKIRLQAQNNPLPKGKCFVYSNGLMDHLCVCEEGGNKLWYKKPGNFQGTLDAFFKIIRNEGIKSLWSGLPPTLVMAVPATVIYFTCYDQLSALLRSKLGVGAVTVISPLELIRTKMQSKKFSYVELHRFVSKKVSEDGWISLWRGWAPTVLRDVPFSAMYWYNYEILKKWLCEKSGLYEPTFMINFTSGALSGSFAAVATLPFDVVKTQKQTQLWTYESHKISMPLHMSTWIIMKNIVAKNGFSGLFSGLIPRLIKIAPACAIMISTYEFGKAFFQKQNVRRQQY

SEQ ID NO: 915190 - protein, 534 aa, Homo sapiens
MFSWVSKDARRKKEPELFQTVAEGLRQLYAQKLLPLEEHYRFHEFHSPALEDADFDNKPMVLLVGQYSTGKTTFIRHLIEQDFPGMRIGPEPTTDSFIAVMHGPTEGVVPGNALVVDPRRPFRKLNAFGNAFLNRFMCAQLPNPVLDSISIIDTPGILSGEKQRISRGYDFAAVLEWFAERVDRIILLFDAHKLDISDEFSEVIKALKNHEDKIRVVLNKADQIETQQLMRVYGALMWSLGKIINTPEVVRVYIGSFWSHPLLIPDNRKLFEAEEQDLFKDIQSLPRNAALRKLNDLIKRARLAKVHAYIISSLKKEMPNVFGKESKKKELVNNLGEIYQKIEREHQISPGDFPSLRKMQELLQTQDFSKFQALKPKLLDTVDDMLANDIARLMVMVRQEESLMPSQVVKGGAFDGTMNGPFGHGYGEGAGEGIDDVEWVVGKDKPTYDEIFYTLSPVNGKITGANAKKEMVKSKLPNTVLGKIWKLADVDKDGLLDDEEFALANHLIKVKLEGHELPADLPPHLVPPSKRRHE

SEQ ID NO: 915191 - protein, 535 aa, Homo sapiens
MFSWVSKDARRKKEPELFQTVAEGLRQLYAQKLLPLEEHYRFHEFHSPALEDADFDNKPMVLLVGQYSTGKTTFIRHLIEQDFPGMRIGPEPTTDSFIAVMHGPTEGVVPGNALVVDPRRPFRKLNAFGNAFLNRFMCAQLPNPVLDSISIIDTPGILSGEKQRISRGYDFAAVLEWFAERVDRIILLFDAHKLDISDEFSEVIKALKNHEDKIRVVLNKADQIETQQLMRVYGALMWSLGKIINTPEVVRVYIGSFWSHPLLIPDNRKLFEAEEQDLFKDIQSLPRNAALRKLNDLIKRARLAKVHAYIISSLKKEMPNVFGKESKKKELVNNLGEIYQKIEREHQISPGDFPSLRKMQELLQTQDFSKFQALKPKLLDTVDDMLANDIARLMVMVRQEESLMPSQVVKGGAFDGTMNGPFGHGYGEGAGEGIDDVEWVVGKDKPTYDEIFYTLSPVNGKITGANAKKEMVKSKLPNTVLGKIWKLADVDKDGLLDDEEFALANHLIKVKLEGHELPADLPPHLVPPPSSAWGH

SEQ ID NO: 915192 - protein, 534 aa, Homo sapiens; identical to SEQ ID NO: 915190

SEQ ID NO: 915193 - protein, 407 aa, Homo sapiens
MFSWVSKDARRKKEPELFQTVAEGLRQLYAQKLLPLEEHYRFHEFHSPALEDADFDNKPMVLLVGQYSTGKTTFIRHLIEQDFPGMRIGPEPTTDSFIAVMHGPTEGVVPGNALVVDPRRPFRKLNAFGNAFLNRFMCAQLPNPVLDSISIIDTPGILSGEKQRISRGYDFAAVLEWFAERVDRIILLFDAHKLDISDEFSEVIKALKNHEDKIRVVLNKADQIETQQLMRVYGALMWSLGKIINTPEVVRVYIGSFWSHPLLIPDNRKLFEAEEQDLFKDIQSLPRNAALRKLNDLIKRARLAKVHAYIISSLKKEMPNVFGKESKKKELVNNLGEIYQKIEREHQISPGDFPSLRKMQELLQTQDFSKFQALKPKLLDTVDDMLANARPGGRDGGRGSLTISQGP

SEQ ID NO: 915194 - protein, 534 aa, Homo sapiens; identical to SEQ ID NO: 915190

SEQ ID NO: 915195 - protein, 534 aa, Homo sapiens; identical to SEQ ID NO: 915190

SEQ ID NO: 915196 - protein, 274 aa, Homo sapiens
LPLPASRYPVSVHIDSLLWLLPSSLPRNAALRKLNDLIKRARLAKVHAYIISSLKKEMPNVFGKESKKKELVNNLGEIYQKIEREHQISPGDFPSLRKMQELLQTQDFSKFQALKPKLLDTVDDMLANDIARLMVMVRQEESLMPSQVVKGGAFDGTMNGPFGHGYGEGAGEGIDDVEWVVGKDKPTYDEIFYTLSPVNGKITGANAKKEMVKSKLPNTVLGKIWKLADVDKDGLLDDEEFALANHLIKVKLEGHELPADLPPHLVPPSKRRHE

SEQ ID NO: 915197 - protein, 534 aa, Homo sapiens; identical to SEQ ID NO: 915190

SEQ ID NO: 915198 - protein, 534 aa, Homo sapiens; identical to SEQ ID NO: 915190

SEQ ID NO: 915199 - protein, 534 aa, Homo sapiens; identical to SEQ ID NO: 915190

SEQ ID NO: 915200 - protein, 367 aa, Homo sapiens
MFSWVSKDARRKKEPELFQTVAEGLRQLYAQKLLPLEEHYRFHEFHSPALEDADFDNKPMVLLVGQYSTGKTTFIRHLIEQDFPGMRIGPEPTTDSFIAVMHGPTEGVVPGNALVVDPRRPFRKLNAFGNAFLNRFMCAQLPNPVLDSISIIDTPGILSGEKQRISRGYDFAAVLEWFAERVDRIILLFDAHKLDISDEFSEVIKALKNHEDKIRVVLNKADQIETQQLMRVYGALMWSLGKIINTPEVVRVYIGSFWSHPLLIPDNRKLFEAEEQDLFKDIQSLPRNAALRKLNDLIKRARLAKVDPGVRGAAYCQAGPWGSETGTQGPRIARDPSQLTSQADLHCAVSLYRNQSLVSTRVQPALN

SEQ ID NO: 915201 - protein, 141 aa, Homo sapiens
MFSWVSKDARRKKEPELFQTVAEGLRQLYAQKLLPLEEHYRFHEFHSPALEDADFDNKPMVLLVGQYSTGKTTFIRHLIEQDFPGMRIGPEPTTDSFIAVMHGPTEGVVPGNALVVDPRRPFRKLNALLALFSLARHSIQY

SEQ ID NO: 915202 - protein, 152 aa, Homo sapiens
MLSFPLILASKLAGVSSCTEYLSVVFGANLPQVVQCLLTDVDSFRLGTDFNDLFHFLWSIQHGPDYHHSVQKVKRDAVRGCDVLSASDDTVASVGCKDDDGSDRRLQGAVQVGEALNVQHVDLINKQHTRDQLSNALVDVLVHHLNVFQKNT

SEQ ID NO: 915203 - protein, 548 aa, Homo sapiens
MEQPGTAASPVSGSMFSWVSKDARRKKEPELFQTVAEGLRQLYAQKLLPLEEHYRFHEFHSPALEDADFDNKPMVLLVGQYSTGKTTFIRHLIEQDFPGMRIGPEPTTDSFIAVMHGPTEGVVPGNALVVDPRRPFRKLNAFGNAFLNRFMCAQLPNPVLDSISIIDTPGILSGEKQRISRGYDFAAVLEWFAERVDRIILLFDAHKLDISDEFSEVIKALKNHEDKIRVVLNKADQIETQQLMRVYGALMWSLGKIINTPEVVRVYIGSFWSHPLLIPDNRKLFEAEEQDLFKDIQSLPRNAALRKLNDLIKRARLAKVHAYIISSLKKEMPNVFGKESKKKELVNNLGEIYQKIEREHQISPGDFPSLRKMQELLQTQDFSKFQALKPKLLDTVDDMLANDIARLMVMVRQEESLMPSQVVKGGAFDGTMNGPFGHGYGEGAGEGIDDVEWVVGKDKPTYDEIFYTLSPVNGKITGANAKKEMVKSKLPNTVLGKIWKLADVDKDGLLDDEEFALANHLIKVKLEGHELPADLPPHLVPPSKRRHE

SEQ ID NO: 915204 - protein, 398 aa, Homo sapiens [sequence omitted]

SEQ ID NO: 915205 - protein, 534 aa, Homo sapiens; identical to SEQ ID NO: 915190

SEQ ID NO: 915206 - protein, 236 aa, Homo sapiens [sequence omitted]

SEQ ID NO: 915207 - protein, 216 aa, Homo sapiens
SCHPEHGSADGLVSDSRKASTSQIYREHHISPVALTEPPEDAELLQTQDFSKFQALKPKLLDTVDDMLANDIARLMVMVRQEESLMPSQVVKGGAFDGTMNGPFGHGYGEGAGEGIDDVEWVVGKDKPTYDEIFYTLSPVNGKITGANAKKEMVKSKLPNTVLGKIWKLADVDKDGLLDDEEFALANHLIKVKLEGHELPADLPPHLVPPSKRRHE

SEQ ID NO: 915208 - protein, 534 aa, Homo sapiens; identical to SEQ ID NO: 915190

SEQ ID NO: 915209 - protein, 332 aa, Homo sapiens
MFSWVSKDARRKKEPELFQTVAEGLRQLYAQKLLPLEEHYRFHEFHSPALEDADFDNKPMVLLVGQYSTGKTTFIRHLIEQDFPGMRIGPEPTTDSFIAVMHGPTEGVVPGNALVVDPRRPFRKLNAFGNAFLNRFMCAQLPNPVLDSISIIDTPGILSGEKQRISRGYDFAAVLEWFAERVDRIILLFDAHKLDISDEFSEVIKALKNHEDKIRVVLNKADQIETQQLMRVYGALMWSLGKIINTPEVVRVYIGSFWSHPLLIPDNRKLFEAEEQDLFKDIQRCSESAGTGLVLLSPSLHTVLGEDGCGRCPCREVTVEVAVACSHLWEEK

SEQ ID NO: 915210 - protein, 542 aa, Homo sapiens
MDLGAITKYSALHAKPNGLILQYGTAGFRTKAEHLDHVMFRMGLLAVLRSKQTKSTIGVMVTASHNPEEDNGVKLVDPLGEMLAPSWEEHATCLANAEEQDMQRVLIDISEKEAVNLQQDAFVVIGRDTRPSSEKLSQSVIDGVTVLGGQFHDYGLLTTPQLHYMVYCRNTGGRYGKATIEGYYQKLSKAFVELTKQASCSGDEYRSLKVDCANGIGALKLREMEHYFSQGLSVQLFNDGSKGKLNHLCGADFVKSHQKPPQGMEIKSNERCCSFDGDADRIVYYYHDADGHFHLIDGDKIATLISSFLKELLVEIGESLNIGVVQTAYANGSSTRYLEEVMKVPVYCTKTGVKHLHHKAQEFDIGVYFEANGHGTALFSTAVEMKIKQSAEQLEDKKRKAAKMLENIIDLFNQAAGDAISDMLVIEAILALKGLTVQQWDALYTDLPNRQLKVQVADRRVISTTDAERQAVTPPGLQEAINDLVKKYKLSRAFVRPSGTEDVVRVYAEADSQESADHLAHEVSLAVFQLAGGIGERPQPGF

SEQ ID NO: 915211 - protein, 542 aa, Homo sapiens; identical to SEQ ID NO: 915210

SEQ ID NO: 915212 - protein, 542 aa, Homo sapiens; identical to SEQ ID NO: 915210

SEQ ID NO: 915213 - protein, 542 aa, Homo sapiens; identical to SEQ ID NO: 915210

SEQ ID NO: 915214 - protein, 510 aa, Homo sapiens
KPRRATSAVLRTGFGCRRCCLGASPLRVGEGGFLTEEDNGVKLVDPLGEMLAPSWEEHATCLANAEEQDMQRVLIDISEKEAVNLQQDAFVVIGRDTRPSSEKLSQSVIDGVTVLGGQFHDYGLLTTPQLHYMVYCRNTGGRYGKATIEGYYQKLSKAFVELTKQASCSGDEYRSLKVDCANGIGALKLREMEHYFSQGLSVQLFNDGSKGKLNHLCGADFVKSHQKPPQGMEIKSNERCCSFDGDADRIVYYYHDADGHFHLIDGDKIATLISSFLKELLVEIGESLNIGVVQTAYANGSSTRYLEEVMKVPVYCTKTGVKHLHHKAQEFDIGVYFEANGHGTALFSTAVEMKIKQSAEQLEDKKRKAAKMLENIIDLFNQAAGDAISDMLVIEAILALKGLTVQQWDALYTDLPNRQLKVQVADRRVISTTDAERQAVTPPGLQEAINDLVKKYKLSRAFVRPSGTEDVVRVYAEADSQESADHLAHEVSLAVFQLAGGIGERPQPGF

SEQ ID NO: 915215 - protein, 566 aa, Homo sapiens
MDLGAITKYSALHAKPNGLILQYGTAGFRTKAEHLDHVMFRMGLLAVLRSKQTKSTIGVMVTASHNPEEDNGVKLVDPLGEMLAPSWEEHATCLANAEEQDMQRVLIDISEKEAVNLQQDAFVVIGRDTRPSSEKLSQSVIDGVTVLGGQFHDYGLLTTPQLHYMVYCRNTGGRYGKATIEGYYQKLSKAFVELTKQASCSGDEYRSLKVDCANGIGALKLREMEHYFSQGLSVQLFNDGSKGKLNHLCGADFVKSHQKPPQGMEIKSNERCCSFDGDADRIVYYYHDADGHFHLIDGDKIATLISSFLKELLVEIGESLNIGVVQTAYANGSSTRYLEEVMKVPVYCTKTGVKHLHHKAQEFDIGVYFEANGHGTALFSTAVEMKIKQSAEQLEDKKRKAAKMLENIIDLFNQAAGDAISDMLVIEAILALKGLTVQQWDALYTDLPNRQLKVQVADRRVISTTDAERQAVTPPGLQEAINDLVKKYKLSRAFVRPSGTEDVVRVYAEADSQGSRLVVWIFIIWPLHILLKVCAKPGQSTVSALNRESGGDIWQLSCRSLSHLRV

SEQ ID NO: 915216 - protein, 204 aa, Homo sapiens
MHVLQVPVYCTKTGVKHLHHKAQEFDIGVYFEANGHGTALFSTAVEMKIKQSAEQLEDKKRKAAKMLENIIDLFNQAAGDAISDMLVIEAILALKGLTVQQWDALYTDLPNRQLKVQVADRRVISTTDAERQAVTPPGLQEAINDLVKKYKLSRAFVRPSGTEDVVRVYAEADSQESADHLAHEVSLAVFQLAGGIGERPQPGF

SEQ ID NO: 915217 - protein, 149 aa, Homo sapiens
MDLGAITKYSALHAKPNGLILQYGTAGFRTKAEHLDHVMFRMGLLAVLRSKQTKSTIGVMVTASHNPEEDNGVKLVDPLGEMLAPSWEEHATCLANAEEQDMQRVLIDISEKEAVNLQQDAFVVIGRDTSPTVEKLSQTCKNGGDGPWK

SEQ ID NO: 915218 - protein, 542 aa, Homo sapiens; identical to SEQ ID NO: 915210

SEQ ID NO: 915219 - protein, 542 aa, Homo sapiens; identical to SEQ ID NO: 915210

SEQ ID NO: 915220 - protein, 542 aa, Homo sapiens; identical to SEQ ID NO: 915210

SEQ ID NO: 915221 - protein, 515 aa, Homo sapiens
MDLGAITKYSALHAKPNGLILQYGTAGFRTKAEHLDHVMFRMGLLAVLRSKQTKSTIGVMVTASHNPEEDNGVKLVDPLGEMLAPSWEEHATCLANAEEQDMQRVLIDISEKEAVNLQQDAFVVIGRDTRPSSEKLSQSVIDGVTVLGGQFHDYGLLTTPQLHYMVYCRNTGGRYGKATIEGYYQKLSKAFVELTKQASCSGDEYRSLKVDCANGIGALKLREMEHYFSQGLSVQLFNDGSKGKLNHLCGADFVKSHQKPPQGMEIKSNERCCSFDGDADRIVYYYHDADGHFHLIDGDKIATLISSFLKELLVEIGESLNIGVVQTAYANGSSTRYLEEVMKVPVYCTKTGVKHLHHKAQEFDIGVYFEANGHGTALFSTAVEMKIKQSAEQLEDKKRKAAKMLENIIDLFNQAAGDAISDMLVIEAILALKGLTVQQWDALYTDLPNRQLKVQVADRRVISTTDAERQAVTPPGLQEAINDLVKKYKLSRAFVRPSGTEDVVRVYAEADSQLI

SEQ ID NO: 915222 - protein, 120 aa, Homo sapiens
MLVIEAILALKGLTVQQWDALYTDLPNRQLKVQVADRRVISTTDAERQAVTPPGLQEAINDLVKKYKLSRAFVRPSGTEDVVRVYAEADSQESADHLAHEVSLAVFQLAGGIGERPQPGF

SEQ ID NO: 915223 - protein, 943 aa, Homo sapiens
MGLTKQYLRYVASAVFGVIGSQKGNIVFVTLRGEKGRYVAVPACEHVFIWDLRKGEKILILQGLKQEVTCLCPSPDGLHLAVGYEDGSIRIFSLLSGEGNVTFNGHKAAITTLKYDQLGGRLASGSKDTDIIVWDVINESGLYRLKGHKDAITQALFLREKNLLVTSGKDTMVKWWDLDTQHCFKTMVGHRTEVWGLVLLSEEKRLITGASDSELRVWDIAYLQEIEDPEEPDPKKIKGSSPGIQDTLEAEDGAFETDEAPEDRILSCRKAGSIMREGRDRVVNLAVDKTGRILACHGTDSVLELFCILSKKEIQKKMDKKMKKARKKAKLHSSKGEEEDPEVNVEMSLQDEIQRVTNIKTSAKIKSFDLIHSPHGELKAVFLLQNNLVELYSLNPSLPTPQPVRTSRITIGGHRSDVRTLSFSSDNIAVLSAAADSIKIWNRSTLQCIRTMTCEYALCSFFVPGDRQVVIGTKTGKLQLYDLASGNLLETIDAHDGALWSMSLSPDQRGFVTGGADKSVKFWDFELVKDENSTQKRLSVKQTRTLQLDEDVLCVSYSPNQKLLAVSLLDCTVKIFYVDTLKFFLSLYGHKLPVICMDISHDGALIATGSADRNVKIWGLDFGDCHKSLFAHDDSVMYLQFVPKSHLFFTAGKDHKIKQWDADKFEHIQTLEGHHQEIWCLAVSPSGDYVVSSSHDKSLRLWERTREPLILEEEREMEREAEYEESVAKEDQPAVPGETQGDSYFTGKKTIETVKAAERIMEAIELYREETAKMKEHKAICKAAGKEVPLPSNPILMAYGSISPSAYVLEIFKGIKSSELEESLLVLPFSYVPDILKLFNEFIQLGSDVELICRCLFFLLRIHFGQITSNQMLVPVIEKLRETTISKVSQVRDVIGFNMAGLDYLKRECEAKSEVMFFADATSHLEEKKRKRKKREKLILTLT

SEQ ID NO: 915224 - protein, 925 aa, Homo sapiens
MGLTKQYLRYVASAVFGVIGSQKGNIVFVTLRGEKGRYVAVPACEHVFIWDLRKGEKILILQGLKQEVTCLCPSPDGLHLAVGYEDGSIRIFSLLSGEGNVTFNGHKAAITTLKYDQLGGRLASGSKDTDIIVWDVINESGLYRLKGHKDAITQALFLREKNLLVTSGKDTMVKWWDLDTQHCFKTMVGHRTEVWGLVLLSEEKRLITGASDSELRVWDIAYLQEIEDPEEPDPKKIKGSSPGIQDTLEAEDGAFETDEAPEDRILSCRKAGSIMREGRDRVVNLAVDKTGRILACHGTDSVLELFCILSKKEIQKKMDKKMKKARKKAKLHSSKGEEEDPEVNVEMSLQDEIQRVTNIKTSAKIKSFDLIHSPHGELKAVFLLQNNLVELYSLNPSLPTPQPVRTSRITIGGHRSDVRTLSFSSDNIAVLSAAADSIKIWNRSTLQCIRTMTCEYALCSFFVPGDRQVVIGTKTGKLQLYDLASGNLLETIDAHDGALWSMSLSPDQRGFVTGGADKSVKFWDFELVKDENSTQKRLSVKQTRTLQLDEDVLCVSYSPNQKLLAVSLLDCTVKIFYVDTLKFFLSLYGHKLPVICMDISHDGALIATGSADRNVKIWGLDFGDCHKSLFAHDDSVMYLQFVPKSHLFFTAGKDHKIKQWDADKFEHIQTLEGHHQEIWCLAVSPSGDYVVSSSHDKSLRLWERTREPLILEEEREMEREAEYEESVAKEDQPAVPGETQGDSYFTGKKTIETVKAAERIMEAIELYREETAKMKEHKAICKAAGKEVPLPSNPILMAYGSISPSAYVLEIFKGIKSSELEESLLVLPFSYVPDILKLFNEFIQLGSDVELICRCLFFLLRIHFGQITSNQMLVPVIEKLRETTISLKRECEAKSEVMFFADATSHLEEKKRKRKKREKLILTLT

SEQ ID NO: 915225 - protein, 894 aa, Homo sapiens
MGLTKQYLRYVASAVFGVIGSQKGNIVFVTLRGEKGRYVAVPACEHVFIWDLRKGEKILILQGLKQEVTCLCPSPDGLHLAVGYEDGSIRIFSLLSGEGNVTFNGHKAAITTLKYDQLGGRLASGSKDTDIIVWDVINESGLYRLKGHKDAITQALFLREKNLLVTSGKDTMVKWWDLDTQHCFKTMVGHRTEVWGLVLLSEEKRLITGASDSELRVWDIAYLQEIEDPEEPDPKKIKGSSPGIQDTLEAEDGAFETDEAPEDRILSCRKAGSIMREGRDRVVNLAVDKTGRILACHGTDSVLELFCILSKKEIQKKMDKKMKKARKKAKLHSSKGEEEDPEVNVEMSLQDEIQRVTNIKTSAKIKSFDLIHSPHGELKAVFLLQNNLVELYSLNPSLPTPQPVRTSRITIGGHRSDVRTLSFSSDNIAVLSAAADSIKIWNRSTLQCIRTMTCEYALCSFFVPGDRQVVIGTKTGKLQLYDLASGNLLETIDAHDGALWSMSLSPDQRGFVTGGADKSVKFWDFELVKDENSTQKRLSVKQTRTLQLDEDVLCVSYSPNQKLLAVSLLDCTVKIFYVDTLKFFLSLYGHKLPVICMDISHDGALIATGSADRNVKIWGLDFGDCHKSLFAHDDSVMYLQFVPKSHLFFTAGKDHKIKQWDADKFEHIQTLEGHHQEIWCLAVSPSGDYVVSSSHDKSLRLWERTREPLILEEEREMEREAEYEESVAKEDQPAVPGETQGDSYFTGKKTIETVKAAERIMEAIELYREETAKMKEHKAICKAAGKEVPLPSNPILMAYGSISPSAYVLEIFKGIKSSELEESLLVLPFSYVPDILKLFNEFIQLGSDVELICRCLFFLLRIHFGQITSNQMLVPVIEKLRETTISKVSQVRDS

SEQ ID NO: 915226 - protein, 555 aa, Homo sapiens
  misc_feature (544)..(544): Xaa can be any naturally occurring amino acid
  misc_feature (551)..(551): Xaa can be any naturally occurring amino acid
MGLTKQYLRYVASAVFGVIGSQKGNIVFVTLRGEKGRYVAVPACEHVFIWDLRKGEKILILQGLKQEVTCLCPSPDGLHLAVGYEDGSIRIFSLLSGEGNVTFNGHKAAITTLKYDQLGGRLASGSKDTDIIVWDVINESGLYRLKGHKDAITQALFLREKNLLVTSGKDTMVKWWDLDTQHCFKTMVGHRTEVWGLVLLSEEKRLITGASDSELRVWDIAYLQEIEDPEEPDPKKIKGSSPGIQDTLEAEDGAFETDEAPEDRILSCRKAGSIMREGRDRVVNLAVDKTGRILACHGTDSVLELFCILSKKEIQKKMDKKMKKARKKAKLHSSKGEEEDPEVNVEMSLQDEIQRVTNIKTSAKIKSFDLIHSPHGELKAVFLLQNNLVELYSLNPSLPTPQPVRTSRITIGGHRSDVRTLSFSSDNIAVLSAAADSIKIWNRSTLQCIRTMTCEYALCSFFVPGDRQVVIGTKTGKLQLYDLASGNLLETIDAHDGALWSMSLSPDQRGFVTGGADKSVKFWDFELVKDENSTQKRTFCLSQXPTLALKXKIFC

SEQ ID NO: 915227 - protein, 192 aa, Homo sapiens
MGLTKQYLRYVASAVFGVIGSQKGNIVFVTLRGEKGRYVAVPACEHVFIWDLRKGEKILILQGLKQEVTCLCPSPDGLHLAVGYEDGSIRIFSLLSGEGNVTFNGHKAAITTLKYDQLGGRLASGSKDTDIIVWDVINESGLYRLKGHKDAITQALFLREKNLLVTSGKDTMVRMVGPCYSPAANRSGSTSI

SEQ ID NO: 915228 - protein, 943 aa, Homo sapiens; identical to SEQ ID NO: 915223

SEQ ID NO: 915229 - protein, 803 aa, Homo sapiens
MGLTKQYLRYVASAVFGVIGSQKGNIVFVTLRGEKGRYVAVPACEHVFIWDLRKGEKILILQGLKQEVTCLCPSPDGLHLAVGYEDGSIRIFSLLSGEGNVTFNGHKAAITTLKYDQLGGRLASGSKDTDIIVWDVINESGLYRLKGHKDAITQALFLREKNLLVTSGKDTMVKWWDLDTQHCFKTMVGHRTEVWGLVLLSEEKRLITGASDSELRVWDIAYLQEIEDPEEPDPKKIKGSSPGIQDTLEAEDGAFETDEAPEDRILSCRKAGSIMREGRDRVVNLAVDKTGRILACHGTDSVLELFCILSKKEIQKKMDKKMKKARKKAKLHSSKGEEEDPEVNVEMSLQDEIQRVTNIKTSAKIKSFDLIHSPHGELKAVFLLQNNLVELYSLNPSLPTPQPVRTSRITIGGHRSDVRTLSFSSDNIAVLSAAADSIKIWNRSTLQCIRTMTCEYALCSFFVPGDRQVVIGTKTGKLQLYDLASGNLLETIDAHDGALWSMSLSPDQRGFVTGGADKSVKFWDFELVKDENSTQKRLSVKQTRTLQLDEDVLCVSYSPNQKLLAVSLLDCTVKIFYVDTLKFFLSLYGHKLPVICMDISHDGALIATGSADRNVKIWGLDFGDCHKSLFAHDDSVMYLQFVPKSHLFFTAGKDHKIKQWDADKFEHIQTLEGHHQEIWCLAVSPSGDYVVSSSHDKSLRLWERTREPLILEEEREMEREAEYEESVAKEDQPAVPGETQGDSYFTGKKTIETVKAAERIMEAIELYREETAKMKEHKAICKAAGKEVPLPQRQTVLLSTFIF

SEQ ID NO: 915230 - protein, 95 aa, Homo sapiens
GSGRWERRLQNGSDGVGRQAAFSALLTRWREALHFPTALTAAPSCLPPTHREACCSSAAVTESGASAAATVSLGLGCFAEGSGPESEGDCGVQGR

SEQ ID NO: 915231 - protein, 67 aa, Homo sapiens
GSGRWERRLQNGSDGLPQPPELVRVLQGPAPRHRHLLSSEFPSDETTGVFTHHPHHFFFPNLMEGST

SEQ ID NO: 915232 - protein, 77 aa, Homo sapiens
ICIICILLLPESRDQNLPENISNGEHYTRQPLLPHKKGEQPLLLTNAELKDYSGLHDAAAAGDTLPEGATANGMKAM

SEQ ID NO: 915233 - protein, 77 aa, Homo sapiens; identical to SEQ ID NO: 915232

SEQ ID NO: 915234 - protein, 77 aa, Homo sapiens; identical to SEQ ID NO: 915232

SEQ ID NO: 915235 - protein, 152 aa, Homo sapiens
MTRKFVKRSIFLEILDVIEPSEFVKIMEPLFRQLAKCVSSPHFQVAERALYYWNNEYIMSLISDNAAKILPIMFPSLYRNSKTHWNKTIHGLIYNALKLFMEMNQKLFDDCTQQFKAEKLKEKLKMKEREEAWVKIENLAKANPQVLKKRIT

SEQ ID NO: 915236 - protein, 524 aa, Homo sapiens
MLTCNKAGSRMVVDAANSNGPFQPVVLLHIRDVPPADQEKLFIQKLRQCCVLFDFVSDPLSDLKWKEVKRAALSEMVEYITHNRNVITEPIYPEVVHMFAVNMFRTLPPSSNPTGAEFDPEEDEPTLEAAWPHLQLVYEFFLRFLESPDFQPNIAKKYIDQKFVLQLLELFDSEDPRERDFLKTTLHRIYGKFLGLRAYIRKQINNIFYRFIYETEHHNGIAELLEILGSIINGFALPLKEEHKIFLLKVLLPLHKVKSLSVYHPQLAYCVVQFLEKDSTLTEPVVMALLKYWPKTHSPKEVMFLNELEEILDVIEPSEFVKIMEPLFRQLAKCVSSPHFQVAERALYYWNNEYIMSLISDNAAKILPIMFPSLYRNSKTHWNKTIHGLIYNALKLFMEMNQKLFDDCTQQFKAEKLKEKLKMKEREEAWVKIENLAKANPQYTVYSQASTMSIPVAMETDGPLFEDVQMLRKTVKDEAHQAQKDPKKDRPLARRKSELPQDPHTKKALEAHCRADELASQDGR

SEQ ID NO: 915237 - protein, 449 aa, Homo sapiens
MLTCNKAGSRMVVDAANSNGPFQPVVLLHIRDVPPADQEKLFIQKLRQCCVLFDFVSDPLSDLKWKEVKRAALSEMVEYITHNRNVITEPIYPEVVHMFAVNMFRTLPPSSNPTGAEFDPEEDEPTLEAAWPHLQLVYEFFLRFLESPDFQPNIAKKYIDQKFVLQLLELFDSEDPRERDFLKTTLHRIYGKFLGLRAYIRKQINNIFYRFIYETEHHNGIAELLEILGSIINGFALPLKEEHKIFLLKVLLPLHKVKSLSVYHPQLAYCVVQFLEKDSTLTEPVVMALLKYWPKTHSPKEVMFLNELEEILDVIEPSEFVKIMEPLFRQLAKCVSSPHFQVAERALYYWNNEYIMSLISDNAAKILPIMFPSLYRNSKTHWNKTIHGLIYNALKLFMEMNQKLFDDCTQQFKAEKLKEKLKMKEREEAWVKIENLAKANPQVLKKRIT

SEQ ID NO: 915238 - protein, 118 aa, Homo sapiens
LLLQYWSLYTVLHTRFFSGYMSFLSKLCGSHEETSNQGKGEGLRHKTYLYKISFKNSNLGHVKFFYIFSCLNLSSFFMLCSARKCGEMEQGGCGRSRWLGSTCLCLFPFSVFLCLMHL

SEQ ID NO: 915239 - protein, 118 aa, Homo sapiens
SSKPSTCVFQVAERALYYWNNEYIMSLISDNAAKILPIMFPSLYRNSKTHWNKTIHGLIYNALKLFMEMNQKLFDDCTQQFKAEKLKEKLKMKEREEAWVKIENLAKANPQVLKKRIT

SEQ ID NO: 915240 - protein, 100 aa, Homo sapiens
AAAGARRPGRGRCCCGGRRRQGRRRRRRPAPAMPNKNKKEKESPKAGKSGKSSKEGQDTVESECYCLRAGATELEITTENTEMLGPSLLPHKDTRGNLAY

SEQ ID NO: 915241 - protein, 485 aa, Homo sapiens
MLTCNKAGSRMVVDAANSNGPFQPVVLLHIRDVPPADQEKLFIQKLRQCCVLFDFVSDPLSDLKWKEVKRAALSEMVEYITHNRNVITEPIYPEVVHMFAVNMFRTLPPSSNPTGAEFDPEEDEPTLEAAWPHLQLVYEFFLRFLESPDFQPNIAKKYIDQKFVLQLLELFDSEDPRERDFLKTTLHRIYGKFLGLRAYIRKQINNIFYRFIYETEHHNGIAELLEILGSIINGFALPLKEEHKIFLLKVLLPLHKVKSLSVYHPQLAYCVVQFLEKDSTLTEPVVMALLKYWPKTHSPKEVMFLNELEEILDVIEPSEFVKIMEPLFRQLAKCVSSPHFQVAERALYYWNNEYIMSLISDNAAKILPIMFPSLYRNSKTHWNKTIHGLIYNALKLFMEMNQKLFDDCTQQFKAEKLKEKLKMKEREEAWVKIENLAKANPQAQKDPKKDRPLARRKSELPQDPHTKKALEAHCRADELASQDGR

SEQ ID NO: 915242 - protein, 540 aa, Homo sapiens
MPNKNKKEKESPKAGKSGKSSKEGQDTVESEQISVRKNSLVAVPSTVSAKIKVPVSQPIVKKDKRQNSSRFSASNNRELQKLPSLKDVPPADQEKLFIQKLRQCCVLFDFVSDPLSDLKWKEVKRAALSEMVEYITHNRNVITEPIYPEVVHMFAVNMFRTLPPSSNPTGAEFDPEEDEPTLEAAWPHLQLVYEFFLRFLESPDFQPNIAKKYIDQKFVLQLLELFDSEDPRERDFLKTTLHRIYGKFLGLRAYIRKQINNIFYRFIYETEHHNGIAELLEILGSIINGFALPLKEEHKIFLLKVLLPLHKVKSLSVYHPQLAYCVVQFLEKDSTLTEPVVMALLKYWPKTHSPKEVMFLNELEEILDVIEPSEFVKIMEPLFRQLAKCVSSPHFQVAERALYYWNNEYIMSLISDNAAKILPIMFPSLYRNSKTHWNKTIHGLIYNALKLFMEMNQKLFDDCTQQFKAEKLKEKLKMKEREEAWVKIENLAKANPQAQKDPKKDRPLARRKSELPQDPHTKKALEAHCRADELASQDGR

SEQ ID NO: 915243 - protein, 544 aa, Homo sapiens
RRAGPTRKGRDCRESPKAGKSGKSSKEGQDTVESEQISVRKNSLVAVPSTVSAKIKVPVSQPIVKKDKRQNSSRFSASNNRELQKLPSLKDVPPADQEKLFIQKLRQCCVLFDFVSDPLSDLKWKEVKRAALSEMVEYITHNRNVITEPIYPEVVHMFAVNMFRTLPPSSNPTGAEFDPEEDEPTLEAAWPHLQLVYEFFLRFLESPDFQPNIAKKYIDQKFVLQLLELFDSEDPRERDFLKTTLHRIYGKFLGLRAYIRKQINNIFYRFIYETEHHNGIAELLEILGSIINGFALPLKEEHKIFLLKVLLPLHKVKSLSVYHPQLAYCVVQFLEKDSTLTEPVVMALLKYWPKTHSPKEVMFLNELEEILDVIEPSEFVKIMEPLFRQLAKCVSSPHFQVAERALYYWNNEYIMSLISDNAAKILPIMFPSLYRNSKTHWNKTIHGLIYNALKLFMEMNQKLFDDCTQQFKAEKLKEKLKMKEREEAWVKIENLAKANPQAQKDPKKDRPLARRKSELPQDPHTKKALEAHCRADELASQDGR

SEQ ID NO: 915244 - protein, 449 aa, Homo sapiens; identical to SEQ ID NO: 915237

SEQ ID NO: 915245 - protein, 466 aa, Homo sapiens
MQLGRWDDSACWDVPPADQEKLFIQKLRQCCVLFDFVSDPLSDLKWKEVKRAALSEMVEYITHNRNVITEPIYPEVVHMFAVNMFRTLPPSSNPTGAEFDPEEDEPTLEAAWPHLQLVYEFFLRFLESPDFQPNIAKKYIDQKFVLQLLELFDSEDPRERDFLKTTLHRIYGKFLGLRAYIRKQINNIFYRFIYETEHHNGIAELLEILGSIINGFALPLKEEHKIFLLKVLLPLHKVKSLSVYHPQLAYCVVQFLEKDSTLTEPVVMALLKYWPKTHSPKEVMFLNELEEILDVIEPSEFVKIMEPLFRQLAKCVSSPHFQVAERALYYWNNEYIMSLISDNAAKILPIMFPSLYRNSKTHWNKTIHGLIYNALKLFMEMNQKLFDDCTQQFKAEKLKEKLKMKEREEAWVKIENLAKANPQAQKDPKKDRPLARRKSELPQDPHTKKALEAHCRADELASQDGR

SEQ ID NO: 915246 - protein, 383 aa, Homo sapiens
MFRTLPPSSNPTGAEFDPEEDEPTLEAAWPHLQLVYEFFLRFLESPDFQPNIAKKYIDQKFVLQLLELFDSEDPRERDFLKTTLHRIYGKFLGLRAYIRKQINNIFYRFIYETEHHNGIAELLEILGSIINGFALPLKEEHKIFLLKVLLPLHKVKSLSVYHPQLAYCVVQFLEKDSTLTEPVVMALLKYWPKTHSPKEVMFLNELEEILDVIEPSEFVKIMEPLFRQLAKCVSSPHFQVAERALYYWNNEYIMSLISDNAAKILPIMFPSLYRNSKTHWNKTIHGLIYNALKLFMEMNQKLFDDCTQQFKAEKLKEKLKMKEREEAWVKIENLAKANPQAQKDPKKDRPLARRKSELPQDPHTKKALEAHCRADELASQDGR

SEQ ID NO: 915247 - protein, 526 aa, Homo sapiens
MLTCNKAGSRMVVDAANSNGPFQPVVLLHIRDVPPADQEKLFIQKLRQCCVLFDFVSDPLSDLKWKEVKRAALSEMVEYITHNRNVITEPIYPEVVHMFAVNMFRTLPPSSNPTGAEFDPEEDEPTLEAAWPHLQLVYEFFLRFLESPDFQPNIAKKYIDQKFVLQLLELFDSEDPRERDFLKTTLHRIYGKFLGLRAYIRKQINNIFYRFIYETEHHNGIAELLEILGSIINGFALPLKEEHKIFLLKVLLPLHKVKSLSVYHPQLAYCVVQFLEKDSTLTEPVVMALLKYWPKTHSPKEVMFLNELEEILDVIEPSEFVKIMEPLFRQLAKCVSSPHFQVAERALYYWNNEYIMSLISDNAAKILPIMFPSLYRNSKTHWNKTIHGLIYNALKLFMEMNQKLFDDCTQQFKAEKLKEKLKMKEREEAWVKIENLAKANPQYTVYSQASTMSIPVAMETDGPLFEDVQMLRKTVKDEAHQGLALIPRLECSGTILAHCSLGLLDSSNPPTSASQAAVTTGTTTLS

SEQ ID NO: 915248 - protein, 485 aa, Homo sapiens
MLTCNKAGSRMVVDAANSNGPFQPVVLLHIRDVPPADQEKLFIQKLRQCCVLFDFVSDPLSDLKWKEVKRAALSEMVEYITHNRNVITEPIYPEVVHMFAVNMFRTLPPSSNPTGAEFDPEEDEPTLEAAWPHLQLVYEFFLRFLESPDFQPNIAKKYIDQKFVLQLLELFDSEDPRERDFLKTTLHRIYGKFLGLRAYIRKQINNIFYRFIYETEHHNGIAELLEILGSIINGFALPLKEEHKIFLLKVLLPLHKVKSLSVYHPQLAYCVVQFLEKDSTLTEPVVMALLKYWPKTHSPKEVMFLNELEEILDVIEPSEFVKIMEPLFRQLAKCVSSPHFQVAERALYYWNNEYIMSLISDNAAKILPIMFPSLYRNSKTHWNKTIHGLIYNALKLFMEMNQKLFDDCTQQFKAEKLKEKLKMKEREEAWVKIENLAKANPQHRKIRRRTILFDFLQNLRHFHFPMMYSGSLLHQIPTHHLLCLC

SEQ ID NO: 915249 - protein, 227 aa, Homo sapiens
MTRKFVKRSIFLEILDVIEPSEFVKIMEPLFRQLAKCVSSPHFQVAERALYYWNNEYIMSLISDNAAKILPIMFPSLYRNSKTHWNKTIHGLIYNALKLFMEMNQKLFDDCTQQFKAEKLKEKLKMKEREEAWVKIENLAKANPQYTVYSQASTMSIPVAMETDGPLFEDVQMLRKTVKDEAHQAQKDPKKDRPLARRKSELPQDPHTKKALEAHCRADELASQDGR

SEQ ID NO: 915250 - protein, 384 aa, Homo sapiens
MLTCNKAGSRMVVDAANSNGPFQPVVLLHIRDVPPADQEKLFIQKLRQCCVLFDFVSDPLSDLKWKEVKRAALSEMVEYITHNRNVITEPIYPEVVHMFAVNMFRTLPPSSNPTGAEFDPEEDEPTLEAAWPHLQLVYEFFLRFLESPDFQPNIAKKYIDQKFVLQLLELFDSEDPRERDFLKTTLHRIYGKFLGLRAYIRKQINNIFYRFIYETEHHNGIAELLEILGSIINGFALPLKEEHKIFLLKVLLPLHKVKSLSVYHPQLAYCVVQFLEKDSTLTEPVVMALLKYWPKTHSPKEVMFLNELEEILDVIEPSEFVKIMEPLFRQLAKCVSSPHFQVAERALYYWNNEYIMSLISDNAAKILPIMFPSLYRNSKTHWNK

SEQ ID NO: 915251 - protein, 448 aa, Homo sapiens
MLTCNKAGSRMVVDAANSNGPFQPVVLLHIRDVPPADQEKLFIQKLRQCCVLFDFVSDPLSDLKWKEVKRAALSEMVEYITHNRNVITEPIYPEVVHMFAVNMFRTLPPSSNPTGAEFDPEEDEPTLEAAWPHLQLVYEFFLRFLESPDFQPNIAKKYIDQKFVLQLLELFDSEDPRERDFLKTTLHRIYGKFLGLRAYIRKQINNIFYSHSMKESIIWNKQSYWKYWDIINGFALPLKEEHKIFLLKVLLPLHKVKSLSVYHPQLAYCVVQFLEKDSTLTEPVVMALLKYWPKTHSPKEVMFLNELEEILDVIEPSEFVKIMEPLFRQLAKCVSSPHFQVAERALYYWNNEYIMSLISDNAAKILPIMFPSLYRNSKTHWNKTIHGLIYNALKLFMEMNQKLFDDCTQQFKAEKLKEKLKMKEREEAWVKIENLAKANPQVLKKRIT

SEQ ID NO: 915252 - protein, 367 aa, Homo sapiens
MLTCNKAGSRMVVDAANSNGPFQPVVLLHIRDVPPADQEKLFIQKLRQCCVLFDFVSDPLSDLKWKEVKRAALSEMVEYITHNRNVITEPIYPEVVHMFAVNMFRTLPPSSNPTGAEFDPEEDEPTLEAAWPHLQLVYEFFLRFLESPDFQPNIAKKYIDQKFVLQLLELFDSEDPRERDFLKTTLHRIYGKFLGLRAYIRKQINNIFYRFIYETEHHNGIAELLEILGSIINGFALPLKEEHKIFLLKVLLPLHKVKSLSVYHPQVAYCVCSFRAGPHLMNQGCCDFSNTGQDSLSKRSKVFTDSTRLDGLHLRDCEVWNPLRSGQLFPATSMWEDLYTGRTSPHAHEIASLVRQPGLMVTGLDPE

SEQ ID NO: 915253 - protein, 166 aa, Homo sapiens
RRAGPTRKGRDCRESPKAGKSGKSSKEGQDTVESEQISVRKNSLVAVPSTVSAKIKVPVSQPIVKKDKRQNSSRFSASNNRELQKLPSLKVEAVKLGRVSAELRLEVPDLQLWPPTEQQGEQTHGEPRGPQSMDGAASLLPCPSSSTPDLPAFSPALLPLLPTCQP

SEQ ID NO: 915254 - protein, 485 aa, Homo sapiens; identical to SEQ ID NO: 915241

SEQ ID NO: 915255 - protein, 107 aa, Homo sapiens
MLTCNKAGSRMVVDAANSNGPFQPVVLLHIRVEAVKLGRVSAELRLEVPDLQLWPPTEQQGEQTHGEPRGPQSMDGAASLLPCPSSSTPDLPAFSPALLPLLPTCQP

SEQ ID NO: 915256 - protein, 185 aa, Homo sapiens
MPNKNKKEKESPKAGKSGKSSKEGQDTVESEQISVRKNSLVAVPSTVSAKIKVPVSQPIVKKDKRQNSSRFSASNNRELQKLPSLKDVPPADQEKLFIQKLRQCCVLFDFVSDPLSDLKWKEVKRAALSEMVEYITHNRNVITEPIYPEVVHMCQLTGFRNIYPLFFQSFGEREFGPGGKKEPNR

SEQ ID NO: 915257 - protein, 485 aa, Homo sapiens; identical to SEQ ID NO: 915241

SEQ ID NO: 915258 - protein, 485 aa, Homo sapiens; identical to SEQ ID NO: 915241

SEQ ID NO: 915259 - protein, 554 aa, Homo sapiens
TNQGGAGCRMGGTSREELRKAELESPKAGKSGKSSKEGQDTVESEQISVRKNSLVAVPSTVSAKIKVPVSQPIVKKDKRQNSSRFSASNNRELQKLPSLKDVPPADQEKLFIQKLRQCCVLFDFVSDPLSDLKWKEVKRAALSEMVEYITHNRNVITEPIYPEVVHMFAVNMFRTLPPSSNPTGAEFDPEEDEPTLEAAWPHLQLVYEFFLRFLESPDFQPNIAKKYIDQKFVLQLLELFDSEDPRERDFLKTTLHRIYGKFLGLRAYIRKQINNIFYRFIYETEHHNGIAELLEILGSIINGFALPLKEEHKIFLLKVLLPLHKVKSLSVYHPQLAYCVVQFLEKDSTLTEPVVMALLKYWPKTHSPKEVMFLNELEEILDVIEPSEFVKIMEPLFRQLAKCVSSPHFQVAERALYYWNNEYIMSLISDNAAKILPIMFPSLYRNSKTHWNKTIHGLIYNALKLFMEMNQKLFDDCTQQFKAEKLKEKLKMKEREEAWVKIENLAKANPQAQKDPKKDRPLARRKSELPQDPHTKKALEAHCRADELASQDGR

SEQ ID NO: 915260 - protein, 469 aa, Homo sapiens
MFKLHFRHSWQEYFRDVPPADQEKLFIQKLRQCCVLFDFVSDPLSDLKWKEVKRAALSEMVEYITHNRNVITEPIYPEVVHMFAVNMFRTLPPSSNPTGAEFDPEEDEPTLEAAWPHLQLVYEFFLRFLESPDFQPNIAKKYIDQKFVLQLLELFDSEDPRERDFLKTTLHRIYGKFLGLRAYIRKQINNIFYRFIYETEHHNGIAELLEILGSIINGFALPLKEEHKIFLLKVLLPLHKVKSLSVYHPQLAYCVVQFLEKDSTLTEPVVMALLKYWPKTHSPKEVMFLNELEEILDVIEPSEFVKIMEPLFRQLAKCVSSPHFQVAERALYYWNNEYIMSLISDNAAKILPIMFPSLYRNSKTHWNKTIHGLIYNALKLFMEMNQKLFDDCTQQFKAEKLKEKLKMKEREEAWVKIENLAKANPQAQKDPKKDRPLARRKSELPQDPHTKKALEAHCRADELASQDGR

SEQ ID NO: 915261 - protein, 410 aa, Homo sapiens
MVEYITHNRNVITEPIYPEVVHMFAVNMFRTLPPSSNPTGAEFDPEEDEPTLEAAWPHLQLVYEFFLRFLESPDFQPNIAKKYIDQKFVLQLLELFDSEDPRERDFLKTTLHRIYGKFLGLRAYIRKQINNIFYRFIYETEHHNGIAELLEILGSIINGFALPLKEEHKIFLLKVLLPLHKVKSLSVYHPQLAYCVVQFLEKDSTLTEPVVMALLKYWPKTHSPKEVMFLNELEEILDVIEPSEFVKIMEPLFRQLAKCVSSPHFQVAERALYYWNNEYIMSLISDNAAKILPIMFPSLYRNSKTHWNKTIHGLIYNALKLFMEMNQKLFDDCTQQFKAEKLKEKLKMKEREEAWVKIENLAKANPQAQKDPKKDRPLARRKSELPQDPHTKKALEAHCRADELASQDGR

SEQ ID NO: 915262 - protein, 513 aa, Homo sapiens
HEAVLACWSVMAVSKKSAHVMYVPPADQEKLFIQKLRQCCVLFDFVSDPLSDLKWKEVKRAALSEMVEYITHNRNVITEPIYPEVVHMFAVNMFRTLPPSSNPTGAEFDPEEDEPTLEAAWPHLQLVYEFFLRFLESPDFQPNIAKKYIDQKFVLQLLELFDSEDPRERDFLKTTLHRIYGKFLGLRAYIRKQINNIFYSHSMKESIIWNKQSYWKYWDIINGFALPLKEEHKIFLLKVLLPLHKVKSLSVYHPQLAYCVVQFLEKDSTLTEPVVMALLKYWPKTHSPKEVMFLNELEEILDVIEPSEFVKIMEPLFRQLAKCVSSPHFQVAERALYYWNNEYIMSLISDNAAKILPIMFPSLYRNSKTHWNKTIHGLIYNALKLFMEMNQKLFDDCTQQFKAEKLKEKLKMKEREEAWVKIENLAKANPQYTVYSQASTMSIPVAMETDGPLFEDVQMLRKTVKDEAHQAQKDPKKDRPLARRKSELPQDPHTKKALEAHCRADELASQDGR

SEQ ID NO: 915263 - protein, 418 aa, Homo sapiens
MLTCNKAGSRMVVDAANSNGPFQPVVLLHIRDVPPADQEKLFIQKLRQCCVLFDFVSDPLSDLKWKEVKRAALSEMVEYITHNRNVITEPIYPEVVHMFAVNMFRTLPPSSNPTGAEFDPEEDEPTLEAAWPHLQLVYEFFLRFLESPDFQPNIAKKYIDQKFVLQLLELFDSEDPRERDFLKTTLHRIYGKFLGLRAYIRKQINNIFYRFIYETEHHNGIAELLEILGSIINGFALPLKEEHKIFLLKVLLPLHKVKSLSVYHPQLAYCVVQFLEKDSTLTEPVVMALLKYWPKTHSPKEVMFLNELEEILDVIEPSEFVKIMEPLFRQLAKCVSSPHFQVAERALYYWNNEYIMSLISDNAAKILPIMFPSLYRNSKTHWNKTIHGLIYNALKLFMEMNQKLFDDCTQQFKAEKLK

SEQ ID NO: 915264 - protein, 362 aa, Homo sapiens
MLTCNKAGSRMVVDAANSNGPFQPVVLLHIRDVPPADQEKLFIQKLRQCCVLFDFVSDPLSDLKWKEVKRAALSEMVEYITHNRNVITEPIYPEVVHMFAVNMFRTLPPSSNPTGAEFDPEEDEPTLEAAWPHLQLVYEFFLRFLESPDFQPNIAKKYIDQKFVLQLLELFDSEDPRERDFLKTTLHRIYGKFLGLRAYIRKQINNIFYRFIYETEHHNGIAELLEILGSIINGFALPLKEEHKIFLLKVLLPLHKVKSLSVYHPQLAYCVVQFLEKDSTLTEPVVMALLKYWPKTHSPKEVMFLNELEEILDVIEPSEFVKIMEPLFRQLAKCVSSPHFQDNTWLDIQRPEALHGDEPKAI

SEQ ID NO: 915265 - protein, 234 aa, Homo sapiens
LLLQYWSLYTVLHTRFFSGYMSFLSKLCGSHEETSNQGKGEGLRHKTYLYKISFKNSNLGHVKFFYIFSCLNLSSFFMLCSARKCGEMEQGGCGRSRWLGSTCLCLFPFSVFLCLMHLNTDDILLFFREKLKMKEREEAWVKIENLAKANPQYTVYSQASTMSIPVAMETDGPLFEDVQMLRKTVKDEAHQAQKDPKKDRPLARRKSELPQDPHTKKALEAHCRADELASQDGR

SEQ ID NO: 915266 - protein, 161 aa, Homo sapiens
MLTCNKAGSRMVVDAANSNGPFQPVVLLHIRDVPPADQEKLFIQKLRQCCVLFDFVSDPLSDLKWKEVKRAALSEMVEYITHNRNVITEPIYPEVVHMFAVNMFRTLPPSSNPTGAEFDPEEDEPTLEAAWPHLQPCLCIFLEIFRFSHDIPPHIAESQYS

SEQ ID NO: 915267 - protein, 150 aa, Homo sapiens
GAIIVIVVIYHHQYHYKGSAGRPEVPIIHIGKLRPREGSRLAQSCPWGKEAGLGLWPQFPHLRNRPHNSSDLLGEGQSGPWVGLRLDHWPPEVPWNSGPECLAILCLLCVTVPHECLQCPSVFPPSTTLFPICVFRVLACPPPSALCPIS

SEQ ID NO: 915268 - protein, 2051 aa, Homo sapiens
DARTMAASERRAFAHKINRTVAAEVRKQVSRERSGSPHSSRRCSSSLGVPLTEVVEPLDFEDVLLSRPPDAEPGPLRDLVEFPADDLELLLQPRECRTTEPGIPKDEKLDAQVRAAVEMYIEDWVIVHRRYQYLSAAYSPVTTDTQRERQKGLPRQVFEQDASGDERSGPEDSNDSRRGSGSPEDTPRSSGASSIFDLRNLAADSLLPSLLERAAPEDVDRRNETLRRQHRPPALLTLYPAPDEDEAVERCSRPEPPREHFGQRILVKCLSLKFEIEIEPIFGILALYDVREKKKISENFYFDLNSDSMKGLLRAHGTHPAISTLARSAIFSVTYPSPDIFLVIKLEKVLQQGDISECCEPYMVLKEVDTAKNKEKLEKLRLAAEQFCTRLGRYRMPFAWTAVHLANIVSSAGQLDRDSDSEGERRPAWTDRRRRGPQDRASSGDDACSFSGFRPATLTVTNFFKQEAERLSDEDLFKFLADMRRPSSLLRRLRPVTAQLKIDISPAPENPHFCLSPELLHIKPYPDPRGRPTKEILEFPAREVYAPHTSYRNLLYVYPHSLNFSSRQGSVRNLAVRVQYMTGEDPSQALPVIFGKSSCSEFTREAFTPVVYHNKSPEFYEEFKLHLPACVTENHHLLFTFYHVSCQPRPGTALETPVGFTWIPLLQHGRLRTGPFCLPVSVDQPPPSYSVLTPDVALPGMRWVDGHKGVFSVELTAVSSVHPQDPYLDKFFTLVHVLEEGAFPFRLKDTVLSEGNVEQELRASLAALRLASPEPLVAFSHHVLDKLVRLVIRPPIISGQIVNLGRGAFEAMAHVVSLVHRSLEAAQDARGHCPQLAAYVHYAFRLPGTEPSLPDGAPPVTVQAATLARGSGRPASLYLARSKSISSSNPDLAVAPGSVDDEVSRILASKLLHEELALQWVVSSSAVREAILQHAWFFFQLMVKSMALHLLLGQRLDTPRKLRFPGRFLDDITALVGSVGLEVITRVHKDVELAEHLNASLAFFLSDLLSLVDRGFVFSLVRAHYKQVATRLQSSPNPAALLTLRMEFTRILCSHEHYVTLNLPCCPLSPPASPSPSVSSTTSQSSTFSSQAPDPKVTSMFELSGPFRQQHFLAGLLLTELALALEPEAEGAFLLHKKAISAVHSLLCGHDTDPRYAEATVKARVAELYLPLLSIARDTLPRLHDFAEGPGQRSRLASMLDSDTEGEGDIAGTINPSVAMAIAGGPLAPGSRASISQGPPTASRAGCALSAESSRTLLACVLWVLKNTEPALLQRWATDLTLPQLGRLLDLLYLCLAAFEYKGKKAFERINSLTFKKSLDMKARLEEAILGTIGARQEMVRRSRERSPFGNPENVRWRKSVTHWKQTSDRVDKTKDEMEHEALVEGNLATEASLVVLDTLEIIVQTVMLSEARESVLGAVLKVVLYSLGSAQSALFLQHGLATQRALVSKFPELLFEEDTELCADLCLRLLRHCGSRISTIRTHASASLYLLMRQNFEIGHNFARVKMQVTMSLSSLVGTTQNFSEEHLRRSLKTILTYAEEDMGLRDSTFAEQVQDLMFNLHMILTDTVKMKEHQEDPEMLIDLMYRIARGYQGSPDLRLTWLQNMAGKHAELGNHAEAAQCMVHAAALVAEYLALLEDHRHLPVGCVSFQNISSNVLEESAISDDILSPDEEGFCSGKHFTELGLVGLLEQAAGYFTMGGLYEAVNEVYKNLIPILEAHRDYKKLAAVHGKLQEAFTKIMHQSSGWERVFGTYFRVGFYGAHFGDLDEQEFVYKEPSITKLAEISHRLEEFYTERFGDDVVEIIKDSNPVDKSKLDSQKAYIQITYVEPYFDTYELKDRVTYFDRNYGLRTFLFCTPFTPDGRAHGELPEQHKRKTLLSTDHAFPYIKTRIRVCHREETVLTPVEVAIEDMQKKTRELAFATEQDPPDAKMLQMVLQGSVGPTVNQGPLEVAQVFLAEIPEDPKLFRHHNKLRLCFKDFCKKCEDALRKNKALIGPDQKEYHRELERNYCRLREALQPLLTQRLPQLMAPTPPGLRNSLNRASFRKADL

SEQ ID NO: 915269 - protein, 2550 aa, Homo sapiens
MASDPTGGSILISCSVLDGERVGGTGELWALKASALLVLLALGLFISFHNLDFPHRKNLSAPLPEFSRPQWPPPYLSRTVAAEVRKQVSRERSGSPHSSRRCSSSLGVPLTEVVEPLDFEDVLLSRPPDAEPGPLRDLVEFPADDLELLLQPRECRTTEPGIPKDEKLDAQVRAAVEMYIEDWVIVHRRYQYLSAAYSPVTTDTQRERQKGLPRQVFEQDASGDERSGPEDSNDSRRGSGSPEDTPRSSGASSIFDLRNLAADSLLPSLLERAAPEDVDRRNETLRRQHRPPALLTLYPAPDEDEAVERCSRPEPPREHFGQRILVKCLSLKFEIEIEPIFGILALYDVREKKKISENFYFDLNSDSMKGLLRAHGTHPAISTLARSAIFSVTYPSPDIFLVIKLEKVLQQGDISECCEPYMVLKEVDTAKNKEKLEKLRLAAEQFCTRLGRYRMPFAWTAVHLANIVSSAGQLDRDSDSEGERRPAWTDRRRRGPQDRASSGDDACSFSGFRPATLTVTNFFKQEAERLSDEDLFKFLADMRRPSSLLRRLRPVTAQLKIDISPAPENPHFCLSPELLHIKPYPDPRGRPTKEILEFPAREVYAPHTSYRNLLYVYPHSLNFSSRQGSVRNLAVRVQYMTGEDPSQALPVSGCAPGKGGEGIPHGSLMNPLSQVIFGKSSCSEFTREAFTPVVYHNKYVGGHVRNLGALMGVGGCPLYIHIRQHRWEDGGQEEEEVEAPRVLMREAEADSRDSGAYAAIRAWHGRGDGADSGDPSPQQIPQPDSARSPEFYEEFKLHLPACVTENHHLLFTFYHVSCQPRPGTALETPVGFTVSLPSLPPPEPSSSPNLAADLTSSLSPVDPTAAARAPEDRPLLSPSVCGPAAAQLFRAHTRCMCPGAPACQCTVPRSTPESPAFLPVNPGRLVILYWCLQGPRVAHYSPINASLCPTCPPQRFPLPLCSIPTLATLTAFLITVPCPRSTLSFPMNAPLLMTLGLKSSYPVFLTYSMNIHSPCVSILCPRLGMWISSLPSGPSQSTGTRAGGRVLGCTPRPGYTHAAVSQWLGPLGDLISQGGLTSAHLVPPSHRWRFRACAGWTVTRACSVWSSQPCPLCTPRYGVGREPRVPPCSPLACPTIEYTVADGRGGLASGLGRDFGQLDPALREAADSGRGGASFPEAPPCSLHIPTQDPYLDKFFTLVHVLEEGAFPFRLKDTVLSEGNVEQELRASLAALRLASPEPLVAFSHHVLDKLVRLVIRPPIISGQIVNLGRGAFEAMAHVVSLVHRSLEAAQDARGHCPQLAAYVHYAFRLPGTEPSLPDGAPPVTVQAATLARGSGRPASLYLARSKSISSSNPDLAVAPGSVDDEVSRILASKGIDRSHSWVNSAYAPGGSKAVLRRAPPYCGADPRQLLHEELALQWVVSSSAVREAILQHAWFFFQLMVKSMALHLLLGQRLDTPRKLRFPGRFLDDITALVGSVGLEVITRVHKDVELAEHLNASLAFFLSDLLSLVDRGFVFSLVRAHYKQVATRLQSSPNPAALLTLRMEFTRILCSHEHYVTLNLPCCPLSPPASPSPSVSSTTSQSSTFSSQAPDPKVTSMFELSGPFRQQHFLAGLLLTELALALEPEAEGAFLLHKKAISAVHSLLCGHDTDPRYAEATVKARVAELYLPLLSIARDTLPRLHDFAEGPGQRSRLASMLDSDTEGEGDIAGTINPSVAMAIAGGPLAPGSRASISQGPPTASRAGCALSAESSRTLLACVLWVLKNTEPALLQRWATDLTLPQLGRLLDLLYLCLAAFEYKGKKAFERINSLTFKKSLDMKARLEEAILGTIGARQEMVRRSRERSPFGNPENVRWRKSVTHWKQTSDRVDKTKDEMEHEALVEGNLATEASLVVLDTLEIIVQTVMLSEARESVLGAVLKVVLYSLGSAQSALFLQHGLATQRALVSKFPELLFEEDTELCADLCLRLLRHCGSRISTIRTHASASLYLLMRQNFEIGHNFARVKMQVTMSLSSLVGTTQNFSEEHLRRSLKTILTYAEEDMGLRDSTFAEQVQDLMFNLHMILTDTVKMKEHQEDPEMLIDLMYRIARGYQGSPDLRLTWLQNMAGKHAELGNHAEAAQCMVHAAALVAEYLALLEDHRHLPVGCVSFQNISSNVLEESAISDDILSPDEEGFCSGKHFTELGLVGLLEQAAGYFTMGGLYEAVNEVYKNLIPILEAHRDYKKLAAVHGKLQEAFTKIMHQSSGWERVFGTYFRVGFYGAHFGDLDEQEFVYKEPSITKLAEISHRLEEFYTERFGDDVVEIIKDSNPVDKSKLDSQKAYIQITYVEPYFDTYELKDRVTYFDRNYGLRTFLFCTPFTPDGRAHGELPEQHKRKTLLSTDHAFPYIKTRIRVCHREETVLTPVEVAIEDMQKKTRELAFATEQDPPDAKMLQMVLQGSVGPTVNQGPLEVAQVFLAEIPEDPKLFRHHNKLRLCFKDFCKKCEDALRKNKALIGPDQKEYHRELERNYCRLREALQPLLTQRLPQLMAPTPPGLRNSLNRASFRKADL

SEQ ID NO: 915270 - protein, 1043 aa, Homo sapiens
GLGVSLVDFRISFSPFFSTSKPTFLSRDASASPCSSIFAISSCSALKSVRMPGLLPCCPLSPPASPSPSVSSTTSQSSTFSSQAPDPKVTSMFELSGPFRQQHFLAGLLLTELALALEPEAEGAFLLHKKAISAVHSLLCGHDTDPRYAEATVKARVAELYLPLLSIARDTLPRLHDFAEGPGQRSRLASMLDSDTEGEGDIAGTINPSVAMAIAGGPLAPGSRASISQGPPTASRAGCALSAESSRTLLACVLWVLKNTEPALLQRWATDLTLPQLGRLLDLLYLCLAAFEYKGKKAFERINSLTFKKSLDMKARLEEAILGTIGARQEMVRRSRERSPFGNPENVRWRKSVTHWKQTSDRVDKTKDEMEHEALVEGNLATEASLVVLDTLEIIVQTVMLSEARESVLGAVLKVVLYSLGSAQSALFLQHGLATQRALVSKFPELLFEEDTELCADLCLRLLRHCGSRISTIRTHASASLYLLMRQNFEIGHNFARVKMQVTMSLSSLVGTTQNFSEEHLRRSLKTILTYAEEDMGLRDSTFAEQVQDLMFNLHMILTDTVKMKEHQEDPEMLIDLMYRIARGYQGSPDLRLTWLQNMAGKHAELGNHAEAAQCMVHAAALVAEYLALLEDHRHLPVGCVSFQNISSNVLEESAISDDILSPDEEGFCSGKHFTELGLVGLLEQAAGYFTMGGLYEAVNEVYKNLIPILEAHRDYKKLAAVHGKLQEAFTKIMHQSSGWERVFGTYFRVGFYGAHFGDLDEQEFVYKEPSITKLAEISHRLEEFYTERFGDDVVEIIKDSNPVDKSKLDSQKAYIQITYVEPYFDTYELKDRVTYFDRNYGLRTFLFCTPFTPDGRAHGELPEQHKRKTLLSTDHAFPYIKTRIRVCHREETVLTPVEVAIEDMQKKTRELAFATEQDPPDAKMLQMVLQGSVGPTVNQGPLEVAQVFLAEIPEDPKLFRHHNKLRLCFKDFCKKCEDALRKNKALIGPDQKEYHRELERNYCRLREALQPLLTQRLPQLMAPTPPGLRNSLNRASFRKADL

SEQ ID NO: 915271 - protein, 2059 aa, Homo sapiens
DARTMAASERRAFAHKINRTVAAEVRKQVSRERSGSPHSSRRCSSSLGVPLTEVVEPLDFEDVLLSRPPDAEPGPLRDLVEFPADDLELLLQPRECRTTEPGIPKDEKLDAQVRAAVEMYIEDWVIVHRRYQYLSAAYSPVTTDTQRERQKGLPRQVFEQDASGDERSGPEDSNDSRRGSGSPEDTPRSSGASSIFDLRNLAADSLLPSLLERAAPEDVDRRNETLRRQHRPPALLTLYPAPDEDEAVERCSRPEPPREHFGQRILVKCLSLKFEIEIEPIFGILALYDVREKKKISENFYFDLNSDSMKGLLRAHGTHPAISTLARSAIFSVTYPSPDIFLVIKLEKVLQQGDISECCEPYMVLKEVDTAKNKEKLEKLRLAAEQFCTRLGRYRMPFAWTAVHLANIVSSAGQLDRDSDSEGERRPAWTDRRRRGPQDRASSGDDACSFSGFRPATLTVTNFFKQEAERLSDEDLFKFLADMRRPSSLLRRLRPVTAQLKIDISPAPENPHFCLSPELLHIKPYPDPRGRPTKEILEFPAREVYAPHTSYRNLLYVYPHSLNFSSRQGSVRNLAVRVQYMTGEDPSQALPVIFGKSSCSEFTREAFTPVVYHNKSPEFYEEFKLHLPACVTENHHLLFTFYHVSCQPRPGTALETPVGFTWIPLLQHGRLRTGPFCLPVSVDQPPPSYSVLTPDVALPGMRWVDGHKGVFSVELTAVSSVHPQDPYLDKFFTLVHVLEEGAFPFRLKDTVLSEGNVEQELRASLAALRLASPEPLVAFSHHVLDKLVRLVIRPPIISGQIVNLGRGAFEAMAHVVSLVHRSLEAAQDARGHCPQLAAYVHYAFRLPGTEPSLPDGAPPVTVQAATLARGSGRPASLYLARSKSISSSNPDLAVAPGSVDDEVSRILASKLLHEELALQWVVSSSAVREAILQHAWFFFQLMVKSMALHLLLGQRLDTPRKLRFPGRFLDDITALVGSVGLEVITRVHKDVELAEHLNASLAFFLSDLLSLVDRGFVFSLVRAHYKQVATRLQSSPNPAALLTLRMEFTRILCSHEHYVTLNLPCCPLSPPASPSPSVSSTTSQSSTFSSQAPDPKVTSMFELSGPFRQQHFLAGLLLTELALALEPEAEGAFLLHKKAISAVHSLLCGHDTDPRYAEATVKARVAELYLPLLSIARDTLPRLHDFAEGPGQRSRLASMLDSDTEGEGDIAGTINPSVAMAIAGGPLAPGSRASISQGPPTASRAGCALSAESSRTLLACVLWVLKNTEPALLQRWATDLTLPQLGRLLDLLYLCLAAFEYKGKKAFERINSLTFKKSLDMKARLEEAILGTIGARQEMVRRSRERSPFGNPENVRWRKSVTHWKQTSDRVDKTKDEMEHEALVEGNLATEASLVVLDTLEIIVQTVMLSEARESVLGAVLKVVLYSLGSAQSALFLQHGLATQRALVSKFPELLFEEDTELCADLCLRLLRHCGSRISTIRTHASASLYLLMRQNFEIGHNFARVKMQVTMSLSSLVGTTQNFSEEHLRRSLKTILTYAEEDMGLRDSTFAEQVQDLMFNLHMILTDTVKMKEHQEDPEMLIDLMYRIARGYQGSPDLRLTWLQNMAGKHAELGNHAEAAQCMVHAAALVAEYLALLEDHRHLPVGCVSFQNISSNVLEESAISDDILSPDEEGFCSGKHFTELGLVGLLEQAAGYFTMGGLYEAVNEVYKNLIPILEAHRDYKKLAAVHGKLQEAFTKIMHQSSGWERVFGTYFRVGFYGAHFGDLDEQEFVYKEPSITKLAEISHRLEEFYTERFGDDVVEIIKDSNPVDKSKLDSQKAYIQITYVEPYFDTYELKDRVTYFDRNYGLRTFLFCTPFTPDGRAHGELPEQHKRKTLLSTDHAFPYIKTRIRVCHREETVLTPVEVAIEDMQKKTRELAFATEQDPPDAKMLQMVLQGSVGPTVNQGPLEVAQVFLAEIPEDPKLFRHHNKLRLCFKDFCKKCEDALRKNKALIGPDQKEYHRELERNYCRLRDSTFAEQVQDLMFNLHMILTDTVKMKEHQDEPEMFIDLITALPR

SEQ ID NO: 915272 - protein, 351 aa, Homo sapiens
HVCPILPGSALSSGWERVFGTYFRVGFYGAHFGDLDEQEFVYKEPSITKLAEISHRLEARPCGWGWNGAWGCLGAGEGLSLGGPESALCLQEFYTERFGDDVVEIIKDSNPVDKSKLDSQKAYIQITYVEPYFDTYELKDRVTYFDRNYGLRTFLFCTPFTPDGRAHGELPEQHKRKTLLSTDHAFPYIKTRIRVCHREETVLTPVEVAIEDMQKKTRELAFATEQDPPDAKMLQMVLQGSVGPTVNQGPLEVAQVFLAEIPEDPKLFRHHNKLRLCFKDFCKKCEDALRKNKALIGPDQKEYHRELERNYCRLREALQPLLTQRLPQLMAPTPPGLRNSLNRASFRKADL

SEQ ID NO: 915273 - protein, 2546 aa, Homo sapiens
MASDPTGGSILISCSVLDGERVGGTGELWALKASALLVLLALGLFISFHNLDFPHRKNLSAPLPEFSRPQWPPPYLSRTVAAEVRKQVSRERSGSPHSSRRCSSSLGVPLTEVVEPLDFEDVLLSRPPDAEPGPLRDLVEFPADDLELLLQPRECRTTEPGIPKDEKLDAQVRAAVEMYIEDWVIVHRRYQYLSAAYSPVTTDTQRERQKGLPRQVFEQDASGDERSGPEDSNDSRRGSGSPEDTPRSSGASSIFDLRNLAADSLLPSLLERAAPEDVDRRNETLRRQHRPPALLTLYPAPDEDEAVERCSRPEPPREHFGQRILVKCLSLKFEIEIEPIFGILALYDVREKKKISENFYFDLNSDSMKGLLRAHGTHPAISTLARSAIFSVTYPSPDIFLVIKLEKVLQQGDISECCEPYMVLKEVDTAKNKEKLEKLRLAAEQFCTRLGRYRMPFAWTAVHLANIVSSAGQLDRDSDSEGERRPAWTDRRRRGPQDRASSGDDACSFSGFRPATLTVTNFFKQEAERLSDEDLFKFLADMRRPSSLLRRLRPVTAQLKIDISPAPENPHFCLSPELLHIKPYPDPRGRPTKEILEFPAREVYAPHTSYRNLLYVYPHSLNFSSRQGSVRNLAVRVQYMTGEDPSQALPVSGCAPGKGGEGIPHGSLMNPLSQVIFGKSSCSEFTREAFTPVVYHNKYVGGHVRNLGALMGVGGCPLYIHIRQHRWEDGGQEEEEVEAPRVLMREAEADSRDSGAYAAIRAWHGRGDGADSGDPSPQQIPQPDSARSPEFYEEFKLHLPACVTENHHLLFTFYHVSCQPRPGTALETPVGFTVSLPSLPPPEPSSSPNLAADLTSSLSPVDPTAAARAPEDRPLLSPSVCGPAAAQLFRAHTRCMCPGAPACQCTVPRSTPESPAFLPVNPGRLVILYWCLQGPRVAHYSPINASLCPTCPPQRFPLPLCSIPTLATLTAFLITVPCPRSTLSFPMNAPLLMTLGLKSSYPVFLTYSMNIHSPCVSILCPRLGMWISSLPSGPSQSTGTRAGGRVLGCTPRPGYTHAAVSQWLGPLGDLISQGGLTSAHLVPPSHRWRFRACAGWTVTRACSVWSSQPCPLCTPRYGVGREPRVPPCSPLACPTIEYTVADGRGGLASGLGRDFGQLDPALREAADSGRGGASFPEAPPCSLHIPTQDPYLDKFFTLVHVLEEGAFPFRLKDTVLSEGNVEQELRASLAALRLASPEPLVAFSHHVLDKLVRLVIRPPIISGQIVNLGRGAFEAMAHVVSLVHRSLEAAQDARGHCPQLAAYVHYAFRLPGTEPSLPDGAPPVTVQAATLARGSGRPASLYLARSKSISSSNPDLAVAPGSVDDEVSRILASKAIDCNSSRASSYLEGSSSAPPATQLRPTVQKLLHEELALQWVVSSSAVREAILQHAWFFFQLMVKSMALHLLLGQRLDTPRKLRFPGRFLDDITALVGSVGLEVITRVHKDVELAEHLNASLAFFLSDLLSLVDRGFVFSLVRAHYKQVATRLQSSPNPAALLTLRMEFTRILCSHEHYVTLNLPCCPLSPPASPSPSVSSTTSQSSTFSSQAPDPKVTSMFELSGPFRQQHFLAGLLLTELALALEPEAEGAFLLHKKAISAVHSLLCGHDTDPRYAEATVKARVAELYLPLLSIARDTLPRLHDFAEGPGQRSRLASMLDSDTEGEGDIAGTINPSVAMAIAGGPLAPGSRASISQGPPTASRAGCALSAESSRTLLACVLWVLKNTEPALLQRWATDLTLPQLGRLLDLLYLCLAAFEYKGKKAFERINSLTFKKSLDMKARLEEAILGTIGARQEMVRRSRERSPFGNPENVRWRKSVTHWKQTSDRVDKTKDEMEHEALVEGNLATEASLVVLDTLEIIVQTVMLSEARESVLGAVLKVVLYSLGSAQSALFLQHGLATQRALVSKFPELLFEEDTELCADLCLRLLRHCGSRISTIRTHASASLYLLMRQNFEIGHNFARVKMQVTMSLSSLVGTTQNFSEEHLRRSLKTILTYAEEDMGLRDSTFAEQVQDLMFNLHMILTDTVKMKEHQEDPEMLIDLMYRIARGYQGSPDLRLTWLQNMAGKHAELGNHAEAAQCMVHAAALVAEYLALLEDHRHLPVGCVSFQNISSNVLEESAISDDILSPDEEGFCSGKHFTELGLVGLLEQAAGYFTMGGLYEAVNEVYKNLIPILEAHRDYKKLAAVHGKLQEAFTKIMHQSSGWERVFGTYFRVGFYGAHFGDLDEQEFVYKEPSITKLAEISHRLEEFYTERFGDDVVEIIKDSNPVDKSKLDSQKAYIQITYVEPYFDTYELKDRVTYFDRNYGLRTFLFCTPFTPDGRAHGELPEQHKRKTLLSTDHAFPYIKTRIRVCHREETVLTPVEVAIEDMQKKTRELAFATEQDPPDAKMLQMVLQGSVGPTVNQGPLEVAQVFLAEIPEDPKLFRHHNKLRLCFKDFCKKCEDALRKNKALIGPDQKEYHRELERNYCRLREALQPLLTQRLPQLMAPTPPGLRNSLNRASFRKADL

SEQ ID NO: 915274 - protein, 1651 aa, Homo sapiens
MCPGAPACQCTVPRSTPESPAFLPVNPGRLVILYWCLQGPRVAHYSPINASLCPTCPPQRFPLPLCSIPTLATLTAFLITVPCPRSTLSFPMNAPLLMTLGLKSSYPVFLTYSMNIHSPCVSILCPRLGMWISSLPSGPSQSTGTRAGGRVLGCTPRPGYTHAAVSQWLGPLGDLISQGGLTSAHLVPPSHRWRFRACAGWTVTRACSVWSSQPCPLCTPRYGVGREPRVPPCSPLACPTIEYTVADGRGGLASGLGRDFGQLDPALREAADSGRGGLQFPEAPPCSLHIPTQDPYLDKFFTLVHVLEEGAFPFRLKDTVLSEGNVEQELRASLAALRLASPEPLVAFSHHVLDKLVRLVIRPPIISGQIVNLGRGAFEAMAHVVSLVHRSLEAAQDARGHCPQLAAYVHYAFRLPGTEPSLPDGAPPVTVQAATLARGSGRPASLYLARSKSISSSNPDLAVAPGSVDDEVSRILASKAIDCNSSRASSYLEGSSSAPPATQLRPTVQKLLHEELALQWVVSSSAVREAILQHAWFFFQLMVKSMALHLLLGQRLDTPRKLRFPGRFLDDITALVGSVGLEVITRVHKDVELAEHLNASLAFFLSDLLSLVDRGFVFSLVRAHYKQVATRLQSSPNPAALLTLRMEFTRILCSHEHYVTLNLPCCPLSPPASPSPSVSSTTSQSSTFSSQAPDPKVTSMFELSGPFRQQHFLAGLLLTELALALEPEAEGAFLLHKKAISAVHSLLCGHDTDPRYAEATVKARVAELYLPLLSIARDTLPRLHDFAEGPGQRSRLASMLDSDTEGEGDIAGTINPSVAMAIAGGPLAPGSRASISQGPPTASRAGCALSAESSRTLLACVLWVLKNTEPALLQRWATDLTLPQLGRLLDLLYLCLAAFEYKGKKAFERINSLTFKKSLDMKARLEEAILGTIGARQEMVRRSRERSPFGNPENVRWRKSVTHWKQTSDRVDKTKDEMEHEALVEGNLATEASLVVLDTLEIIVQTVMLSEARESVLGAVLKVVLYSLGSAQSALFLQHGLATQRALVSKFPELLFEEDTELCADLCLRLLRHCGSRISTIRTHASASLYLLMRQNFEIGHNFARVKMQVTMSLSSLVGTTQNFSEEHLRRSLKTILTYAEEDMGLRDSTFAEQVQDLMFNLHMILTDTVKMKEHQEDPEMLIDLMYRIARGYQGSPDLRLTWLQNMAGKHAELGNHAEAAQCMVHAAALVAEYLALLEDHRHLPVGCVSFQNISSNVLEESAISDDILSPDEEGFCSGKHFTELGLVGLLEQAAGYFTMGGLYEAVNEVYKNLIPILEAHRDYKKLAAVHGKLQEAFTKIMHQSSGWERVFGTYFRVGFYGAHFGDLDEQEFVYKEPSITKLAEISHRLEEFYTERFGDDVVEIIKDSNPVDKSKLDSQKAYIQITYVEPYFDTYELKDRVTYFDRNYGLRTFLFCTPFTPDGRAHGELPEQHKRKTLLSTDHAFPYIKTRIRVCHREETVLTPVEVAIEDMQKKTRELAFATEQDPPDAKMLQMVLQGSVGPTVNQGPLEVAQVFLAEIPEDPKLFRHHNKLRLCFKDFCKKCEDALRKNKALIGPDQKEYHRELERNYCRLREALQPLLTQRLPQLMAPTPPGLRNSLNRASFRKADL

SEQ ID NO: 915275 - protein, 952 aa, Homo sapiens
MFELSGPFRQQHFLAGLLLTELALALEPEAEGAFLLHKKAISAVHSLLCGHDTDPRYAEATVKARVAELYLPLLSIARDTLPRLHDFAEGPGQRSRLASMLDSDTEGEGDIAGTINPSVAMAIAGGPLAPGSRASISQGPPTASRAGCALSAESSRTLLACVLWVLKNTEPALLQRWATDLTLPQLGRLLDLLYLCLAAFEYKGKKAFERINSLTFKKSLDMKARLEEAILGTIGARQEMVRRSRERSPFGNPENVRWRKSVTHWKQTSDRVDKTKDEMEHEALVEGNLATEASLVVLDTLEIIVQTVMLSEARESVLGAVLKVVLYSLGSAQSALFLQHGLATQRALVSKFPELLFEEDTELCADLCLRLLRHCGSRISTIRTHASASLYLLMRQNFEIGHNFARVKMQVTMSLSSLVGTTQNFSEEHLRRSLKTILTYAEEDMGLRDSTFAEQVQDLMFNLHMILTDTVKMKEHQEDPEMLIDLMYRIARGYQGSPDLRLTWLQNMAGKHAELGNHAEAAQCMVHAAALVAEYLALLEDHRHLPVGCVSFQNISSNVLEESAISDDILSPDEEGFCSGKHFTELGLVGLLEQAAGYFTMGGLYEAVNEVYKNLIPILEAHRDYKKLAAVHGKLQEAFTKIMHQSSGWERVFGTYFRVGFYGAHFGDLDEQEFVYKEPSITKLAEISHRLEEFYTERFGDDVVEIIKDSNPVDKSKLDSQKAYIQITYVEPYFDTYELKDRVTYFDRNYGLRTFLFCTPFTPDGRAHGELPEQHKRKTLLSTDHAFPYIKTRIRVCHREETVLTPVEVAIEDMQKKTRELAFATEQDPPDAKMLQMVLQGSVGPTVNQGPLEVAQVFLAEIPEDPKLFRHHNKLRLCFKDFCKKCEDALRKNKALIGPDQKEYHRELERNYCRLREALQPLLTQRLPQLMAPTPPGLRNSLNRASFRKADL

SEQ ID NO: 915276 - protein, 119 aa, Homo sapiens
MAPPYLSRTVAAEVRKQVSRERSGSPHSSRRCSSSLGVPLTEVVEPLDFEDVLLSRPPDAEPGPLRDLVEFPADDLELLLQPRECRTTEPGIPKDEKLDAQVRAAVEMYIEDWVIVHRR

SEQ ID NO: 915277 - protein, 1227 aa, Homo sapiens
MGDTSEDASIHRLEGTDLDCQVGGLICKSKSAASEQHVFKAPAPRPSLLGLDLLASLKRREREEKDDGEDKKKSKVSSYKDWEESKDDQKDAEEEGGDQAGQNIRKDRHYRSARVETPSHPGGVSEEFWERSRQRERERREHGVYASSKEEKDWKKEKSRDRDYDRKRDRDERDRSRHSSRSERDGGSERSSRRNEPESPRHRPKDAATPSRSTWEEEDSGYGSSRRSQWESPSPTPSYRDSERSHRLSTRDRDRSVRGKYSDDTPLPTPSYKYNEWADDRRHLGSTPRLSRGRGRREEGEEGISFDTEEERQQWEDDQRQADRDWYMMDEGYDEFHNPLAYSSEDYVRRREQHLHKQKQKRISAQRRQINEDNERWETNRMLTSGVVHRLEVDEDFEEDNAAKVHLMVHNLVPPFLDGRIVFTKQPEPVIPVKDATSDLAIIARKGSQTVRKHREQKERKKAQHKHWELAGTKLGDIMGVKKEEEPDKAVTEDGKVDYRTEQKFADHMKRKSEASSEFAKKKSILEQRQYLPIFAVQQELLTIIRDNSIVIVVGETGSGKTTQLTQYLHEDGYTDYGMIGCTQPRRVAAMSVAKRVSEEMGGNLGEEVGYAIRFEDCTSENTLIKYMTDGILLRESLREADLDHYSAIIMDEAHERSLNTDVLFGLLREVVARRSDLKLIVTSATMDAEKFAAFFGNVPIFHIPGRTFPVDILFSKTPQEDYVEAAVKQSLQVHLSGAPGDILIFMPGQEDIEVTSDQIVEHLEELENAPALAVLPIYSQLPSDLQAKIFQKAPDGVRKCIVATNIAETSLTVDGIMFVIDSGYCKLKVFNPRIGMDALQIYPISQANANQRSGRAGRTGPGQCFRLYTQSAYKNELLTTTVPEIQRTNLANVVLLLKSLGVQDLLQFHFMDPPPEDNMLNSMYQLWILGALDNTGGLTSTGRLMVEFPLDPALSKMLIVSCDMGCSSEILLIVSMLSVPAIFYRPKGREEESDQIREKFAVPESDHLTYLNVYLQWKNNNYSTIWCNDHFIHAKAMRKVREVRAQLKDIMVQQRMSLASCGTDWDIVRKCICAAYFHQAAKLKGIGEYVNIRTGMPCHLHPTSSLFGMGYTPDYIVYHELVMTTKEYMQCVTAVDGEWLAELGPMFYSVKQAGKSRQENRRRAKEEASAMEEEMALAEEQLRARRQEQEKRSPLGSVRSTKIYTPGRKEQGEPMTPRRTPARFGL

SEQ ID NO: 915278 - protein, 1227 aa, Homo sapiens; identical to SEQ ID NO: 915277

SEQ ID NO: 915279 - protein, 1050 aa, Homo sapiens
MGDTSEDASIHRLEGTDLDCQVGGLICKSKSAASEQHVFKAPAPRPSLLGLDLLASLKRREREEKDDGEDKKKSKVSSYKDWEESKDDQKDAEEEGGDQAGQNIRKDRHYRSARVETPSHPGGVSEEFWERSRQRERERREHGVYASSKEEKDWKKEKSRDRDYDRKRDRDERDRSRHSSRSERDGGSERSSRRNEPESPRHRPKDAATPSRSTWEEEDSGYGSSRRSQWESPSPTPSYRDSERSHRLSTRDRDRSVRGKYSDDTPLPTPSYKYNEWADDRRHLGSTPRLSRGRGRREEGEEGISFDTEEERQQWEDDQRQADRDWYMMDEGYDEFHNPLAYSSEDYVRRREQHLHKQKQKRISAQRRQINEDNERWETNRMLTSGVVHRLEVDEDFEEDNAAKVHLMVHNLVPPFLDGRIVFTKQPEPVIPVKDATSDLAIIARKGSQTVRKHREQKERKKAQHKHWELAGTKLGDIMGVKKEEEPDKAVTEDGKVDYRTEQKFADHMKRKSEASSEFAKKKSILEQRQYLPIFAVQQELLTIIRDNSIVIVVGETGSGKTTQLTQYLHEDGYTDYGMIGCTQPRRVAAMSVAKRVSEEMGGNLGEEVGYAIRFEDCTSENTLIKYMTDGILLRESLREADLDHYSAIIMDEAHERSLNTDVLFGLLREVVARRSDLKLIVTSATMDAEKFAAFFGNVPIFHIPGRTFPVDILFSKTPQEDYVEAAVKQSLQVHLSGAPGDILIFMPGQEDIEVTSDQIVEHLEELENAPALAVLPIYSQLPSDLQAKIFQKAPDGVRKCIVATNIAETSLTVDGIMFVIDSGYCKLKVFNPRIGMDALQIYPISQANANQRSGRAGRTGPGQCFRLYTQSAYKNELLTTTVPEIQRTNLANVVLLLKSLGVQDLLQFHFMDPPPEDNMLNSMYQLWILGALDNTGGLTSTGRLMVEFPLDPALSKMLIVSCDMGCSSEILLIVSMLSVPAIFYRPKGREEESDQIREKFAVPESDHLTYLNVYLQWKNNNYSTIWCNDHFIHAKAMRKVEWWMSRMLG

SEQ ID NO: 915280 - protein, 1360 aa, Homo sapiens
MGDTSEDASIHRLEGTDLDCQVGGLICKSKSAASEQHVFKAPAPRPSLLGLDLLASLKRREREEKDDGEDKKKSKVSSYKDWEESKDDQKDAEEEGGDQAGQNIRKDRHYRSARVETPSHPGGVSEEFWERSRQRERERREHGVYASSKEEKDWKKEKSRDRDYDRKRDRDERDRSRHSSRSERDGGSERSSRRNEPESPRHRPKDAATPSRSTWEEEDSGYGSSRRSQWESPSPTPSYRDSERSHRLSTRDRDRSVRGKYSDDTPLPTPSYKYNEWADDRRHLGSTPRLSRGRGRREEGEEGISFDTEEERQQWEDDQRQADRDWYMMDEGYDEFHNPLAYSSEDYVRRREQHLHKQKQKRISAQRRQINEDNERWETNRMLTSGVVHRLEVDEDFEEDNAAKVHLMVHNLVPPFLDGRIVFTKQPEPVIPVKDATSDLAIIARKGSQTVRKHREQKERKKAQHKHWELAGTKLGDIMGVKKEEEPDKAVTEDGKVDYRTEQKFADHMKRKSEASSEFAKKKSILEQRQYLPIFAVQQELLTIIRDNSIVIVVGETGSGKTTQLTQYLHEDGYTDYGMIGCTQPRRVAAMSVAKRVSEEMGGNLGEEVGYAIRFEDCTSENTLIKYMTDGILLRESLREADLDHYSAIIMDEAHERSLNTDVLFGLLREVVARRSDLKLIVTSATMDAEKFAAFFGNVPIFHIPGRTFPVDILFSKVLRPPCYELTLPCQHFSDAKPAGGWRVGRGLGWRRFPGDHGANGAACSSGTRGQRTLLWVRFCFIISLRLKYRAQGGTVPSCRGLAVRPMWRCGGPQSPWLHSRAVPGPLGSQEMPGLRFQYLPLTVSPLLLQTPQEDYVEAAVKQSLQVHLSGAPGDILIFMPGQEDIEVTSDQIVEHLEELENAPALAVLPIYSQLPSDLQAKIFQKAPDGVRKCIVATNIAETSLTVDGIMFVIDSGYCKLKVFNPRIGMDALQIYPISQANANQRSGRAGRTGPGQCFRLYTQSAYKNELLTTTVPEIQRTNLANVVLLLKSLGVQDLLQFHFMDPPPEDNMLNSMYQLWILGALDNTGGLTSTGRLMVEFPLDPALSKMLIVSCDMGCSSEILLIVSMLSVPAIFYRPKGREEESDQIREKFAVPESDHLTYLNVYLQWKNNNYSTIWCNDHFIHAKAMRKVREVRAQLKDIMVQQRMSLASCGTDWDIVRKCICAAYFHQAAKLKGIGEYVNIRTGMPCHLHPTSSLFGMGYTPDYIVYHELVMTTKEYMQCVTAVDGEWLAELGPMFYSVKQAGKSRQENRRRAKEEASAMEEEMALAEEQLRARRQEQEKRSPLGSVRSTKIYTPGRKEQGEPMTPRRTPARFGL

SEQ ID NO: 915281 - protein, 977 aa, Homo sapiens
MGDTSEDASIHRLEGTDLDCQVGGLICKSKSAASEQHVFKAPAPRPSLLGLDLLASLKRREREEKDDGEDQADRDWYMMDEGYDEFHNPLAYSSEDYVRRREQHLHKQKQKRISAQRRQINEDNERWETNRMLTSGVVHRLEVDEDFEEDNAAKVHLMVHNLVPPFLDGRIVFTKQPEPVIPVKDATSDLAIIARKGSQTVRKHREQKERKKAQHKHWELAGTKLGDIMGVKKEEEPDKAVTEDGKVDYRTEQKFADHMKRKSEASSEFAKKKSILEQRQYLPIFAVQQELLTIIRDNSIVIVVGETGSGKTTQLTQYLHEDGYTDYGMIGCTQPRRVAAMSVAKRVSEEMGGNLGEEVGYAIRFEDCTSENTLIKYMTDGILLRESLREADLDHYSAIIMDEAHERSLNTDVLFGLLREVVARRSDLKLIVTSATMDAEKFAAFFGNVPIFHIPGRTFPVDILFSKTPQEDYVEAAVKQSLQVHLSGAPGDILIFMPGQEDIEVTSDQIVEHLEELENAPALAVLPIYSQLPSDLQAKIFQKAPDGVRKCIVATNIAETSLTVDGIMFVIDSGYCKLKVFNPRIGMDALQIYPISQANANQRSGRAGRTGPGQCFRLYTQSAYKNELLTTTVPEIQRTNLANVVLLLKSLGVQDLLQFHFMDPPPEDNMLNSMYQLWILGALDNTGGLTSTGRLMVEFPLDPALSKMLIVSCDMGCSSEILLIVSMLSVPAIFYRPKGREEESDQIREKFAVPESDHLTYLNVYLQWKNNNYSTIWCNDHFIHAKAMRKVREVRAQLKDIMVQQRMSLASCGTDWDIVRKCICAAYFHQAAKLKGIGEYVNIRTGMPCHLHPTSSLFGMGYTPDYIVYHELVMTTKEYMQCVTAVDGEWLAELGPMFYSVKQAGKSRQENRRRAKEEASAMEEEMALAEEQLRARRQEQEKRSPLGSVRSTKIYTPGRKEQGEPMTPRRTPARFGL

SEQ ID NO: 915282 - protein, 1189 aa, Homo sapiens
MGDTSEDASIHRLEGTDLDCQVGGLICKSKSAASEQHVFKAPAPRPSLLGLDLLASLKRREREEKDDGEDKKKSKVSSYKDWEESKDDQKDAEEEGGDQAGQNIRKDRHYRSARVETPSHPGGVSEEFWERSRQRERERREHGVYASSKEEKDWKKEKSRDRDYDRKRDRDERDRSRHSSRSERDGGSERSSRRNEPESPRHRPKDAATPSRSTWEEEDSGYGSSRRSQWESPSPTPSYRDSERSHRLSTRDRDRSVRGKYSDDTPLPTPSYKYNEWADDRRHLGSTPRLSRGRGRREEGEEGISFDTEEERQQWEDDQRQADRDWYMMDEGYDEFHNPLAYSSEDYVRRREQHLHKQKQKRISAQRRQINEDNERWETNRMLTSGVVHRLEVDEDFEEDNAAKVHLMVHNLVPPFLDGRIVFTKQPEPVIPVKDATSDLAIIARKGSQTVRKHREQKERKKAQHKHWELAGTKLGDIMGVKKEEEPDKAVTEDGKVDYRTEQKFADHMKRKSEASSEFAKKKSILEQRQYLPIFAVQQELLTIIRDNSIVIVVGETGSGKTTQLTQYLHEDGYTDYGMIGCTQPRRVAAMSVAKRVSEEMGGNLGEEVGYAIRFEDCTSENTLIKYMTDGILLRESLREADLDHYSAIIMDEAHERSLNTDVLFGLLREVVARRSDLKLIVTSATMDAEKFAAFFGNVPIFHIPGRTFPVDILFSKTPQEDYVEAAVKQSLQVHLSGAPGDILIFMPGQEDIEVTSDQIVEHLEELENAPALAVLPIYSQLPSDLQAKIFQKAPDGVRKCIVATNIAETSLTVDGIMFVIDSGYCKLKVFNPRIGMDALQIYPISQANANQRSGRAGRTGPGQCFRLYTQSAYKNELLTTTVPEIQRTNLANVVLLLKSLGVQDLLQFHFMDPPPEDNMLNSMYQLWILGALDNTGGLTSTGRLMVEFPLDPALSKMLIVSCDMGCSSEILLIVSMLSVPAIFYRPKGREEESDQIREKFAVPESDHLTYLNVYLQWKNNNYSTIWCNDHFIHAKAMRKVREVRAQLKDIMVQQRMSLASCGTDWDIVRKCICAAYFHQAAKLKGIGEYVNIRTGMPCHLHPTSSLFGMGYTPDYIVYHELVMTTKEYMQCVTAVDGEWLAELGPMFYSVKQAGKSRQENRRRAKEEASAMEEEMALAEEQLRAWREP

SEQ ID NO: 915283 - protein, 579 aa, Homo sapiens
MGLGDRSQGSPPWGPPSRLFSQVVARRSDLKLIVTSATMDAEKFAAFFGNVPIFHIPGRTFPVDILFSKTPQEDYVEAAVKQSLQVHLSGAPGDILIFMPGQEDIEVTSDQIVEHLEELENAPALAVLPIYSQLPSDLQAKIFQKAPDGVRKCIVATNIAETSLTVDGIMFVIDSGYCKLKVFNPRIGMDALQIYPISQANANQRSGRAGRTGPGQCFRLYTQSAYKNELLTTTVPEIQRTNLANVVLLLKSLGVQDLLQFHFMDPPPEDNMLNSMYQLWILGALDNTGGLTSTGRLMVEFPLDPALSKMLIVSCDMGCSSEILLIVSMLSVPAIFYRPKGREEESDQIREKFAVPESDHLTYLNVYLQWKNNNYSTIWCNDHFIHAKAMRKVREVRAQLKDIMVQQRMSLASCGTDWDIVRKCICAAYFHQAAKLKGIGEYVNIRTGMPCHLHPTSSLFGMGYTPDYIVYHELVMTTKEYMQCVTAVDGEWLAELGPMFYSVKQAGKSRQENRRRAKEEASAMEEEMALAEEQLRARRQEQEKRSPLGSVRSTKIYTPGRKEQGEPMTPRRTPARFGL

SEQ ID NO: 915284 - protein, 1222 aa, Homo sapiens
MGDTSEDASIHRLEGTDLDCQVGGLICKSKSAASEQHVFKAPAPRPSLLGLDLLASLKRREREEKDDGEDKKKSKVSSYKDWEESKDDQKDAEEEGGDQAGQNIRKDRHYRSARVETPSHPGGVSEEFWERSRQRERERREHGVYASSKEEKDWKKEKSRDRDYDRKRDRDERDRSRHSSRSERDGGSERSSRRNEPESPRHRPKDAATPSRSTWEEEDSGYGSSRRSQWESPSPTPSYRDSERSHRLSTRDRDRSVRGKYSDDTPLPTPSYKYNEWADDRRHLGSTPRLSRGRGRREEGEEGISFDTEEERQQWEDDQRQADRDWYMMDEGYDEFHNPLAYSSEDYVRRREQHLHKQKQKRISAQRRQINEDNERWETNRMLTSGVVHRLEVDEDFEEDNAAKVHLMVHNLVPPFLDGRIVFTKQPEPVIPVKDATSDLAIIARKGSQTVRKHREQKERKKAQHKHWELAGTKLGDIMGVKKEEEPDKAVTEDGKVDYRTEQKFADHMKRKSEASSEFAKKKSILEQRQYLPIFAVQQELLTIIRDNSIVIVVGETGSGKTTQLTQYLHEDGYTDYGMIGCTQPRRVAAMSVAKRVSEEMGGNLGEEVGYAIRFEDCTSENTLIKYMTDGILLRESLREADLDHYSAIIMDEAHERSLNTDVLFGLLREVVARRSDLKLIVTSATMDAEKFAAFFGNVPIFHIPGRTFPVDILFSKTPQEDYVEAAVKQSLQVHLSGAPGDILIFMPGQEDIEVTSDQIVEHLEELENAPALAVLPIYSQLPSDLQAKIFQKAPDGVRKCIVATNIAETSLTVDGIMFVIDSGYCKLKVFNPRIGMDALQIYPISQANANQRSGRAGRTGPGQCFRLYTQSAYKNELLTTTVPEIQRTNLANVVLLLKSLGVQDLLQFHFMDPPPEDNMLNSMYQLWILGALDNTGGLTSTGRLMVEFPLDPALSKMLIVSCDMGCSSEILLIVSMLSVPAIFYRPKGREEESDQIREKFAVPESDHLTYLNVYLQWKNNNYSTIWCNDHFIHAKAMRKVREVRAQLKDIMVQQRMSLASCGTDWDIVRKCICAAYFHQAAKLKGIGEYVNIRTGMPCHLHPTSSLFGMGYTPDYIVYHELVMTTKEYMQCVTAVDGEWLAELGPMFYSVKQAGKSRQVRILCSSQGCCLPVGSVFPPLGIEDLRSSNPLTSLCKHKGCDPAGWVCLIPHHPLQLFGRLSL

SEQ ID NO: 915285 - protein, 1050 aa, Homo sapiens; identical to SEQ ID NO: 915279

SEQ ID NO: 915286 - protein, 246 aa, Homo sapiens
MGDTSEDASIHRLEGTDLDCQVGGLICKSKSAASEQHVFKAPAPRPSLLGLDLLASLKRREREEKDDGEDKKKSKVSSYKDWEESKDDQKDAEEEGGDQAGQNIRKDRHYRSARVETPSHPGGVSEEFWERSRQRERERREHGVYASSKEEKDWKKENTIVFIIATLISLKTIPLRRICAYGHTSLAPGKQGGLGLLVSISKHMAKYGHTKLIQVNIGPFLPGVPNMVNPGICPYCTHTLPLSPTL

SEQ ID NO: 915287 - protein, 66 aa, Homo sapiens
MEQTDLFPFQAQHKHWELAGTKLGDIMGVKKEEEPDKAVTEDGKVDYRWAASASSTSALLQRWGPM

SEQ ID NO: 915288 - protein, 126 aa, Homo sapiens
MPCHLHPTSSLFGMGYTPDYIVYHELVMTTKEYMQCVTAVDGEWLAELGPMFYSVKQAGKSRQVRILCSSQGCCLPVGSVFPPLGIEDLRSSNPLTSLCKHKGCDPAGWVCLIPHHPLQLFGRLSL

SEQ ID NO: 915289 - protein, 1227 aa, Homo sapiens; identical to SEQ ID NO: 915277

SEQ ID NO: 915290 - protein, 1259 aa, Homo sapiens
MGDTSEDASIHRLEGTDLDCQVGGLICKSKSAASEQHVFKAPAPRPSLLGLDLLASLKRREREEKDDGEDKKKSKVSSYKDWEESKDDQKDAEEEGGDQAGQNIRKDRHYRSARVETPSHPGGVSEEFWERSRQRERERREHGVYASSKEEKDWKKEKSRDRDYDRKRDRDERDRSRHSSRSERDGGSERSSRRNEPESPRHRPKDAATPSRSTWEEEDSGYGSSRRSQWESPSPTPSYRDSERSHRLSTRDRDRSVRGKYSDDTPLPTPSYKYNEWADDRRHLGSTPRLSRGRGRREEGEEGISFDTEEERQQWEDDQRQADRDWYMMDEGYDEFHNPLAYSSEDYVRRREQHLHKQKQKRISAQRRQINEDNERWETNRMLTSGVVHRLEVDEDFEEDNAAKVHLMVHNLVPPFLDGRIVFTKQPEPVIPVKDATSDLAIIARKGSQTVRKHREQKERKKAQHKHWELAGTKLGDIMGVKKEEEPDKAVTEDGKVDYRTEQKFADHMKRKSEASSEFAKKKSILEQRQYLPIFAVQQELLTIIRDNSIVIVVGETGSGKTTQLTQYLHEDGYTDYGMIGCTQPRRVAAMSVAKRVSEEMGGNLGEEVGYAIRFEDCTSENTLIKYMTDGILLRESLREADLDHYSAIIMDEAHERSLNTDVLFGLLREVVARRSDLKLIVTSATMDAEKFAAFFGNVPIFHIPGRTFPVDILFSKTPQEDYVEAAVKQSLQVHLSGAPGDILIFMPGQEDIEVRALVTDCDERVCLAYERLGFQCLYSSSLGSQVTSDQIVEHLEELENAPALAVLPIYSQLPSDLQAKIFQKAPDGVRKCIVATNIAETSLTVDGIMFVIDSGYCKLKVFNPRIGMDALQIYPISQANANQRSGRAGRTGPGQCFRLYTQSAYKNELLTTTVPEIQRTNLANVVLLLKSLGVQDLLQFHFMDPPPEDNMLNSMYQLWILGALDNTGGLTSTGRLMVEFPLDPALSKMLIVSCDMGCSSEILLIVSMLSVPAIFYRPKGREEESDQIREKFAVPESDHLTYLNVYLQWKNNNYSTIWCNDHFIHAKAMRKVREVRAQLKDIMVQQRMSLASCGTDWDIVRKCICAAYFHQAAKLKGIGEYVNIRTGMPCHLHPTSSLFGMGYTPDYIVYHELVMTTKEYMQCVTAVDGEWLAELGPMFYSVKQAGKSRQENRRRAKEEASAMEEEMALAEEQLRARRQEQEKRSPLGSVRSTKIYTPGRKEQGEPMTPRRTPARFGL

SEQ ID NO: 915291 - protein, 541 aa, Homo sapiens
MDAEKFAAFFGNVPIFHIPGRTFPVDILFSKTPQEDYVEAAVKQSLQVHLSGAPGDILIFMPGQEDIEVTSDQIVEHLEELENAPALAVLPIYSQLPSDLQAKIFQKAPDGVRKCIVATNIAETSLTVDGIMFVIDSGYCKLKVFNPRIGMDALQIYPISQANANQRSGRAGRTGPGQCFRLYTQSAYKNELLTTTVPEIQRTNLANVVLLLKSLGVQDLLQFHFMDPPPEDNMLNSMYQLWILGALDNTGGLTSTGRLMVEFPLDPALSKMLIVSCDMGCSSEILLIVSMLSVPAIFYRPKGREEESDQIREKFAVPESDHLTYLNVYLQWKNNNYSTIWCNDHFIHAKAMRKVREVRAQLKDIMVQQRMSLASCGTDWDIVRKCICAAYFHQAAKLKGIGEYVNIRTGMPCHLHPTSSLFGMGYTPDYIVYHELVMTTKEYMQCVTAVDGEWLAELGPMFYSVKQAGKSRQENRRRAKEEASAMEEEMALAEEQLRARRQEQEKRSPLGSVRSTKIYTPGRKEQGEPMTPRRTPARFGL

SEQ ID NO: 915292 - protein, 843 aa, Homo sapiens
LGPQIEVRSPLYQVLRPDSCGAWCWESWRLEDWNVARCHQHSGGVYHLRGEACSPVGLIFHCSQSCGRMEQTDLFPFQAQHKHWELAGTKLGDIMGVKKEEEPDKAVTEDGKVDYRTEQKFADHMKRKSEASSEFAKKKSILEQRQYLPIFAVQQELLTIIRDNSIVIVVGETGSGKTTQLTQYLHEDGYTDYGMIGCTQPRRVAAMSVAKRVSEEMGGNLGEEVGYAIRFEDCTSENTLIKYMTDGILLRESLREADLDHYSAIIMDEAHERSLNTDVLFGLLREVVARRSDLKLIVTSATMDAEKFAAFFGNVPIFHIPGRTFPVDILFSKTPQEDYVEAAVKQSLQVHLSGAPGDILIFMPGQEDIEVTSDQIVEHLEELENAPALAVLPIYSQLPSDLQAKIFQKAPDGVRKCIVATNIAETSLTVDGIMFVIDSGYCKLKVFNPRIGMDALQIYPISQANANQRSGRAGRTGPGQCFRLYTQSAYKNELLTTTVPEIQRTNLANVVLLLKSLGVQDLLQFHFMDPPPEDNMLNSMYQLWILGALDNTGGLTSTGRLMVEFPLDPALSKMLIVSCDMGCSSEILLIVSMLSVPAIFYRPKGREEESDQIREKFAVPESDHLTYLNVYLQWKNNNYSTIWCNDHFIHAKAMRKVREVRAQLKDIMVQQRMSLASCGTDWDIVRKCICAAYFHQAAKLKGIGEYVNIRTGMPCHLHPTSSLFGMGYTPDYIVYHELVMTTKEYMQCVTAVDGEWLAELGPMFYSVKQAGKSRQENRRRAKEEASAMEEEMALAEEQLRARRQEQEKRSPLGSVRSTKIYTPGRKEQGEPMTPRRTPARFGL

SEQ ID NO: 915293 - protein, 1111 aa, Homo sapiens
MGDTSEDASIHRLEGTDLDCQVGGLICKSKSAASEQHVFKAPAPRPSLLGLDLLASLKRREREEKDDGEDKKKSKVSSYKDWEESKDDQKDAEEEGGDQAGQNIRKDRHYRSARVETPSHPGGVSEEFWERSRQRERERREHGVYASSKEEKDWKKEKSRDRDYDRKRDRDERDRSRHSSRSERDGGSERSSRRNEPESPRHRPKDAATPSRSTWEEEDSGYGSSRRSQWESPSPTPSYRDSERSHRLSTRDRDRSVRGKYSDDTPLPTPSYKYNEWADDRRHLGSTPRLSRGRGRREEGEEGISFDTEEERQQWEDDQRQADRDWYMMDEGYDEFHNPLAYSSEDYVRRREQHLHKQKQKRISAQRRQINEDNERWETNRMLTSGVVHRLEVDEDFEEDNAAKVHLMVHNLVPPFLDGRIVFTKQPEPVIPVKDATSDLAIIARKGSQTVRKHREQKERKKAQHKHWELAGTKLGDIMGVKKEEEPDKAVTEDGKVDYRTEQKFADHMKRKSEASSEFAKKKSILEQRQYLPIFAVQQELLTIIRDNSIVIVVGETGSGKTTQLTQYLHEDGYTDYGMIGCTQPRRVAAMSVAKRVSEEMGGNLGEEVGYAIRFEDCTSENTLIKYMTDGILLRESLREADLDHYSAIIMDEAHERSLNTDVLFGLLREVVARRSDLKLIVTSATMDAEKFAAFFGNVPIFHIPGRTFPVDILFSKTPQEDYVEAAVKQSLQVHLSGAPGDILIFMPGQEDIEVTSDQIVEHLEELENAPALAVLPIYSQLPSDLQAKIFQKAPDGVRKCIVATNIAETSLTVDGIMFVIDSGYCKLKVFNPRIGMDALQIYPISQANANQRSGRAGRTGPGQCFRLYTQSAYKNELLTTTVPEIQRTNLANVVLLLKSLGVQDLLQFHFMDPPPEDNMLNSMYQLWILGALDNTGGLTSTGRLMVEFPLDPALSKMLIVSCDMGCSSEILLIVSMLSVPAIFYRPKGREEESDQIREKFAVPESDHLTYLNVYLQWKNNNYSTIWCNDHFIHAKAMRKVREVRAQLKDIMVQQRMSLASCGTDWDIVRKCICAAYFHQAAKLKGIGEYVNIRTGMPCHLHPTSSLFGMG

SEQ ID NO: 915294 - protein, 614 aa, Homo sapiens
MGDTSEDASIHRLEGTDLDCQVGGLICKSKSAASEQHVFKAPAPRPSLLGLDLLASLKRREREEKDDGEDKKKSKVSSYKDWEESKDDQKDAEEEGGDQAGQNIRKDRHYRSARVETPSHPGGVSEEFWERSRQRERERREHGVYASSKEEKDWKKEKSRDRDYDRKRDRDERDRSRHSSRSERDGGSERSSRRNEPESPRHRPKDAATPSRSTWEEEDSGYGSSRRSQWESPSPTPSYRDSERSHRLSTRDRDRSVRGKYSDDTPLPTPSYKYNEWADDRRHLGSTPRLSRGRGRREEGEEGISFDTEEERQQWEDDQRQADRDWYMMDEGYDEFHNPLAYSSEDYVRRREQHLHKQKQKRISAQRRQINEDNERWETNRMLTSGVVHRLEVDEDFEEDNAAKVHLMVHNLVPPFLDGRIVFTKQPEPVIPVKDATSDLAIIARKGSQTVRKHREQKERKKAQHKHWELAGTKLGDIMGVKKEEEPDKAVTEDGKVDYRTEQKFADHMKRKSEASSEFAKKKSILEQRQYLPIFAVQQELLTIIRDNSIVIVVGETGSGKTTQLTQYLHEDGYTDYGMIGCTQPRRVAAMSVAKRVSEEMGGNLGEEVSGRGG

SEQ ID NO: 915295 - protein, 101 aa, Homo sapiens
MGDTSEDASIHRLEGTDLDCQVGGLICKSKSAASEQHVFKAPAPRPSLLGLDLLASLKRREREEKDDGEDSSFKKKTKQAKTSGFSKNCGFKSFVLIIKHY

SEQ ID NO: 915296 - protein, 400 aa, Homo sapiens
PEPARRRRRQGAASSHTESAAASRVGSNRSRARAGGGAMACAGLLTVCLLRPPAPQPQPQTPRHPQLAPDPGPAGHTLFQDVFRRADKNDDGKLSFEEFQNYFADGVLSLGELQELFSGIDGHLTDNLETEKLCDYFSEHLGVYRPVLAALESLNRAVLAAMDATKLEYERASKVDQFVTRFLLRETVSQLQALQSSLEGASDTLEAQAHGWRSDAESVEAQSRLCGSRRAGRRALRSVSRSSTWSPGSSDTGRSSEAEMQWRLQVNRLQELIDQLECKAPRLEPLREEDLAKGPDLHILMAQRQVQVAEEGLQDFHRALRCYVDFTGAQSHCLHVSAQKMLDGASFTLYEFWQDEASWRRHQQSPGSKAFQRILIDHLRAPDTLTTVFFPASWWIMNNN

SEQ ID NO: 915297 - protein, 485 aa, Homo sapiens
PEPARRRRRQGAASSHTESAAASRVGSNRSRARAGGGAMACAGLLTVCLLRPPAPQPQPQTPRHPQLAPDPGPAGHTLFQDVFRRADKNDDGKLSFEEFQNYFADGVLSLGELQELFSGIDGHLTDNLETEKLCDYFSEHLGVYRPVLAALESLNRAVLAAMDATKLEYERASKVDQFVTRFLLRETVSQLQALQSSLEGASDTLEAQAHGWRYVRVLSTCGASAQAPIVPPFQIPTVPASWSLHFRAGKPWQGSHGGVNETGFGAEASESQEACLPHPGLSRPGAPVLGPVSLTSSRSDAESVEAQSRLCGSRRAGRRALRSVSRSSTWSPGSSDTGRSSEAEMQWRLQVNRLQELIDQLECKAPRLEPLREEDLAKGPDLHILMAQRQVQVAEEGLQDFHRALRCYVDFTGAQSHCLHVSAQKMLDGASFTLYEFWQDEASWRRHQQSPGSKAFQRILIDHLRAPDTLTTVFFPASWWIMNNN

SEQ ID NO: 915298 - protein, 345 aa, Homo sapiens
TRWAKALGRRERDRGPERKQCGCGPEVFRRADKNDDGKLSFEEFQNYFADGVLSLGELQELFSGIDGHLTDNLETEKLCDYFSEHLGVYRPVLAALESLNRAVLAAMDATKLEYERASKVDQFVTRFLLRETVSQLQALQSSLEGASDTLEAQAHGWRSDAESVEAQSRLCGSRRAGRRALRSVSRSSTWSPGSSDTGRSSEAEMQWRLQVNRLQELIDQLECKAPRLEPLREEDLAKGPDLHILMAQRQVQVAEEGLQDFHRALRCYVDFTGAQSHCLHVSAQKMLDGASFTLYEFWQDEASWRRHQQSPGSKAFQRILIDHLRAPDTLTTVFFPASWWIMNNN

SEQ ID NO: 915299 - protein, 410 aa, Homo sapiens
PEPARRRRRQGAASSHTESAAASRVGSNRSRARAGGGAMACAGLLTVCLLRPPAPQPQPQTPRHPQLAPDPGPAGHTLFQDVFRRADKNDDGKLSFEEFQNYFADGVLSLGELQELFSGIDGHLTDNLETEKLCDYFSEHLGVYRPVLAALESLNRAVLAAMDATKLEYERASKVDQFVTRFLLRETVSQLQALQSSLEGASDTLEAQAHGWRPGPVSLTSSRSDAESVEAQSRLCGSRRAGRRALRSVSRSSTWSPGSSDTGRSSEAEMQWRLQVNRLQELIDQLECKAPRLEPLREEDLAKGPDLHILMAQRQVQVAEEGLQDFHRALRCYVDFTGAQSHCLHVSAQKMLDGASFTLYEFWQDEASWRRHQQSPGSKAFQRILIDHLRAPDTLTTVFFPASWWIMNNN

SEQ ID NO: 915300 - protein, 241 aa, Homo sapiens
LTVPPGPQEYERASKVDQFVTRFLLRETVSQLQALQSSLEGASDTLEAQAHGWRSDAESVEAQSRLCGSRRAGRRALRSVSRSSTWSPGSSDTGRSSEAEMQWRLQVNRLQELIDQLECKAPRLEPLREEDLAKGPDLHILMAQRQVQVAEEGLQDFHRALRCYVDFTGAQSHCLHVSAQKMLDGASFTLYEFWQDEASWRRHQQSPGSKAFQRILIDHLRAPDTLTTVFFPASWWIMNNN

SEQ ID NO: 915301 - protein, 336 aa, Homo sapiens
HVSRPLLAGLLGCFGPFVGTIVSHGRAGHHWGRWPTLRLLCPLGPGNIVTSRADLTKLQALSTAFQGPQEYERASKVDQFVTRFLLRETVSQLQALQSSLEGASDTLEAQAHGWRSDAESVEAQSRLCGSRRAGRRALRSVSRSSTWSPGSSDTGRSSEAEMQWRLQVNRLQELIDQLECKVRAVGPGPHKGGPSWYPPEPGPCWRPGPHSVPSQAPRLEPLREEDLAKGPDLHILMAQRQVQVAEEGLQDFHRALRCYVDFTGAQSHCLHVSAQKMLDGASFTLYEFWQDEASWRRHQQSPGSKAFQRILIDHLRAPDTLTTVFFPASWWIMNNN

SEQ ID NO: 915302 - protein, 230 aa, Homo sapiens
MNLALLLTCYVTLAQEYERASKVDQFVTRFLLRETVSQLQALQSSLEGASDTLEAQAHGWRSDAESVEAQSRLCGSRRAGRRALRSVSRSSTWSPGSSDTGRSSEAEMQWRLQVNRLQELIDQLECKHILMAQRQVQVAEEGLQDFHRALRCYVDFTGAQSHCLHVSAQKMLDGASFTLYEFWQDEASWRRHQQSPGSKAFQRILIDHLRAPDTLTTVFFPASWWIMNNN

SEQ ID NO: 915303 - protein, 88 aa, Homo sapiens
PEPARRRRRQGAASSHTESAAASRVGSNRSRARAGGGAMACAGLLTVCLLRPPAPQPQPQTPRHPQLRAPDTLTTVFFPASWWIMNNN

SEQ ID NO: 915304 - protein, 343 aa, Homo sapiens
PEPARRRRRQGAASSHTESAAASRVGSNRSRARAGGGAMACAGLLTVCLLRPPAPQPQPQTPRHPQLAPDPGPAGHTLFQDVFRRADKNDDGKLSFEEFQNYFADGVLSLGELQELFSGIDGHLTDNLETEKLCDYFSEHLGVYRPVLAALESLNRAVLAAMDATKLEYERASKVDQFVTRFLLRETVSQLQALQSSLEGASDTLEAQAHGWRSDAESVEAQSRLCGSRRAGRRALRSVSRSSTWSPGSSDTGRSSEAGRCAVAQEMCAVAAMGKWPRVRAREMHCGSGDERHDRDGKVAQSQGSGDARRDGDGKVAWSQGSGDVRCAGGGKVPSQMELRLPL

SEQ ID NO: 915305 - protein, 172 aa, Homo sapiens
PEPARRRRRQGAASSHTESAAASRVGSNRSRARAGGGAMACAGLLTVCLLRPPAPQPQPQTPRHPQLAPDPGPAGHTLFQDVFRRADKNDDGKLSFEEFQNYFADGVLSLGELQELFSGIDGHLTDNLETEKLCDYFSEHLGVYRPVLAALESLNRAVLAAMDATKLGEWSG

SEQ ID NO: 915306 - protein, 400 aa, Homo sapiens; identical to SEQ ID NO: 915296

SEQ ID NO: 915307 - protein, 434 aa, Homo sapiens
PEPARRRRRQGAASSHTESAAASRVGSNRSRARAGGGAMACAGLLTVCLLRPPAPQPQPQTPRHPQLAPDPGPAGHTLFQDVFRRADKNDDGKLSFEEFQNYFADGVLSLGELQELFSGIDGHLTDNLETEKLCDYFSEHLGVYRPVLAALESLNRAVLAAMDATKLEYERASKVDQFVTRFLLRETVSQLQALQSSLEGASDTLEAQAHGWRSDAESVEAQSRLCGSRRAGRRALRSVSRSSTWSPGSSDTGRSSEAEMQWRLQVNRLQELIDQLECKVRAVGPGPHKGGPSWYPPEPGPCWRPGPHSVPSQAPRLEPLREEDLAKGPDLHILMAQRQVQVAEEGLQDFHRALRCYVDFTGAQSHCLHVSAQKMLDGASFTLYEFWQDEASWRRHQQSPGSKAFQRILIDHLRAPDTLTTVFFPASWWIMNNN

SEQ ID NO: 915308 - protein, 400 aa, Homo sapiens; identical to SEQ ID NO: 915296

SEQ ID NO: 915309 - protein, 309 aa, Homo sapiens
MDIVDQALQNYFADGVLSLGELQELFSGIDGHLTDNLETEKLCDYFSEHLGVYRPVLAALESLNRAVLAAMDATKLEYERASKVDQFVTRFLLRETVSQLQALQSSLEGASDTLEAQAHGWRSDAESVEAQSRLCGSRRAGRRALRSVSRSSTWSPGSSDTGRSSEAEMQWRLQVNRLQELIDQLECKAPRLEPLREEDLAKGPDLHILMAQRQVQVAEEGLQDFHRALRCYVDFTGAQSHCLHVSAQKMLDGASFTLYEFWQDEASWRRHQQSPGSKAFQRILIDHLRAPDTLTTVFFPASWWIMNNN

SEQ ID NO: 915310 - protein, 382 aa, Homo sapiens
PEPARRRRRQGAASSHTESAAASRVGSNRSRARAGGGAMACAGLLTVCLLRPPAPQPQPQTPRHPQLAPDPGPAGHTLFQDVFRRADKNDDGKLSFEEFQNYFADGVLSLGELQELFSGIDGHLTDNLETEKLCDYFSEHLGVYRPVLAALESLNRAVLAAMDATKLEYERASKVDQFVTRFLLRETVSQLQALQSSLEGASDTLEAQAHGWRSDAESVEAQSRLCGSRRAGRRALRSVSRSSTWSPGSSDTGRSSEAEMQWRLQVNRLQELIDQLECKHILMAQRQVQVAEEGLQDFHRALRCYVDFTGAQSHCLHVSAQKMLDGASFTLYEFWQDEASWRRHQQSPGSKAFQRILIDHLRAPDTLTTVFFPASWWIMNNN

SEQ ID NO: 915311 - protein, 226 aa, Homo sapiens
MPPSWSDAESVEAQSRLCGSRRAGRRALRSVSRSSTWSPGSSDTGRSSEAEMQWRLQVNRLQELIDQLECKVRAVGPGPHKGGPSWYPPEPGPCWRPGPHSVPSQAPRLEPLREEDLAKGPDLHILMAQRQVQVAEEGLQDFHRALRCYVDFTGAQSHCLHVSAQKMLDGASFTLYEFWQDEASWRRHQQSPGSKAFQRILIDHLRAPDTLTTVFFPASWWIMNNN

SEQ ID NO: 915312 - protein, 400 aa, Homo sapiens; identical to SEQ ID NO: 915296

SEQ ID NO: 915313 - protein, 382 aa, Homo sapiens; identical to SEQ ID NO: 915310

SEQ ID NO: 915314 - protein, 258 aa, Homo sapiens
PEPARRRRRQGAASSHTESAAASRVGSNRSRARAGGGAMACAGLLTVCLLRPPAPQPQPQTPRHPQLAPDPGPAGHTLFQDVFRRADKNDDGKLSFEEFQNYFADGVLSLGELQELFSGIDGHLTERVREGAVDYFSEHLGVYRPVLAALESLNRAVLAAMDATKLEYERASKVDQFVTRFLLRETVSQLQALQSSLEGASDTLEAQAHGWRRIRERVGAYQLFENPSDEAEPLAFNRHHLSPGLCHGAVTATRGVRS

SEQ ID NO: 915315 - protein, 274 aa, Homo sapiens
MPKYCRAPNCSNTAGRLGADNRPVSFYKFPLKDGPRLQAWLQHMGCEHWVPSCHQHLCSEHFTPSCFQWRWGVRYLRPDAVPSIFSRGPPAKSQRRTRSTQKPVSPPPPLQKNTPLPQSPAIPVSGPVRLVVLGPTSGSPKTVATMLLTPLAPAPTPERSQPEVPAQQAQTGLGPVLGALQRRVRRLQRCQERHQAQLQALERLAQQLHGESLLARARRGLQRLTTAQTLGPEESQTFTIICGGPDIAMVLAQDPAPATVDAKPELLDTRIPSA

SEQ ID NO: 915316 - protein, 129 aa, Homo sapiens
MLLTPLAPAPTPERSQPEVPAQQAQTGLGPVLGALQRRVRRLQRCQERHQAQLQALERLAQQLHGESLLARARRGLQRLTTAQTLGPEESQTFTIICGGPDIAMVLAQDPAPATVDAKPELLDTRIPSA

SEQ ID NO: 915317 - protein, 223 aa, Homo sapiens
MPKYCRAPNCSNTAGRLGADNRPVSFYKFPLKDGPRLQAWLQHMGCEHWVPSCHQHLCSEHFTPSCFQWRWGVRYLRPDAVPSIFSRGPPAKSQRRTRSTQKPVSPPPPLQKNTPLPQSPAIPVSGPVRLVVLGPTSGSPKTVATMLLTPLAPAPTPERSQPEVRPSAGSTATPGAEAATVPGAAPGAAAGPGTAGTAATRGEPAGTGTPGSAAPDNSPDPWT

SEQ ID NO: 915318 - protein, 274 aa, Homo sapiens; identical to SEQ ID NO: 915315

SEQ ID NO: 915319 - protein, 545 aa, Homo sapiens [sequence omitted]

SEQ ID NO: 915320 - protein, 393 aa, Homo sapiens
MKQLENQEVARWVFFCQLCSWFTWYCCTRTLTNTMETVLTIIALFYYPLEGSKSMNSVKYSSLVALAFIIRPTAVILWTPLLFRHFCQEPRKLDLILHHFLPVGFVTLSLSLMIDRIFFGQWTLVQFNFLKFNVLQNWGTFYGSHPWHWYFSQGFPVILGTHLPFFIHGCYLAPKRYRILLVTVLWTLLVYSMLSHKEFRFIYPVLPFCMVFCGYSLTHLKTWKKPALSFLFLSNLFLALYTGLVHQRGTLDVMSHIQKVCYNNPNKSSASIFIMMPCHSTPYYSHVHCPLPMRFLQCPPDLTGKSHYLDEADVFYLNPLNWLHREFHDDASLPTHLITFSILEEEISAFLISSNYKRTAVFFHTHLPEGRIGSHIYVYERKLKGKFNMKMKF

SEQ ID NO: 915321 - protein, 344 aa, Homo sapiens
MEPGGGDASLTLHGLQNRSHGKIKLRKRKSTLYFNTQEKSARRRGDLLGENIYLLLFTIALRILNCFLVQTSFVPDEYWQSLEVSHHMVFNYGYLTWEWTERLRSYTYPLIFASIYKILHLLGKDSVQLLIWIPRLAQALLSAVADVRLYSLMKQLENQEVARWVFFCQLCSWFTWYCCTRTLTNTMETVLTIIALFYYPLEGSKSMNSVKYSSLVALAFIIRPTAVILWTPLLFRHFCQEPRKLDLILHHFLPVGFVTLSLSLMIDRIFFGQWTLVQFNFLKFNVLQNWGTFYGSHPWHWYFSQGFPVILGTHLPFFIHGCYLAPKRYRILLVTVLWTLLVYR

SEQ ID NO: 915322 - protein, 219 aa, Homo sapiens
  misc_feature (197)..(197): Xaa can be any naturally occurring amino acid
  misc_feature (215)..(215): Xaa can be any naturally occurring amino acid
MEPGGGDASLTLHGLQNRSHGKIKLRKRKSTLYFNTQEKSARRRGDLLGENIYLLLFTIALRILNCFLVQTSFVPDEYWQSLEVSHHMVFNYGYLTWEWTERLRSYTYPLIFASIYKILHLLGKDSVQLLIWIPRLAQALLSAVADVRLYSLMKQLENQEVARWVFFCQLCSWFTWYCCTRTLTNTNGKTGSSTNKXAPFSQLNPFGERVSKRSXMETK

SEQ ID NO: 915323 - protein, 509 aa, Homo sapiens
MEPGGGDASLTLHGLQNRSHGKIKLRKRKSTLYFNTQEKSARRRGDLLGENIYLLLFTIALRILNCFLVQTSFVPDEYWQSLEVSHHMVFNYGYLTWEWTERLRSYTYPLIFASIYKILHLLGKDSVQLLIWIPRLAQALLSAVADVRLYSLMKQLENQEVARWVFFCQLCSWFTWYCCTRTLTNTMETVLTIIALFYYPLEGSKSMNSVKYSSLVALAFIIRPTAVILWTPLLFRHFCQEPRKLDLILHHFLPVGFVTLSLSLMIDRIFFGQWTLVQFNFLKFNVLQNWGTFYGSHPWHWYFSQGFPVILGTHLPFFIHGCYLAPKRYRILLVTVLWTLLVYSMLSHKEFRFIYPVLPFCMVFCGYSLTHLKTWKKPALSFLFLSNLFLALYTGLVHQRGTLDVMSHIQKVCYNNPNKSSASIFIMMPCHSTPYYSHVHCPLPMRFLQCPPDLTGKSHYLDEADVFYLNPLNWLHREFHDDASLPTHLITFSILEEVSKHEKEENSVF

SEQ ID NO: 915324 - protein, 183 aa, Homo sapiens
MEPGGGDASLTLHGLQNRSHGKIKLRKRKSTLYFNTQEKSARRRGDLLGENIYLLLFTIALRILNCFLVQTSFVPDEYWQSLEVSHHMVFNYGYLTWEWTERLRSYTYPLIFASIYKILHLLGKDSVQLLIWIPRLAQALLSAVADVRLYSLMKQLENQEVARWVVSPKYFRSCMPVISFLWV

SEQ ID NO: 915325 - protein, 427 aa, Homo sapiens
MFLHPAEIQKLVLEGRVGEAIETTQRFYPGLLEHNPNLLFMLKCRQFVEMVNGTDSEVRSLSSRSPKSQDSYPGSPSLSPRHGPSSSHMHNTGADSPSCSNGVASTKSKQNHSKYPAPSSSSSSSSSSSSSSPSSVNYSESNSTDSTKSQHHSSTSNQETSNPWLQLERRPNQAAPTTPPGPTPTSTPPHSDSEMEMEAEHYPNGVLGSMSTRIVNGAYKHEDLQTDESSMDDRHPRRQLCGGNQAATERIILFGRELQALSEQLGREYGKNLAHTEMLQDAFSLLAYSDPWSCPVGQQLDPIQREPVCAALNSAILVLPGLLEHNPNLLFMLKCRQFVEMVNGTDSEVRSLSSRSPKSQDSYPGSPSLSPRHGPSSSHMHNTGADSPSCSNGVASTKSKQNHSKYPAPSSSSSSSAFSSLHWVFLH

SEQ ID NO: 915326 - protein, 300 aa, Homo sapiens
AKVDWDPAAGALRVNHYSRFDPSYMGIGLSAQGVNMNRLPGWDKHSYGYHGDDGHSFCSSGTGQPYGPTFTTGDVIGCCVNLINGTCFYTKNGHSLGIAFTDLPANLYPTVGLQTPGEIVDANFGQQPFLFDIEDYMREWRAKVQGTVHCFPISARLGEWQAVLQNMVSSYLVHHGYCATATAFARMTETPIQEEQASIKNRQKIQKTGCWEGRDGARPSEKQPRQLLTQGCWRKQHEHPSSMASKVEEGTEERMAEHGTEKRKTRKIRNSQEKRQKPQGTENREDTQHTKPEKEPRATK

SEQ ID NO: 915327 - protein, 557 aa, Homo sapiens
AKVDWDPAAGALRVNHYSRFDPSYMGIGLSAQGVNMNRLPGWDKHSYGYHGDDGHSFCSSGTGQPYGPTFTTGDVIGCCVNLINGTCFYTKNGHSLGIAFTDLPANLYPTVGLQTPGEIVDANFGQQPFLFDIEDYMREWRAKVQGTVHCFPISARLGEWQAVLQNMVSSYLVHHGYCATATAFARMTETPIQEEQASIKNRQKIQKLVLEGRVGEAIETTQRFYPGLLEHNPNLLFMLKCRQFVEMVNGTDSEVRSLSSRSPKSQDSYPGSPSLSPRHGPSSSHMHNTGADSPSCSNGVASTKSKQNHSKYPAPSSSSSSSSSSSSSSPSSVNYSESNSTDSTKSQHHSSTSNQETSNPWLQLERRPNQAAPTTPPGPTPTSTPPHSDSEMEMEAEHYPNGVLGSMSTRIVNGAYKHEDLQTDESSMDDRHPRRQLCGGNQAATERIILFGRELQALSEQLGREYGKNLAHTEMLQDAFSLLAYSDPWSCPVGQQLDPIQREPVCAALNSAILESQNLPKQPPLMLALGQASECLRLMARAGLGSCSFARVDDYLH

SEQ ID NO: 915328 - protein, 557 aa, Homo sapiens; identical to SEQ ID NO: 915327

SEQ ID NO: 915329 - protein, 51 aa, Homo sapiens
FDIEDYMREWRAKVQGTVHCFPISARLGEWQAVLQKLSALLLPLPTPTPPQ

SEQ ID NO: 915330 - protein, 620 aa, Homo sapiens
MAAATADPGAGNPQPGDSSGGGAGGGLPSPGEQELSRRLQRLYPAVNQQETPLPRSWSPKDKYNYIGLSQGNLRVHYKGHGKNHKDAASVRATHPIPAACGIYYFEVKIVSKGRDGYMGIGLSAQGVNMNRLPGWDKHSYGYHGDDGHSFCSSGTGQPYGPTFTTGDVIGCCVNLINGTCFYTKNGHSLGIAFTDLPANLYPTVGLQTPGEIVDANFGQQPFLFDIEDYMREWRAKVQGTVHCFPISARLGEWQAVLQNMVSSYLVHHGYCATATAFARMTETPIQEEQASIKNRQKIQKLVLEGRVGEAIETTQRFYPGLLEHNPNLLFMLKCRQFVEMVNGTDSEVRSLSSRSPKSQDSYPGSPSLSPRHGPSSSHMHNTGADSPSCSNGVASTKSKQNHSKYPAPSSSSSSSSSSSSSSPSSVNYSESNSTDSTKSQHHSSTSNQETSDSEMEMEAEHYPNGVLGSMSTRIVNGAYKHEDLQTDESSMDDRHPRRQLCGGNQAATERIILFGRELQALSEQLGREYGKNLAHTEMLQDAFSLLAYSDPWSCPVGQQLDPIQREPVCAALNSAILESQNLPKQPPLMLALGQASECLRLMARAGLGSCSFARVDDYLH

SEQ ID NO: 915331 - protein, 557 aa, Homo sapiens; identical to SEQ ID NO: 915327

SEQ ID NO: 915332 - protein, 557 aa, Homo sapiens; identical to SEQ ID NO: 915327

SEQ ID NO: 915333 - protein, 557 aa, Homo sapiens; identical to SEQ ID NO: 915327

SEQ ID NO: 915334 - protein, 194 aa, Homo sapiens
CDALRPRWRPAAQPPRLLAGETISSGGGRGGAGVRPHRKRKSKRRKWWAFWVTSYLLPAGAQAVVVYLPVVLPIGEDGPGDGAEGPAASAGLFAVFAGQGTIDQFEYDGCDNCDAYLQMKGNREMVYDCTSSSFDGIIAMMSPEDSWVSKWQRVSNFKPGVYAVSVTGRLPQGIVRELKSRGVAYKSRDTAIKT

SEQ ID NO: 915335 - protein, 194 aa, Homo sapiens; identical to SEQ ID NO: 915334

SEQ ID NO: 915336 - protein, 198 aa, Homo sapiens
CDALRPRWRPAAQPPRLLAGETISSGGGRGGAGVRPHRKRKSKRRKWWAFWVTSYLLPAGAQAVVVYLPVVLPIGEDGPGDGAEGPAASAGLFAVFAGQGTIDQFEYDGCDNCDAYLQMKGNREMVYDCTSSSFDGIIAMMSPEDSWVSKWQRVSNFKPGVYAVSVTGRLPQDLARCKAASIFALHLLPLLISCSGTK

SEQ ID NO: 915337 - protein, 194 aa, Homo sapiens; identical to SEQ ID NO: 915334

SEQ ID NO: 915338 - protein, 194 aa, Homo sapiens; identical to SEQ ID NO: 915334

SEQ ID NO: 915339 - protein, 136 aa, Homo sapiens
CDALRPRWRPAAQPPRLLAGETISSGGGRGGAGVRPHRKRKSKRRKWWAFWVTSYLLPAGAQAVVVYLPVVLPIGEDGPGDGAEGPAASAGLFAVFAGQGTIDQFEYDGCDNCDAYLQMKGNREMVYDCTSSSFDG

SEQ ID NO: 915340 - protein, 194 aa, Homo sapiens; identical to SEQ ID NO: 915334

SEQ ID NO: 915341 - protein, 194 aa, Homo sapiens; identical to SEQ ID NO: 915334

SEQ ID NO: 915342 - protein, 136 aa, Homo sapiens; identical to SEQ ID NO: 915339

SEQ ID NO: 915343 - protein, 194 aa, Homo sapiens; identical to SEQ ID NO: 915334

SEQ ID NO: 915344 - protein, 132 aa, Homo sapiens
MALETVPKDLRHLRACLLCSLVKGVSRGPGCRAHGGPSTIDQFEYDGCDNCDAYLQMKGNREMVYDCTSSSFDGIIAMMSPEDSWVSKWQRVSNFKPGVYAVSVTGRLPQGIVRELKSRGVAYKSRDTAIKT

SEQ ID NO: 915345 - protein, 198 aa, Homo sapiens; identical to SEQ ID NO: 915336

SEQ ID NO: 915346 - protein, 364 aa, Homo sapiens
MAAISTSIPVISQPQFTAMNEPQCFYNESIAFFYNRSGKHLATEWNTVSKLVMGLGITVCIFIMLANLLVMVAIYVNRRFHFPIYYLMANLAAADFFAGLAYFYLMFNTGPNTRRLTVSTWLLRQGLIDTSLTASVANLLAIAIERHITVFRMQLHTRMSNRRVVVVIVVIWTMAIVMGAIPSVGWNCICDIENCSNMAPLYSDSYLVFWAIFNLVTFVVMVVLYAHIFGYVRQRTMRMSRHSSGPRRNRDTMMSLLKTVVIVLGAFIICWTPGLVLLLLDVCCPQCDVLAYEKFFLLLAEFNSAMNPIIYSYRDKEMSATFRQILCCQRSENPTGPTEGSDRSASSLNHTILAGVHSNDHSVV

SEQ ID NO: 915347 - protein, 364 aa, Homo sapiens; identical to SEQ ID NO: 915346

SEQ ID NO: 915348 - protein, 364 aa, Homo sapiens; identical to SEQ ID NO: 915346

SEQ ID NO: 915349 - protein, 364 aa, Homo sapiens; identical to SEQ ID NO: 915346

SEQ ID NO: 915350 - protein, 364 aa, Homo sapiens; identical to SEQ ID NO: 915346

SEQ ID NO: 915351 - protein, 125 aa, Homo sapiens
LAPEASLYKRERTPCCYTLLIFHRYRAFIICWTPGLVLLLLDVCCPQCDVLAYEKFFLLLAEFNSAMNPIIYSYRDKEMSATFRQILCCQRSENPTGPTEGSDRSASSLNHTILAGVHSNDHSVV

SEQ ID NO: 915352 - protein, 364 aa, Homo sapiens; identical to SEQ ID NO: 915346

SEQ ID NO: 915353 - protein, 364 aa, Homo sapiens; identical to SEQ ID NO: 915346

SEQ ID NO: 915354 - protein, 364 aa, Homo sapiens; identical to SEQ ID NO: 915346

SEQ ID NO: 915355 - protein, 346 aa, Homo sapiens
MNEPQCFYNESIAFFYNRSGKHLATEWNTVSKLVMGLGITVCIFIMLANLLVMVAIYVNRRFHFPIYYLMANLAAADFFAGLAYFYLMFNTGPNTRRLTVSTWLLRQGLIDTSLTASVANLLAIAIERHITVFRMQLHTRMSNRRVVVVIVVIWTMAIVMGAIPSVGWNCICDIENCSNMAPLYSDSYLVFWAIFNLVTFVVMVVLYAHIFGYVRQRTMRMSRHSSGPRRNRDTMMSLLKTVVIVLGAFIICWTPGLVLLLLDVCCPQCDVLAYEKFFLLLAEFNSAMNPIIYSYRDKEMSATFRQILCCQRSENPTGPTEGSDRSASSLNHTILAGVHSNDHSVV

SEQ ID NO: 915356 - protein, 364 aa, Homo sapiens; identical to SEQ ID NO: 915346

SEQ ID NO: 915357 - protein, 793 aa, Homo sapiens
MPAGPVQAVPPPPPVPTEPKQPTEEEASSKEDSAPSKPVVGIIYPPPEVRNIVDKTASFVARNGPEFEARIRQNEINNPKFNFLNPNDPYHAYYRHKVSEFKEGKAQEPSAAIPKVMQQQQQTTQQQLPQKVQAQVIQETIVPKEPPPEFEFIADPPSISAFDLDVVKLTAQFVARNGRQFLTQLMQKEQRNYQFDFLRPQHSLFNYFTKLVEQYTKILIPPKGLFSKLKKEAENPREVLDQVCYRVEWAKFQERERKKEEEEKEKERVAYAQIDWHDFVVVETVDFQPNEQGNFPPPTTPEELGARILIQERYEKFGESEEVEMEVESDEEDDKQEKAEEPPSQLDQDTQVQDMDEGSDDEEEGQKVPPPPETPMPPPLPPTPDQVIVRKDYDPKASKPLPPAPAPDEYLVSPITGEKIPASKMQEHMRIGLLDPRWLEQRDRSIREKQSDDEVYAPGLDIESSLKQLAERRTDIFGVEETAIGKKIGEEEIQKPEEKVTWDGHSGSMARTQQAAQANITLQEQIEAIHKAKGLVPEDDTKEKIGPSKPNEIPQQPPPPSSATNIPSSAPPITSVPRPPTMPPPVRTTVVSAVPVMPRPPMASVVRLPPGSVIAPMPPIIHAPRINVVPMPPSAPPIMAPRPPPMIVPTAFVPAPPVAPVPAPAPMPPVHPPPPMEDEPTSKKLKTEDSLMPEEEFLRRNKGPVSIKVQVPNMQDKTEWKLNGQVLVFTLPLTDQVSVIKVKIHEATGMPAGKQKLQYEGIFIKDSNSLAYYNMANGAVIHLALKERGGRKK

SEQ ID NO: 915358 - protein, 793 aa, Homo sapiens; identical to SEQ ID NO: 915357

SEQ ID NO: 915359 - protein, 793 aa, Homo sapiens; identical to SEQ ID NO: 915357

SEQ ID NO: 915360 - protein, 728 aa, Homo sapiens
MPAGPVQAVPPPPPVPTEPKQPTEEEASSKEDSAPSKPVVGIIYPPPEVRNIVDKTASFVARNGPEFEARIRQNEINNPKFNFLNPNDPYHAYYRHKVSEFKEGKAQFVARNGRQFLTQLMQKEQRNYQFDFLRPQHSLFNYFTKLVEQYTKILIPPKGLFSKLKKEAENPREVLDQVCYRVEWAKFQERERKKEEEEKEKERVAYAQIDWHDFVVVETVDFQPNEQGNFPPPTTPEELGARILIQERYEKFGESEEVEMEVESDEEDDKQEKAEEPPSQLDQDTQVQDMDEGSDDEEEGQKVPPPPETPMPPPLPPTPDQVIVRKDYDPKASKPLPPAPAPDEYLVSPITGEKIPASKMQEHMRIGLLDPRWLEQRDRSIREKQSDDEVYAPGLDIESSLKQLAERRTDIFGVEETAIGKKIGEEEIQKPEEKVTWDGHSGSMARTQQAAQANITLQEQIEAIHKAKGLVPEDDTKEKIGPSKPNEIPQQPPPPSSATNIPSSAPPITSVPRPPTMPPPVRTTVVSAVPVMPRPPMASVVRLPPGSVIAPMPPIIHAPRINVVPMPPSAPPIMAPRPPPMIVPTAFVPAPPVAPVPAPAPMPPVHPPPPMEDEPTSKKLKTEDSLMPEEEFLRRNKGPVSIKVQVPNMQDKTEWKLNGQVLVFTLPLTDQVSVIKVKIHEATGMPAGKQKLQYEGIFIKDSNSLAYYNMANGAVIHLALKERGGRKK

SEQ ID NO: 915361 - protein, 578 aa, Homo sapiens
MKALEVVASSGADPGFSVAPSCFPSLQVCYRVEWAKFQERERKKEEEEKEKERVAYAQIDWHDFVVVETVDFQPNEQGNFPPPTTPEELGARILIQERYEKFGESEEVEMEVESDEEDDKQEKAEEPPSQLDQDTQVQDMDEGSDDEEEGQKVPPPPETPMPPPLPPTPDQVIVRKDYDPKASKPLPPAPAPDEYLVSPITGEKIPASKMQEHMRIGLLDPRWLEQRDRSIREKQSDDEVYAPGLDIESSLKQLAERRTDIFGVEETAIGKKIGEEEIQKPEEKVTWDGHSGSMARTQQAAQANITLQEQIEAIHKAKGLVPEDDTKEKIGPSKPNEIPQQPPPPSSATNIPSSAPPITSVPRPPTMPPPVRTTVVSAVPVMPRPPMASVVRLPPGSVIAPMPPIIHAPRINVVPMPPSAPPIMAPRPPPMIVPTAFVPAPPVAPVPAPAPMPPVHPPPPMEDEPTSKKLKTEDSLMPEEEFLRRNKGPVSIKVQVPNMQDKTEWKLNGQVLVFTLPLTDQVSVIKVKIHEATGMPAGKQKLQYEGIFIKDSNSLAYYNMANGAVIHLALKERGGRKK

SEQ ID NO: 915362 - protein, 369 aa, Homo sapiens
MQEHMRIGLLDPRWLEQRDRSIREKQSDDEVYAPGLDIESSLKQLAERRTDIFGVEETAIGKKIGEEEIQKPEEKVTWDGHSGSMARTQQAAQANITLQEQIEAIHKAKGLVPEDDTKEKIGPSKPNEIPQQPPPPSSATNIPSSAPPITSVPRPPTMPPPVRTTVVSAVPVMPRPPMASVVRLPPGSVIAPMPPIIHAPRINVVPMPPSAPPIMAPRPPPMIVPTAFVPAPPVAPVPAPAPMPPVHPPPPMEDEPTSKKLKTEDSLMPEEEFLRRNKGPVSIKVQVPNMQDKTEWKLNGQVLVFTLPLTDQVSVIKVKIHEATGMPAGKQKLQYEGIFIKDSNSLAYYNMANGAVIHLALKERGGRKK

SEQ ID NO: 915363 - protein, 133 aa, Homo sapiens
MPAGPVQAVPPPPPVPTEPKQPTEEEASSKEDSAPSKPVVGIIYPPPEVRNIVDKTASFVARNGPEFEARIRQNEINNPKFNFLNPNDPYHAYYRHKVSEFKEGKALWARWSLGLLGLGPSGAAAAGCLLLLL

SEQ ID NO: 915364 - protein, 793 aa, Homo sapiens; identical to SEQ ID NO: 915357

SEQ ID NO: 915365 - protein, 793 aa, Homo sapiens; identical to SEQ ID NO: 915357

SEQ ID NO: 915366 - protein, 793 aa, Homo sapiens; identical to SEQ ID NO: 915357

SEQ ID NO: 915367 - protein, 793 aa, Homo sapiens; identical to SEQ ID NO: 915357

SEQ ID NO: 915368 - protein, 739 aa, Homo sapiens
  misc_feature (709)..(709): Xaa can be any naturally occurring amino acid
  misc_feature (719)..(719): Xaa can be any naturally occurring amino acid
  misc_feature (721)..(721): Xaa can be any naturally occurring amino acid
  misc_feature (732)..(732): Xaa can be any naturally occurring amino acid
MPAGPVQAVPPPPPVPTEPKQPTEEEASSKEDSAPSKPVVGIIYPPPEVRNIVDKTASFVARNGPEFEARIRQNEINNPKFNFLNPNDPYHAYYRHKVSEFKEGKAQEPSAAIPKVMQQQQQTTQQQLPQKVQAQVIQETIVPKEPPPEFEFIADPPSISAFDLDVVKLTAQFVARNGRQFLTQLMQKEQRNYQFDFLRPQHSLFNYFTKLVEQYTKILIPPKGLFSKLKKEAENPREVLDQVCYRVEWAKFQERERKKEEEEKEKERVAYAQIDWHDFVVVETVDFQPNEQGNFPPPTTPEELGARILIQERYEKFGESEEVEMEVESDEEDDKQEKAEEPPSQLDQDTQVQDMDEGSDDEEEGQKVPPPPETPMPPPLPPTPDQVIVRKDYDPKASKPLPPAPAPDEYLVSPITGEKIPASKMQEHMRIGLLDPRWLEQRDRSIREKQSDDEVYAPGLDIESSLKQLAERRTDIFGVEETAIGKKIGEEEIQKPEEKVTWDGHSGSMARTQQAAQANITLQEQIEAIHKAKGLVPEDDTKEKIGPSKPNEIPQQPPPPSSATNIPSSAPPITSVPRPPTMPPPVRTTVVSAVPVMPRPPMASVVRLPPGSVIAPMPPIIHAPRINVVPMPPSAPPIMAPRPPPMIVPTAFVPAPPVAPVPAPAPMPPVHPPPPMEDEPTSKKLKTEDSLMPEEEFLRRNKGPVSIKXLGALSGGKVXQXLHAPWPCSERXLAFALIN

SEQ ID NO: 915369 - protein, 260 aa, Homo sapiens
MPAGPVQAVPPPPPVPTEPKQPTEEEASSKEDSAPSKPVVGIIYPPPEVRNIVDKTASFVARNGPEFEARIRQNEINNPKFNFLNPNDPYHAYYRHKVSEFKEGKAQEPSAAIPKVMQQQQQTTQQQLPQKVQAQVIQETIVPKEPPPEFEFIADPPSISAFDLDVVKLTAQFVARNGRQFLTQLMQKEQRNYQFDFLRPQHSLFNYFTKLVEQYTKILIPPKGLFSKLKKEAENPREVLDQPKKFLGSRCGLPQLGIGA

SEQ ID NO: 915370 - protein, 103 aa, Homo sapiens
MPAGPVQAVPPPPPVPTEPKQPTEEEASSKEDSAPSKPVVGIIYPPPEVRNIVDKTASFVARNGPEFEARIRQNEINNPKFNFLNPNDPYHAYYLGYYYLGDN

SEQ ID NO: 915371 - protein, 123 aa, Homo sapiens
MVLQVSAAPRTVALTALLMVLLTSVVQGRATPENYLFQGRQECYAFNGTQRFLERYIYNREEFVRFDSDVGEFRAVTELGRPDEEYWNSQKDILEEKRAVPDRMCRHNYELGEAHDPAAPSPA

SEQ ID NO: 915372 - protein, 175 aa, Homo sapiens
MRSTGTARRTSWRRSGQCRTGCADTTTSWARPMTLQRRVQPRVNVSPSKKGPLQHHNLLVCHVTDFYPGSIQVRWFLNGQEETAGVVSTNLIRNGDWTFQILVMLEMTPQQGDVYTCQVEHTSLDSPVTVEWKAQSDSARSKTLTGAGGFVLGLIICGVGIFMHRRSKKVQRGSA

SEQ ID NO: 915373 - protein, 175 aa, Homo sapiens; identical to SEQ ID NO: 915372

SEQ ID NO: 915374 - protein, 160 aa, Homo sapiens
MGHSASWRDTTTSWARPMTLQRRVQPRVNVSPSKKGPLQHHNLLVCHVTDFYPGSIQVRWFLNGQEETAGVVSTNLIRNGDWTFQILVMLEMTPQQGDVYTCQVEHTSLDSPVTVEWKAQSDSARSKTLTGAGGFVLGLIICGVGIFMHRRSKKVQRGSA

SEQ ID NO: 915375 - protein, 123 aa, Homo sapiens; identical to SEQ ID NO: 915371

SEQ ID NO: 915376 - protein, 123 aa, Homo sapiens; identical to SEQ ID NO: 915371

SEQ ID NO: 915377 - protein, 123 aa, Homo sapiens; identical to SEQ ID NO: 915371

SEQ ID NO: 915378 - protein, 126 aa, Homo sapiens
MVLQVSAAPRTVALTALLMVLLTSVVQGRATPENYPMATSGGLSLTQTHSPATSSPIDAHFEALSLSKFTFSFLVLHFPNIFSIPGPIRDAVAPWGKGTNPWQQLHSIPLFNVTFSTGGISFLCWS

SEQ ID NO: 915379 - protein, 123 aa, Homo sapiens; identical to SEQ ID NO: 915371

SEQ ID NO: 915380 - protein, 123 aa, Homo sapiens; identical to SEQ ID NO: 915371

SEQ ID NO: 915381 - protein, 145 aa, Homo sapiens
MVLQVSAAPRTVALTALLMVLLTSVVQGRATPENYLFQGRQECYAFNGTQRFLERYIYNREEFVRFDSDVGEFRAVTELGRPDEEYWNSQKDILEEKRAVPDRMCRHNYELGEAHDPAAPRQHSSPMVPEWTGGNSWGRVHQPDP

SEQ ID NO: 915382 - protein, 123 aa, Homo sapiens; identical to SEQ ID NO: 915371

SEQ ID NO: 915383 - protein, 71 aa, Homo sapiens
ARYPNVLLRAESDCAFHSTVTGLIQAGVLHLAGVDISLLEGASSSITRSKKGQGEICINRVPELTEKTIVP

SEQ ID NO: 915384 - protein, 137 aa, Homo sapiens
MSQKKGRKEGRKEGRKEGRKEGQSQILFHYFSSTLLVQPRVNVSPSKKGPLQHHNLLVCHVTDFYPGSIQVRWFLNGQEETAGVVSTNLIRNGDWTFQILVMLEMTPQQGDVYTCQVEHTSLDSPVTVEWSESLMTL

SEQ ID NO: 915385 - protein, 120 aa, Homo sapiens
IPRFAEKAPLALLSQSIIQRCCSCKSINRKSIHNLAGQRSSSAVSRLPSLGSGAAPLPPWLARNVVIRPGAGMTSCSRSSAAGAEAAAGRWGAGRRELTEHSAGAAGLRPVAACAGTCAD

SEQ ID NO: 915386 - protein, 120 aa, Homo sapiens; identical to SEQ ID NO: 915385

SEQ ID NO: 915387 - protein, 120 aa, Homo sapiens; identical to SEQ ID NO: 915385

SEQ ID NO: 915388 - protein, 120 aa, Homo sapiens; identical to SEQ ID NO: 915385

SEQ ID NO: 915389 - protein, 120 aa, Homo sapiens; identical to SEQ ID NO: 915385

SEQ ID NO: 915390 - protein, 103 aa, Homo sapiens
QLLESIDVEHFSLFNVGDSLLCGYLVAMTDVETTYADFIASGRTGRRNAIHDILVSSASGNSNELALKLAGLDINKTEGEEDAQRSSTEQSGEAQGEAAKSES

SEQ ID NO: 915391 - protein, 120 aa, Homo sapiens; identical to SEQ ID NO: 915385

SEQ ID NO: 915392 - protein, 347 aa, Homo sapiens
MPARALLPRRMGHRTLASTPALWASIPCPRSELRLDLVLPSGQSFRWREQSPAHWSGVLADQVWTLTQTEEQLHCTVYRGDKSQASRPTPDELEAVRKYFQLDVTLAQLYHHWGSVDSHFQEVAQKFQGVRLLRQDPIECLFSFICSSNNNIARITGMVERLCQAFGPRLIQLDDVTYHGFPSLQALAGPEVEAHLRKLGLGYRARYVSASARAILEEQGGLAWLQQLRESSYEEAHKALCILPGVGTKVADCICLMALDKPQAVPVDVHMWHIAQRDYSWHPTTSQAKGPSPQTNKELGNFFRSLWGPYAGWAQALQVLFSADLRQSRHAQEPPAKRRKGSKGPEG

SEQ ID NO: 915393 - protein, 424 aa, Homo sapiens
MPARALLPRRMGHRTLASTPALWASIPCPRSELRLDLVLPSGQSFRWREQSPAHWSGVLADQVWTLTQTEEQLHCTVYRGDKSQASRPTPDELEAVRKYFQLDVTLAQLYHHWGSVDSHFQEVAQKFQGVRLLRQDPIECLFSFICSSNNNIARITGMVERLCQAFGPRLIQLDDVTYHGFPSLQALAGPEVEAHLRKLGLGYRARYVSASARAILEEQGGLAWLQQLRESSYEEAHKALCILPGVGTKVADCICLMALDKPQAVPVDVHMWHIAQRDYSWHPTTSQAKGPSPQTNKELGNFFRSLWGPYAGWAQAGLLGNAFDGHQLLRPLIFCQDHLREGPPIGRGDSQGEELEPQLPSSLSSIPYGFCDHCWTKDVDDPPLVTHPSPGSRDGHMTQAWPVKVVSPLATVIGHVMQASLLAL

SEQ ID NO: 915394 - protein, 356 aa, Homo sapiens
MPARALLPRRMGHRTLASTPALWASIPCPRSELRLDLVLPSGQSFRWREQSPAHWSGVLADQVWTLTQTEEQLHCTVYRGDKSQASRPTPDELEAVRKYFQLDVTLAQLYHHWGSVDSHFQEVAQKFQGVRLLRQDPIECLFSFICSSNNNIARITGMVERLCQAFGPRLIQLDDVTYHGFPSLQALAGPEVEAHLRKLGLGYRARYVSASARAILEEQGGLAWLQQLRESSYEEAHKALCILPGVGTKVADCICLMALDKPQAVPVDVHMWHIAQRDYSWHPTTSQAKGPSPQTNKELGNFFRSLWGPYAGWAQALCQVITTFMTFLGPHRLDQMPPEELQTSSSRLGGPPWQCI

SEQ ID NO: 915395 - protein, 357 aa, Homo sapiens
MPARALLPRRMGHRTLASTPALWASIPCPRSELRLDLVLPSGQSFRWREQSPAHWSGVLADQVWTLTQTEEQLHCTVYRGDKSQASRPTPDELEAVRKYFQLDVTLAQLYHHWGSVDSHFQEVAQKFQGVRLLRQDPIECLFSFICSSNNNIARITGMVERLCQAFGPRLIQLDDVTYHGFPSLQALAGPEVEAHLRKLGLGYRARYVSASARAILEEQGGLAWLQQLRESSYEEAHKALCILPGVGTKGLLGNAFDGHQLLRPLIFCQDHLREGPPIGRGDSQGEELEPQLPSSLSSIPYGFCDHCWTKDVDDPPLVTHPSPGSRDGHMTQAWPVKVVSPLATVIGHVMQASLLAL

SEQ ID NO: 915396 - protein, 185 aa, Homo sapiens
MGHRTLASTPALWASIPCPRSELRLDLVLPSGQSFRWREQSPAHWSGVLADQVWTLTQTEEQLHCTVYRGDKSQASRPTPDELEAVRKYFQLDVTLAQLYHHWGSVDSHFQEVAQKFQGVRLLRQDPIECLFSFICSSNNNIARITGMVERLCQAFGPRLIQLDDVTYHGFPSLQALAGPPWQCI

SEQ ID NO: 915397 - protein, 356 aa, Homo sapiens
MPARALLPRRMGHRTLASTPALWASIPCPRSELRLDLVLPSGQSFRWREQSPAHWSGVLADQVWTLTQTEEQLHCTVYRGDKSQASRPTPDELEAVRKYFQLDVTLAQLYHHWGSVDSHFQEVAQKFQGVRLLRQDPIECLFSFICSSNNNIARITGMVERLCQAFGPRLIQLDDVTYHGFPSLQALAGPEVEAHLRKLGLGYRARYVSASARAILEEQGGLAWLQQLRESSYEEAHKALCILPGVGTKETFSGACGDLMLAGPKRYRCCSVPTCANPAMLRSHQQSAERVPKGRKARWGTLDKEIPQAPSPPFPTSLSPSPPSLMLGRGLPVTTSKARHPQIKQSVCTTRWGGGY

SEQ ID NO: 915398 - protein, 287 aa, Homo sapiens
MPARALLPRRMGHRTLASTPALWASIPCPRSELRLDLVLPSGQSFRWREQSPAHWSGVLADQVWTLTQTEEQLHCTVYRGDKSQASRPTPDELEAVRKYFQLDVTLAQLYHHWGSVDSHFQEVAQKFQGVRLLRQDPIECLFSFICSSNNNIARITGMVERLCQAFGPRLIQLDDVTYHGFPSLQALAGPEVEAHLRKLGLGYRARYVSASARAILEEQGGLAWLQQLRESSYEEAHKALCILPGVGTKAVTDAAMMATRHSLTAVPVMSYVTFTYVLLRAINNPGV

SEQ ID NO: 915399 - protein, 190 aa, Homo sapiens
MPARALLPRRMGHRTLASTPALWASIPCPRSELRLDLVLPSGQSFRWREQSPAHWSGVLADQVWTLTQTEEQLHCTVYRGDKSQASRPTPDELEAVRKYFQLDVTLAQLYHHWGSVDSHFQEVAQKFQGVRLLRQDPIECLFSFICSSNNNIARITGMVERLCQAFGPRLIQLDDVTYHGFPSLQALAGG

SEQ ID NO: 915400 - protein, 316 aa, Homo sapiens
MCLGLRWREQSPAHWSGVLADQVWTLTQTEEQLHCTVYRGDKSQASRPTPDELEAVRKYFQLDVTLAQLYHHWGSVDSHFQEVAQKFQGVRLLRQDPIECLFSFICSSNNNIARITGMVERLCQAFGPRLIQLDDVTYHGFPSLQALAGPEVEAHLRKLGLGYRARYVSASARAILEEQGGLAWLQQLRESSYEEAHKALCILPGVGTKVADCICLMALDKPQAVPVDVHMWHIAQRDYSWHPTTSQAKGPSPQTNKELGNFFRSLWGPYAGWAQALCQVITTFMTFLGPHRLDQMPPEELQTSSSRLGGPPWQCI

SEQ ID NO: 915401 - protein, 213 aa, Homo sapiens
MPARALLPRRMGHRTLASTPALWASIPCPRSELRLDLVLPSGQSFRWREQSPAHWSGVLADQVWTLTQTEEQLHCTVYRGDKSQASRPTPDELEAVRKYFQLDVTLAQLYHHWGSVDSHFQEVAQKFQGVRLLRQDPIECLFSFICSSNNNIARITGMVERLCQAFGPRLIQLDDVTYHGFPSLQALAGNFFRSLWGPYAGWAQAVSVPRCPP

SEQ ID NO: 915402 - protein, 236 aa, Homo sapiens
MPARALLPRRMGHRTLASTPALWASIPCPRSELRLDLVLPSGQSFRWREQSPAHWSGVLADQVWTLTQTEEQLHCTVYRGDKSQASRPTPDELEAVRKYFQLDVTLAQLYHHWGSVDSHFQEVAQKFQGVRLLRQDPIECLFSFICSSNNNIARITGMVERLCQAFGPRLIQLDDVTYHGFPSLQALAGNFFRSLWGPYAGWAQALQVLFSADLRQSRHAQEPPAKRRKGSKGPEG

SEQ ID NO: 915403 - protein, 324 aa, Homo sapiens
MPARALLPRRMGHRTLASTPALWASIPCPRSELRLDLVLPSGQSFRWREQSPAHWSGVLADQVWTLTQTEEQLHCTVYRGDKSQASRPTPDELEAVRKYFQLDVTLAQLYHHWGSVDSHFQEVAQKFQGVRLLRQDPIECLFSFICSSNNNIARITGMVERLCQAFGPRLIQLDDVTYHGFPSLQALAGPEVEAHLRKLGLGYRARYVSASARAILEEQGGLAWLQQLRESSYEEAHKALCILPGVGTKVADCICLMALDKPQAVPVDVHMWHIAQRDYSWHPTTSQAKGPSPQTNKELGNFFRSLWGPYAGWAQAVSVPRCPP

SEQ ID NO: 915404 - protein, 322 aa, Homo sapiens
MPARALLPRRMGHRTLASTPALWASIPCPRSELRLDLVLPSGQSFRWREQSPAHWSGVLADQVWTLTQTEEQLHCTVYRGDKSQASRPTPDELEAVRKYFQLDVTLAQLYHHWGSVDSHFQEVAQKFQGVRLLRQDPIECLFSFICSSNNNIARITGMVERLCQAFGPRLIQLDDVTYHGFPSLQALAGPEVEAHLRKLGLGYRARYVSASARAILEEQGGLAWLQQLRESSYEEAHKALCILPGVGTKVADCICLMALDKPQAVPVDVHMWHIAQRDYSWHPTTSQAKGPSPQTNKELGNFFRSLWGPYAGWAQAAGSDAS

SEQ ID NO: 915405 - protein, 359 aa, Homo sapiens
MPARALLPRRMGHRTLASTPALWASIPCPRSELRLDLVLPSGQSFRWREQSPAHWSGVLADQVWTLTQTEEQLHCTVYRGDKSQASRPTPDELEAVRKYFQLDVTLAQLYHHWGSVDSHFQEVAQKFQGVRLLRQDPIECLFSFICSSNNNIARITGMVERLCQAFGPRLIQLDDVTYHGFPSLQALAGPEVEAHLRKLGLGYRARYVSASARAILEEQGGLAWLQQLRESSYEEAHKALCILPGVGTKVADCICLMALDKPQAVPVDVHMWHIAQRDYSWHPTTSQAKGPSPQTNKELGNFFRSLWGPYAGWAQAGLLGNAFDGHQLLRPLIFCQDHLREGPLATVIGHVMQASLLAL

SEQ ID NO: 915406 - protein, 324 aa, Homo sapiens; identical to SEQ ID NO: 915403

SEQ ID NO: 915407 - protein, 261 aa, Homo sapiens
MLPWLNCITTGVPWTPTSKRWLRNSKVCDCCDKTPSNAFSLLSVPPTTTSPASLAWWSGCARLLDLGSSSLMMSPTMASPACRPWLVADCICLMALDKPQAVPVDVHMWHIAQRDYSWHPTTSQAKGPSPQTNKELGNFFRSLWGPYAGWAQAGLLGNAFDGHQLLRPLIFCQDHLREGPPIGRGDSQGEELEPQLPSSLSSIPYGFCDHCWTKDVDDPPLVTHPSPGSRDGHMTQAWPVKVVSPLATVIGHVMQASLLAL

SEQ ID NO: 915408 - protein, 316 aa, Homo sapiens; identical to SEQ ID NO: 915400

SEQ ID NO: 915409 - protein, 190 aa, Homo sapiens; identical to SEQ ID NO: 915399

SEQ ID NO: 915410 - protein, 218 aa, Homo sapiens
MPARALLPRRMGHRTLASTPALWASIPCPRSELRLDLVLPSGQSFRWREQSPAHWSGVLADQVWTLTQTEEQLHCTVYRGDKSQASRPTPDELEAVRKYFQLDVTLAQLYHHWGSVDSHFQEVAQKFQGVRLLRQDPIECLFSFICSSNNNIARITGMVERLCQAFGPRLIQLDDVTYHGFPSLQALAGVPVPAEGLLTSASAFQSPLRSRQPEADRR

SEQ ID NO: 915411 - protein, 568 aa, Homo sapiens
MLLLPSAADGRGTAITHALTSASTLCQVEPVGRWFEAFVKRRNRNASASFQELEDKKELSEESEDEELQLEEFPMLKTLDPKDWKNQDHYAVLGLGHVRYKATQRQIKAAHKAMVLKHHPDKRKAAGEPIKEGDNDYFTCITKAYEMLSDPVKRRAFNSVDPTFDNSVPSKSEAKDNFFEVFTPVFERNSRWSNKKNVPKLGDMNSSFEDVDIFYSFWYNFDSWREFSYLDEEEKEKAECRDERRWIEKQNRATRAQRKKEEMNRIRTLVDNAYSCDPRIKKFKEEEKAKKEAEKKAKAEAKRKEQEAKEKQRQAELEAARLAKEKEEEEVRQQALLAKKEKDIQKKAIKKERQKLRNSCKIEEINEQIRKEKEEAEARMRQASKNTEKSTGGGGNGSKNWSEDDLQLLIKAVNLFPAGTNSRWEVIANYMNIHSSSGVKRTAKDVIGKAKSLQKLDPHQKDDINKKAFDKFKKEHGVVPQADNATPSERFEGPYTDFTPWTTEEQKLLEQALKTYPVNTPERWEKIAEAVPGRTKKDCMKRYKELVEMVKAKKAAQEQVLNASRAKK

SEQ ID NO: 915412 - protein, 118 aa, Homo sapiens
MLLLPSAADGRGTAITHALTSASTLCQVEPVGRWFEAFVKRRNRNASASFQELEDKKELSEESEDEELQLEEFPMLKTLDPKDWKNQDHYAVLGLGHVRYKATQRQIKAARKYLVILK

SEQ ID NO: 915413 - protein, 621 aa, Homo sapiens
MLLLPSAADGRGTAITHALTSASTLCQVEPVGRWFEAFVKRRNRNASASFQELEDKKELSEESEDEELQLEEFPMLKTLDPKDWKNQDHYAVLGLGHVRYKATQRQIKAAHKAMVLKHHPDKRKAAGEPIKEGDNDYFTCITKAYEMLSDPVKRRAFNSVDPTFDNSVPSKSEAKDNFFEVFTPVFERNSRWSNKKNVPKLGDMNSSFEDVDIFYSFWYNFDSWREFSYLDEEEKEKAECRDERRWIEKQNRATRAQRKKEEMNRIRTLVDNAYSCDPRIKKFKEEEKAKKEAEKKAKAEAKRKEQEAKEKQRQAELEAARLAKEKEEEEVRQQALLAKKEKDIQKKAIKKERQKLRNSCKTWNHFSDNEAERVKMMEEVEKLCDRLELASLQCLNETLTSCTKEVGKAALEKQIEEINEQIRKEKEEAEARMRQASKNTEKSTGGGGNGSKNWSEDDLQLLIKAVNLFPAGTNSRWEVIANYMNIHSSSGVKRTAKDVIGKAKSLQKLDPHQKDDINKKAFDKFKKEHGVVPQADNATPSERFEGPYTDFTPWTTEEQKLLEQALKTYPVNTPERWEKIAEAVPGRTKKDCMKRYKELVEMVKAKKAAQEQVLNASRAKK

SEQ ID NO: 915414 - protein, 621 aa, Homo sapiens; identical to SEQ ID NO: 915413

SEQ ID NO: 915415 - protein, 637 aa, Homo sapiens
MLLLPSAADGRGTAITHALTSASTLCQVEPVGRWFEAFVKRRNRNASASFQELEDKKELSEESEDEELQLEEFPMLKTLDPKDWKNQDHYAVLGLGHVRYKATQRQIKAAHKAMVLKHHPDKRKAAGEPIKEGDNDYFTCITKGSPGDSYQKLILTVNSSYEMLSDPVKRRAFNSVDPTFDNSVPSKSEAKDNFFEVFTPVFERNSRWSNKKNVPKLGDMNSSFEDVDIFYSFWYNFDSWREFSYLDEEEKEKAECRDERRWIEKQNRATRAQRKKEEMNRIRTLVDNAYSCDPRIKKFKEEEKAKKEAEKKAKAEAKRKEQEAKEKQRQAELEAARLAKEKEEEEVRQQALLAKKEKDIQKKAIKKERQKLRNSCKTWNHFSDNEAERVKMMEEVEKLCDRLELASLQCLNETLTSCTKEVGKAALEKQIEEINEQIRKEKEEAEARMRQASKNTEKSTGGGGNGSKNWSEDDLQLLIKAVNLFPAGTNSRWEVIANYMNIHSSSGVKRTAKDVIGKAKSLQKLDPHQKDDINKKAFDKFKKEHGVVPQADNATPSERFEGPYTDFTPWTTEEQKLLEQALKTYPVNTPERWEKIAEAVPGRTKKDCMKRYKELVEMVKAKKAAQEQVLNASRAKK

SEQ ID NO: 915416 - protein, 512 aa, Homo sapiens
MLLLPSAADGRGTAITHALTSASTLCQVEPVGRWFEAFVKRRNRNASASFQELEDKKELSEESEDEELQLEEFPMLKTLDPKDWKNQDHYAVLGLGHVRYKATQRQIKAAHKAMVLKHHPDKRKAAGEPIKEGDNDYFTCITKAYEMLSDPVKRRAFNSVDPTFDNSVPSKSEAKDNFFEVFTPVFERNSRWSNKKNVPKLGDMNSSFEDVDIFYSFWYNFDSWREFSYLDEEEKEKAECRDERRWIEKQNRATRAQRKKEEMNRIRTLVDNAYSCDPRIKKFKEEEKAKKEAEKKAKAEAKRKEQEAKEKQRQAELEAARLAKEKEEEEVRQQALLAKKEKDIQKKAIKKERQKLRNSCKTWNHFSDNEAERVKMMEEVEKLCDRLELASLQCLNETLTSCTKEVGKAALEKQIEEINEQIRKEKEEAEARMRQASKNTEKSTGGGGNGSKNWSEDDLQLLIKAVNLFPAGTNSRWEVIANYMNIHSSSGVKRTAKDVIGKAKSLQKLGEF

SEQ ID NO: 915417 - protein, 475 aa, Homo sapiens
MLSDPVKRRAFNSVDPTFDNSVPSKSEAKDNFFEVFTPVFERNSRWSNKKNVPKLGDMNSSFEDVDIFYSFWYNFDSWREFSYLDEEEKEKAECRDERRWIEKQNRATRAQRKKEEMNRIRTLVDNAYSCDPRIKKFKEEEKAKKEAEKKAKAEAKRKEQEAKEKQRQAELEAARLAKEKEEEEVRQQALLAKKEKDIQKKAIKKERQKLRNSCKTWNHFSDNEAERVKMMEEVEKLCDRLELASLQCLNETLTSCTKEVGKAALEKQIEEINEQIRKEKEEAEARMRQASKNTEKSTGGGGNGSKNWSEDDLQLLIKAVNLFPAGTNSRWEVIANYMNIHSSSGVKRTAKDVIGKAKSLQKLDPHQKDDINKKAFDKFKKEHGVVPQADNATPSERFEGPYTDFTPWTTEEQKLLEQALKTYPVNTPERWEKIAEAVPGRTKKDCMKRYKELVEMVKAKKAAQEQVLNASRAKK

SEQ ID NO: 915418 - protein, 402 aa, Homo sapiens
MLLLPSAADGRGTAITHALTSASTLCQVEPVGRWFEAFVKRRNRNASASFQELEDKKELSEESEDEELQLEEFPMLKTLDPKDWKNQDHYAVLGLGHVRYKATQRQIKAAHKAMVLKHHPDKRKAAGEPIKEGDNDYFTCITKAYEMLSDPVKRRAFNSVDPTFDNSVPSKSEAKDNFFEVFTPVFERNSRWSNKKNVPKLGDMNSSFEDVDIFYSFWYNFDSWREFSYLDEEEKEKAECRDERRWIEKQNRATRAQRKKEEMNRIRTLVDNAYSCDPRIKKFKEEEKAKKEAEKKAKAEAKRKEQEAKEKQRQAELEAARLAKEKEEEEVRQQALLAKKEKDIQKKAIKKERQKLRNSCKTWNHFSDNEAERVKMMEEVEKLCDRLELARYTYGTAIEVFT

SEQ ID NO: 915419 - protein, 500 aa, Homo sapiens
SQLILEGTTTPSDLAVMSMAAFMNDTEAMRTRKFMTNRLLERKQMVIDVLHPGKATVPKTEIREKLAKMYKTTPDVIFVFGFRTHFGGGRTTGFGMIYDSLDYAKKNEPKHRLARHGLYEKKKTFKKATKGTTRAQRKKEEMNRIRTLVDNAYSCDPRIKKFKEEEKAKKEAEKKAKAEAKRKEQEAKEKQRQAELEAARLAKEKEEEEVRQQALLAKKEKDIQKKAIKKERQKLRNSCKTWNHFSDNEAERVKMMEEVEKLCDRLELASLQCLNETLTSCTKEVGKAALEKQIEEINEQIRKEKEEAEARMRQASKNTEKSTGGGGNGSKNWSEDDLQLLIKAVNLFPAGTNSRWEVIANYMNIHSSSGVKRTAKDVIGKAKSLQKLDPHQKDDINKKAFDKFKKEHGVVPQADNATPSERFEGPYTDFTPWTTEEQKLLEQALKTYPVNTPERWEKIAEAVPGRTKKDCMKRYKELVEMVKAKKAAQEQVLNASRAKK

SEQ ID NO: 915420 - protein, 337 aa, Homo sapiens
MDGGSEAQGKKTDVNTGRDERNKEIQGQRQAELEAARLAKEKEEEEVRQQALLAKKEKDIQKKAIKKERQKLRNSCKTWNHFSDNEAERVKMMEEVEKLCDRLELASLQCLNETLTSCTKEVGKAALEKQIEEINEQIRKEKEEAEARMRQASKNTEKSTGGGGNGSKNWSEDDLQLLIKAVNLFPAGTNSRWEVIANYMNIHSSSGVKRTAKDVIGKAKSLQKLDPHQKDDINKKAFDKFKKEHGVVPQADNATPSERFEGPYTDFTPWTTEEQKLLEQALKTYPVNTPERWEKIAEAVPGRTKKDCMKRYKELVEMVKAKKAAQEQVLNASRAKK

SEQ ID NO: 915421 - protein, 138 aa, Homo sapiens [sequence omitted]

SEQ ID NO: 915422 - protein, 218 aa, Homo sapiens [sequence omitted]

SEQ ID NO: 915423 - protein, 272 aa, Homo sapiens [sequence omitted]

SEQ ID NO: 915424 - protein, 402 aa, Homo sapiens; identical to SEQ ID NO: 915418

SEQ ID NO: 915425 - protein, 556 aa, Homo sapiens [sequence omitted]

SEQ ID NO: 915426 - protein, 479 aa, Homo sapiens [sequence omitted]

SEQ ID NO: 915427 - protein, 464 aa, Homo sapiens
MCILDFHTKCNVLKKGERLDLSSILEGKERYPLKQIHSLALKRIFFHLFCLDHVLFLCYIRYNFDSWREFSYLDEEEKEKAECRDERRWIEKQNRATRAQRKKEEMNRIRTLVDNAYSCDPRIKKFKEEEKAKKEAEKKAKAEAKRKEQEAKEKQRQAELEAARLAKEKEEEEVRQQALLAKKEKDIQKKAIKKERQKLRNSCKTWNHFSDNEAERVKMMEEVEKLCDRLELASLQCLNETLTSCTKEVGKAALEKQIEEINEQIRKEKEEAEARMRQASKNTEKSTGGGGNGSKNWSEDDLQLLIKAVNLFPAGTNSRWEVIANYMNIHSSSGVKRTAKDVIGKAKSLQKLDPHQKDDINKKAFDKFKKEHGVVPQADNATPSERFEGPYTDFTPWTTEEQKLLEQALKTYPVNTPERWEKIAEAVPGRTKKDCMKRYKELVEMVKAKKAAQEQVLNASRAKK

SEQ ID NO: 915428 - protein, 402 aa, Homo sapiens; identical to SEQ ID NO: 915418

SEQ ID NO: 915429 - protein, 157 aa, Homo sapiens
AASRQDYFVLGLPRPRPGPCCLYLWGLHMWTATARGCHGHTTQQSKNPPAENALSKVPLNSILGDNPWLRGTGCAVQNCGALGSTLAEGAEHLPRGTCTFGSAKLQRTCSQVLRNHCLPQGQGQPCPPFSWTVLRPQYCTQQGSNSLGMERSDLDRN

SEQ ID NO: 915430 - protein, 569 aa, Homo sapiens
MATEGGGKEMNEIKTQFTTREGLYKLLPHSEYSRPNRVPFNSQGSNPVRVSFVNLNDQSGNGDRLCFNVGRELYFYIYKGVRKAADLSKPIDKRIYKGTQPTCHDFNHLTATAESVSLLVGFSAGQVQLIDPIKKETSKLFNEERLIDKSRVTCVKWVPGSESLFLVAHSSGNMYLYNVEHTCGTTAPHYQLLKQGESFAVHTCKSKSTRNPLLKWTVGEGALNEFAFSPDGKFLACVSQDGFLRVFNFDSVELHGTMKSYFGGLLCVCWSPDGKYIVTGGEDDLVTVWSFVDCRVIARGHGHKSWVSVVAFDPYTTSVEEGDPMEFSGSDEDFQDLLHFGRDRANSTQSRLSKRNSTDSRPVSVTYRFGSVGQDTQLCLWDLTEDILFPHQPLSRARTHTNVMNATSPPAGSNGNSVTTPGNSVPPPLPRSNSLPHSAVSNAGSKSSVMDGAIASGVSKFATLSLHDRKERHHEKDHKRNHSMGHISSKSSDKLNLVTKTKTDPAKTLGTPLCPRMEDVPLLEPLICKKIAHERLTVLIFLEDCIVTACQEGFICTWGRPGKVVSFNP

SEQ ID NO: 915431 - protein, 508 aa, Homo sapiens
MATEGGGKEMNEIKTQFTTREGLYKLLPHSEYSRPNRVPFNSQGSNPVRVSFVNLNDQSGNGDRLCFNVGRELYFYIYKGVRKRLIDKSRVTCVKWVPGSESLFLVAHSSGNMYLYNVEHTCGTTAPHYQLLKQGESFAVHTCKSKSTRNPLLKWTVGEGALNEFAFSPDGKFLACVSQDGFLRVFNFDSVELHGTMKSYFGGLLCVCWSPDGKYIVTGGEDDLVTVWSFVDCRVIARGHGHKSWVSVVAFDPYTTSVEEGDPMEFSGSDEDFQDLLHFGRDRANSTQSRLSKRNSTDSRPVSVTYRFGSVGQDTQLCLWDLTEDILFPHQPLSRARTHTNVMNATSPPAGSNGNSVTTPGNSVPPPLPRSNSLPHSAVSNAGSKSSVMDGAIASGVSKFATLSLHDRKERHHEKDHKRNHSMGHISSKSSDKLNLVTKTKTDPAKTLGTPLCPRMEDVPLLEPLICKKIAHERLTVLIFLEDCIVTACQEGFICTWGRPGKVVSFNP

SEQ ID NO: 915432 - protein, 312 aa, Homo sapiens
MKSYFGGLLCVCWSPDGKYIVTGGEDDLVTVWSFVDCRVIARGHGHKSWVSVVAFDPYTTSVEEGDPMEFSGSDEDFQDLLHFGRDRANSTQSRLSKRNSTDSRPVSVTYRFGSVGQDTQLCLWDLTEDILFPHQPLSRARTHTNVMNATSPPAGSNGNSVTTPGNSVPPPLPRSNSLPHSAVSNAGSKSSVMDGAIASGVSKFATLSLHDRKERHHEKDHKRNHSMGHISSKSSDKLNLVTKTKTDPAKTLGTPLCPRMEDVPLLEPLICKKIAHERLTVLIFLEDCIVTACQEGFICTWGRPGKVVSFNP

SEQ ID NO: 915433 - protein, 396 aa, Homo sapiens
MYLYNVEHTCGTTAPHYQLLKQGESFAVHTCKSKSTRNPLLKWTVGEGALNEFAFSPDGKFLACVSQDGFLRVFNFDSVELHGTMKSYFGGLLCVCWSPDGKYIVTGGEDDLVTVWSFVDCRVIARGHGHKSWVSVVAFDPYTTSVEEGDPMEFSGSDEDFQDLLHFGRDRANSTQSRLSKRNSTDSRPVSVTYRFGSVGQDTQLCLWDLTEDILFPHQPLSRARTHTNVMNATSPPAGSNGNSVTTPGNSVPPPLPRSNSLPHSAVSNAGSKSSVMDGAIASGVSKFATLSLHDRKERHHEKDHKRNHSMGHISSKSSDKLNLVTKTKTDPAKTLGTPLCPRMEDVPLLEPLICKKIAHERLTVLIFLEDCIVTACQEGFICTWGRPGKVVSFNP

SEQ ID NO: 915434 - protein, 396 aa, Homo sapiens; identical to SEQ ID NO: 915433

SEQ ID NO: 915435 - protein, 157 aa, Homo sapiens
MATEGGGKEMNEIKTQFTTREGLYKLLPHSEYSRPNRVPFNSQGSNPVRVSFVNLNDQSGNGDRLCFNVGRELYFYIYKGVRKAADLSKPIDKRIYKGTQPTCHDFNHLTATAESVSLLVGFSAGQVQLIDPIKKETSKLFNEEAFEGRYATFSPFV

SEQ ID NO: 915436 - protein, 600 aa, Homo sapiens
MATEGGGKEMNEIKTQFTTREGLYKLLPHSEYSRPNRVPFNSQGSNPVRVSFVNLNDQSGNGDRLCFNVGRELYFYIYKGVRKAADLSKPIDKRIYKGTQPTCHDFNHLTATAESVSLLVGFSAGQVQLIDPIKKETSKLFNEENSCQHLWKVDWNEERQNEGSKTSEEALVTVQRLIDKSRVTCVKWVPGSESLFLVAHSSGNMYLYNVEHTCGTTAPHYQLLKQGESFAVHTCKSKSTRNPLLKWTVGEGALNEFAFSPDGKFLACVSQDGFLRVFNFDSVELHGTMKSYFGGLLCVCWSPDGKYIVTGGEDDLVTVWSFVDCRVIARGHGHKSWVSVVAFDPYTTSVEEGDPMEFSGSDEDFQDLLHFGRDRANSTQSRLSKRNSTDSRPVSVTYRFGSVGQDTQLCLWDLTEDILFPHQPLSRARTHTNVMNATSPPAGSNGNSVTTPGNSVPPPLPRSNSLPHSAVSNAGSKSSVMDGAIASGVSKFATLSLHDRKERHHEKDHKRNHSMGHISSKSSDKLNLVTKTKTDPAKTLGTPLCPRMEDVPLLEPLICKKIAHERLTVLIFLEDCIVTACQEGFICTWGRPGKVVSFNP

SEQ ID NO: 915437 - protein, 396 aa, Homo sapiens; identical to SEQ ID NO: 915433

SEQ ID NO: 915438 - protein, 396 aa, Homo sapiens; identical to SEQ ID NO: 915433

SEQ ID NO: 915439 - protein, 569 aa, Homo sapiens; identical to SEQ ID NO: 915430

SEQ ID NO: 915440 - protein, 115 aa, Homo sapiens
HLAKTADPGARAQGSPGCGEEWLWHLPILWVLQALLEVFGLFGLWSFSPGTEVEMGRRPGQCSWKLTLHFSAPVFQFKSAFSSAETTELSGKCVVALATGEVWGQLVIRKGMEDV

SEQ ID NO: 915441 - protein, 257 aa, Homo sapiens
MAAPMNGQVCVVTGASRGIGRGIALQLCKAGATVYITGRHLDTLRVVAQEAQSLGGQCVPVVCDSSQESEVRSLFEQVDREQQGRLDVLVNNAYAGVQTILNTRNKAFWETPASMWDDINNVGLRGHYFCSVYGARLMVPAGQGLIVVISSPGSLQYMFNVPYGVGKAACDKLAADCAHELRRHGVSCVSLWPGIVQTELLKEHMAKEEVLQDPVLKQFKSAFSSAETTELSGKCVVALATGEVWGQLVIRKGMEDV

SEQ ID NO: 915442 - protein, 237 aa, Homo sapiens
RSLRPHPQVLTWAGTLPLYLSTESPRVLLQNQSLNTASMWDDINNVGLRGHYFCSVYGARLMVPAGQGLIVVISSPGSLQYMFNVPYGVGKAACDKLAADCAHELRRHGVSCVSLWPGIVQTELLKEHMAKEEVLQDPVLKQFKSAFSSAETTELSGKCVVALATDPNILSLSGKVLPSCDLARRYGLRDVDGRPVQDYLSLSSVLSHVSGLGWLASYLPSFLRVPKWIIALYTSKF

SEQ ID NO: 915443 - protein, 313 aa, Homo sapiens
MAAPMNGQVCVVTGASRGIGRGIALQLCKAGATVYITGRHLDTLRVVAQEAQSLGGQCVPVVCDSSQESEVRSLFEQVDREQQGRLDVLVNNAYAGVQTILNTRNKAFWETPASMWDDINNVGLRGHYFCSVYGARLMVPAGQGLIVVISSPGSLQYMFNVPYGVGKAACDKLAADCAHELRRHGVSCVSLWPGIVQTELLKEHMAKEEVLQDPVLKQFKSAFSSAETTELSGKCVVALATDPNILSLSGKVLPSCDLARRYGLRDVDGRPVQDYLSLSSVLSHVSGLGWLASYLPSFLRVPKWIIALYTSKF

SEQ ID NO: 915444 - protein, 313 aa, Homo sapiens; identical to SEQ ID NO: 915443

SEQ ID NO: 915445 - protein, 177 aa, Homo sapiens
MAAPMNGQVCVVTGASRGIGRGIALQLCKAGATVYITGRHLDTLRVVAQEAQSLGGQCVPVVCDSSQESEVRSLFEQVDREQQGRLDVLVNNAYAGVQTILNTRNKAFWETPASMWDDINNVGLRGHYFCSVYGARLMVPAGQGLIVVISSPGSLQYMFNVPYGVGKAAVRTQWHRS

SEQ ID NO: 915446 - protein, 313 aa, Homo sapiens; identical to SEQ ID NO: 915443

SEQ ID NO: 915447 - protein, 402 aa, Homo sapiens
MDGEEQQPPHEANVEPVVPSEASEPVPRVLSGDPQNLSDVDAFNLLLEMKLKRRRQRPNLPRTVTQLVAEDGSRVYVVGTAHFSDDSKRDVVKTIREVQPDVVVVELCQYRVSMLKMDESTLLREAQELSLEKLQQAVRQNGLMSGLMQMLLLKVSAHITEQLGMAPGGEFREAFKEASKVPFCKFHLGDRPIPVTFKRAIAALSFWQKVRLAWGLCFLSDPISKDDVERCKQKDLLEQMMAEMIGEFPDLHRTIVSERDVYLTYMLRQAARRLELPRASDGDGRRRRGTPCEAEARAGTDPLSFPTAEPRKCVPSVVVGVVGMGHVPGIEKNWSTDLNIQEIMTVPPPSVSGRVSRLAVKAAFFGLLGYSLYWMGRRTASLVLSLPAAQYCLQRVTEARHK

SEQ ID NO: 915448 - protein, 359 aa, Homo sapiens
PLRARAAWRPAEERRCLASVRRAARTARSPQVQEAAAQPWTGRSSSHRTRPTWNLLCRQRLQSRCPGCFLETPRTCTIREVQPDVVVVELCQYRVSMLKMDESTLLREAQELSLEKLQQAVRQNGLMSGLMQMLLLKVSAHITEQLGMAPGGEFREAFKEASKVPFCKFHLGDRPIPVTFKRAIAALSFWQKVRLAWGLCFLSDPISKDDVERCKQKDLLEQMMAEMIGEFPDLHRTIVSERDVYLTYMLRQAARRLELPRASDAEPRKCVPSVVVGVVGMGHVPGIEKNWSTDLNIQEIMTVPPPSVSGRVSRLAVKAAFFGLLGYSLYWMGRRTASLVLSLPAAQYCLQRVTEARHK

SEQ ID NO: 915449 - protein, 376 aa, Homo sapiens
MDGEEQQPPHEANVEPVVPSEASEPVPRVLSGDPQNLSDVDAFNLLLEMKLKRRRQRPNLPRTVTQLVAEDGSRVYVVGTAHFSDDSKRDVVKTIREVQPDVVVVELCQYRVSMLKMDESTLLREAQELSLEKLQQAVRQNGLMSGLMQMLLLKVSAHITEQLGMAPGGEFREAFKEASKVPFCKFHLGDRPIPVTFKRAIAALSFWQKVRLAWGLCFLSDPISKDDVERCKQKDLLEQMMAEMIGEFPDLHRTIVSERDVYLTYMLRQAARRLELPRASDAEPRKCVPSVVVGVVGMGHVPGIEKNWSTDLNIQEIMTVPPPSVSGRVSRLAVKAAFFGLLGYSLYWMGRRTASLVLSLPAAQYCLQRVTEARHK

SEQ ID NO: 915450 - protein, 454 aa, Homo sapiens
MDGEEQQPPHEANVEPVVPSEASEPVPRVLSGDPQNLSDVDAFNLLLEMKLKRRRQRPNLPRTVTQLVAEDGSRVYVVGTAHFSDDSKRDVVKTIREVQPDVVVVELCQYRVSMLKMDESTLLREAQELSLEKLQQAVRQNGLMSGLMQMLLLKVSAHITEQLGMAPGGEFREAFKEASKVPFCKFHLGDRPIPVTFKRAIAALSFWQKVRLAWGLCFLSDPIRYGLPPGPWPACRVVCGRLQALLCRSKRSNPHSRPSLPFPSATNPKQTCCGPCPVSTVPAPPPQPVAHPCGAAAIPLHSKDDVERCKQKDLLEQMMAEMIGEFPDLHRTIVSERDVYLTYMLRQAARRLELPRASDAEPRKCVPSVVVGVVGMGHVPGIEKNWSTDLNIQEIMTVPPPSVSGRVSRLAVKAAFFGLLGYSLYWMGRRTASLVLSLPAAQYCLQRVTEARHK

SEQ ID NO: 915451 - protein, 224 aa, Homo sapiens
MDGEEQQPPHEANVEPVVPSEASEPVPRVLSGDPQNLSDVDAFNLLLEMKLKRRRQRPNLPRTVTQLVAEDGSRVYVVGTAHFSDDSKRDVVKTIREVQPDVVVVELCQYRVSMLKMDESTLLREAQELSLEKLQQAVRQNGLMSGLMQMLLLKVSAHITEQLGMAPGGEFREAFKEASKVPFCKFHLGDRPIPVTFKRAIAALSFWQKVRLAWGLCFLSDPIR

SEQ ID NO: 915452 - protein, 376 aa, Homo sapiens; identical to SEQ ID NO: 915449

SEQ ID NO: 915453 - protein, 266 aa, Homo sapiens
MDGEEQQPPHEANVEPVVPSEASEPVPRVLSGDPQNLSDVDAFNLLLEMKLKRRRQRPNLPRTVTQLVAEDGSRVYVVGTAHFSDDSKRDVVKTIREVQPDVVVVELCQYRVSMLKMDESTLLREAQELSLEKLQQAVRQGAQPRARVRVRVGVKATCLPVAQVPLTAHAPSQCGCAWPALGIAGLGTSPGPGEMKEAPLPGFRQGRRKWVALQAEAGAGHPRTGLLSSCWGWVRSQCKVGPPVPHPGPKWVGLRAPPVPTSPALQ

SEQ ID NO: 915454 - protein, 379 aa, Homo sapiens
MDGEEQQPPHEANVEPVVPSEASEPVPRVLSGDPQNLSDVDAFNLLLEMKLKRRRQRPNLPRTVTQLVAEDGSRVYVVGTAHFSDDSKRDVVKTIREVQPDVVVVELCQYRVSMLKMDESTLLREAQELSLEKLQQAVRQNGLMSGLMQMLLLKVSAHITEQLGMAPGGEFREAFKEASKVPFCKFHLGDRPIPVTFKRAIAALSFWQKVRLAWGLCFLSDPISKDDVERCKQKDLLEQMMAEMIGEFPDLHRTIVSERDVYLTYMLRQAARRLELPRASDAEPRKCVPSVVVGVVGMGHVPGIEKNWSTDLNIQEIMTVPPPSVSGRVSRLAVKAAFFGLLGYSLYWMGRRTASLVLSLPAAQYCLQRVTEARHKEKN

SEQ ID NO: 915455 - protein, 87 aa, Homo sapiens
PLRARAAWRPAEERRCLASVRRAARTARSPQVQEAAAQPWTGRSSSHRTRPTWNLLCRQRLQSRCPGCFLETPRTCPTWTPSTCSWR

SEQ ID NO: 915456 - protein, 376 aa, Homo sapiens; identical to SEQ ID NO: 915449

SEQ ID NO: 915457 - protein, 367 aa, Homo sapiens
MDGEEQQPPHEANVEPVVPSEASEPVPRVLSGDPQNLSDVDAFNLLLEMKLKRRRQRPNLPRTVTQLVAEDGSRVYVVGTAHFSDDSKRDVVKTIREVQPDVVVVELCQYRVSMLKMDESTLLREAQELSLEKLQQAVRQNGLMSGLMQMLLLKVSAHITEQLGMAPGGEFREAFKEASKVPFCKFHLGDRPIPVTFKRAIAALSFWQKVRLAWGLCFLSDPISKDDVERCKQKDLLEQMMAEMIGEFPDLHRTIVSERDVYLTYMLRQAARRLELPRASDAEPRKCVPSVVVGVVGMGHVPGIEKNWSTDLNIQEIMTVSRLAVKAAFFGLLGYSLYWMGRRTASLVLSLPAAQYCLQRVTEARHK

SEQ ID NO: 915458 - protein, 319 aa, Homo sapiens [sequence omitted]

SEQ ID NO: 915459 - protein, 376 aa, Homo sapiens; identical to SEQ ID NO: 915449

SEQ ID NO: 915460 - protein, 266 aa, Homo sapiens; identical to SEQ ID NO: 915453

SEQ ID NO: 915461 - protein, 101 aa, Homo sapiens
KNWSTDLNIQAVAHAHDAHDHGGDALPGIEKNWSTDLNIQEIMTVPPPSVSGRVSRLAVKAAFFGLLGYSLYWMGRRTASLVLSLPAAQYCLQRVTEARHK

SEQ ID NO: 915462 - protein, 153 aa, Homo sapiens
MDGEEQQPPHEANVEPVVPSEASEPVPRVLSGDPQNLSDVDAFNLLLEMKLKRRRQRPNLPRTVTQLVAEDGSRVYVVGTAHFSDDSKRDVVKTIREVQPDVVVVELCQYRVSMLKMDESTLLREAQELSLEKLQQAVRQPVPPRHFWVPGAS

SEQ ID NO: 915463 - protein, 139 aa, Homo sapiens
MNCWLPTVLWSCKPRSCPAGPPTPEAQSEEERSDEEPEAKEEEEEKPHMPTEFDFDDEPVTPKDSLIDRRRTPGSSARSQKREARLDKVLSDMKRHKKLEEQILRTGRDLFSLDSEDPSPASPPLRSSGSSLFPRQRKY

SEQ ID NO: 915464 - protein, 139 aa, Homo sapiens; identical to SEQ ID NO: 915463

SEQ ID NO: 915465 - protein, 149 aa, Homo sapiens
MSLARGHGDTAASTAAPLSEEGEVTSGLQALAVEDTGGPSASAGKAEDEGEGGREETEREGSGGEEAQGEVPSAGGEEPAEEDSEDWCVPCSDEEVELPADGQPWMPPPSEIQRLYELLAAHGTLELQAEILPRRASHAGGPERRGEIR

SEQ ID NO: 915466 - protein, 139 aa, Homo sapiens; identical to SEQ ID NO: 915463

SEQ ID NO: 915467 - protein, 139 aa, Homo sapiens; identical to SEQ ID NO: 915463

SEQ ID NO: 915468 - protein, 359 aa, Homo sapiens
MGGLEKKKYERGSATNYITRNKARKKLQLSLADFRRLCILKGIYPHEPKHKKKVNKGSTAARTFYLIKDIRFLLHEPIVNKFREYKVFVRKLRKAYGKSEWNTVERLKDNKPNYKLDHIIKERYPTFIDALRDLDDALSMCFLFSTFPRTGKCHVQTIQLCRRLTVEFMHYIIAARALRKVFLSIKGIYYQAEVLGQPIVWITPYAFSHDHPTDVDYRVMATFTEFYTTLLGFVNFRLYQLLNLHYPPKSRVSQAKGNAGEGQSVESQSDGELGAHKVRGTRVGAVPKARGPEGRKYPPRGTITAEAKTRQERPNTEKIEGPHHHPKEKRQENTHRERATTHDVDDETNAPQKQQRKQK

SEQ ID NO: 915469 - protein, 513 aa, Homo sapiens
MGGLEKKKYERGSATNYITRNKARKKLQLSLADFRRLCILKGIYPHEPKHKKKVNKGSTAARTFYLIKDIRFLLHEPIVNKFREYKVFVRKLRKAYGKSEWNTVERLKDNKPNYKLDHIIKERYPTFIDALRDLDDALSMCFLFSTFPRTGKCHVQTIQLCRRLTVEFMHYIIAARALRKVFLSIKGIYYQAEVLGQPIVWITPYAFSHDHPTDVDYRVMATFTEFYTTLLGFVNFRLYQLLNLHYPPKLEGQAQAEAKAGEGTYALDSESCMEKLAALSASLARVVVPATEEEAEVDEFPTDGEMSAQEEDRRKELEAQEKHKKLFEGLKFFLNREVPREALAFIIRSFGGEVSWDKSLCIGATYDVTDSRITHQIVDRPGQQTSVIGRCYVQPQWVFDSVNARLLLPVAEYFSGVQLPPHLSPFVTEKEGDYVPPEKLKLLALQRGEDPGNLNESEEEEEEDDNNEGDGDEEGENEEEEEDAEAGSEKEEEARLAALEEAQGDGRHLEAGG

SEQ ID NO: 915470 - protein, 581 aa, Homo sapiens
MYERGSATNYITRNKARKKLQLSLADFRRLCILKGIYPHEPKHKKKVNKGSTAARTFYLIKDIRFLLHEPIVNKFREYKVFVRKLRKAYGKSEWNTVERLKDNKPNYKLDHIIKERYPTFIDALRDLDDALSMCFLFSTFPRTGKCHVQTIQLCRRLTVEFMHYIIAARALRKVFLSIKGIYYQAEVLGQPIVWITPYAFSHDHPTDVDYRVMATFTEFYTTLLGFVNFRLYQLLNLHYPPKLEGQAQAEAKAGEGTYALDSESCMEKLAALSASLARVVVPATEEEAEVDEFPTDGEMSAQEEDRRKELEAQEKHKKLFEGLKFFLNREVPREALAFIIRSFGGEVSWDKSLCIGATYDVTDSRITHQIVDRPGQQTSVIGRCYVQPQWVFDSVNARLLLPVAEYFSGVQLPPHLSPFVTEKEGDYVPPEKLKLLALQRGEDPGNLNESEEEEEEDDNNEGDGDEEGENEEEEEDAEAGSEKEEEARLAALEEQRMEGKKPRVMAGTLKLEDKQRLAQEEESEAKRLAIMMMKKREKYLYQKIMFGKRRKIREANKLAEKRKAHDEAVRSEKKAKKARPE

SEQ ID NO: 915471 - protein, 588 aa, Homo sapiens
MGGLEKKKYERGSATNYITRNKARKKLQLSLADFRRLCILKGIYPHEPKHKKKVNKGSTAARTFYLIKDIRFLLHEPIVNKFREYKVFVRKLRKAYGKSEWNTVERLKDNKPNYKLDHIIKERYPTFIDALRDLDDALSMCFLFSTFPRTGKCHVQTIQLCRRLTVEFMHYIIAARALRKVFLSIKGIYYQAEVLGQPIVWITPYAFSHDHPTDVDYRVMATFTEFYTTLLGFVNFRLYQLLNLHYPPKLEGQAQAEAKAGEGTYALDSESCMEKLAALSASLARVVVPATEEEAEVDEFPTDGEMSAQEEDRRKELEAQEKHKKLFEGLKFFLNREVPREALAFIIRSFGGEVSWDKSLCIGATYDVTDSRITHQIVDRPGQQTSVIGRCYVQPQWVFDSVNARLLLPVAEYFSGVQLPPHLSPFVTEKEGDYVPPEKLKLLALQRGEDPGNLNESEEEEEEDDNNEGDGDEEGENEEEEEDAEAGSEKEEEARLAALEEQRMEGKKPRVMAGTLKLEDKQRLAQEEESEAKRLAIMMMKKREKYLYQKIMFGKRRKIREANKLAEKRKAHDEAVRSEKKAKKARPE

SEQ ID NO: 915472 - protein, 465 aa, Homo sapiens
MGGLEKKKYERGSATNYITRNKARKKLQLSLADFRRLCILKGIYPHEPKHKKKVNKGSTAARTFYLIKDIRFLLHEPIVNKFREYKVFVRKLRKAYGKSEWNTVERLKDNKPNYKLDHIIKERYPTFIDALRDLDDALSMCFLFSTFPRTGKCHVQTIQLCRRLTVEFMHYIIAARALRKVFLSIKGIYYQAEVLGQPIVWITPYAFSHDHPTDVDYRVMATFTEFYTTLLGFVNFRLYQLLNLHYPPKLEGQAQAEAKAGEGTYALDSESCMEKLAALSASLARVVVPATEEEAEVDEFPTDGEMSAQEEDRRKELEAQEKHKKLFEGLKFFLNREVPREALAFIIRSFGGEVSWDKSLCIGATYDVTDSRITHQIVDRPGQQTSVIGRCYVQPQWVFDSVNARLLLPVAEYFSGVQLPPHLSPFVTEKEGDYVPPEKLKLLALQRGEDPRTPVMSQKTERKTD

SEQ ID NO: 915473 - protein, 333 aa, Homo sapiens
PSPFVRSSTYALDSESCMEKLAALSASLARVVVPATEEEAEVDEFPTDGEMSAQEEDRRKELEAQEKHKKLFEGLKFFLNREVPREALAFIIRSFGGEVSWDKSLCIGATYDVTDSRITHQIVDRPGQQTSVIGRCYVQPQWVFDSVNARLLLPVAEYFSGVQLPPHLSPFVTEKEGDYVPPEKLKLLALQRGEDPGNLNESEEEEEEDDNNEGDGDEEGENEEEEEDAEAGSEKEEEARLAALEEQRMEGKKPRVMAGTLKLEDKQRLAQEEESEAKRLAIMMMKKREKYLYQKIMFGKRRKIREANKLAEKRKAHDEAVRSEKKAKKARPE

SEQ ID NO: 915474 - protein, 356 aa, Homo sapiens
MGGLEKKKYERGSATNYITRNKARKKLQLSLADFRRLCILKGIYPHEPKHKKKVNKGSTAARTFYLIKDIRFLLHEPIVNKFREYKVFVRKLRKAYGKSEWNTVERLKDNKPNYKLDHIIKERYPTFIDALRDLDDALSMCFLFSTFPRTGKCHVQTIQLCRRLTVEFMHYIIAARALRKVFLSIKGIYYQAEVLGQPIVWITPYAFSHDHPTDVDYRVMATFTEFYTTLLGFVNFRLYQLLNLHYPPKLEGQAQAEAKAGEGTYALDSESCMEKLAALSASLARVVVPATEEEAEVDEFPTDGKMSAQEEDRRKEICDMVFGIDMVWLRPHLNPILNCNSHMSRERLVGGDWIMG

SEQ ID NO: 915475 - protein, 155 aa, Homo sapiens
SYHRYALTATPSPLPSPLGNLNESEEEEEEDDNNEGDGDEEGENEEEEEDAEAGSEKEEEARLAALEEQRMEGKKPRVMAGTLKLEDKQRLAQEEESEAKRLAIMMMKKREKYLYQKIMFGKRRKIREANKLAEKRKAHDEAVRSEKKAKKARPE

SEQ ID NO: 915476 - protein, 127 aa, Homo sapiens
MSQKRRRKRTTTTKVMVMKREKMRRRRKMQRLVQKRRKRPGWQPWKKPRVMAGTLKLEDKQRLAQEEESEAKRLAIMMMKKREKYLYQKIMFGKRRKIREANKLAEKRKAHDEAVRSEKKAKKARPE

SEQ ID NO: 915477 - protein, 118 aa, Homo sapiens
MYERGSATNYITRNKARKKLQLSLADFRRLCILKGIYPHEPKHKKKVNKGSTAARTFYLIKDIRFLLLLSPASPDPSCSLAGPVGSPRFPWMELPCWCLVREEASVPSLILCSQEPVT

SEQ ID NO: 915478 - protein, 114 aa, Homo sapiens
MNQREPEAGGNSAQSHPAPREPLLSSGSRSLTTLSNRYLDNAILSRTMECGAPLHPRRHRAVPKPSAPLRPNMQRGSQSMNRHQGDYRKACISTFVLTLKVFVTIVSGKDLERV

SEQ ID NO: 915479 - protein, 588 aa, Homo sapiens; identical to SEQ ID NO: 915471

SEQ ID NO: 915480 - protein, 610 aa, Homo sapiens
  misc_feature (8)..(8): Xaa can be any naturally occurring amino acid
DGSNLGVXVAKAGWWSAPQRGAMGGLEKKKYERGSATNYITRNKARKKLQLSLADFRRLCILKGIYPHEPKHKKKVNKGSTAARTFYLIKDIRFLLHEPIVNKFREYKVFVRKLRKAYGKSEWNTVERLKDNKPNYKLDHIIKERYPTFIDALRDLDDALSMCFLFSTFPRTGKCHVQTIQLCRRLTVEFMHYIIAARALRKVFLSIKGIYYQAEVLGQPIVWITPYAFSHDHPTDVDYRVMATFTEFYTTLLGFVNFRLYQLLNLHYPPKLEGQAQAEAKAGEGTYALDSESCMEKLAALSASLARVVVPATEEEAEVDEFPTDGEMSAQEEDRRKELEAQEKHKKLFEGLKFFLNREVPREALAFIIRSFGGEVSWDKSLCIGATYDVTDSRITHQIVDRPGQQTSVIGRCYVQPQWVFDSVNARLLLPVAEYFSGVQLPPHLSPFVTEKEGDYVPPEKLKLLALQRGEDPGNLNESEEEEEEDDNNEGDGDEEGENEEEEEDAEAGSEKEEEARLAALEEQRMEGKKPRVMAGTLKLEDKQRLAQEEESEAKRLAIMMMKKREKYLYQKIMFGKRRKIREANKLAEKRKAHDEAVRSEKKAKKARPE

SEQ ID NO: 915481 - protein, 581 aa, Homo sapiens; identical to SEQ ID NO: 915470

SEQ ID NO: 915482 - protein, 588 aa, Homo sapiens; identical to SEQ ID NO: 915471

SEQ ID NO: 915483 - protein, 270 aa, Homo sapiens
NKAKYEAGCKSAEESSEPRGARGGPGFIIRSFGGEVSWDKSLCIGATYDVTDSRITHQIVDRPGQQTSVIGRCYVQPQWVFDSVNARLLLPVAEYFSGVQLPPHLSPFVTEKEGDYVPPEKLKLLALQRGEDPGNLNESEEEEEEDDNNEGDGDEEGENEEEEEDAEAGSEKEEEARLAALEEQRMEGKKPRVMAGTLKLEDKQRLAQEEESEAKRLAIMMMKKREKYLYQKIMFGKRRKIREANKLAEKRKAHDEAVRSEKKAKKARPE

SEQ ID NO: 915484 - protein, 223 aa, Homo sapiens
METSYSRITHQIVDRPGQQTSVIGRCYVQPQWVFDSVNARLLLPVAEYFSGVQLPPHLSPFVTEKEGDYVPPEKLKLLALQRGEDPGNLNESEEEEEEDDNNEGDGDEEGENEEEEEDAEAGSEKEEEARLAALEEQRMEGKKPRVMAGTLKLEDKQRLAQEEESEAKRLAIMMMKKREKYLYQKIMFGKRRKIREANKLAEKRKAHDEAVRSEKKAKKARPE

SEQ ID NO: 915485 - protein, 135 aa, Homo sapiens
MVDDGEVGGWIDGGMDEMDGWVKNEEEEEDAEAGSEKEEEARLAALEEQRMEGKKPRVMAGTLKLEDKQRLAQEEESEAKRLAIMMMKKREKYLYQKIMFGKRRKIREANKLAEKRKAHDEAVRSEKKAKKARPE

SEQ ID NO: 915486 - protein, 91 aa, Homo sapiens
  misc_feature (8)..(8): Xaa can be any naturally occurring amino acid
DGSNLGVXVAKAGWWSAPQRGAMGGLEKKKYERGSATNYITRNKARKKLQLSLADFRTPHALWLGQWAALASLGWSCPAGAWSEKRPLCPA

SEQ ID NO: 915487 - protein, 192 aa, Homo sapiens
RPPPPPQLPSRAARRGKSARRLAMARGGDTGCTGPSETSASGAAAIALPGLEGPATDAQCQTLPLTVLKSRSPSPRSLPPALSCPPPQPAMLEHLSSLPTQMDYKGQKLAEQMFQGIILFSAIVGFIYGYVAEQFGWTVYIVMAGFAFSCLLTLPPWPIYRRHPLKWLPVQESSTDDKKPGERKIKRHAKNN

SEQ ID NO: 915488 - protein, 164 aa, Homo sapiens
RPPPPPQLPSRAARRGKSARRLAMARGGDTGCTGPSETSASGAAAIALPGLEGPATDAQCQTLPLTVLKSRSPSPRSLPPALSCPPPQPAMLEHLSSLPTQMDYKGQKLAEQMFQGIILFSAIVGFIYGYVAEQFGWTVYIVMAGFAFSCLVRNLWVLVAAWVL

SEQ ID NO: 915489 - protein, 164 aa, Homo sapiens
RPPPPPQLPSRAARRGKSARRLAMARGGDTGCTGPSETSASGAAAIALPGLEGPATDAQCQTLPLTVLKSRSPSPRSLPPALSCPPPQPAMLEHLSSLPTQMVRAQPGDLCTPFLCLAASKPMLEHRPGAALFRARMVTVHPLSRIASWVPFSSTPRESPVHSP

SEQ ID NO: 915490 - protein, 164 aa, Homo sapiens; identical to SEQ ID NO: 915489

SEQ ID NO: 915491 - protein, 163 aa, Homo sapiens
RPPPPPQLPSRAARRGKSARRLAMARGGDTGCTGPSETSASGAAAIALPGLEGPATDAQCQTLPLTVLKSRSPSPRSLPPALSCPPPQPAMLEHLSSLPTQMDYKGQKLAEQMFQGIILFSALTLPPWPIYRRHPLKWLPVQESSTDDKKPGERKIKRHAKNN

SEQ ID NO: 915492 - protein, 188 aa, Homo sapiens
RPPPPPQLPSRAARRGKSARRLAMARGGDTGCTGPSETSASGAAAIALPGLEGPATDAQCQTLPLTVLKSRSPSPRSLPPALSCPPPQPAMLEHLSSLPTQMDYKGQKLAEQMFQGIILFSAIVGFIYGYVAEQFGWTVYIVMAGFAFSCLLTLPPWPIYRRHPLKWLPVQESSTDDKKPGPGPRGIL

SEQ ID NO: 915493 - protein, 192 aa, Homo sapiens; identical to SEQ ID NO: 915487

SEQ ID NO: 915494 - protein, 171 aa, Homo sapiens
RPPPPPQLPSRAARRGKSARRLAMARGGDTGCTGPSETSASGAAAIALPGLEGPATDAQCQTLPLTVLKSRSPSPRSLPPALSCPPPQPAMLEHLSSLPTQMDYKGQKLAEQMFQGIILFSAVSIGFTFNLTLPPWPIYRRHPLKWLPVQESSTDDKKPGERKIKRHAKNN

SEQ ID NO: 915495 - protein, 192 aa, Homo sapiens; identical to SEQ ID NO: 915487

SEQ ID NO: 915496 - protein, 192 aa, Homo sapiens; identical to SEQ ID NO: 915487

SEQ ID NO: 915497 - protein, 197 aa, Homo sapiens
RPPPPPQLPSRAARRGKSARRLAMARGGDTGCTGPSETSASGAAAIALPGLEGPATDAQCQTLPLTVLKSRSPSPRSLPPALSCPPPQPAMLEHLSSLPTQMDYKGQKLAEQMFQGIILFSAIVGFIYGYVAEQFGWTVYIVMAGFAFSCLLTLPPWPIYRRHPLKWLPVQESSTDDKKPGERKIKRHATKLLSYPR

SEQ ID NO: 915498 - protein, 326 aa, Homo sapiens
MATNFSDIVKQGYVKMKSRKLGIYRRCWLVFRKSSSKGPQRLEKYPDEKSVCLRGCPKVTEISNVKCVTRLPKETKRQAVAIIFTDDSARTFTCDSELEAEEWYKTLSVECLGSRLNDISLGEPDLLAPGVQCEQTDRFNVFLLPCPNLDVYGECKLQITHENIYLWDIHNPRVKLVSWPLCSLRRYGRDATRFTFEAGRMCDAGEGLYTFQTQEGEQIYQRVHSATLAIAEQHKRVLLEMEKNVRLLNKGTEHYSYPCTPTTMLPRSAYWHHITGSQNIAEASSYAGEGYGAAQASSETDLLNRFILLKPKPSQGDSSEAKTPSQ

SEQ ID NO: 915499 - protein, 326 aa, Homo sapiens; identical to SEQ ID NO: 915498

SEQ ID NO: 915500 - protein, 326 aa, Homo sapiens; identical to SEQ ID NO: 915498

SEQ ID NO: 915501 - protein, 326 aa, Homo sapiens; identical to SEQ ID NO: 915498

SEQ ID NO: 915502 - protein, 326 aa, Homo sapiens; identical to SEQ ID NO: 915498

SEQ ID NO: 915503 - protein, 326 aa, Homo sapiens; identical to SEQ ID NO: 915498

SEQ ID NO: 915504 - protein, 244 aa, Homo sapiens
HTKSKHVHVVSHNAPPHSLLWMLDQVRITCTSKLTNQCLGEPDLLAPGVQCEQTDRFNVFLLPCPNLDVYGECKLQITHENIYLWDIHNPRVKLVSWPLCSLRRYGRDATRFTFEAGRMCDAGEGLYTFQTQEGEQIYQRVHSATLAIAEQHKRVLLEMEKNVRLLNKGTEHYSYPCTPTTMLPRSAYWHHITGSQNIAEASSYAGEGYGAAQASSETDLLNRFILLKPKPSQGDSSEAKTPSQ

SEQ ID NO: 915505 - protein, 324 aa, Homo sapiens
MATNFSDIVKQGYVKMKSRKLGIYRRCWLVFRKSSSKGPQRLEKYPDEKSVCLRGCPKVTEISNVKCVTRLPKETKRQAVAIIFTDDSARTFTCDSELEAEEWYKTLSVECLGSRLNDISLGEPDLLAPGVQCEQTDRFNVFLLPCPNLDVYGECKLQITHENIYLWDIHNPRVKLVSWPLCSLRRYGRDATRFTFEAGRMCDAGEGLYTFQTQEGEQIYQRVHSATLAIAEQHKRVLLEMEKNVRLLNKGTEHYSYPCTPTTMLPRSAYWHHITGSQNIAEASSYAGEGYGAAQASSETDLLNRFILLKPKVFGEGGRAGWLS

SEQ ID NO: 915506 - protein, 326 aa, Homo sapiens; identical to SEQ ID NO: 915498

SEQ ID NO: 915507 - protein, 365 aa, Homo sapiens
MATNFSDIVKQGYVKMKSRKLGIYRRCWLVFRKSSSKGPQRLEKYPDEKSVCLRGCPKVTEISNVKCVTRLPKETKRQAVAIIFTDDSARTFTCDSELEAEEWYKTLSVECLGSRLNDISLGEPDLLAPGVQCEQTDRFNVFLLPCPNLDVYGECKLQITHENIYLWDIHNPRVKLVSWPLCSLRRYGRDATRFTFEAGRMCDAGEGLYTFQTQEGEQIYQRVHSATLAIAEQHKRVLLEMEKNVRLLNKGTEHYSYPCTPTTMLPRSAYWHHITGSQNIAEASSYAGESLPCPTPTCQEALWRMRPIGQGSFDLALSSEPASVPTGEGYGAAQASSETDLLNRFILLKPKPSQGDSSEAKTPSQ

SEQ ID NO: 915508 - protein, 326 aa, Homo sapiens; identical to SEQ ID NO: 915498

SEQ ID NO: 915509 - protein, 326 aa, Homo sapiens
MISARLSESCLYSSARPPCQRQIYRRCWLVFRKSSSKGPQRLEKYPDEKSVCLRGCPKVTEISNVKCVTRLPKETKRQAVAIIFTDDSARTFTCDSELEAEEWYKTLSVECLGSRLNDISLGEPDLLAPGVQCEQTDRFNVFLLPCPNLDVYGECKLQITHENIYLWDIHNPRVKLVSWPLCSLRRYGRDATRFTFEAGRMCDAGEGLYTFQTQEGEQIYQRVHSATLAIAEQHKRVLLEMEKNVRLLNKGTEHYSYPCTPTTMLPRSAYWHHITGSQNIAEASSYAGEGYGAAQASSETDLLNRFILLKPKPSQGDSSEAKTPSQ

SEQ ID NO: 915510 - protein, 126 aa, Homo sapiens
MCDAGEGLYTFQTQEGEQIYQRVHSATLAIAEQHKRVLLEMEKNVRLLNKGTEHYSYPCTPTTMLPRSAYWHHITGSQNIAEASSYAGEGYGAAQASSETDLLNRFILLKPKPSQGDSSEAKTPSQ

SEQ ID NO: 915511 - protein, 145 aa, Homo sapiens
VPAPAAASARMSPPASGSGLSEITGGLDPDPVPGQRPPRPAPPRELRAPGWPCSDRLAPPHTTRLPLLPPGMRRELRTVPSPKGASSFSPRIGREERGPPRGSQDAELQSPGPAPSPSSASLQRLPTAGLSPSGRSSLTPQLHLY

SEQ ID NO: 915512 - protein, 210 aa, Homo sapiens
MAASVEQREGTIQVQGQALFFREALPGSGQARFSVLLLHGIRFSSETWQNLGTLHRLAQAGYRAVAIDLPGLGHSKEAAAPAPIGELAPGSFLAAVVDALELGPPVVISPSLSGMYSLPFLTAPGSQLPGFVPVAPICTDKINAANYASVKTPALIVYGDQDPMGQTSFEHLKQLPNHRVLIMKGAGHPCYLDKPEEWHTGLLDFLQGLQ

SEQ ID NO: 915513 - protein, 242 aa, Homo sapiens
GTVRVLGEHAPASRLRESTQLPRPFTSTAAAGMAASVEQREGTIQVQGQALFFREALPGSGQARFSVLLLHGIRFSSETWQNLGTLHRLAQAGYRAVAIDLPGLGHSKEAAAPAPIGELAPGSFLAAVVDALELGPPVVISPSLSGMYSLPFLTAPGSQLPGFVPVAPICTDKINAANYASVKTPALIVYGDQDPMGQTSFEHLKQLPNHRVLIMKGAGHPCYLDKPEEWHTGLLDFLQGLQ

SEQ ID NO: 915514 - protein, 242 aa, Homo sapiens
MYKCDTGCNFSDEGVVSHCYQGAFIEQQYAAGMAASVEQREGTIQVQGQALFFREALPGSGQARFSVLLLHGIRFSSETWQNLGTLHRLAQAGYRAVAIDLPGLGHSKEAAAPAPIGELAPGSFLAAVVDALELGPPVVISPSLSGMYSLPFLTAPGSQLPGFVPVAPICTDKINAANYASVKTPALIVYGDQDPMGQTSFEHLKQLPNHRVLIMKGAGHPCYLDKPEEWHTGLLDFLQGLQ

SEQ ID NO: 915515 - protein, 168 aa, Homo sapiens
TRGSTHASRTRGSSTRLLPVCASPRSSPGLGHSKEAAAPAPIGELAPGSFLAAVVDALELGPPVVISPSLSGMYSLPFLTAPGSQLPGFVPVAPICTDKINAANYASVKTPALIVYGDQDPMGQTSFEHLKQLPNHRVLIMKGAGHPCYLDKPEEWHTGLLDFLQGLQ

SEQ ID NO: 915516 - protein, 274 aa, Homo sapiens
MDAASLWPQEGAPEHGQSPPPLDGARPLPSVPPPAPGHRQHAPASRLRESTQLPRPFTSTAAAGMAASVEQREGTIQVQGQALFFREALPGSGQARFSVLLLHGIRFSSETWQNLGTLHRLAQAGYRAVAIDLPGLGHSKEAAAPAPIGELAPGSFLAAVVDALELGPPVVISPSLSGMYSLPFLTAPGSQLPGFVPVAPICTDKINAANYASVKTPALIVYGDQDPMGQTSFEHLKQLPNHRVLIMKGAGHPCYLDKPEEWHTGLLDFLQGLQ

SEQ ID NO: 915517 - protein, 235 aa, Homo sapiens
  misc_feature (31)..(31): Xaa can be any naturally occurring amino acid
  misc_feature (35)..(35): Xaa can be any naturally occurring amino acid
  misc_feature (77)..(77): Xaa can be any naturally occurring amino acid
  misc_feature (98)..(98): Xaa can be any naturally occurring amino acid
  misc_feature (102)..(102): Xaa can be any naturally occurring amino acid
  misc_feature (122)..(122): Xaa can be any naturally occurring amino acid
  misc_feature (148)..(148): Xaa can be any naturally occurring amino acid
  misc_feature (155)..(155): Xaa can be any naturally occurring amino acid
HHPPPSPLPHSTHLPTPFTTTPPPPIPPTLXHPTXTIHLHPHPLFFPHPLPPTPHPPFSLLLLHPIPFSSHTSHNLXTLHTLPHPPYPPFPIHLPPLXHSNXPPPPPPIPHLPPPTFLPPLXHPFHLPPPLFITPSLTPIYSLPFLTXPRSHLPXFLPLAPISTHKINPANYPTLNTPALIVYGDQDPMGQTSFEHLKQLPNHRVLIMKGAGHPCYLDKPEEWHTGLLDFLQGLQ

SEQ ID NO: 915518 - protein, 274 aa, Homo sapiens; identical to SEQ ID NO: 915516

SEQ ID NO: 915519 - protein, 274 aa, Homo sapiens; identical to SEQ ID NO: 915516

SEQ ID NO: 915520 - protein, 274 aa, Homo sapiens; identical to SEQ ID NO: 915516

SEQ ID NO: 915521 - protein, 274 aa, Homo sapiens; identical to SEQ ID NO: 915516

SEQ ID NO: 915522 - protein, 153 aa, Homo sapiens
VRSEFWDSTRLLPVCASPRSSPAPAPIGELAPGSFLAAVVDALELGPPVVISPSLSGMYSLPFLTAPGSQLPGFVPVAPICTDKINAANYASVKTPALIVYGDQDPMGQTSFEHLKQLPNHRVLIMKGAGHPCYLDKPEEWHTGLLDFLQGLQ

SEQ ID NO: 915523 - protein, 274 aa, Homo sapiens; identical to SEQ ID NO: 915516

SEQ ID NO: 915524 - protein, 256 aa, Homo sapiens
MDAASLWPQEGAPEHGQSPPPLDGARPLPSVPPPAPGHRQHAPASRLRESTQLPRPFTSTAAAGMAASVEQREGTIQVQGQALFFREALPGSGQARFSVLLLHGIRFSSETWQNLGTLHRLAQAGYRAVAIDLPGLGHSKEAAAPAPIGELAPGSFLAAVVDALELGPPVVISPSLSGMYSLPFLTAPGSQLPGFVPVAPICTDGDQDPMGQTSFEHLKQLPNHRVLIMKGAGHPCYLDKPEEWHTGLLDFLQGLQ

SEQ ID NO: 915525 - protein, 69 aa, Homo sapiens
LQPGQQELKLCLRKKKSRDASRAFVTGDCSEAGLVDDVSDLSAAEMLTLHNWLSFYEKNYVCVGKSSIG

SEQ ID NO: 915526 - protein, 264 aa, Homo sapiens
MLRCGGRGLLLGLAVAAAAVMAARLMGWWGPRAGFRLFIPEELSRYRGGPGDPGLYLALLGRVYDVSSGRRHYEPGSHYSGFAGRDASRAFVTGDCSEAGLVDDVSDLSAAEMLTLHNWLSFYEKNYVCVGRVTGRFYGEDGLPTPALTQVEAAITRGLEANKLQLQEKQTFPPCNAEWSSARGSRLWCSQKSGGVSRDWIGVPRKLYKPGAKEPRCVCVRTTGPPSGQMPDNPPHRNRGDLDHPNLAEYTGCPPLAITCSFPL

SEQ ID NO: 915527 - protein, 152 aa, Homo sapiens
MLTLHNWLSFYEKNYVCVGRVTGRFYGEDGLPTPALTQVEAAITRGLEANKLQLQEKQTFPPCNAEWSSARGSRLWCSQKSGGVSRDWIGVPRKLYKPGAKEPRCVCVRTTGPPSGQMPDNPPHRNRGDLDHPNLAEYTGCPPLAITCSFPL

SEQ ID NO: 915528 - protein, 150 aa, Homo sapiens
MTDFLEEHQYHFTIETGRVTGRFYGEDGLPTPALTQVEAAITRGLEANKLQLQEKQTFPPCNAEWSSARGSRLWCSQKSGGVSRDWIGVPRKLYKPGAKEPRCVCVRTTGPPSGQMPDNPPHRNRGDLDHPNLAEYTGCPPLAITCSFPL

SEQ ID NO: 915529 - protein, 264 aa, Homo sapiens; identical to SEQ ID NO: 915526

SEQ ID NO: 915530 - protein, 264 aa, Homo sapiens; identical to SEQ ID NO: 915526

SEQ ID NO: 915531 - protein, 264 aa, Homo sapiens; identical to SEQ ID NO: 915526

SEQ ID NO: 915532 - protein, 201 aa, Homo sapiens
MLRCGGRGLLLGLAVAAAAVMAARLMGWWGPRAGFRLFIPEELSRYRGGPGDPGLYLALLGRVYDVSSGRRHYEPGSHYSGFAGRDASRAFVTGDCSEAGLVDDVSDLSAAEMLTLHNWLSFYEKNYVCVGRVTGRFYGEDGLPTPALTQVEAAITRGLEANKLQLQEKQTFPPCNAEWSSARGSRLWCSQKRWRERLPPT

SEQ ID NO: 915533 - protein, 191 aa, Homo sapiens
MLRCGGRGLLLGLAVAAAAVMAARLMGWWGPRAGFRLFIPEELSRYRGGPGDPGLYLALLGRVYDVSSGRRHYEPGSHYSGFAGRDASRAFVTGDCSEAGLVDDVSDLSAAEMLTPGRSCDHQRLGGQQTTAAREADIPAVQRGVELSQGQPALVLPEEVSRLPFFSFLPVPNPTPRPSCLQYSVNSGIDC

SEQ ID NO: 915534 - protein, 264 aa, Homo sapiens; identical to SEQ ID NO: 915526

SEQ ID NO: 915535 - protein, 152 aa, Homo sapiens; identical to SEQ ID NO: 915527

SEQ ID NO: 915536 - protein, 144 aa, Homo sapiens
DLHYQHNLGVLSLCCPSRMTGVSCFCHYTSHPLHHLLCSYKDPKKWNNRIADLRKQIEELSERKYVMSKLEKSCNLMFMGFYTMELLFIMGVPWTSPELPASHAILTRFSLEDGKLMNLAAADLGPDQSGVTATTLGAAESREH

SEQ ID NO: 915537 - protein, 251 aa, Homo sapiens
MLLPPGSLSRPRTFSSQPLQTKLMTHNGLFRPIPYVTAVSADEPTAPQQPPQAQLHRYNGLFRPSSCLPAFSPGPELSQVDLTRPSSCFFAASPGPAPASWWPLQAQPLPPVGLYSPNICLTADSSRPASASQWTLQTQMVSHCGILSRSSCLSAASPGPAPPASQWPLSAQPSSCLPAAFPSPAFDFWWPLQASTRPSLLPPEGLHRPSLCLTADSPRPASSRLTAASPVQSSCLSATSAGPATACQWPL

SEQ ID NO: 915538 - protein, 149 aa, Homo sapiens [sequence omitted]

SEQ ID NO: 915539 - protein, 251 aa, Homo sapiens; identical to SEQ ID NO: 915537

SEQ ID NO: 915540 - protein, 251 aa, Homo sapiens; identical to SEQ ID NO: 915537

SEQ ID NO: 915541 - protein, 251 aa, Homo sapiens; identical to SEQ ID NO: 915537

SEQ ID NO: 915542 - protein, 251 aa, Homo sapiens; identical to SEQ ID NO: 915537

SEQ ID NO: 915543 - protein, 149 aa, Homo sapiens [sequence omitted]

SEQ ID NO: 915544 - protein, 157 aa, Homo sapiens
MLLPPGSLSRPRTFSSQPLQTKLMTHNGLFRPIPYVTAVSADEPTAPQQPPQAQLHRYNGLFRPSSCLPAFSPGPELSQVDLTRPSSCFFAASPGPAPASWWPLQAQPLPPVGLYSPNICLTADSSRPASASLWTPQAKLPTFQQLLHTQLLPPSGL

SEQ ID NO: 915545 - protein, 149 aa, Homo sapiens [sequence omitted]

SEQ ID NO: 915546 - protein, 251 aa, Homo sapiens; identical to SEQ ID NO: 915537

SEQ ID NO: 915547 - protein, 251 aa, Homo sapiens; identical to SEQ ID NO: 915537

SEQ ID NO: 915548 - protein, 149 aa, Homo sapiens [sequence omitted]

SEQ ID NO: 915549 - protein, 149 aa, Homo sapiens [sequence omitted]

SEQ ID NO: 915550 - protein, 251 aa, Homo sapiens; identical to SEQ ID NO: 915537

SEQ ID NO: 915551 - protein, 149 aa, Homo sapiens [sequence omitted]

SEQ ID NO: 915552 - protein, 149 aa, Homo sapiens [sequence omitted]

SEQ ID NO: 915553 - protein, 62 aa, Homo sapiens
MTVKLPQPYGIVSSIKLLFFVNSKALPLHLQRVPKYFLEGGAPYPNSPFGGVVLTIPWPAVL

SEQ ID NO: 915554 - protein, 186 aa, Homo sapiens
MTVGPFPGLVPASWLTLEAQNFLKSAFCPTSVYCRTLQARPLPHSGPSRPRWCLTVASSVEAPAFRQPLQAQLLLPPSGLFRPSPAHASRRPSQAPLLTFGGLCRPRQGPASCLPKACTGPASASQRTLHAQLALASLRPPQSKAPAFRPLRQVQLLPASGLFRPSSFLTTAFPGPVFPFWQPLGF

SEQ ID NO: 915555 - protein, 149 aa, Homo sapiens [sequence omitted]

SEQ ID NO: 915556 - protein, 149 aa, Homo sapiens [sequence omitted]

SEQ ID NO: 915557 - protein, 149 aa, Homo sapiens [sequence omitted]

SEQ ID NO: 915558 - protein, 149 aa, Homo sapiens [sequence omitted]

SEQ ID NO: 915559 - protein, 608 aa, Homo sapiens
MGPKKSWRSHFFPLPEVWLLLLLSQALSPSHGPQTQAGVGLVWSVPLPSALRSQSCLGAPLRDASELTTVHLFPTRGWGARRALWVHSSASASSAASRRRLRAQASGISSFSLVDGGAPREDGGARGVWLPSSGQVSAQRTGRRLVGLEPTPTGSLTPRPPRPVPGMPRARKGNTLRKGGQRRGGGARSSAQADSGSSDDEAASEARSTASECPSLLSTTAEDSLGGDVVDEQGQQEDLEEKLKEYVDCLTDKSAKTRQGALESLRLALASRLLPDFLLERRLTLADALEKCLKKGKGEEQALAAAVLGLLCVQLGPGPKGEELFHSLQPLLVSVLSDSTASPAARLHCASALGLGCYVAAADIQDLVSCLACLESVFSRFYGLGGSSTSPVVPASLHGLLSAALQAWALLLTICPSTQISHILDRQLPRLPQLLSSESVNLRIAAGETIALLFELARDLEEEFVYEDMEALCSVLRTLATDSNKYRAKADRRRQRSTFRAVLHSVEGGECEEEIVRFGFEVLYMDSWARHRIYAAFKEVLGSGMHHHLQNNELLRDIFGLGPVLLLDATALKACKVPRFEKHLYNAAAFKARTKARSRVRDKRADIL

SEQ ID NO: 915560 - protein, 642 aa, Homo sapiens
MGPKKSWRSHFFPLPEVWLLLLLSQALSPSHGPQTQAGVGLVWSVPLPSALRSQSCLGAPLRDASELTTVHLFPTRGWGARRALWVHSSASASSAGGPQALDYHSHGALRAASRRRLRAQASGISSFSLVDVGLNRMAWNSPSRRPVWQGGAPREDGGARGVWLPSSGQVSAQRTGRRLVGLEPTPTGSLTPRPPRPVPGMPRARKGNTLRKGGQRRGGGARSSAQADSGSSDDEAASEARSTASECPSLLSTTAEDSLGGDVVDEQGQQEDLEEKLKEYVDCLTDKSAKTRQGALESLRLALASRLLPDFLLERRLTLADALEKCLKKGKGEEQALAAAVLGLLCVQLGPGPKGEELFHSLQPLLVSVLSDSTASPAARLHCASALGLGCYVAAADIQDLVSCLACLESVFSRFYGLGGSSTSPVVPASLHGLLSAALQAWALLLTICPSTQISHILDRQLPRLPQLLSSESVNLRIAAGETIALLFELARDLEEEFVYEDMEALCSVLRTLATDSNKYRAKADRRRQRSTFRAVLHSVEGGECEEEIVRFGFEVLYMDSWARHRIYAAFKEVLGSGMHHHLQNNELLRDIFGLGPVLLLDATALKACKVPRFEKHLYNAAAFKARTKARSRVRDKRADIL

SEQ ID NO: 915561 - protein, 642 aa, Homo sapiens; identical to SEQ ID NO: 915560

SEQ ID NO: 915562 - protein, 748 aa, Homo sapiens
MGPKKSWRSHFFPLPEVWLLLLLSQALSPSHGPQTQAGVGLVWSVPLPSALRSQSCLGAPLRDASELTTVHLFPTRGWGARRALWVHSSASASSAGGPQALDYHSHGALRAASRRRLRAQASGISSFSLVDVGLNRMAWNSPSRRPVWQGGAPREDGGARGVWLPSSGQVSAQRTGRRLVGLEPTPTGSLTPRPPRPVPGMPRARKGNTLRKGGQRRGGGARSSAQADSGSSDDEAASEARSTASECPSLLSTTAEDSLGGDVVDEQGQQEDLEEKLKEYVDCLTDKSAKTRQGALESLRLALASRLLPDFLLERRLTLADALEKCLKKGKGEEQALAAAVLGLLCVQLGPGPKGEELFHSLQPLLVSVLSDSTASPAARLHCASALGLGCYVAAADIQDLVSCLACLESVFSRFYGLGGSSTSPVVPASLHGLLSAALQAWALLLTICPSTQISHILDRQLPRLPQLLSSESVNLRIAAGETIALLFELARDLEVRGTRMGGAVVTPPAHHRLDAGGATQNRTALGHYAEEVAPKQIYLLDVMMGALSSGVLACQRPRRGQRGQAEKRGSLSERRGLGSALFRASRAQASTTHPPMLPLQEEFVYEDMEALCSVLRTLATDSNKYRAKADRRRQRSTFRAVLHSVEGGECEEEIVRFGFEVLYMDSWARHRIYAAFKEVLGSGMHHHLQNNELLRDIFGLGPVLLLDATALKACKVPRFEKHLYNAAAFKARTKARSRVRDKRADIL

SEQ ID NO: 915563 - protein, 642 aa, Homo sapiens; identical to SEQ ID NO: 915560

SEQ ID NO: 915564 - protein, 637 aa, Homo sapiens
MGPKKSWRSHFFPLPEVWLLLLLSQALSPSHGPQTQAGVGLVWSVPLPSALRSQSCLGAPLRDASELTTVHLFPTRGWGARRALWVHSSASASSAGGPQALDYHSHGALRAASRRRLRAQASGISSFSLVDVGLNRMAWNSPSRRPVWQGGAPREDGGARGVWLPSSGQVSAQRTGRRLVGLEPTPTGSLTPRPPRPVPGMPRARKGNTLRKGGQRRGGGARSSAQADSGSSDDEAASEARSTASECPSLLSTTAEDSLGGDVVDEQGQQEDLEEKLKEYVDCLTDKSAKTRQGALESLRLALASRLLPDFLLERRLTLADALEKCLKKGKGEEQALAAAVLGLLCVQLGPGPKGEELFHSLQPLLVSVLSDSTASPAARLHCASALGLGCYVAAADIQDLVSCLACLESVFSRFYGLGGSSTSPVVPASLHGLLSAALQAWALLLTICPSTQISHILDRQLPRLPQLLSSESVNLRIAAGETIALLFELARDLEEEFVYEDMEALCSVLRTLATDSNKYRAKADRRRQRSTFRAVLHSVEGGECEEEIVRFGFEVLYMDSWARHRIYAAFKEVLGSGMHHHLQNNELLRDIFGLGPVLLLDATALKACKVPRFEKVCTLGHLSLPPIPISWRPGIL

SEQ ID NO: 915565 - protein, 642 aa, Homo sapiens; identical to SEQ ID NO: 915560

SEQ ID NO: 915566 - protein, 637 aa, Homo sapiens; identical to SEQ ID NO: 915564

SEQ ID NO: 915567 - protein, 670 aa, Homo sapiens
MGPKKSWRSHFFPLPEVWLLLLLSQALSPSHGPQTQAGVGLVWSVPLPSALRSQSCLGAPLRDASELTTVHLFPTRGWGARRALWVHSSASASSAGGPQALDYHSHGALRAASRRRLRAQASGISSFSLVDVGLNRMAWNSPSRRPVWQGGAPREDGGARGVWLPSSGQVSAQRTGRRLVGLEPTPTGSLTPRPPRPVPGMPRARKGNTLRKGGQRRGGGARSSAQADSGSSDDEAASEARSTASECPSLLSTTAEDSLGGDVVDEQGQQEDLEEKLKEYVDCLTDKSAKTRQGALESLRLALASRLLPDFLLERRLTLADALEKCLKKGKGEEQALAAAVLGLLCVQLGPGPKGEELFHSLQPLLVSVLSDSTASPAARLHCASALGLGCYVAAADIQVRGLWAQVVEHLRAVTLPLSSPASLCSYDLVSCLACLESVFSRFYGLGGSSTSPVVPASLHGLLSAALQAWALLLTICPSTQISHILDRQLPRLPQLLSSESVNLRIAAGETIALLFELARDLEEEFVYEDMEALCSVLRTLATDSNKYRAKADRRRQRSTFRAVLHSVEGGECEEEIVRFGFEVLYMDSWARHRIYAAFKEVLGSGMHHHLQNNELLRDIFGLGPVLLLDATALKACKVPRFEKHLYNAAAFKARTKARSRVRDKRADIL

SEQ ID NO: 915568 - protein, 743 aa, Homo sapiens
MGPKKSWRSHFFPLPEVWLLLLLSQALSPSHGPQTQAGVGLVWSVPLPSALRSQSCLGAPLRDASELTTVHLFPTRGWGARRALWVHSSASASSAGGPQALDYHSHGALRAASRRRLRAQASGISSFSLVDVGLNRMAWNSPSRRPVWQGGAPREDGGARGVWLPSSGQVSAQRTGRRLVGLEPTPTGSLTPRPPRPVPGMPRARKGNTLRKGGQRRGGGARSSAQADSGSSDDEAASEARSTASECPSLLSTTAEDSLGGDVVDEQGQQEDLEEKLKEYVDCLTDKSAKTRQGALESLRLALASRLLPDFLLERRLTLADALEKCLKKGKGEEQALAAAVLGLLCVQLGPGPKGEELFHSLQPLLVSVLSDSTASPAARLHCASALGLGCYVAAADIQDLVSCLACLESVFSRFYGLGGSSTSPVVPASLHGLLSAALQAWALLLTICPSTQISHILDRQLPRLPQLLSSESVNLRIAAGETIALLFELARDLEVRGTRMGGAVVTPPAHHRLDAGGATQNRTALGHYAEEVAPKQIYLLDVMMGALSSGVLACQRPRRGQRGQAEKRGSLSERRGLGSALFRASRAQASTTHPPMLPLQEEFVYEDMEALCSVLRTLATDSNKYRAKADRRRQRSTFRAVLHSVEGGECEEEIVRFGFEVLYMDSWARHRIYAAFKEVLGSGMHHHLQNNELLRDIFGLGPVLLLDATALKACKVPRFEKVCTLGHLSLPPIPISWRPGIL

SEQ ID NO: 915569 - protein, 604 aa, Homo sapiens
MGPKKSWRSHFFPLPEVWLLLLLSQALSPSHGPQTQAGVGLVWSVPLPSALRSQSCLGAPLRDASELTTVHLFPTRGWGARRALWVHSSASASSAGGPQALDYHSHGALRAASRRRLRAQASGISSFSLVDVGLNRMAWNSPSRRPVWQGGAPREDGGARGVWLPSSGQVSAQRTGRRLVGLEPTPTGSLTPRPPRPVPGMPRARKGNTLRKGGQRRGGGARSSAQADSGSSDDEAASEARSTASECPSLLSTTAEDSLGGDVVDEQGQQEDLEEKLKEYVDCLTDKSAKTRQGALESLRLALASRLLPDFLLERRLTLADALEKCLKKGKGEEQALAAAVLGLLCVQLGPGPKGEELFHSLQPLLVSVLSDSTASPAARLHCASALGLGCYVAAADIQDLVSCLACLESVFSRFYGLGGSSTSPVVPASLHGLLSAALQAWALLLTICPSTQISHILDRQLPRLPQLLSSESVNLRIAAGETIALLFELARDLEEEFVYEDMEALCSVLRTLATDSNKYRAKADRRRQRSTFRAVLHSVEGGECEEEIVRFGFEVLYMDSWARHRIYAAFKEVLGSGMHHHLQTMSYSLHLCLACLFSYYYTT

SEQ ID NO: 915570 - protein, 697 aa, Homo sapiens
MGPKKSWRSHFFPLPEVWLLLLLSQALSPSHGPQTQAGVGLVWSVPLPSALRSQSCLGAPLRDASELTTVHLFPTRGWGARRALWVHSSASASSAGGPQALDYHSHGALRAASRRRLRAQASGISSFSLVDVGLNRMAWNSPSRRPVWQGGAPREDGGARGVWLPSSGQVSAQRTGRRLVGLEPTPTGSLTPRPPRPVPGMPRARKGNTLRKGGQRRGGGARSSAQADSGSSDDEAASEARSTASECPSLLSTTAEDSLGGDVVDEQGQQEDLEEKLKEYVDCLTDKSAKTRQGALESLRLALASRLLPDFLLERRLTLADALEKCLKKGKGEEQALAAAVLGLLCVQLGPGPKGEELFHSLQPLLVSVLSDSTASPAARLHVSCLCPMKPFLHLIPQQSGGFPLSSASFTLRGVSSRAGNPGSPADRGIALPFSQQCASALGLGCYVAAADIQDLVSCLACLESVFSRFYGLGGSSTSPVVPASLHGLLSAALQAWALLLTICPSTQISHILDRQLPRLPQLLSSESVNLRIAAGETIALLFELARDLEEEFVYEDMEALCSVLRTLATDSNKYRAKADRRRQRSTFRAVLHSVEGGECEEEIVRFGFEVLYMDSWARHRIYAAFKEVLGSGMHHHLQNNELLRDIFGLGPVLLLDATALKACKVPRFEKHLYNAAAFKARTKARSRVRDKRADIL

SEQ ID NO: 915571 - protein, 435 aa, Homo sapiens
MGLGSLAGLTPQGARSSAQADSGSSDDEAASEARSTASECPSLLSTTAEDSLGGDVVDEQGQQEDLEEKLKEYVDCLTDKSAKTRQGALESLRLALASRLLPDFLLERRLTLADALEKCLKKGKGEEQALAAAVLGLLCVQLGPGPKGEELFHSLQPLLVSVLSDSTASPAARLHCASALGLGCYVAAADIQDLVSCLACLESVFSRFYGLGGSSTSPVVPASLHGLLSAALQAWALLLTICPSTQISHILDRQLPRLPQLLSSESVNLRIAAGETIALLFELARDLEEEFVYEDMEALCSVLRTLATDSNKYRAKADRRRQRSTFRAVLHSVEGGECEEEIVRFGFEVLYMDSWARHRIYAAFKEVLGSGMHHHLQNNELLRDIFGLGPVLLLDATALKACKVPRFEKHLYNAAAFKARTKARSRVRDKRADIL

SEQ ID NO: 915572 - protein, 368 aa, Homo sapiens
MPQPSQHHCRGQPCAKTRQGALESLRLALASRLLPDFLLERRLTLADALEKCLKKGKGEEQALAAAVLGLLCVQLGPGPKGEELFHSLQPLLVSVLSDSTASPAARLHCASALGLGCYVAAADIQDLVSCLACLESVFSRFYGLGGSSTSPVVPASLHGLLSAALQAWALLLTICPSTQISHILDRQLPRLPQLLSSESVNLRIAAGETIALLFELARDLEEEFVYEDMEALCSVLRTLATDSNKYRAKADRRRQRSTFRAVLHSVEGGECEEEIVRFGFEVLYMDSWARHRIYAAFKEVLGSGMHHHLQNNELLRDIFGLGPVLLLDATALKACKVPRFEKHLYNAAAFKARTKARSRVRDKRADIL

SEQ ID NO: 915573 - protein, 702 aa, Homo sapiens
MGPKKSWRSHFFPLPEVWLLLLLSQALSPSHGPQTQAGVGLVWSVPLPSALRSQSCLGAPLRDASELTTVHLFPTRGWGARRALWVHSSASASSAGGPQALDYHSHGALRAASRRRLRAQASGISSFSLVDVGLNRMAWNSPSRRPVWQGGAPREDGGARGVWLPSSGQVSAQRTGRRLVGLEPTPTGSLTPRPPRPVPGMPRARKGNTLRKGGQRRGGGARSSAQADSGSSDDEAASEARSTASECPSLLSTTAEDSLGESGWKFDRGLVRAPWAEDKKRCCPGGLAGGDVVDEQGQQEDLEEKLKEYVDCLTDKRYPWLPANSYTQLQAVIKGGLAHMTPLLDSPSAKTRQGALESLRLALASRLLPDFLLERRLTLADALEKCLKKGKGEEQALAAAVLGLLCVQLGPGPKGEELFHSLQPLLVSVLSDSTASPAARLHCASALGLGCYVAAADIQDLVSCLACLESVFSRFYGLGGSSTSPVVPASLHGLLSAALQAWALLLTICPSTQISHILDRQLPRLPQLLSSESVNLRIAAGETIALLFELARDLEEEFVYEDMEALCSVLRTLATDSNKYRAKADRRRQRSTFRAVLHSVEGGECEEEIVRFGFEVLYMDSWARHRIYAAFKEVLGSGMHHHLQNNELLRDIFGLGPVLLLDATALKACKVPRFEKHLYNAAAFKARTKARSRVRDKRADIL

SEQ ID NO: 915574 - protein, 803 aa, Homo sapiens
MGPKKSWRSHFFPLPEVWLLLLLSQALSPSHGPQTQAGVGLVWSVPLPSALRSQSCLGAPLRDASELTTVHLFPTRGWGARRALWVHSSASASSAGGPQALDYHSHGALRAASRRRLRAQASGISSFSLVDVGLNRMAWNSPSRRPVWQGGAPREDGGARGVWLPSSGQVSAQRTGRRLVGLEPTPTGSLTPRPPRPVPGMPRARKGNTLRKGGQRRGGGARSSAQADSGSSDDEAASEARSTASECPSLLSTTAEDSLGGDVVDEQGQQEDLEEKLKEYVDCLTDKSAKTRQGALESLRLALASRLLPDFLLERRLTLADALEKCLKKGKGEEQALAAAVLGLLCVQLGPGPKGEELFHSLQPLLVSVLSDSTASPAARLHVSCLCPMKPFLHLIPQQSGGFPLSSASFTLRGVSSRAGNPGSPADRGIALPFSQQCASALGLGCYVAAADIQDLVSCLACLESVFSRFYGLGGSSTSPVVPASLHGLLSAALQAWALLLTICPSTQISHILDRQLPRLPQLLSSESVNLRIAAGETIALLFELARDLEVRGTRMGGAVVTPPAHHRLDAGGATQNRTALGHYAEEVAPKQIYLLDVMMGALSSGVLACQRPRRGQRGQAEKRGSLSERRGLGSALFRASRAQASTTHPPMLPLQEEFVYEDMEALCSVLRTLATDSNKYRAKADRRRQRSTFRAVLHSVEGGECEEEIVRFGFEVLYMDSWARHRIYAAFKEVLGSGMHHHLQNNELLRDIFGLGPVLLLDATALKACKVPRFEKHLYNAAAFKARTKARSRVRDKRADIL

SEQ ID NO: 915575 - protein, 140 aa, Homo sapiens
MEALCSVLRTLATDSNKYRAKADRRRQRSTFRAVLHSVEGGECEEEIVRFGFEVLYMDSWARHRIYAAFKEVLGSGMHHHLQNNELLRDIFGLGPVLLLDATALKACKVPRFEKHLYNAAAFKARTKARSRVRDKRADIL

SEQ ID NO: 915576 - protein, 410 aa, Homo sapiens
MGPKKSWRSHFFPLPEVWLLLLLSQALSPSHGPQTQAGVGLVWSVPLPSALRSQSCLGAPLRDASELTTVHLFPTRGWGARRALWVHSSASASSAGGPQALDYHSHGALRAASRRRLRAQASGISSFSLVDVGLNRMAWNSPSRRPVWQGGAPREDGGARGVWLPSSGQVSAQRTGRRLVGLEPTPTGSLTPRPPRPVPGMPRARKGNTLRKGGQRRGGGARSSAQADSGSSDDEAASEARSTASECPSLLSTTAEDSLGGDVVDEQGQQEDLEEKLKEYVDCLTDKSAKTRQGALESLRLALASRLLPDFLLERRLTLADALEKCLKKGKGEEQALAAAVLGLLCVQLGPGPKGEELFHSLQPLLVSVLSDSTASPAARLHCASALGLGCYVAAADIQAAAPAAPALVQ

SEQ ID NO: 915577 - protein, 408 aa, Homo sapiens
MGPKKSWRSHFFPLPEVWLLLLLSQALSPSHGPQTQAGVGLVWSVPLPSALRSQSCLGAPLRDASELTTVHLFPTRGWGARRALWVHSSASASSAGGPQALDYHSHGALRAASRRRLRAQASGISSFSLVDVGLNRMAWNSPSRRPVWQGGAPREDGGARGVWLPSSGQVSAQRTGRRLVGLEPTPTGSLTPRPPRPVPGMPRARKGNTLRKGGQRRGGGARSSAQADSGSSDDEAASEARSTASECPSLLSTTAEDSLGGDVVDEQGQQEDLEEKLKEYVDCLTDKSAKTRQGALESLRLALASRLLPDFLLERRLTLADALEKCLKKGKGEEQALAAAVLGLLCVQLGPGPKGEELFHSLQPLLVSVLSDSTASPAARLHCASAWLAVRGALTSGLFLLLLEGSAG

SEQ ID NO: 915578 - protein, 601 aa, Homo sapiens
MTTNTQGKGYVKLIIAPLKMSYAVSWSERHGNNQAIFRHLHYLGTALHSTMMSAVQLLGTIKDYPYTAMLIHLNAKIYYEFFIVLKVYVNYFSKLLWSHVYSSCICDMQKDEDSWPPGVYILMVLLVQADCFSLLMNIAWLLIISYLEGSLGEQFLKAEGCAKFQGIDSLSLHCISPARYHFFPQGAMQVMLISMNQKRNHSALEHLNHPPKPPMLSCYSCQSITKKINSSLRLYIPQFSFFSQSLYIILYSDGPGFAYKPFKTDYVVLILTFLCMTPIPFLKQHCDRCGASTCISKQIINPTFELKLAWILVMSRNSSESRNLFCMLIKLKLGLIESASNSDRTLTLVLEYEHSNAGLKMSSVVVTSYFIYAFVNNEAIETKTNSLNIFRLFSCFNKGFFLLPLKMGSEKINRGNHKTFKLSGLGRSSAHPLTTCLVPLVPKHVENKRHKLSMLNKTSCYGCNNQKGAEFQKEYESRECQYGVCKITRYGYGVVYDMLYVDKVGGLLKLGFELKRVRMHIFPLFQDFQMTRHMLWMILVPTTNDQTIKYPCNKGDFLFVNSPENTDRSVVSLLFYCIKNSLNKFYSQSFILDGFGQTAIS

SEQ ID NO: 915579 - protein, 387 aa, Homo sapiens
MLSCYSCQSITKKINSSLRLYIPQFSFFSQSLYIILYSDGPGFAYKPFKTDYVVLILTFLCMTPIPFLKQHCDRCGASTCISKQIINPTFELKLAWILVMSRNSSESRNLFCMLIKLKLGLIESASNSDRTLTLVLEYEHSNAGLKMSSVVVTSYFIYAFVNNEAIETKTNSLNIFRLFSCFNKGFFLLPLKMGSEKINRGNHKTFKLSGLGRSSAHPLTTCLVPLSPSMFENKRHKLSMLNKTSCYGCNNQKGAEFQKEYESRECQYGVCKITRYGYGVVYDMLYVDKVGGLLKLGFELKRVRMHIFPLFQDFQMTRHMLWMILVPTTNDQTIKYPCNKGDFLFVNSPENTDRSVVSLLFYCIKNSLNKFYSQSFILDGFGQTAIS

SEQ ID NO: 915580 - protein, 150 aa, Homo sapiens
AKCETPSSQMALHEGFVLLFLKEKELHGKFSHPPPSAPNSSMSKVVFYFSETESHSVAQAGVQWCNLSSLQPPPPGFKQLLLTSSNPPGLLFSCLNMACLLVSLFSYSLYVKKLHFACLMEMLLIASVSAFLICRPFTFPVCSMLCANTQ

SEQ ID NO: 915581 - protein, 1166 aa, Homo sapiens
MFPLCAGVLYLQYGDETKQLRMPNEITSADTIRALFVSAFPQQLTMKMLESPSVAIYIKDESRNVYYELNDVRNIQDRSLLKVYNKDPAHAFNHTPKTMNGDMRMQRELVYARGDGPGAPRPGSTAHPPHAIPNSPPSTPVPHSMPPSPSRIPYGGTRSMVVPGNATIPRDRISSLPVSRPISPSPSAILERRDVKPDEDMSGKNIAMYRNEGFYADPYLYHEGRMSIASSHGGHPLDVPDHIIAYHRTAIRSASAYCNPSMQAEMHMEQSLYRQKSRKYPDSHLPTLGSKTPPASPHRVSDLRMIDMHAHYNAHGPPHTMQPDRASPSRQAFKKEPGTLVYIEKPRSAAGLSSLVDLGPPLMEKQVFAYSTATIPKDRETRERMQAMEKQIASLTGLVQSALFKGPITSYSKDASSEKMMKTTANRNHTDSAGTPHVSGGKMLSALESTVPPSQPPPVGTSAIHMSLLEMRRSVAELRLQLQQMRQLQLQNQELLRAMMKKAELEISGKVMETMKRLEDPCSAQRVLVEQERQKYLHEEEKIVKKLCELEDFVEDLKKDSTAASRLVTLKDVEDGAFLLRQVGEAVATLKGEFPTLQNKMRAILRIEVEAVRFLKEEPHKLDSLLKRVRSMTDVLTMLRRHVTDGLLKGTDAAQAAQYMAMEKATAAEVLKSQEEAAHTSGQPFHSTGAPGDAKSEVVPLSGMMVRHAQSSPVVIQPSQHSVALLNPAQNLPHVASSPAVPQEATSTLQMSQAPQSPQIPMNGSAMQSLFIEEIHSVSAKNRAVSIEKAEKKWEEKRQNLDHYNGKEFEKLLEEAQANIMKSIPNLEMPPATGPLPRGDAPVDKVELSEDSPNSEQDLEKLGGKSPPPPPPPPRRSYLPGSGLTTTRSGDVVYTGRKENITAKASSEDAGPSPQTRATKYPAEEPASAWTPSPPPVTTSSSKDEEEEEEEGDKIMAELQGSSGAPQTSRMPVPMSAKNRPGTLDKPGKQSKLQDPRQYRQANGSAKKSGGDFKPTSPSLPASKIPALSPSSGKSSSLPSSSGDSSNLPNPPATKPSIASNPLSPQTGPPAHSASLIPSVSNGSLKFQSLTHTGKGHHLSFSPQSQNGRAPPPLSFSSSPPSPASSVSLNQGAKGTRTIHTPSLTSYKAQNGSSSKATPSTAKETS

SEQ ID NO: 915582 - protein, 566 aa, Homo sapiens
MRAILRIEVEAVRFLKEEPHKLDSLLKRVRSMTDVLTMLRRHVTDGLLKGTDAAQAAQYMAMEKATAAEVLKSQEEAAHTSGQPFHSTGAPGDAKSEVVPLSGMMVRHAQSSPVVIQPSQHSVALLNPAQNLPHVASSPAVPQEATSTLQMSQAPQSPQIPMNGSAMQSLFIEEIHSVSAKNRAVSIEKAEKKWEEKRQNLDHYNGKEFEKLLEEAQANIMKSIPNLEMPPATGPLPRGDAPVDKVELSEDSPNSEQDLEKLGGKSPPPPPPPPRRSYLPGSGLTTTRSGDVVYTGRKENITAKASSEDAGPSPQTRATKYPAEEPASAWTPSPPPVTTSSSKDEEEEEEEGDKIMAELQGSSGAPQTSRMPVPMSAKNRPGTLDKPGKQSKLQDPRQYRQANGSAKKSGGDFKPTSPSLPASKIPALSPSSGKSSSLPSSSGDSSNLPNPPATKPSIASNPLSPQTGPPAHSASLIPSVSNGSLKFQSLTHTGKGHHLSFSPQSQNGRAPPPLSFSSSPPSPASSVSLNQGAKGTRTIHTPSLTSYKAQNGSSSKATPSTAKETS

SEQ ID NO: 915583 - protein, 566 aa, Homo sapiens; identical to SEQ ID NO: 915582

SEQ ID NO: 915584 - protein, 1027 aa, Homo sapiens
MQRELVYARGDGPGAPRPGSTAHPPHAIPNSPPSTPVPHSMPPSPSRIPYGGTRSMVVPGNATIPRDRISSLPVSRPISPSPSAILERRDVKPDEDMSGKNIAMYRNEGFYADPYLYHEGRMSIASSHGGHPLDVPDHIIAYHRTAIRSASAYCNPSMQAEMHMEQSLYRQKSRKYPDSHLPTLGSKTPPASPHRVSDLRMIDMHAHYNAHGPPHTMQPDRASPSRQAFKKEPGTLVYIEKPRSAAGLSSLVDLGPPLMEKQVFAYSTATIPKDRETSEKMMKTTANRNHTDSAGTPHVSGGKMLSALESTVPPSQPPPVGTSAIHMSLLEMRRSVAELRLQLQQMRQLQLQNQELLRAMMKKAELEISGKVMETMKRLEDPCSAQRVLVEQERQKYLHEEEKIVKKLCELEDFVEDLKKDSTAASRLVTLKDVEDGAFLLRQVGEAVATLKGEFPTLQNKMRAILRIEVEAVRFLKEEPHKLDSLLKRVRSMTDVLTMLRRHVTDGLLKGTDAAQAAQYMAMEKATAAEVLKSQEEAAHTSGQPFHSTGAPGDAKSEVVPLSGMMVRHAQSSPVVIQPSQHSVALLNPAQNLPHVASSPAVPQEATSTLQMSQAPQSPQIPMNGSAMQSLFIEEIHSVSAKNRAVSIEKAEKKWEEKRQNLDHYNGKEFEKLLEEAQANIMKSIPNLEMPPATGPLPRGDAPVDKVELSEDSPNSEQDLEKLGGKSPPPPPPPPRRSYLPGSGLTTTRSGDVVYTGRKENITAKASSEDAGPSPQTRATKYPAEEPASAWTPSPPPVTTSSSKDEEEEEEEGDKIMAELQGSSGAPQTSRMPVPMSAKNRPGTLDKPGKQSKLQDPRQYRQANGSAKKSGGDFKPTSPSLPASKIPALSPSSGKSSSLPSSSGDSSNLPNPPATKPSIASNPLSPQTGPPAHSASLIPSVSNGSLKFQSLTHTGKGHHLSFSPQSQNGRAPPPLSFSSSPPSPASSVSLNQGAKGTRTIHTPSLTSYKAQNGSSSKATPSTAKETS

SEQ ID NO: 915585 - protein, 566 aa, Homo sapiens; identical to SEQ ID NO: 915582

SEQ ID NO: 915586 - protein, 566 aa, Homo sapiens; identical to SEQ ID NO: 915582

SEQ ID NO: 915587 - protein, 627 aa, Homo sapiens
MCWCPCSRSELEDFVEDLKKDSTAASRLVTLKDVEDGAFLLRQVGEAVATLKGEFPTLQNKMRAILRIEVEAVRFLKEEPHKLDSLLKRVRSMTDVLTMLRRHVTDGLLKGTDAAQAAQYMAMEKATAAEVLKSQEEAAHTSGQPFHSTGAPGDAKSEVVPLSGMMVRHAQSSPVVIQPSQHSVALLNPAQNLPHVASSPAVPQEATSTLQMSQAPQSPQIPMNGSAMQSLFIEEIHSVSAKNRAVSIEKAEKKWEEKRQNLDHYNGKEFEKLLEEAQANIMKSIPNLEMPPATGPLPRGDAPVDKVELSEDSPNSEQDLEKLGGKSPPPPPPPPRRSYLPGSGLTTTRSGDVVYTGRKENITAKASSEDAGPSPQTRATKYPAEEPASAWTPSPPPVTTSSSKDEEEEEEEGDKIMAELQGSSGAPQTSRMPVPMSAKNRPGTLDKPGKQSKLQDPRQYRQANGSAKKSGGDFKPTSPSLPASKIPALSPSSGKSSSLPSSSGDSSNLPNPPATKPSIASNPLSPQTGPPAHSASLIPSVSNGSLKFQSLTHTGKGHHLSFSPQSQNGRAPPPLSFSSSPPSPASSVSLNQGAKGTRTIHTPSLTSYKAQNGSSSKATPSTAKETS

SEQ ID NO: 915588 - protein, 566 aa, Homo sapiens; identical to SEQ ID NO: 915582

SEQ ID NO: 915589 - protein, 405 aa, Homo sapiens
MRAILRIEVEAVRFLKEEPHKLDSLLKRVRSMTDVLTMLRRHVTDGLLKGTDAAQAAQYMAMEKATAAEVLKSQEEAAHTSGQPFHSTGAPGDAKSEVVPLSGMMVRHAQSSPVVIQPSQHSVALLNPAQNLPHVASSPAVPQEATSTLQMSQAPQSPQIPMNGSAMQSLFIEEIHSVSAKNRAVSIEKAEKKWEEKRQNLDHYNGKEFEKLLEEAQANIMKSIPNLEMPPATGPLPRGDAPVDKVELSEDSPNSEQDLEKLGGKSPPPPPPPPRRSYLPGSGLTTTRSGDVVYTGRKENITAKASSEDAGPSPQTRATKYPAEEPASAWTPSPPPVTTSSSKDEEEEEEEGDKIMAELQGSSGAPQTSRMPVPMSAKNRPGTLDKPGKQSKLQDPRQYRQVVLP

SEQ ID NO: 915590 - protein, 618 aa, Homo sapiens [sequence omitted]

SEQ ID NO: 915591 - protein, 405 aa, Homo sapiens; identical to SEQ ID NO: 915589

SEQ ID NO: 915592 - protein, 779 aa, Homo sapiens [sequence omitted]

SEQ ID NO: 915593 - protein, 405 aa, Homo sapiens; identical to SEQ ID NO: 915589

SEQ ID NO: 915594 - protein, 155 aa, Homo sapiens
MNLYDTPENTVRRQEQPSIESTSPISRTDEIRKNTYRTLDSLEQTIKQLENTISEMSPKALVDTSCSSNRDSVASSSHIAQEASPRPLLVPDEGPTALEPPTSIPSASRKGSSGAPQTSRMPVPMSAKNRPGTLDKPGKQSKLQDPRQYRQVVLP

SEQ ID NO: 915595 - protein, 405 aa, Homo sapiens; identical to SEQ ID NO: 915589

SEQ ID NO: 915596 - protein, 313 aa, Homo sapiens
MQRELVYARGDGPGAPRPGSTAHPPHAIPNSPPSTPVPHSMPPSPSRIPYGGTRSMVVPGNATIPRDRISSLPVSRPISPSPSAILERRDVKPDEDMSGKNIAMYRNEGFYADPYLYHEGRMSIASSHGGHPLDVPDHIIAYHRTAIRSASAYCNPSMQAEMHMEQSLYRQKSRKYPDSHLPTLGSKTPPASPHRVSDLRMIDMHAHYNAHGPPHTMQPDRASPSRQAFKKEPGTLVYIEKPRSAAGLSSLVDLGPPLMEKQVFAYSTATIPKDRETRERMQAMEKQIASLTGLVQSALFKGPITSYSKDASR

SEQ ID NO: 915597 - protein, 313 aa, Homo sapiens; identical to SEQ ID NO: 915596

SEQ ID NO: 915598 - protein, 283 aa, Homo sapiens
MQRELVYARGDGPGAPRPGSTAHPPHAIPNSPPSTPVPHSMPPSPSRIPYGGTRSMVVPGNATIPRDRISSLPVSRPISPSPSAILERRDVKPDEDMSGKNIAMYRNEGFYADPYLYHEGRMSIASSHGGHPLDVPDHIIAYHRTAIRSASAYCNPSMQAEMHMEQSLYRQKSRKYPDSHLPTLGSKTPPASPHRVSDLRMIDMHAHYNAHGPPHTMQPDRASPSRQAFKKEPGTLVYIEKPRSAAGLSSLVDLGPPLMEKQVFAYSTATIPKDRETRIEEKQ

SEQ ID NO: 915599 - protein, 113 aa, Homo sapiens
QSLYRQKSRKYPDSHLPTLGSKTPPASPHRVSDLRMIDMHAHYNAHGPPHTMQPDRASPSRQAFKKEPGTLVYIEKPRSAAGLSSLVDLGPPLMEKQVFAYSTATIPKDRETR

SEQ ID NO: 915600 - protein, 544 aa, Homo sapiens
MPGRCQSDAAMRVNGPASRAPAGWTSGSLHTGPRAGRPRAQARGVRGRGLLLRPRPAKELPLPRKGGAWAPAGNPGPLHPLGVAVGMAGSGRLVLRPWIRELILGSETPSSPRAGQLLEVLQDAEAAVAGPSHAPDTSDVGATLLVSDGTHSVRCLVTREALDTSDWEEKEFGFRGTEGRLLLLQDCGVHVQVAEGGAPAEFYLQVDRFSLLPTEQPRLRVPGCNQDLDVQKKLYDCLEEHLSESTSSNAGLSLSQLLDEMREDQEHQGALVCLAESCLTLEGPCTAPPVTHWAASRCKATGEAVYTVPSSMLCISENDQLILSSLGPCQRTQGPELPPPDPALQDLSLTLIASPPSSPSSSGTPALPGHMSSEESGTSISLLPALSLAAPDPGQRSSSQPSPAICSAPATLTPRSPHASRTPSSPLQSCTPSLSPRSHVPSPHQALVTRPQKPSLEFKEFVGLPCKNRPPFPRTGATRGAQEPCSVWEPPKRHRDGSAFQYEYEPPCTSLCARVQAVRLPPQLMAWALHFLMDAQPGSEPTPM

SEQ ID NO: 915601 - protein, 224 aa, Homo sapiens
MPGRCQSDAAMRVNGPASRAPAGWTSGSLHTGPRAGRPRAQARGVRGRGLLLRPRPAKELPLPRKGGAWAPAGNPGPLHPLGVAVGMAGSGRLVLRPWIRELILGSETPSSPRAGQLLEVLQDAEAAVAGPSHAPDTSDVGATLLVSDGTHSVRCLVTREALDTSDWEEKEFGFRGTEGRLLLLQDCGVHVQVAEGGAPAEFYLQVDRFSLLPTEQPRLRVPGW

SEQ ID NO: 915602 - protein, 544 aa, Homo sapiens; identical to SEQ ID NO: 915600

SEQ ID NO: 915603 - protein, 544 aa, Homo sapiens; identical to SEQ ID NO: 915600

SEQ ID NO: 915604 - protein, 519 aa, Homo sapiens
MPGRCQSDAAMRVNGPASRAPAGWTSGSLHTGPRAGRPRAQARGVRGRGLLLRPRPAKELPLPRKGGAWAPAGNPGPLHPLGVAVGMAGSGRLVLRPWIRELILGSETPSSPRAGQLLEVLQDAEAAVAGPSHAPDTSDVGATLLVSDGTHSVRCLVTREALDTSDWEEKEFGFRGTEGRLLLLQDCGVHVQVAEGGAPAEFYLQVDRFSLLPTEQPRLRVPGCNQDLDVQKKLYDCLEEHLSESTSSNAGLSLSQLLDEMREDQEHQGALVCLAESCLTLEGPCTAPPVTHWAASRCKATGEAVYTVPSSMLCISENDQLILSSLGPCQRTQGPELPPPDPALQDLSLTLIASPPSSPSSSGTPALPGHMSSEESGTSISLLPALSLAAPDPGQRSSSQPSPAICSAPATLTPRSPHASRTPSSPLQSCTPSLSPRSHVPSPHQALVTRPQKPSLEFKEFVGLPCKNRPPFPRTGATRGAQEPCSVWEPPKRHRDGSAFQYEYEPPCTSLCARVQAVR

SEQ ID NO: 915605 - protein, 503 aa, Homo sapiens
MPGRCQSDAAMRVNGPASRAPAGWTSGSLHTGPRAGRPRAQARGVRGRGLLLRPRPAKELPLPRKGGAWAPAGNPGPLHPLGVAVGMAGSGRLVLRPWIRELILGSETPSSPRAGQLLEVLQDAEAAVAGPSHAPDTSDVGATLLVSDGTHSVRCLVTREALDTSDWEEKEFGFRGTEGRLLLLQDCGVHVQVAEGGAPAEFYLQVDRFSLLPTEQPRLRVPGCNQDLDVQKKLYDCLEEHLSESTSSNAGLSLSQLLDEMREDQEHQGALVCLAESCLTLEGPCTAPPVTHWAASRCKATGEAVYTVPSSMLCISENDQLILSSLGPCQRTQGPELPPPDPALQDLSLTLIASPPSSPSSSGTPALPGHMSSEESGTSISLLPALSLAAPDPGQRSSSQPSPAICSAPATLTPRSPHASRTPSSPLQSCTPSLSPRSHVPSPHQALVTRPQKPSLEFKEFVGLPCKNRPPFPRTGATRGAQEPCSVWVSIAPLQLEGRTRKA

SEQ ID NO: 915606 - protein, 503 aa, Homo sapiens; identical to SEQ ID NO: 915605

SEQ ID NO: 915607 - protein, 531 aa, Homo sapiens
MPGRCQSDAAMRVNGPASRAPAGWTSGSLHTGPRAGRPRAQARGVRGRGLLLRPRPAKELPLPRKGGAWAPAGNPGPLHPLGVAVGMAGSGRLVLRPWIRELILGSETPSSPRAGQLLEVLQDAEAAVAGPSHAPDTSDVGATLLVSDGTHSVRCLVTREALDTSDWEEKEFGFRGTEGRLLLLQDCGVHVQVAEGGAPAEFYLQVDRFSLLPTEQPRLRVPGCNQDLDVQKKLYDCLEEHLSESTSSNAGLSLSQLLDEMREDQEHQGALVCLAESCLTLEGPCTAPPVTHWAASRCKATGEAVYTVPSSMLCISENDQLILSSLGPCQRTQGPELPPPDPALQDLSLTLIASPPSSPSSSGTPALPGHMSSEESGTSISLLPALSLAAPDPGQRSSSQPSPAICSAPATLTPRSPHASRTPSSPLQSCTPSLSPRSHVPSPHQALVTRPQKPSLEFKEFVGLPCKNRPPFPRTGATRGAQEPCSVWYEYEPPCTSLCARVQAVRLPPQLMAWALHFLMDAQPGSEPTPM

SEQ ID NO: 915608 - protein, 569 aa, Homo sapiens
MPGRCQSDAAMRVNGPASRAPAGWTSGSLHTGPRAGRPRAQARGVRGRGLLLRPRPAKELPLPRKGGAWAPAGNPGPLHPLGVAVGMAGSGRLVLRPWIRELILGSETPSSPRAGQLLEVSPHSGPGDRGGGPGWWDDAARRRQVLQDAEAAVAGPSHAPDTSDVGATLLVSDGTHSVRCLVTREALDTSDWEEKEFGFRGTEGRLLLLQDCGVHVQVAEGGAPAEFYLQVDRFSLLPTEQPRLRVPGCNQDLDVQKKLYDCLEEHLSESTSSNAGLSLSQLLDEMREDQEHQGALVCLAESCLTLEGPCTAPPVTHWAASRCKATGEAVYTVPSSMLCISENDQLILSSLGPCQRTQGPELPPPDPALQDLSLTLIASPPSSPSSSGTPALPGHMSSEESGTSISLLPALSLAAPDPGQRSSSQPSPAICSAPATLTPRSPHASRTPSSPLQSCTPSLSPRSHVPSPHQALVTRPQKPSLEFKEFVGLPCKNRPPFPRTGATRGAQEPCSVWEPPKRHRDGSAFQYEYEPPCTSLCARVQAVRLPPQLMAWALHFLMDAQPGSEPTPM

SEQ ID NO: 915609 - protein, 461 aa, Homo sapiens
MFQSRERAALLGIRERLILKVRDTLQIHRDRADCIEVLQDAEAAVAGPSHAPDTSDVGATLLVSDGTHSVRCLVTREALDTSDWEEKEFGFRGTEGRLLLLQDCGVHVQVAEGGAPAEFYLQVDRFSLLPTEQPRLRVPGCNQDLDVQKKLYDCLEEHLSESTSSNAGLSLSQLLDEMREDQEHQGALVCLAESCLTLEGPCTAPPVTHWAASRCKATGEAVYTVPSSMLCISENDQLILSSLGPCQRTQGPELPPPDPALQDLSLTLIASPPSSPSSSGTPALPGHMSSEESGTSISLLPALSLAAPDPGQRSSSQPSPAICSAPATLTPRSPHASRTPSSPLQSCTPSLSPRSHVPSPHQALVTRPQKPSLEFKEFVGLPCKNRPPFPRTGATRGAQEPCSVWEPPKRHRDGSAFQYEYEPPCTSLCARVQAVRLPPQLMAWALHFLMDAQPGSEPTPM

SEQ ID NO: 915610 - protein, 357 aa, Homo sapiens [sequence omitted]

SEQ ID NO: 915611 - protein, 420 aa, Homo sapiens
MPGRCQSDAAMRVNGPASRAPAGWTSGSLHTGPRAGRPRAQARGVRGRGLLLRPRPAKELPLPRKGGAWAPAGNPGPLHPLGVAVGMAGSGRLVLRPWIRELILGSETPSSPRAGQLLEVLQDAEAAVAGPSHAPDTSDVGATLLVSDGTHSVRCLVTREALDTSDWEEKEFGFRGTEGRLLLLQDCGVHVQVAEGGAPAEFYLQVDRFSLLPTEQPRLRVPGCNQDLDVQKKLYDCLEEHLSESTSSNAGLSLSQLLDEMREDQEHQGALVCLAESCLTLEGPCTAPPVTHWAASRCKATGEAVYTVPSSMLCISENDQLILSSLGPCQRTQGPELPPPDPALQDLSLTLIASPPSSPSSSGPELPGEPRSPALSGNPQRGIVMVLPSSMSMSHPARPSVLGSKLSGFLPSSWPGPCTF

SEQ ID NO: 915612 - protein, 129 aa, Homo sapiens
MAELIQKKLQGEVEKYQQLQKDLSKSMSGRQKLEAQLTENNIVKEELALLDGSNVVFKLLGPVLVKQELGEARATVGKRLDYITAEIKRYESQLRDLERQSEQQRETLAQLQQEFQRAQAAKAGAPGKA

SEQ ID NO: 915613 - protein, 129 aa, Homo sapiens; identical to SEQ ID NO: 915612

SEQ ID NO: 915614 - protein, 129 aa, Homo sapiens; identical to SEQ ID NO: 915612

SEQ ID NO: 915615 - protein, 102 aa, Homo sapiens
MAELIQKKLQGEVEKYQQLQKDLSKSMSGRQKLEAQLTENNIVKEELALLDGSNVVFKLLGPVLVKQELGEARATVGKRLDYITAEIKRYESLPQPPPLLMP

SEQ ID NO: 915616 - protein, 116 aa, Homo sapiens
MAELIQKKLQGEVEKYQQLQKDLSKSMSGRQKLEAQLTENNIVKEKEVRDWDLWGEEGPVLAMVLITYVPSLHQELALLDGSNVVFKLLGPVLVKQELGEARATVGKRLDYITAEM

SEQ ID NO: 915617 - protein, 126 aa, Homo sapiens
FLLPQIHIHLTRIVGIGGTFDVSKLPFLSSPDLSKSMSGRQKLEAQLTENNIVKEKEVRDWDLWGEEGPVLAMVLITYVPSLHQELALLDGSNVVFKLLGPVLVKQELGEARATVGKRLDYITAEM

SEQ ID NO: 915618 - protein, 429 aa, Homo sapiens
MAVAVGRPSNEELRNLSLSGHVGFDSLPDQLVNKSTSQGFCFNILCVGETGIGKSTLMDTLFNTKFESDPATHNEPGVRLKARSYELQESNVRLKLTIVDTVGFGDQINKDDSYKPIVEYIDAQFEAYLQEELKIKRSLFNYHDTRIHACLYFIAPTGHSLKSLDLVTMKKLDSKVNIIPIIAKADTIAKNELHKFKSKIMSELVSNGVQIYQFPTDEETVAEINATMSVHLPFAVVGSTEEVKIGNKMAKARQYPWGVVQVENENHCDFVKLREMLIRVNMEDLREQTHTRHYELYRRCKLEEMGFKDTDPDSKPFSLQETYEAKRNEFLGELQKKEEEMRQMFVMRVKEKEAELKEAEKELHEKFDLLKRTHQEEKKKVEDKKKELEEEVNNFQKKKAAAQLLQSQAQQSGAQQTKKDKDKKNASFT

SEQ ID NO: 915619 - protein, 71 aa, Homo sapiens
ALIKREGRRRGGSRCRWLPAGRRRAERSREGGAREASRSPSTSSSRSRRKAPGRSRSRCRSCDGRGRGETV

SEQ ID NO: 915620 - protein, 429 aa, Homo sapiens; identical to SEQ ID NO: 915618

SEQ ID NO: 915621 - protein, 429 aa, Homo sapiens; identical to SEQ ID NO: 915618

SEQ ID NO: 915622 - protein, 429 aa, Homo sapiens; identical to SEQ ID NO: 915618

SEQ ID NO: 915623 - protein, 429 aa, Homo sapiens; identical to SEQ ID NO: 915618

SEQ ID NO: 915624 - protein, 429 aa, Homo sapiens; identical to SEQ ID NO: 915618

SEQ ID NO: 915625 - protein, 429 aa, Homo sapiens; identical to SEQ ID NO: 915618

SEQ ID NO: 915626 - protein, 452 aa, Homo sapiens
KIKRMAGMKESQISAAGAGAAAAMAVAVGRPSNEELRNLSLSGHVGFDSLPDQLVNKSTSQGFCFNILCVGETGIGKSTLMDTLFNTKFESDPATHNEPGVRLKARSYELQESNVRLKLTIVDTVGFGDQINKDDSYKPIVEYIDAQFEAYLQEELKIKRSLFNYHDTRIHACLYFIAPTGHSLKSLDLVTMKKLDSKVNIIPIIAKADTIAKNELHKFKSKIMSELVSNGVQIYQFPTDEETVAEINATMSVHLPFAVVGSTEEVKIGNKMAKARQYPWGVVQVENENHCDFVKLREMLIRVNMEDLREQTHTRHYELYRRCKLEEMGFKDTDPDSKPFSLQETYEAKRNEFLGELQKKEEEMRQMFVMRVKEKEAELKEAEKELHEKFDLLKRTHQEEKKKVEDKKKELEEEVNNFQKKKAAAQLLQSQAQQSGAQQTKKDKDKKNASFT

SEQ ID NO: 915627 - protein, 372 aa, Homo sapiens
MDTLFNTKFESDPATHNEPGVRLKARSYELQESNVRLKLTIVDTVGFGDQINKDDSYKPIVEYIDAQFEAYLQEELKIKRSLFNYHDTRIHACLYFIAPTGHSLKSLDLVTMKKLDSKVNIIPIIAKADTIAKNELHKFKSKIMSELVSNGVQIYQFPTDEETVAEINATMSVHLPFAVVGSTEEVKIGNKMAKARQYPWGVVQVENENHCDFVKLREMLIRVNMEDLREQTHTRHYELYRRCKLEEMGFKDTDPDSKPFSLQETYEAKRNEFLGELQKKEEEMRQMFVMRVKEKEAELKEAEKELHEKFDLLKRTHQEEKKKVEDKKKELEEEVNNFQKKKAAAQLLQSQAQQSGAQQTKKDKDKKNASFT

SEQ ID NO: 915628 - protein, 397 aa, Homo sapiens
MAVAVGRPSNEELRNLSLSGHVGFDSLPDQLVNKSTSQGFCFNILCVGETGIGKSTLMDTLFNTKFESDPATHNEPGVRLKARSYELQESNVRLKLTIVDTVGFGDQINKDDSYKPIVEYIDAQFEAYLQEELKIKRSLFNYHDTRIHACLYFIAPTGHSLKSLDLVTMKKLDSKVNIIPIIAKADTIAKNELHKFKSKIMSELVSNGVQIYQFPTDEETVAEINATMSVHLPFAVVGSTEEVKIGNKMAKARQYPWGVVQVENENHCDFVKLREMLIRVNMEDLREQTHTRHYELYRRCKLEEMGFKDTDPDSKPFSLQETYEAKRNEFLGELQKKEEEMRQMFVMRVKEKEAELKEAEKELHEKFDLLKRTHQEEKKKVEDKKKKDKDKKNASFT

SEQ ID NO: 915629 - protein, 429 aa, Homo sapiens; identical to SEQ ID NO: 915618

SEQ ID NO: 915630 - protein, 429 aa, Homo sapiens; identical to SEQ ID NO: 915618

SEQ ID NO: 915631 - protein, 429 aa, Homo sapiens; identical to SEQ ID NO: 915618

SEQ ID NO: 915632 - protein, 429 aa, Homo sapiens; identical to SEQ ID NO: 915618

SEQ ID NO: 915633 - protein, 429 aa, Homo sapiens; identical to SEQ ID NO: 915618

SEQ ID NO: 915634 - protein, 425 aa, Homo sapiens
MAVAVGRPSNEELRNLSLSGHVGFDSLPDQLVNKSTSQGFCFNILCVGETGIGKSTLMDTLFNTKFESDPATHNEPGVRLKARSYELQESNVRLKLTIVDTVGFGDQINKDDSYKPIVEYIDAQFEAYLQEELKIKRSLFNYHDTRIHACLYFIAPTGHSLKSLDLVTMKKLDSKVNIIPIIAKADTIAKNELHKFKSKIMSELVSNGVQIYQFPTDEETVAEINATMSVHLPFAVVGSTEEVKIGNKMAKARQYPWGVVQVENENHCDFVKLREMLIRVNMEDLREQTHTRHYELYRRCKLEEMGFKDTDPDSKPFSLQETYEAKRNEFLGELQKKEEEMRQMFVMRVKEKEAELKEAEKELHEKFDLLKRTHQEEKKKVEDKKKELEEEVNNFQKKKAAAQLLQSQAQQSGAQQTKKDKDKKN

SEQ ID NO: 915635 - protein, 432 aa, Homo sapiens
MAVAVGRPSNEELRNLSLSGHVGFDSLPDQLVNKSTSQGFCFNILCVGETGIGKSTLMDTLFNTKFESDPATHNEPGVRLKARSYELQESNVRLKLTIVDTVGFGDQINKDDSYKPIVEYIDAQFEAYLQEELKIKRSLFNYHDTRIHACLYFIAPTGHSLKSLDLVTMKKLDSKVNIIPIIAKADTIAKNELHKFKSKIMSELVSNGVQIYQFPTDEETVAEINATMSVHLPFAVVGSTEEVKIGNKMAKARQYPWGVVQVENENHCDFVKLREMLIRVNMEDLREQTHTRHYELYRRCKLEEMGFKDTDPDSKPFSLQETYEAKRNEFLGELQKKEEEMRQMFVMRVKEKEAELKEAEKELHEKFDLLKRTHQEEKKKVEDKKKELEEEVNNFQKKKAAAQLLQSQAQQSGAQQTKKDKDKKNSPWLCTE

SEQ ID NO: 915636 - protein, 429 aa, Homo sapiens
MAVAVGRPSNEELRNLSLSGHVGFDSLPDQLVNKSTSQGFCFNILCVGETGIGKSTLMDTLFNTKFESDPATHNEPGVRLKARSYELQESNVRLKLTIVDTVGFGDQINKDDSYKPIVEYIDAQFEAYLQEELKIKRSLFNYHDTRIHACLYFIAPTGHSLKSLDLVTMKKLDSKVNIIPIIAKADTIAKNELHKFKSKIMSELVSNGVQIYQFPTDEETVAEINATMSVHLPFAVVGSTEEVKIGNKMAKARQYPWGVVQVENENHCDFVKLREMLIRVNMEDLREQTHTRHYELYRRCKLEEMGFKDTDPDSKPFSLQETYEAKRNEFLGELQKKEEEMRQMFVMRVKEKEAELKEAEKELHEKFDLLKRTHQEEKKKVEDKKKELEEEVNNFQKKKAAAQLLQSQAQQSGAQQTKKDKDKKNFFFM

SEQ ID NO: 915637 - protein, 474 aa, Homo sapiens
MAVAVGRPSNEELRNLSLSGHVGFDSLPDQLVNKSTSQGFCFNILCVGETGIGKSTLMDTLFNTKFESDPATHNEPGVRLKARSYELQESNVRLKLTIVDTVGFGDQINKDDSYKPIVEYIDAQFEAYLQEELKIKRSLFNYHDTRIHACLYFIAPTGHSLKSLDLVTMKKLDSKVNIIPIIAKADTIAKNELHKFKSKIMSELVSNGVQIYQFPTDEETVAEINATMSVHLPFAVVGSTEEVKIGNKMAKARQYPWGVVQVENENHCDFVKLREMLIRVNMEDLREQTHTRHYELYRRCKLEEMGFKDTDPDSKPFSLQETYEAKRNEFLGELQKKEEEMRQMFVMRVKEKEAELKEAEKELHEKFDLLKRTHQEEKKKVEDKKKKKKKKKKKKKKKKKKKKKKKKERRRKKNEERRQNEEEERKKNKGGGRTIITLIKQQRKVYKRNRRDTNKQENQKSADNVRQSTTAQRN

SEQ ID NO: 915638 - protein, 425 aa, Homo sapiens
MAVAVGRPSNEELRNLSLSGHVGFDSLPDQLVNKSTSQGFCFNILCVGETGIGKSTLMDTLFNTKFESDPATHNEPGVRLKARSYELQESNVRLKLTIVDTVGFGDQINKDDSYKPIVEYIDAQFEAYLQEELKIKRSLFNYHDTRIHACLYFIAPTGHSLKSLDLVTMKKLDSKVNIIPIIAKADTIAKNELHKFKSKIMSELVSNGVQIYQFPTDEETVAEINATMSVHLPFAVVGSTEEVKIGNKMAKARQYPWGVVQVENENHCDFVKLREMLIRVNMEDLREQTHTRHYELYRRCKLEEMGFKDTDPDSKPFSLQETYEAKRNEFLGELQKKEEEMRQMFVMRVKEKEAELKEAEKELHEKFDLLKRTHQEEKKKVEDKKKELEEEVNNFQKKKAAAQLLQSQAQQSGAQQTKKDKDKKK

SEQ ID NO: 915639 - protein, 425 aa, Homo sapiens; identical to SEQ ID NO: 915638

SEQ ID NO: 915640 - protein, 425 aa, Homo sapiens; identical to SEQ ID NO: 915638

SEQ ID NO: 915641 - protein, 327 aa, Homo sapiens
GKGKLRRRSVSGNMASRSKRRAVESGVPQPPDPPVQRDEEEEKEVENEDEDDDDSDKEKDEEDEVIDEEVNIEFEAYSLSDNDYDGIKKLLQQLFLKAPVNTAELTDLLIQQNHIGSVIKQTDVSEDSNDDMDEDEVFGFISLLNLTERKGTQCVEQIQELVLRFCEKNCEKSMVEQLDKFLNDTTKPVGLLLSERFINVPPQIALPMYQQLQKELAGAHRTNKPCGKCYFYLLISKTFVEAGKNNSKKKPSNKKKAALMFANAEEEFFYEKAILKFNYSVQEESDTCLGGKWSFDDVPMTPLRTVMLIPGDKMNEIMDKLKEYLSV

SEQ ID NO: 915642 - protein, 335 aa, Homo sapiens
GKGKLRRRSVSGNMASRSKRRAVESGVPQPPDPPVQRDEEEEKEVENEDEDDDDSDKEKDEEDEVIDEEVNIEFEAYSLSDNDYDGIKKLLQQLFLKAPVNTAELTDLLIQQNHIGSVIKQTDVSEDSNDDMDEDEVFGFISLLNLTERKGTQCVEQIQELVLRFCEKNCEKSMVEQLDKFLNDTTKPVGLLLSERFINVPPQIALPMYQQLQKELAGAHRTNKPCGKCYFYLLISKTFVEAGKNNSKKKPSNKKKAALMFANAEEEFFYEEQGKPEVLGGPDTRRGLEPVPIQHNGGSRGQVTALVSLKAGLIQSRSTLSDFQGTFMTVGIALS

SEQ ID NO: 915643 - protein, 335 aa, Homo sapiens; identical to SEQ ID NO: 915642

SEQ ID NO: 915644 - protein, 305 aa, Homo sapiens
GKGKLRRRSVSGNMASRSKRRAVESGVPQPPDPPVQRDEEEEKEVENEDEDDDDSDKEKDEEDEVIDEEVNIEFEAYSLSDNDYDGIKKLLQQLFLKAPVNTAELTDLLIQQNHIGSVIKQTDVSEDSNDDMDEDEVFGFISLLNLTERKGTQCVEQIQELVLRFCEKNCEKSMVEQLDKFLNDTTKPVGLLLSERFINVPPQIALPMYQQLQKELAGAHRTNKPCGKCYFYLLISKTFVEAGKNNSKKKPSNKKKAALMFANAEEEFFYEEQGKPEVLGGPDTRRGLEPVPIQHNGWSVPPVLE

SEQ ID NO: 915645 - protein, 277 aa, Homo sapiens
GKGKLRRRSVSGNMASRSKRRAVESGVPQPPDPPVQRDEEEEKEVENEDEDDDDSDKEKDEEDEVIDEEVNIEFEAYSLSDNDYDGIKKLLQQLFLKAPVNTAELTDLLIQQNHIGSVIKQTDVSEDSNDDMDEDEVFGFISLLNLTERKGTQCVEQIQELVLRFCEKNCEKSMVEQLDKFLNDTTKPVGLLLSERFINVPPQIALPMYQQLQKELAGAHRTNKPCGKCYFYLLISKTFVEAGKNNSKKKPSNKKKAALMFANAEEEFFYEVVHGGK

SEQ ID NO: 915646 - protein, 196 aa, Homo sapiens
MDEDEVFGFISLLNLTERKGTQCVEQIQELVLRFCEKNCEKSMVEQLDKFLNDTTKPVGLLLSERFINVPPQIALPMYQQLQKELAGAHRTNKPCGKCYFYLLISKTFVEAGKNNSKKKPSNKKKAALMFANAEEEFFYEKAILKFNYSVQEESDTCLGGKWSFDDVPMTPLRTVMLIPGDKMNEIMDKLKEYLSV

SEQ ID NO: 915647 - protein, 309 aa, Homo sapiens
GKGKLRRRSVSGNMASRSKRRAVESGVPQPPDPPVQRDEEEEKEVENEDEDDDDSDKAYSLSDNDYDGIKKLLQQLFLKAPVNTAELTDLLIQQNHIGSVIKQTDVSEDSNDDMDEDEVFGFISLLNLTERKGTQCVEQIQELVLRFCEKNCEKSMVEQLDKFLNDTTKPVGLLLSERFINVPPQIALPMYQQLQKELAGAHRTNKPCGKCYFYLLISKTFVEAGKNNSKKKPSNKKKAALMFANAEEEFFYEKAILKFNYSVQEESDTCLGGKWSFDDVPMTPLRTVMLIPGDKMNEIMDKLKEYLSV

SEQ ID NO: 915648 - protein, 235 aa, Homo sapiens
HGRSRPGVNRTREHIGSVIKQTDVSEDSNDDMDEDEVFGFISLLNLTERKGTQCVEQIQELVLRFCEKNCEKSMVEQLDKFLNDTTKPVGLLLSERFINVPPQIALPMYQQLQKELAGAHRTNKPCGKCYFYLLISKTFVEAGKNNSKKKPSNKKKAALMFANAEEEFFYEEQGKPEVLGGPDTRRGLEPVPIQHNGGSRGQVTALVSLKAGLIQSRSTLSDFQGTFMTVGIALS

SEQ ID NO: 915649 - protein, 237 aa, Homo sapiens
GKGKLRRRSVSGNMASRSKRRAVESGVPQPPDPPVQRDEEEEKEVENEDEDDDDSDKEKDEEDEVIDEEVNIEFEAYSLSDNDYDGIKKLLQQLFLKAPVNTAELTDLLIQQNHIGSVIKQTDVSEDSNDDMDEDEVFGFISLLNLTERKGTQCVEQIQELVLRFCEKNCEKSMVEQLDKFLNDTTKPVGLLLSERFINVPPQIALPMYQQLQWFTGASDSPGFSEGWTNSIKINSK

SEQ ID NO: 915650 - protein, 237 aa, Homo sapiens; identical to SEQ ID NO: 915649

SEQ ID NO: 915651 - protein, 183 aa, Homo sapiens
GKGKLRRRSVSGNMASRSKRRAVESGVPQPPDPPVQRDEEEEKEVENEDEDDDDSDKEKDEEDEVIDEEVNIEFEAYSLSDNDYDGIKKLLQQLFLKAPVNTAELTDLLIQQNHIGSVIKGTQCVEQIQELVLRFCEKNCEKSMVEQLDKFLNDTTKPVGLLLSERFINVPPQIALPMYQQLQ

SEQ ID NO: 915652 - protein, 131 aa, Homo sapiens
GKGKLRRRSVSGNMASRSKRRAVESGVPQPPDPPVQRDEEEEKEVENEDEDDDDSDKEKDEEDEVIDEEVNIEFEAYSLSDNDYDGIKKLLQQLFLKAPVNTAELTDLLIQQNHIGSVIKVSRIIVFILIK

SEQ ID NO: 915653 - protein, 794 aa, Homo sapiens
QAFQVSLEDLTGHEGNEKGAGPEPPGSEEEEEEQEESLAVAEQGKGRRESESSRSSRRPSGRSPTSTEKRMSFESISSLPEVEPDPEAGSEQEVFSAVEGPSAEETPSDTESPEVLETQLDAHQGLLGMDPPGDMVDFVAAESTEDLKALSSEEEEEMGGAAQEPESLLPPSVLDQASVIAERFVSSFSRRSSVAQEDSKSSGFGSPRLVSRSSSVLSLEGSEKGLARHGSATDSLSCQLSPEVDISVGVATEDSPSVNGMEPPSPGCPVEPDRSSCKKKESALSTRDRLLLDKIKSYYENAEHHDAGFSVRRRESLSYIPKGLVRNSISRFNSLPRPDPEPVPPVGSKRQVGSRPTSWALFELPGPSQAVKGDPPPISDAEFRPSSEIVKIWEGMESSGGSPGKGPGQGQANGFDLHEPLFILEEHELGAITEESATASPESSSPTEGRSPAHLARELKELVKELSSSTQGELVAPLHPRIVQLSHVMDSHVSERVKNKVYQLARQYSLRIKSNKPVMARPPLQWEKVAPERDGKSPTVPCLQEEAGEPLGGKGKRKPVLSLFDYEQLMAQEHSPPKPSSAGEMSPQRFFFNPSAVSQRTTSPGGRPSARSPLSPTETFSWPDVRELCSKYASRDEARRAGGGRPRGPPVNRSHSVPENMVEPPLSGRVGRCRSLSTKRGRGGGEAAQSPGPLPQSKPDGGETLYVTADLTLEDNRRVIVMEKGPLPSPTAGLEESSGQGPSSPVALLGQVQDFQQSAECQPKEEGSRDPADPSQQGRVRNLREKFQALNSVG

SEQ ID NO: 915654 - protein, 617 aa, Homo sapiens
QAFQVSLEDLTGHEGNEKGAGPEPPGSEEEEEEQEESLAVAEQGKGRRESESSRSSRRPSGRSPTSTEKRMSFESISSLPEVEPDPEAGSEQEVFSAVEGPSAEETPSDTESPEVLETQLDAHQGLLGMDPPGDMVDFVAAESTEDLKALSSEEEEEMGGAAQEPESLLPPSVLDQASVIAERFVSSFSRRSSVAQEDSKSSGFGSPRLVSRSSSVLSLEGSEKGLARHGSATDSLSCQLSPEVDISVGVATEDSPSVNGMEPPSPGCPVEPDRSSCKKKESALSTRDRLLLDKIKTGGPTDPRIVQLSHVMDSHVSERVKNKVYQLARQYSLRIKSNKPVMARPPLQWEKVAPERDGKSPTVPCLQEEAGEPLGGKGKRKPVLSLFDYEQLMAQEHSPPKPSSAGEMSPQRFFFNPSAVSQRTTSPGGRPSARSPLSPTETFSWPDVRELCSKYASRDEARRAGGGRPRGPPVNRSHSVPENMVEPPLSGRVGRCRSLSTKRGRGGGEAAQSPGPLPQSKPDGGETLYVTADLTLEDNRRVIVMEKGPLPSPTAGLEESSGQGPSSPVALLGQVQDFQQSAECQPKEEGSRDPADPSQQGRVRNLREKFQALNSVG

SEQ ID NO: 915655 - protein, 823 aa, Homo sapiens
QAFQVSLEDLTGHEGNEKGAGPEPPGSEEEEEEQEESLAVAEQVADFASSLLAALHCWHYRANALLFSRGAMGKGRRESESSRSSRRPSGRSPTSTEKRMSFESISSLPEVEPDPEAGSEQEVFSAVEGPSAEETPSDTESPEVLETQLDAHQGLLGMDPPGDMVDFVAAESTEDLKALSSEEEEEMGGAAQEPESLLPPSVLDQASVIAERFVSSFSRRSSVAQEDSKSSGFGSPRLVSRSSSVLSLEGSEKGLARHGSATDSLSCQLSPEVDISVGVATEDSPSVNGMEPPSPGCPVEPDRSSCKKKESALSTRDRLLLDKIKSYYENAEHHDAGFSVRRRESLSYIPKGLVRNSISRFNSLPRPDPEPVPPVGSKRQVGSRPTSWALFELPGPSQAVKGDPPPISDAEFRPSSEIVKIWEGMESSGGSPGKGPGQGQANGFDLHEPLFILEEHELGAITEESATASPESSSPTEGRSPAHLARELKELVKELSSSTQGELVAPLHPRIVQLSHVMDSHVSERVKNKVYQLARQYSLRIKSNKPVMARPPLQWEKVAPERDGKSPTVPCLQEEAGEPLGGKGKRKPVLSLFDYEQLMAQEHSPPKPSSAGEMSPQRFFFNPSAVSQRTTSPGGRPSARSPLSPTETFSWPDVRELCSKYASRDEARRAGGGRPRGPPVNRSHSVPENMVEPPLSGRVGRCRSLSTKRGRGGGEAAQSPGPLPQSKPDGGETLYVTADLTLEDNRRVIVMEKGPLPSPTAGLEESSGQGPSSPVALLGQVQDFQQSAECQPKEEGSRDPADPSQQGRVRNLREKFQALNSVG

SEQ ID NO: 915656 - protein, 823 aa, Homo sapiens; identical to SEQ ID NO: 915655

SEQ ID NO: 915657 - protein, 377 aa, Homo sapiens
QAFQVSLEDLTGHEGNEKGAGPEPPGSEEEEEEQEESLAVAEQVADFASSLLAALHCWHYRANALLFSRGAMGKGRRESESSRSSRRPSGRSPTSTEKRMSFESISSLPEVEPDPEAGSEQEVFSAVEGPSAEETPSDTESPEVLETQLDAHQGLLGMDPPGDMVDFVAAESTEDLKALSSEEEEEMGGAAQEPESLLPPSVLDQASVIAERFVSSFSRRSSVAQEDSKSSGFGSPRLVSRSSSVLSLEGSEKGLARHGSATDSLSCQLSPEVDISVGVATEDSPSVNGMEPPSPGCPVEPDRSSCKKKESALSTRDRLLLDKIKSYYENAEHHDAGFSVRRRESLSYIPKGLVRNSISRRLRQWPGEALFCNGAFS

SEQ ID NO: 915658 - protein, 823 aa, Homo sapiens; identical to SEQ ID NO: 915655

SEQ ID NO: 915659 - protein, 617 aa, Homo sapiens; identical to SEQ ID NO: 915654

SEQ ID NO: 915660 - protein, 597 aa, Homo sapiens
ADVDLRIPVTEAWFSRESRLTGKKSEKGLARHGSATDSLSCQLSPEVDISVGVATEDSPSVNGMEPPSPGCPVEPDRSSCKKKESALSTRDRLLLDKIKSYYENAEHHDAGFSVRRRESLSYIPKGLVRNSISRFNSLPRPDPEPVPPVGSKRQVGSRPTSWALFELPGPSQAVKGDPPPISDAEFRPSSEIVKIWEGMESSGGSPGKGPGQGQANGFDLHEPLFILEEHELGAITEESATASPESSSPTEGRSPAHLARELKELVKELSSSTQGELVAPLHPRIVQLSHVMDSHVSERVKNKVYQLARQYSLRIKSNKPVMARPPLQWEKVAPERDGKSPTVPCLQEEAGEPLGGKGKRKPVLSLFDYEQLMAQEHSPPKPSSAGEMSPQRFFFNPSAVSQRTTSPGGRPSARSPLSPTETFSWPDVRELCSKYASRDEARRAGGGRPRGPPVNRSHSVPENMVEPPLSGRVGRCRSLSTKRGRGGGEAAQSPGPLPQSKPDGGETLYVTADLTLEDNRRVIVMEKGPLPSPTAGLEESSGQGPSSPVALLGQVQDFQQSAECQPKEEGSRDPADPSQQGRVRNLREKFQALNSVG

SEQ ID NO: 915661 - protein, 823 aa, Homo sapiens; identical to SEQ ID NO: 915655

SEQ ID NO: 915662 - protein, 3325 aa, Homo sapiens
MEVEQEQRRRKVEAGRTKLAHFRQRKTKGDSSHSEKKTAKRKGSAVDASVQEESPVTKEDSALCGGGDICKSTSCDDTPDGAGGAFAAQPEDCDGEKREDLEQLQQKQVNDHPPEQCGMFTVSDHPPEQHGMFTVGDHPPEQRGMFTVSDHPPEQHGMFTVSDHPPEQRGMFTISDHQPEQRGMFTVSDHTPEQRGIFTISDHPAEQRGMFTKECEQECELAITDLESGREDEAGLHQSQAVHGLELEALRLSLSNMHTAQLELTQANLQKEKETALTELREMLNSRRAQELALLQSRQQHELELLREQHAREKEEVVLRCGQEAAELKEKLQSEMEKNAQIVKTLKEDWESEKDLCLENLRKELSAKHQSEMEDLQNQFQKELAEQRAELEKIFQDKNQAERALRNLESHHQAAIEKLREDLQSEHGRCLEDLEFKFKESEKEKQLELENLQASYEDLKAQSQEEIRRLWSQLDSARTSRQELSELHEQLLARTSRVEDLEQLKQREKTQHESELEQLRIYFEKKLRDAEKTYQEDLTLLQQRLQGAREDALLDSVEVGLSCVGLEEKPEKGRKDHVDELEPERHKESLPRFQAELEESHRHQLEALESPLCIQHEGHVSDRCCVETSALGHEWRLEPSEGHSQELPWVHLQGVQDGDLEADTERAARVLGLETEHKVQLSLLQTELKEEIELLKIENRNLFEKLQHETRLKDDLEKVKHNLIEDHQKELNNAKQKTELMKQEFQRKETDWKVMKEELQREAEEKLTLMLLELREKAESEKQTIINKLELREAEMRQLQDQQAAQILDLERSLTEQQARLQQLEQDLTSDDALHCSQCGREPPTAQDGELAALHVKEDCALQLMLARSRFLEERKEIAEKFSAEQDAFLQLLQERHQQQLLSVTAELEARHQAALGELTASLESKQGALLAARVAELQTKHAADLGALETRHLSSLDSLESCYLSEFQTIREEHRQALELLRADFEEQLWKKDSLHQTILTQELEKLKRKHEGELQSVRDHLRTEASTELAGTVAHELQGVHQGEFGSEKKTALHEKEETLRLQSAQAQPFHQEEKESLSLQLQKKNHQVQQLKDQVLSLSHEIEECRSELEVLQQRRERENREGANLLSMLKADVNLSHSERGALQDALRRLLGLFGETLRAAVTLRSRIGERVGLCLDDAGAGLALSTAPALEETWSDVALPELDRTLSECAEMSSVAEISSHMRESFLMSPESVRECEQPIRRVFQSLSLAVDGLMEMALDSSRQLEEARQLHSRFEKEFSFKNEETAQVVRKHQELLECLTEESAAKAELALELHKTQGTLEGFKVETADLKEVLAGKEDSEHRLVLELESLRRQLQQAAQEQAALREECTRLWSRGEATATDAEAREAALRKEVEDLTKEQSETRKQAEKDRSALLSQMKILESELEEQLSQHRGCAKQAEAVTALEQQVASLDKHLRNQRQFMDEQAAEREHEREEFQQEIQRLEGQLRQAAKPQPWGPRDSQQAPLDGEVELLQQKLREKLDEFNELAIQKESADRQVLMQEEEIKRLEEMNINIRKKVAQLQEEVEKQKNIVKGLEQDKEVLKKQQMSSLLLASTLQSTLDAGRCPEPPSGSPPEGPEIQLEVTQRALLRRESEVLDLKEQLEKMKGDLESKNEEILHLNLKLDMQNSQTAVSLRELEEENTSLKVIYTRSSEIEELKATIENLQENQKRLQKEKAEEIEQLHEVIEKLQHELSLMGPVVHEVSDSQAGSLQSELLCSQAGGPRGQALQGELEAALEAKEALSRLLADQERRHSQALEALQQRLQGAEEAAELQLAELERNVALREAEVEDMASRIQEFEAALKAKEATIAERNLEIDALNQRKAAHSAELEAVLLALARIRRALEQQPLAAGAAPPELQWLRAQCARLSRQLQVLHQRFLRCQVELDRRQARRATAHTRVPGAHPQPRMDGGAKAQVTGDVEASHDAALEPVVPDPQGDLQPVLVTLKDAPLCKQEGVMSVLTVCQRQLQSELLLVKNEMRLSLEDGGKGKEKVLEDCQLPKVDLVAQVKQLQEKLNRLLYSMTFQNVDAADTKSLWPMASAHLLESSWSDDSCDGEEPDISPHIDTCDANTATGGVTDVIKNQAIDACDANTTPGGVTDVIKNWDSLIPDEMPDSPIQEKSECQDMSLSSPTSVLGGSRHQSHTAEAGPRKSPVGMLDLSSWSSPEVLRKDWTLEPWPSLPVTPHSGALSLCSADTSLGDRADTSLPQTQGPGLLCSPGVSAAALALQWAESPPADDHHVQRTAVEKDVEDFITTSFDSQETLSSPPPGLEGKADRSEKSDGSGFGARLSPGSGGPEAQTAGPVTPASISGRFQPLPEAMKEKEVRPKHVKALLQMVRDESHQILALSEGLAPPSGEPHPPRKEDEIQDISLHGGKTQEVPTACPDWRGDLLQVVQEAFEKEQEMQGVELQPRLSGSDLGGHSSLLERLEKIIREQGDLQEKSLEHLRLPDRSSLLSEIQALRAQLRMTHLQNQEKLQHLRTALTSAEARGSQQEHQLRRQVELLAYKVEQEKCIAGDLQKTLSEEQEKANSVQKLLAAEQTVVRDLKSDLCESRQKSEQLSRSLCEVQQEVLQLRSMLSSKENELKAALQELESEQGKGRALQSQLEEEQLRHLQRESQSAKALEELRASLETQRAQSSRLCVALKHEQTAKDNLQKELRIEHSRCEALLAQERSQLSELQKDLAAEKSRTLELSEALRHERLLTEQLSQRTQEACVHQDTQAHHALLQKLKEEKSRVVDLQAMLEKVQQQALHSQQQLEAEAQKHCEALRREKEVSATLKSTVEALHTQKRELRCSLEREREKPAWLQAELEQSHPRLKEQEGRKAARRSAEARQSPAAAEQWRKWQRDKEKLRELELQRQRDLHKIKQLQQTVRDLESKDEVPGSRLHLGSARRAAGSDADHLREQQRELEAMRQRLLSAARLLTSFTSQAVDRTVNDWTSSNEKAVMSLLHTLEELKSDLSRPTSSQKKMAAELQFQFVDVLLKDNVSLTKALSTVTQEKLELSRAVSKLEKLLKHHLQKGCSPSRSERSAWKPDETAPQSSLRRPDPGRLPPAASEEAHTSNVKMEKLYLHYLRAESFRKALIYQKKYLLLLIGGFQDSEQETLSMIAHLGVFPSKAERKITSRPFTRFRTAVRVVIAILRLRFLVKKWQEVDRKGALAQGKAPRPGPRARQPQSPPRTRESPPTRDVPSGHTRDPARGRRLAAAASPHSGGRATPSPNSRLERSLTASQDPEHSLTEYIHHLEVIQQRLGGVLPDSTSKKSCHPMIKQ

SEQ ID NO: 915663 - protein, 3240 aa, Homo sapiens
MEVEQEQRRRKVEAGRTKLAHFRQRKTKGDSSHSEKKTAKRKGSAVDASVQEESPVTKEDSALCGGGDICKSTSCDDTPDGAGGAFAAQPEDCDGEKREDLEQLQQKQVNDHPPEQCGMFTVSDHPPEQHGMFTVGDHPPEQRGMFTVSDHPPEQRGMFTISDHQPEQRGMFTVSDHTPEQRGIFTISDHPAEQRGMFTKECEQECELAITDLESGREDEAGLHQSQRPFLRLQAVHGLELEALRLSLSNMHTAQLELTQANLQKEKETALTELREMLNSRRAQELALLQSRQQHELELLREQHAREKEEVVLRCGQEAAELKEKLQSEMEKNAQIVKTLKEDWESEKDLCLENLRKELSAKHQSEMEDLQNQFQKELAEQRAELEKIFQDKNQAERALRNLESHHQAAIEKLREDLQSEHGRCLEDLEFKFKESEKEKQLELENLQASYEDLKAQSQEEIRRLWSQLDSARTSRQELSELHEQLLARTSRVEDLEQLKQREKTQHESELEQLRIYFEKKLRDAEKTYQEDLTLLQQRLQGAREDALLDSVEVGLSCVGLEEKPEKGRKDHVDELEPERHKESLPRFQAELEESHRHQLEALESPLCIQHEGHVSDRCCVETSALGHEWRLEPSEGHSQELPWVHLQGVQDGDLEADTERAARVLGLETEHKVQLSLLQTELKEEIELLKIENRNLFEKLQHETRLKDDLEKVKHNLIEDHQKELNNAKQKTELMKQEFQRKETDWKVMKEELQREAEEKLTLMLLELREKAESEKQTIINKLELREAEMRQLQDQQAAQILDLERSLTEQQARLQQLEQDLTSDDALHCSQCGREPPTAQDGELAALHVKEDCALQLMLARSRFLEERKEIAEKFSAEQDAFLQLLQERHQQQLLSVTAELEARHQAALGELTASLESKQGALLAARVAELQTKHAADLGALETRHLSSLDSLESCYLSEFQTIREEHRQALELLRADFEEQLWKKDSLHQTILTQELEKLKRKHEGELQSVRDHLRTEASTELAGTVAHELQGVHQGEFGSEKKTALHEKEETLRLQSAQAQPFHQEEKESLSLQLQKKNHQVQQLKDQVLSLSHEIEECRSELEVLQQRRERENREGANLLSMLKADVNLSHSERGALQDALRRLLGLFGETLRAAVTLRSRIGERVGLCLDDAGAGLALSTAPALEETWSDVALPELDRTLSECAEMSSVAEISSHMRESFLMSPESVRECEQPIRRVFQSLSLAVDGLMEMALDSSRQLEEARQLHSRFEKEFSFKNEETAQVVRKHQELLECLTEESAAKAELALELHKTQGTLEGFKVETADLKEVLAGKEDSEHRLVLELESLRRQLQQAAQEQAALREECTRLWSRGEATATDAEAREAALRKEVEDLTKEQSETRKQAEKDRSALLSQMKILESELEEQLSQHRGCAKQAEAVTALEQQVASLDKHLRNQRQFMDEQAAEREHEREEFQQEIQRLEGQLRQAAKPQPWGPRDSQQAPLDGEVELLQQKLREKLDEFNELAIQKESADRQVLMQEEEIKRLEEMNINIRKKVAQLQEEVEKQKNIVKGLEQDKEVLKKQQMSSLLLASTLQSTLDAGRCPEPPSGSPPEGPEIQLEVTQRALLRRESEVLDLKEQLEKMKGDLESKNEEILHLNLKLDMQNSQTAVSLRELEEENTSLKVIYTRSSEIEELKATIENLQENQKRLQKEKAEEIEQLHEVIEKLQHELSLMGPVVHEVSDSQAGSLQSELLCSQAGGPRGQALQGELEAALEAKEALSRLLADQERRHSQALEALQQRLQGAEEAAELQLAELERNVALREAEVEDMASRIQEFEAALKAKEATIAERNLEIDALNQRKAAHSAELEAVLLALARIRRALEQQPLAAGAAPPELQWLRAQCARLSRQLQVLHQRFLRCQVELDRRQARRATAHTRVPGAHPQPRMDGGAKAQVTGDVEASHDAALEPVVPDPQGDLQPVLVTLKDAPLCKQEGVMSVLTVCQRQLQSELLLVKNEMRLSLEDGGKGKEKVLEDCQLPKVDLVAQVKQLQEKLNRLLYSMTFQNVDAADTKSLWPMASAHLLESSWSDDSCDGEEPDISPHIDTCDANTATGGVTDVIKNQAIDACDANTTPGGVTDVIKNWDSLIPDEMPDSPIQEKSECQDMSLSSPTSVLGGSRHQSHTAEAGPRKSPVGMLDLSSWSSPEVLRKDWTLEPWPSLPVTPHSGALSLCSADTSLGDRADTSLPQTQGPGLLCSPGVSAAALALQWAESPPADDHHVQRTAVEKDVEDFITTSFDSQETLSSPPPGLEGKADRSEKSDGSGFGARLSPGSGGPEAQTAGPVTPASISGRFQPLPEAMKEKEVRPKHVKALLQMVRDESHQILALSEGLAPPSGEPHPPRKEDEIQDISLHGGKTQEVPTACPDWRGDLLQVVQEAFEKEQEMQGVELQPRLSGSDLGGHSSLLERLEKIIREQGDLQEKSLEHLRLPDRSSLLSEIQALRAQLRMTHLQNQEKLQHLRTALTSAEARGSQQEHQLRRQVELLAYKVEQEKCIAGDLQKTLSEEQEKANSVQKLLAAEQTVVRDLKSDLCESRQKSEQLSRSLCEVQQEVLQLRSMLSSKENELKAALQELESEQGKGRALQSQLEEEQLRHLQRESQSAKALEELRASLETQRAQSSRLCVALKHEQTAKDNLQKELRIEHSRCEALLAQERSQLSELQKDLAAEKSRTLELSEALRHERLLTEQLSQRTQEACVHQDTQAHHALLQKLKEEKSRVVDLQAMLEKVQQQALHSQQQLEAEAQKHCEALRREKERELELQRQRDLHKIKQLQQTVRDLESKDEVPGSRLHLGSARRAAGSDADHLREQQRELEAMRQRLLSAARLLTSFTSQAVDRTVNDWTSSNEKAVMSLLHTLEELKSDLSRPTSSQKKMAAELQFQFVDVLLKDNVSLTKALSTVTQEKLELSRAVSKLEKLLKHHLQKGCSPSRSERSAWKPDETAPQSSLRRPDPGRLPPAASEEAHTSNVKMEKLYLHYLRAESFRKALIYQKKYLLLLIGGFQDSEQETLSMIAHLGVFPSKAERKITSRPFTRFRTAVRVVIAILRLRFLVKKWQEVDRKGALAQGKAPRPGPRARQPQSPPRTRESPPTRDVPSGHTRDPARGRRLAAAASPHSGGRATPSPNSRLERSLTASQDPEHSLTEYIHHLEVIQQRLGGVLPDSTSKKSCHPMIKQ

SEQ ID NO: 915664 - protein, 2874 aa, Homo sapiens
MEDLQNQFQKELAEQRAELEKIFQDKNQAERALRNLESHHQAAIEKLREDLQSEHGRCLEDLEFKFKESEKEKQLELENLQASYEDLKAQSQEEIRRLWSQLDSARTSRQELSELHEQLLARTSRVEDLEQLKQREKTQHESELEQLRIYFEKKLRDAEKTYQEDLTLLQQRLQGAREDALLDSVEVGLSCVGLEEKPEKGRKDHVDELEPERHKESLPRFQAELEESHRHQLEALESPLCIQHEGHVSDRCCVETSALGHEWRLEPSEGHSQELPWVHLQGVQDGDLEADTERAARVLGLETEHKVQLSLLQTELKEEIELLKIENRNLFEKLQHETRLKDDLEKVKHNLIEDHQKELNNAKQKTELMKQEFQRKETDWKVMKEELQREAEEKLTLMLLELREKAESEKQTIINKLELREAEMRQLQDQQAAQILDLERSLTEQQARLQQLEQDLTSDDALHCSQCGREPPTAQDGELAALHVKEDCALQLMLARSRFLEERKEIAEKFSAEQDAFLQLLQERHQQQLLSVTAELEARHQAALGELTASLESKQGALLAARVAELQTKHAADLGALETRHLSSLDSLESCYLSEFQTIREEHRQALELLRADFEEQLWKKDSLHQTILTQELEKLKRKHEGELQSVRDHLRTEASTELAGTVAHELQGVHQGEFGSEKKTALHEKEETLRLQSAQAQPFHQEEKESLSLQLQKKNHQVQQLKDQVLSLSHEIEECRSELEVLQQRRERENREGANLLSMLKADVNLSHSERGALQDALRRLLGLFGETLRAAVTLRSRIGERVGLCLDDAGAGLALSTAPALEETWSDVALPELDRTLSECAEMSSVAEISSHMRESFLMSPESVRECEQPIRRVFQSLSLAVDGLMEMALDSSRQLEEARQLHSRFEKEFSFKNEETAQVVRKHQELLECLTEESAAKAELALELHKTQGTLEGFKVETADLKEVLAGKEDSEHRLVLELESLRRQLQQAAQEQAALREECTRLWSRGEATATDAEAREAALRKEVEDLTKEQSETRKQAEKDRSALLSQMKILESELEEQLSQHRGCAKQAEAVTALEQQVASLDKHLRNQRQFMDEQAAEREHEREEFQQEIQRLEGQLRQAAKPQPWGPRDSQQAPLDGEVELLQQKLREKLDEFNELAIQKESADRQVLMQEEEIKRLEEMNINIRKKVAQLQEEVEKQKNIVKGLEQDKEVLKKQQMSSLLLASTLQSTLDAGRCPEPPSGSPPEGPEIQLEVTQRALLRRESEVLDLKEQLEKMKGDLESKNEEILHLNLKLDMQNSQTAVSLRELEEENTSLKVIYTRSSEIEELKATIENLQENQKRLQKEKAEEIEQLHEVIEKLQHELSLMGPVVHEVSDSQAGSLQSELLCSQAGGPRGQALQGELEAALEAKEALSRLLADQERRHSQALEALQQRLQGAEEAAELQLAELERNVALREAEVEDMASRIQEFEAALKAKEATIAERNLEIDALNQRKAAHSAELEAVLLALARIRRALEQQPLAAGAAPPELQWLRAQCARLSRQLQVLHQRFLRCQVELDRRQARRATAHTRVPGAHPQPRMDGGAKAQVTGDVEASHDAALEPVVPDPQGDLQPVLVTLKDAPLCKQEGVMSVLTVCQRQLQSELLLVKNEMRLSLEDGGKGKEKVLEDCQLPKVDLVAQVKQLQEKLNRLLYSMTFQNVDAADTKSLWPMASAHLLESSWSDDSCDGEEPDISPHIDTCDANTATGGVTDVIKNQAIDACDANTTPGGVTDVIKNWDSLIPDEMPDSPIQEKSECQDMSLSSPTSVLGGSRHQSHTAEAGPRKSPVGMLDLSSWSSPEVLRKDWTLEPWPSLPVTPHSGALSLCSADTSLGDRADTSLPQTQGPGLLCSPGVSAAALALQWAESPPADDHHVQRTAVEKDVEDFITTSFDSQETLSSPPPGLEGKADRSEKSDGSGFGARLSPGSGGPEAQTAGPVTPASISGRFQPLPEAMKEKEVRPKHVKALLQMVRDESHQILALSEGLAPPSGEPHPPRKEDEIQDISLHGGKTQEVPTACPDWRGDLLQVVQEAFEKEQEMQGVELQPRLSGSDLGGHSSLLERLEKIIREQGDLQEKSLEHLRLPDRSSLLSEIQALRAQLRMTHLQNQEKLQHLRTALTSAEARGSQQEHQLRRQVELLAYKVEQEKCIAGDLQKTLSEEQEKANSVQKLLAAEQTVVRDLKSDLCESRQKSEQLSRSLCEVQQEVLQLRSMLSSKENELKAALQELESEQGKGRALQSQLEEEQLRHLQRESQSAKALEELRASLETQRAQSSRLCVALKHEQTAKDNLQKELRIEHSRCEALLAQERSQLSELQKDLAAEKSRTLELSEALRHERLLTEQLSQRTQEACVHQDTQAHHALLQKLKEEKSRVVDLQAMLEKVQQQALHSQQQLEAEAQKHCEALRREKERELELQRQRDLHKIKQLQQTVRDLESKDEVPGSRLHLGSARRAAGSDADHLREQQRELEAMRQRLLSAARLLTSFTSQAVDRTVNDWTSSNEKAVMSLLHTLEELKSDLSRPTSSQKKMAAELQFQFVDVLLKDNVSLTKALSTVTQEKLELSRAVSKLEKLLKHHLQKGCSPSRSERSAWKPDETAPQSSLRRPDPGRLPPAASEEAHTSNVKMEKLYLHYLRAESFRKALIYQKKYLLLLIGGFQDSEQETLSMIAHLGVFPSKAERKITSRPFTRFRTAVRVVIAILRLRFLVKKWQEVDRKGALAQGKAPRPGPRARQPQSPPRTRESPPTRDVPSGHTRDPARGRRLAAAASPHSGGRATPSPNSRLERSLTASQDPEHSLTEYIHHLEVIQQRLGGVLPDSTSKKSCHPMIKQ

SEQ ID NO: 915665 - protein, 2859 aa, Homo sapiens
GAAGPSSVSLLAVPPTSLPLRVLLLLPALWLLPPLGESSPHSGAYESLSRRGPSSLSGSGMGPFPSSAPTTGNQALASRLACCGCPILRRLPDSVYVAELHEQLLARTSRVEDLEQLKQREKTQHESELEQLRIYFEKKLRDAEKTYQEDLTLLQQRLQGAREDALLDSVEVGLSCVGLEEKPEKGRKDHVDELEPERHKESLPRFQAELEESHRHQLEALESPLCIQHEGHVSDRCCVETSALGHEWRLEPSEGHSQELPWVHLQGVQDGDLEADTERAARVLGLETEHKVQLSLLQTELKEEIELLKIENRNLFEKLQHETRLKDDLEKVKHNLIEDHQKELNNAKQKTELMKQEFQRKETDWKVMKEELQREAEEKLTLMLLELREKAESEKQTIINKLELREAEMRQLQDQQAAQILDLERSLTEQQARLQQLEQDLTSDDALHCSQCGREPPTAQDGELAALHVKEDCALQLMLARSRFLEERKEIAEKFSAEQDAFLQLLQERHQQQLLSVTAELEARHQAALGELTASLESKQGALLAARVAELQTKHAADLGALETRHLSSLDSLESCYLSEFQTIREEHRQALELLRADFEEQLWKKDSLHQTILTQELEKLKRKHEGELQSVRDHLRTEASTELAGTVAHELQGVHQGEFGSEKKTALHEKEETLRLQSAQAQPFHQEEKESLSLQLQKKNHQVQQLKDQVLSLSHEIEECRSELEVLQQRRERENREGANLLSMLKADVNLSHSERGALQDALRRLLGLFGETLRAAVTLRSRIGERVGLCLDDAGAGLALSTAPALEETWSDVALPELDRTLSECAEMSSVAEISSHMRESFLMSPESVRECEQPIRRVFQSLSLAVDGLMEMALDSSRQLEEARQLHSRFEKEFSFKNEETAQVVRKHQELLECLTEESAAKAELALELHKTQGTLEGFKVETADLKEVLAGKEDSEHRLVLELESLRRQLQQAAQEQAALREECTRLWSRGEATATDAEAREAALRKEVEDLTKEQSETRKQAEKDRSALLSQMKILESELEEQLSQHRGCAKQAEAVTALEQQVASLDKHLRNQRQFMDEQAAEREHEREEFQQEIQRLEGQLRQAAKPQPWGPRDSQQAPLDGEVELLQQKLREKLDEFNELAIQKESADRQVLMQEEEIKRLEEMNINIRKKVAQLQEEVEKQKNIVKGLEQDKEVLKKQQMSSLLLASTLQSTLDAGRCPEPPSGSPPEGPEIQLEVTQRALLRRESEVLDLKEQLEKMKGDLESKNEEILHLNLKLDMQNSQTAVSLRELEEENTSLKVIYTRSSEIEELKATIENLQENQKRLQKEKAEEIEQLHEVIEKLQHELSLMGPVVHEVSDSQAGSLQSELLCSQAGGPRGQALQGELEAALEAKEALSRLLADQERRHSQALEALQQRLQGAEEAAELQLAELERNVALREAEVEDMASRIQEFEAALKAKEATIAERNLEIDALNQRKAAHSAELEAVLLALARIRRALEQQPLAAGAAPPELQWLRAQCARLSRQLQVLHQRFLRCQVELDRRQARRATAHTRVPGAHPQPRMDGGAKAQVTGDVEASHDAALEPVVPDPQGDLQPVLVTLKDAPLCKQEGVMSVLTVCQRQLQSELLLVKNEMRLSLEDGGKGKEKVLEDCQLPKVDLVAQVKQLQEKLNRLLYSMTFQNVDAADTKSLWPMASAHLLESSWSDDSCDGEEPDISPHIDTCDANTATGGVTDVIKNQAIDACDANTTPGGVTDVIKNWDSLIPDEMPDSPIQEKSECQDMSLSSPTSVLGGSRHQSHTAEAGPRKSPVGMLDLSSWSSPEVLRKDWTLEPWPSLPVTPHSGALSLCSADTSLGDRADTSLPQTQGPGLLCSPGVSAAALALQWAESPPADDHHVQRTAVEKDVEDFITTSFDSQETLSSPPPGLEGKADRSEKSDGSGFGARLSPGSGGPEAQTAGPVTPASISGRFQPLPEAMKEKEVRPKHVKALLQMVRDESHQILALSEGLAPPSGEPHPPRKEDEIQDISLHGGKTQEVPTACPDWRGDLLQVVQEAFEKEQEMQGVELQPRLSGSDLGGHSSLLERLEKIIREQGDLQEKSLEHLRLPDRSSLLSEIQALRAQLRMTHLQNQEKLQHLRTALTSAEARGSQQEHQLRRQVELLAYKVEQEKCIAGDLQKTLSEEQEKANSVQKLLAAEQTVVRDLKSDLCESRQKSEQLSRSLCEVQQEVLQLRSMLSSKENELKAALQELESEQGKGRALQSQLEEEQLRHLQRESQSAKALEELRASLETQRAQSSRLCVALKHEQTAKDNLQKELRIEHSRCEALLAQERSQLSELQKDLAAEKSRTLELSEALRHERLLTEQLSQRTQEACVHQDTQAHHALLQKLKEEKSRVVDLQAMLEKVQQQALHSQQQLEAEAQKHCEALRREKERELELQRQRDLHKIKQLQQTVRDLESKDEVPGSRLHLGSARRAAGSDADHLREQQRELEAMRQRLLSAARLLTSFTSQAVDRTVNDWTSSNEKAVMSLLHTLEELKSDLSRPTSSQKKMAAELQFQFVDVLLKDNVSLTKALSTVTQEKLELSRAVSKLEKLLKHHLQKGCSPSRSERSAWKPDETAPQSSLRRPDPGRLPPAASEEAHTSNVKMEKLYLHYLRAESFRKALIYQKKYLLLLIGGFQDSEQETLSMIAHLGVFPSKAERKITSRPFTRFRTAVRVVIAILRLRFLVKKWQEVDRKGALAQGKAPRPGPRARQPQSPPRTRESPPTRDVPSGHTRDPARGRRLAAAASPHSGGRATPSPNSRLERSLTASQDPEHSLTEYIHHLEVIQQRLGGVLPDSTSKKSCHPMIKQ

SEQ ID NO: 915666 - protein, 2254 aa, Homo sapiens
TYYYYLPLLGIVDHGSKRKHEGELQSVRDHLRTEASTELAGTVAHELQGVHQGEFGSEKKTALHEKEETLRLQSAQAQPFHQEEKESLSLQLQKKNHQVQQLKDQVLSLSHEIEECRSELEVLQQRRERENREGANLLSMLKADVNLSHSERGALQDALRRLLGLFGETLRAAVTLRSRIGERVGLCLDDAGAGLALSTAPALEETWSDVALPELDRTLSECAEMSSVAEISSHMRESFLMSPESVRECEQPIRRVFQSLSLAVDGLMEMALDSSRQLEEARQLHSRFEKEFSFKNEETAQVVRKHQELLECLTEESAAKAELALELHKTQGTLEGFKVETADLKEVLAGKEDSEHRLVLELESLRRQLQQAAQEQAALREECTRLWSRGEATATDAEAREAALRKEVEDLTKEQSETRKQAEKDRSALLSQMKILESELEEQLSQHRGCAKQAEAVTALEQQVASLDKHLRNQRQFMDEQAAEREHEREEFQQEIQRLEGQLRQAAKPQPWGPRDSQQAPLDGEVELLQQKLREKLDEFNELAIQKESADRQVLMQEEEIKRLEEMNINIRKKVAQLQEEVEKQKNIVKGLEQDKEVLKKQQMSSLLLASTLQSTLDAGRCPEPPSGSPPEGPEIQLEVTQRALLRRESEVLDLKEQLEKMKGDLESKNEEILHLNLKLDMQNSQTAVSLRELEEENTSLKVIYTRSSEIEELKATIENLQENQKRLQKEKAEEIEQLHEVIEKLQHELSLMGPVVHEVSDSQAGSLQSELLCSQAGGPRGQALQGELEAALEAKEALSRLLADQERRHSQALEALQQRLQGAEEAAELQLAELERNVALREAEVEDMASRIQEFEAALKAKEATIAERNLEIDALNQRKAAHSAELEAVLLALARIRRALEQQPLAAGAAPPELQWLRAQCARLSRQLQVLHQRFLRCQVELDRRQARRATAHTRVPGAHPQPRMDGGAKAQVTGDVEASHDAALEPVVPDPQGDLQPVLVTLKDAPLCKQEGVMSVLTVCQRQLQSELLLVKNEMRLSLEDGGKGKEKVLEDCQLPKVDLVAQVKQLQEKLNRLLYSMTFQNVDAADTKSLWPMASAHLLESSWSDDSCDGEEPDISPHIDTCDANTATGGVTDVIKNQAIDACDANTTPGGVTDVIKNWDSLIPDEMPDSPIQEKSECQDMSLSSPTSVLGGSRHQSHTAEAGPRKSPVGMLDLSSWSSPEVLRKDWTLEPWPSLPVTPHSGALSLCSADTSLGDRADTSLPQTQGPGLLCSPGVSAAALALQWAESPPADDHHVQRTAVEKDVEDFITTSFDSQETLSSPPPGLEGKADRSEKSDGSGFGARLSPGSGGPEAQTAGPVTPASISGRFQPLPEAMKEKEVRPKHVKALLQMVRDESHQILALSEGLAPPSGEPHPPRKEDEIQDISLHGGKTQEVPTACPDWRGDLLQVVQEAFEKEQEMQGVELQPRLSGSDLGGHSSLLERLEKIIREQGDLQEKSLEHLRLPDRSSLLSEIQALRAQLRMTHLQNQEKLQHLRTALTSAEARGSQQEHQLRRQVELLAYKVEQEKCIAGDLQKTLSEEQEKANSVQKLLAAEQTVVRDLKSDLCESRQKSEQLSRSLCEVQQEVLQLRSMLSSKENELKAALQELESEQGKGRALQSQLEEEQLRHLQRESQSAKALEELRASLETQRAQSSRLCVALKHEQTAKDNLQKELRIEHSRCEALLAQERSQLSELQKDLAAEKSRTLELSEALRHERLLTEQLSQRTQEACVHQDTQAHHALLQKLKEEKSRVVDLQAMLEKVQQQALHSQQQLEAEAQKHCEALRREKERELELQRQRDLHKIKQLQQTVRDLESKDEVPGSRLHLGSARRAAGSDADHLREQQRELEAMRQRLLSAARLLTSFTSQAVDRTVNDWTSSNEKAVMSLLHTLEELKSDLSRPTSSQKKMAAELQFQFVDVLLKDNVSLTKALSTVTQEKLELSRAVSKLEKLLKHHLQKGCSPSRSERSAWKPDETAPQSSLRRPDPGRLPPAASEEAHTSNVKMEKLYLHYLRAESFRKALIYQKKYLLLLIGGFQDSEQETLSMIAHLGVFPSKAERKITSRPFTRFRTAVRVVIAILRLRFLVKKWQEVDRKGALAQGKAPRPGPRARQPQSPPRTRESPPTRDVPSGHTRDPARGRRLAAAASPHSGGRATPSPNSRLERSLTASQDPEHSLTEYIHHLEVIQQRLGGVLPDSTSKKSCHPMIKQ

SEQ ID NO: 915667 - protein, 2113 aa, Homo sapiens
MLGADSLQSPRGALQDALRRLLGLFGETLRAAVTLRSRIGERVGLCLDDAGAGLALSTAPALEETWSDVALPELDRTLSECAEMSSVAEISSHMRESFLMSPESVRECEQPIRRVFQSLSLAVDGLMEMALDSSRQLEEARQLHSRFEKEFSFKNEETAQVVRKHQELLECLTEESAAKAELALELHKTQGTLEGFKVETADLKEVLAGKEDSEHRLVLELESLRRQLQQAAQEQAALREECTRLWSRGEATATDAEAREAALRKEVEDLTKEQSETRKQAEKDRSALLSQMKILESELEEQLSQHRGCAKQAEAVTALEQQVASLDKHLRNQRQFMDEQAAEREHEREEFQQEIQRLEGQLRQAAKPQPWGPRDSQQAPLDGEVELLQQKLREKLDEFNELAIQKESADRQVLMQEEEIKRLEEMNINIRKKVAQLQEEVEKQKNIVKGLEQDKEVLKKQQMSSLLLASTLQSTLDAGRCPEPPSGSPPEGPEIQLEVTQRALLRRESEVLDLKEQLEKMKGDLESKNEEILHLNLKLDMQNSQTAVSLRELEEENTSLKVIYTRSSEIEELKATIENLQENQKRLQKEKAEEIEQLHEVIEKLQHELSLMGPVVHEVSDSQAGSLQSELLCSQAGGPRGQALQGELEAALEAKEALSRLLADQERRHSQALEALQQRLQGAEEAAELQLAELERNVALREAEVEDMASRIQEFEAALKAKEATIAERNLEIDALNQRKAAHSAELEAVLLALARIRRALEQQPLAAGAAPPELQWLRAQCARLSRQLQVLHQRFLRCQVELDRRQARRATAHTRVPGAHPQPRMDGGAKAQVTGDVEASHDAALEPVVPDPQGDLQPVLVTLKDAPLCKQEGVMSVLTVCQRQLQSELLLVKNEMRLSLEDGGKGKEKVLEDCQLPKVDLVAQVKQLQEKLNRLLYSMTFQNVDAADTKSLWPMASAHLLESSWSDDSCDGEEPDISPHIDTCDANTATGGVTDVIKNQAIDACDANTTPGGVTDVIKNWDSLIPDEMPDSPIQEKSECQDMSLSSPTSVLGGSRHQSHTAEAGPRKSPVGMLDLSSWSSPEVLRKDWTLEPWPSLPVTPHSGALSLCSADTSLGDRADTSLPQTQGPGLLCSPGVSAAALALQWAESPPADDHHVQRTAVEKDVEDFITTSFDSQETLSSPPPGLEGKADRSEKSDGSGFGARLSPGSGGPEAQTAGPVTPASISGRFQPLPEAMKEKEVRPKHVKALLQMVRDESHQILALSEGLAPPSGEPHPPRKEDEIQDISLHGGKTQEVPTACPDWRGDLLQVVQEAFEKEQEMQGVELQPRLSGSDLGGHSSLLERLEKIIREQGDLQEKSLEHLRLPDRSSLLSEIQALRAQLRMTHLQNQEKLQHLRTALTSAEARGSQQEHQLRRQVELLAYKVEQEKCIAGDLQKTLSEEQEKANSVQKLLAAEQTVVRDLKSDLCESRQKSEQLSRSLCEVQQEVLQLRSMLSSKENELKAALQELESEQGKGRALQSQLEEEQLRHLQRESQSAKALEELRASLETQRAQSSRLCVALKHEQTAKDNLQKELRIEHSRCEALLAQERSQLSELQKDLAAEKSRTLELSEALRHERLLTEQLSQRTQEACVHQDTQAHHALLQKLKEEKSRVVDLQAMLEKVQQQALHSQQQLEAEAQKHCEALRREKERELELQRQRDLHKIKQLQQTVRDLESKDEVPGSRLHLGSARRAAGSDADHLREQQRELEAMRQRLLSAARLLTSFTSQAVDRTVNDWTSSNEKAVMSLLHTLEELKSDLSRPTSSQKKMAAELQFQFVDVLLKDNVSLTKALSTVTQEKLELSRAVSKLEKLLKHHLQKGCSPSRSERSAWKPDETAPQSSLRRPDPGRLPPAASEEAHTSNVKMEKLYLHYLRAESFRKALIYQKKYLLLLIGGFQDSEQETLSMIAHLGVFPSKAERKITSRPFTRFRTAVRVVIAILRLRFLVKKWQEVDRKGALAQGKAPRPGPRARQPQSPPRTRESPPTRDVPSGHTRDPARGRRLAAAASPHSGGRATPSPNSRLERSLTASQDPEHSLTEYIHHLEVIQQRLGGVLPDSTSKKSCHPMIKQ

SEQ ID NO: 915668 - protein, 3282 aa, Homo sapiens
MEVEQEQRRRKVEAGRTKLAHFRQRKTKGDSSHSEKKTAKRKGSAVDASVQEESPVTKEDSALCGGGDICKSTSCDDTPDGAGGAFAAQPEDCDGEKREDLEQLQQKQVNDHPPEQCGMFTVSDHPPEQHGMFTVGDHPPEQRGMFTVSDHPPEQRGMFTISDHQPEQRGMFTVSDHTPEQRGIFTISDHPAEQRGMFTKECEQECELAITDLESGREDEAGLHQSQRPFLRLQAVHGLELEALRLSLSNMHTAQLELTQANLQKEKETALTELREMLNSRRAQELALLQSRQQHELELLREQHAREKEEVVLRCGQEAAELKEKLQSEMEKNAQIVKTLKEDWESEKDLCLENLRKELSAKHQSEMEDLQNQFQKELAEQRAELEKIFQDKNQAERALRNLESHHQAAIEKLREDLQSEHGRCLEDLEFKFKESEKEKQLELENLQASYEDLKAQSQEEIRRLWSQLDSARTSRQELSELHEQLLARTSRVEDLEQLKQREKTQHESELEQLRIYFEKKLRDAEKTYQEDLTLLQQRLQGAREDALLDSVEVGLSCVGLEEKPEKGRKDHVDELEPERHKESLPRFQAELEESHRHQLEALESPLCIQHEGHVSDRCCVETSALGHEWRLEPSEGHSQELPWVHLQGVQDGDLEADTERAARVLGLETEHKVQLSLLQTELKEEIELLKIENRNLFEKLQHETRLKDDLEKVKHNLIEDHQKELNNAKQKTELMKQEFQRKETDWKVMKEELQREAEEKLTLMLLELREKAESEKQTIINKLELREAEMRQLQDQQAAQILDLERSLTEQQARLQQLEQDLTSDDALHCSQCGREPPTAQDGELAALHVKEDCALQLMLARSRFLEERKEIAEKFSAEQDAFLQLLQERHQQQLLSVTAELEARHQAALGELTASLESKQGALLAARVAELQTKHAADLGALETRHLSSLDSLESCYLSEFQTIREEHRQALELLRADFEEQLWKKDSLHQTILTQELEKLKRKHEGELQSVRDHLRTEASTELAGTVAHELQGVHQGEFGSEKKTALHEKEETLRLQSAQAQPFHQEEKESLSLQLQKKNHQVQQLKDQVLSLSHEIEECRSELEVLQQRRERENREGANLLSMLKADVNLSHSERGALQDALRRLLGLFGETLRAAVTLRSRIGERVGLCLDDAGAGLALSTAPALEETWSDVALPELDRTLSECAEMSSVAEISSHMRESFLMSPESVRECEQPIRRVFQSLSLAVDGLMEMALDSSRQLEEARQLHSRFEKEFSFKNEETAQVVRKHQELLECLTEESAAKAELALELHKTQGTLEGFKVETADLKEVLAGKEDSEHRLVLELESLRRQLQQAAQEQAALREECTRLWSRGEATATDAEAREAALRKEVEDLTKEQSETRKQAEKDRSALLSQMKILESELEEQLSQHRGCAKQAEAVTALEQQVASLDKHLRNQRQFMDEQAAEREHEREEFQQEIQRLEGQLRQAAKPQPWGPRDSQQAPLDGEVELLQQKLREKLDEFNELAIQKESADRQVLMQEEEIKRLEEMNINIRKKVAQLQEEVEKQKNIVKGLEQDKEVLKKQQMSSLLLASTLQSTLDAGRCPEPPSGSPPEGPEIQLEVTQRALLRRESEVLDLKEQLEKMKGDLESKNEEILHLNLKLDMQNSQTAVSLRELEEENTSLKVIYTRSSEIEELKATIENLQENQKRLQKEKAEEIEQLHEVIEKLQHELSLMGPVVHEVSDSQAGSLQSELLCSQAGGPRGQALQGELEAALEAKEALSRLLADQERRHSQALEALQQRLQGAEEAAELQLAELERNVALREAEVEDMASRIQEFEAALKAKEATIAERNLEIDALNQRKAAHSAELEAVLLALARIRRALEQQPLAAGAAPPELQWLRAQCARLSRQLQVLHQRFLRCQVELDRRQARRATAHTRVPGAHPQPRMDGGAKAQVTGDVEASHDAALEPVVPDPQGDLQPVLVTLKDAPLCKQEGVMSVLTVCQRQLQSELLLVKNEMRLSLEDGGKGKEKVLEDCQLPKVDLVAQVKQLQEKLNRLLYSMTFQNVDAADTKSLWPMASAHLLESSWSDDSCDGEEPDISPHIDTCDANTATGGVTDVIKNQAIDACDANTTPGGVTDVIKNWDSLIPDEMPDSPIQEKSEMSGHVSFFTDQRTWWLPPPDLPVTPHSGALSLCSADTSLGDRADTSLPQTQGPGLLCSPGVSAAALALQWAESPPADDHHVQRTAVEKDVEDFITTSFDSQETLSSPPPGLEGKADRSEKSDGSGFGARLSPGSGGPEAQTAGPVTPASISGRFQPLPEAMKEKEVRPKHVKALLQMVRDESHQILALSEGLAPPSGEPHPPRKEDEIQDISLHGGKTQEVPTACPDWRGDLLQVVQEAFEKEQEMQGVELQPRLSGSDLGGHSSLLERLEKIIREQGDLQEKSLEHLRLPDRSSLLSEIQALRAQLRMTHLQNQEKLQHLRTALTSAEARGSQQEHQLRRQVELLAYKVEQEKCIAGDLQKTLSEEQEKANSVQKLLAAEQTVVRDLKSDLCESRQKSEQLSRSLCEVQQEVLQLRSMLSSKENELKAALQELESEQGKGRALQSQLEEEQLRHLQRESQSAKALEELRASLETQRAQSSRLCVALKHEQTAKDNLQKELRIEHSRCEALLAQERSQLSELQKDLAAEKSRTLELSEALRHERLLTEQLSQRTQEACVHQDTQAHHALLQKLKEEKSRVVDLQAMLEKVQQQALHSQQQLEAEAQKHCEALRREKEVSATLKSTVEALHTQKRELRCSLEREREKPAWLQAELEQSHPRLKEQEGRKAARRSAEARQSPAAAEQWRKWQRDKEKLRELELQRQRDLHKIKQLQQTVRDLESKDEVPGSRLHLGSARRAAGSDADHLREQQRELEAMRQRLLSAARLLTSFTSQAVDRTVNDWTSSNEKAVMSLLHTLEELKSDLSRPTSSQKKMAAELQFQFVDVLLKDNVSLTKALSTVTQEKLELSRAVSKLEKLLKHHLQKGCSPSRSERSAWKPDETAPQSSLRRPDPGRLPPAASEEAHTSNVKMEKLYLHYLRAESFRKALIYQKKYLLLLIGGFQDSEQETLSMIAHLGVFPSKAERKITSRPFTRFRTAVRVVIAILRLRFLVKKWQEVDRKGALAQGKAPRPGPRARQPQSPPRTRESPPTRDVPSGHTRDPARGRRLAAAASPHSGGRATPSPNSRLERSLTASQDPEHSLTEYIHHLEVIQQRLGGVLPDSTSKKSCHPMIKQ

SEQ ID NO: 915669 - protein, 3050 aa, Homo sapiens
MEVEQEQRRRKVEAGRTKLAHFRQRKTKGDSSHSEKKTAKRKGSAVDASVQEESPVTKEDSALCGGGDICKSTSCDDTPDGAGGAFAAQPEDCDGEKREDLEQLQQKQVNDHPPEQCGMFTVSDHPPEQHGMFTVGDHPPEQRGMFTVSDHPPEQRGMFTISDHQPEQRGMFTVSDHTPEQRGIFTISDHPAEQRGMFTKECEQECELAITDLESGREDEAGLHQSQRPFLRLQAVHGLELEALRLSLSNMHTAQLELTQANLQKEKETALTELREMLNSRRAQELALLQSRQQHELELLREQHAREKEEVVLRCGQEAAELKEKLQSEMEKNAQIVKTLKEDWESEKDLCLENLRKELSAKHQSEMEDLQNQFQKELAEQRAELEKIFQDKNQAERALRNLESHHQAAIEKLREDLQSEHGRCLEDLEFKFKESEKEKQLELENLQASYEDLKAQSQEEIRRLWSQLDSARTSRQELSELHEQLLARTSRVEDLEQLKQREKTQHESELEQLRIYFEKKLRDAEKTYQEDLTLLQQRLQGAREDALLDSVEVGLSCVGLEEKPEKGRKDHVDELEPERHKESLPRFQAELEESHRHQLEALESPLCIQHEGHVSDRCCVETSALGHEWRLEPSEGHSQELPWVHLQGVQDGDLEADTERAARVLGLETEHKVQLSLLQTELKEEIELLKIENRNLFEKLQHETRLKDDLEKVKHNLIEDHQKELNNAKQKTELMKQEFQRKETDWKVMKEELQREAEEKLTLMLLELREKAESEKQTIINKLELREAEMRQLQDQQAAQILDLERSLTEQQARLQQLEQDLTSDDALHCSQCGREPPTAQDGELAALHVKEDCALQLMLARSRFLEERKEIAEKFSAEQDAFLQLLQERHQQQLLSVTAELEARHQAALGELTASLESKQGALLAARVAELQTKHAADLGALETRHLSSLDSLESCYLSEFQTIREEHRQALELLRADFEEQLWKKDSLHQTILTQELEKLKRKHEGELQSVRDHLRTEASTELAGTVAHELQGVHQGEFGSEKKTALHEKEETLRLQSAQAQPFHQEEKESLSLQLQKKNHQVQQLKDQVLSLSHEIEECRSELEVLQQRRERENREGANLLSMLKADVNLSHSERGALQDALRRLLGLFGETLRAAVTLRSRIGERVGLCLDDAGAGLALSTAPALEETWSDVALPELDRTLSECAEMSSVAEISSHMRESFLMSPESVRECEQPIRRVFQSLSLAVDGLMEMALDSSRQLEEARQLHSRFEKEFSFKNEETAQVVRKHQELLECLTEESAAKAELALELHKTQGTLEGFKVETADLKEVLAGKEDSEHRLVLELESLRRQLQQAAQEQAALREECTRLWSRGEATATDAEAREAALRKEVEDLTKEQSETRKQAEKDRSALLSQMKILESELEEQLSQHRGCAKQAEAVTALEQQVASLDKHLRNQRQFMDEQAAEREHEREEFQQEIQRLEGQLRQAAKPQPWGPRDSQQAPLDGEVELLQQKLREKLDEFNELAIQKESADRQVLMQEEEIKRLEEMNINIRKKVAQLQEEVEKQKNIVKGLEQDKEVLKKQQMSSLLLASTLQSTLDAGRCPEPPSGSPPEGPEIQLEVTQRALLRRESEVLDLKEQLEKMKGDLESKNEEILHLNLKLDMQNSQTAVSLRELEEENTSLKVIYTRSSEIEELKATIENLQENQKRLQKEKAEEIEQLHEVIEKLQHELSLMGPVVHEVSDSQAGSLQSELLCSQAGGPRGQALQGELEAALEAKEALSRLLADQERRHSQALEALQQRLQGAEEAAELQLAELERNVALREAEVEDMASRIQEFEAALKAKEATIAERNLEIDALNQRKAAHSAELEAVLLALARIRRALEQQPLAAGAAPPELQWLRAQCARLSRQLQVLHQRFLRCQVELDRRQARRATAHTRVPGAHPQPRMDGGAKAQVTGDVEASHDAALEPVVPDPQGDLQPVLVTLKDAPLCKQEGVMSVLTVCQRQLQSELLLVKNEMRLSLEDGGKGKEKVLEDCQLPKVDLVAQVKQLQEKLNRLLYSMTFQNVDAADTKSLWPMASAHLLESSWSDDSCDGEEPDISPHIDTCDANTATGGVTDVIKNQAIDACDANTTPGGVTDVIKNWDSLIPDEMPDSPIQEKSECQDMSLSSPTSVLGGSRHQSHTAEAGPRKSPVGMLDLSSWSSPEVLRKDWTLEPWPSLPVTPHSGALSLCSADTSLGDRADTSLPQTQGPGLLCSPGVSAAALALQWAESPPADDHHVQRTAVEKDVEDFITTSFDSQETLSSPPPGLEGKADRSEKSDGSGFGARLSPGSGGPEAQTAGPVTPASISGRFQPLPEAMKEKEVRPKHVKALLQMVRDESHQILALSEGLAPPSGEPHPPRKEDEIQDISLQWGKDAGSAHRVPRLEKELRIEHSRCEALLAQERSQLSELQKDLAAEKSRTLELSEALRHERLLTEQLSQRTQEACVHQDTQAHHALLQKLKEEKSRVVDLQAMLEKVQQQALHSQQQLEAEAQKHCEALRREKEVSATLKSTVEALHTQKRELRCSLEREREKPAWLQAELEQSHPRLKEQEGRKAARRSAEARQSPAAAEQWRKWQRDKEKLRELELQRQRDLHKIKQLQQTVRDLESKDEVPGSRLHLGSARRAAGSDADHLREQQRELEAMRQRLLSAARLLTSFTSQAVDRTVNDWTSSNEKAVMSLLHTLEELKSDLSRPTSSQKKMAAELQFQFVDVLLKDNVSLTKALSTVTQEKLELSRAVSKLEKLLKHHLQKGCSPSRSERSAWKPDETAPQSSLRRPDPGRLPPAASEEAHTSNVKMEKLYLHYLRAESFRKALIYQKKYLLLLIGGFQDSEQETLSMIAHLGVFPSKAERKITSRPFTRFRTAVRVVIAILRLRFLVKKWQEVDRKGALAQGKAPRPGPRARQPQSPPRTRESPPTRDVPSGHTRDPARGRRLAAAASPHSGGRATPSPNSRLERSLTASQDPEHSLTEYIHHLEVIQQRLGGVLPDSTSKKSCHPMIKQ

SEQ ID NO: 915670 - protein, 3328 aa, Homo sapiens
MEVEQEQRRRKVEAGRTKLAHFRQRKTKGDSSHSEKKTAKRKGSAVDASVQEESPVTKEDSALCGGGDICKSTSCDDTPDGAGGAFAAQPEDCDGEKREDLEQLQQKQVNDHPPEQCGMFTVSDHPPEQHGMFTVGDHPPEQRGMFTVSDHPPEQRGMFTISDHQPEQRGMFTVSDHTPEQRGIFTISDHPAEQRGMFTKECEQECELAITDLESGREDEAGLHQSQRPFLRLQAVHGLELEALRLSLSNMHTAQLELTQANLQKEKETALTELREMLNSRRAQELALLQSRQQHELELLREQHAREKEEVVLRCGQEAAELKEKLQSEMEKNAQIVKTLKEDWESEKDLCLENLRKELSAKHQSEMEDLQNQFQKELAEQRAELEKIFQDKNQAERALRNLESHHQAAIEKLREDLQSEHGRCLEDLEFKFKESEKEKQLELENLQASYEDLKAQSQEEIRRLWSQLDSARTSRQELSELHEQLLARTSRVEDLEQLKQREKTQHESELEQLRIYFEKKLRDAEKTYQEDLTLLQQRLQGAREDALLDSVEVGLSCVGLEEKPEKGRKDHVDELEPERHKESLPRFQAELEESHRHQLEALESPLCIQHEGHVSDRCCVETSALGHEWRLEPSEGHSQELPWVHLQGVQDGDLEADTERAARVLGLETEHKVQLSLLQTELKEEIELLKIENRNLFEKLQHETRLKDDLEKVKHNLIEDHQKELNNAKQKTELMKQEFQRKETDWKVMKEELQREAEEKLTLMLLELREKAESEKQTIINKLELREAEMRQLQDQQAAQILDLERSLTEQQARLQQLEQDLTSDDALHCSQCGREPPTAQDGELAALHVKEDCALQLMLARSRFLEERKEIAEKFSAEQDAFLQLLQERHQQQLLSVTAELEARHQAALGELTASLESKQGALLAARVAELQTKHAADLGALETRHLSSLDSLESCYLSEFQTIREEHRQALELLRADFEEQLWKKDSLHQTILTQELEKLKRKHEGELQSVRDHLRTEASTELAGTVAHELQGVHQGEFGSEKKTALHEKEETLRLQSAQAQPFHQEEKESLSLQLQKKNHQVQQLKDQVLSLSHEIEECRSELEVLQQRRERENREGANLLSMLKADVNLSHSERGALQDALRRLLGLFGETLRAAVTLRSRIGERVGLCLDDAGAGLALSTAPALEETWSDVALPELDRTLSECAEMSSVAEISSHMRESFLMSPESVRECEQPIRRVFQSLSLAVDGLMEMALDSSRQLEEARQLHSRFEKEFSFKNEETAQVVRKHQELLECLTEESAAKAELALELHKTQGTLEGFKVETADLKEVLAGKEDSEHRLVLELESLRRQLQQAAQEQAALREECTRLWSRGEATATDAEAREAALRKEVEDLTKEQSETRKQAEKDRSALLSQMKILESELEEQLSQHRGCAKQAEAVTALEQQVASLDKHLRNQRQFMDEQAAEREHEREEFQQEIQRLEGQLRQAAKPQPWGPRDSQQAPLDGEVELLQQKLREKLDEFNELAIQKESADRQVLMQEEEIKRLEEMNINIRKKVAQLQEEVEKQKNIVKGLEQDKEVLKKQQMSSLLLASTLQSTLDAGRCPEPPSGSPPEGPEIQLEVTQRALLRRESEVLDLKEQLEKMKGDLESKNEEILHLNLKLDMQNSQTAVSLRELEEENTSLKVIYTRSSEIEELKATIENLQENQKRLQKEKAEEIEQLHEVIEKLQHELSLMGPVVHEVSDSQAGSLQSELLCSQAGGPRGQALQGELEAALEAKEALSRLLADQERRHSQALEALQQRLQGAEEAAELQLAELERNVALREAEVEDMASRIQEFEAALKAKEATIAERNLEIDALNQRKAAHSAELEAVLLALARIRRALEQQPLAAGAAPPELQWLRAQCARLSRQLQVLHQRFLRCQVELDRRQARRATAHTRVPGAHPQPRMDGGAKAQVTGDVEASHDAALEPVVPDPQGDLQPVLVTLKDAPLCKQEGVMSVLTVCQRQLQSELLLVKNEMRLSLEDGGKGKEKVLEDCQLPKVDLVAQVKQLQEKLNRLLYSMTFQNVDAADTKSLWPMASAHLLESSWSDDSCDGEEPDISPHIDTCDANTATGGVTDVIKNQAIDACDANTTPGGVTDVIKNWDSLIPDEMPDSPIQEKSECQDMSLSSPTSVLGGSRHQSHTAEAGPRKSPVGMLDLSSWSSPEVLRKDWTLEPWPSLPVTPHSGALSLCSADTSLGDRADTSLPQTQGPGLLCSPGVSAAALALQWAESPPADDHHVQRTAVEKDVEDFITTSFDSQETLSSPPPGLEGKADRSEKSDGSGFGARLSPGSGGPEAQTAGPVTPASISGRFQPLPEAMKEKEVRPKHVKALLQMVRDESHQILALSEGLAPPSGEPHPPRKEDEIQDISLHGGKTQEVPTACPDWRGDLLQVVQEAFEKEQEMQGVELQPRLSGSDLGGHSSLLERLEKIIREQGDLQEKSLEHLRLPDRSSLLSEIQALRAQLRMTHLQNQEKLQHLRTALTSAEARGSQQEHQLRRQVELLAYKVEQEKCIAGDLQKTLSEEQEKANSVQKLLAAEQTVVRDLKSDLCESRQKSEQLSRSLCEVQQEVLQLRSMLSSKENELKAALQELESEQGKGRALQSQLEEEQLRHLQRESQSAKALEELRASLETQRAQSSRLCVALKHEQTAKDNLQKELRIEHSRCEALLAQERSQLSELQKDLAAEKSRTLELSEALRHERLLTEQLSQRTQEACVHQDTQAHHALLQKLKEEKSRVVDLQAMLEKVQQQALHSQQQLEAEAQKHCEALRREKEVSATLKSTVEALHTQKRELRCSLEREREKPAWLQAELEQSHPRLKEQEGRKAARRSAEARQSPAAAEQWRKWQRDKEKLRELELQRQRDLHKIKQLQQTVRDLESKDEVPGSRLHLGSARRAAGSDADHLREQQRELEAMRQRLLSAARLLTSFTSQAVDRTVNDWTSSNEKAVMSLLHTLEELKSDLSRPTSSQKKMAAELQFQFVDVLLKDNVSLTKALSTVTQEKLELSRAVSKLEKLLKHHLQKGCSPSRSERSAWKPDETAPQSSLRRPDPGRLPPAASEEAHTSNVKMEKLYLHYLRAESFRKALIYQKKYLLLLIGGFQDSEQETLSMIAHLGVFPSKAERKITSRPFTRFRTAVRVVIAILRLRFLVKKWQEVDRKGALAQGKAPRPGPRARQPQSPPRTRESPPTRDVPSGHTRDPARGRRLAAAASPHSGGRATPSPNSRLERSLTASQDPEHSLTEYIHHLEVIQQRLGGVLPGNASPRRVFIKLIITVPWKRRVC

SEQ ID NO: 915671 - protein, 3328 aa, Homo sapiens; identical to SEQ ID NO: 915670

SEQ ID NO: 915672 - protein, 437 aa, Homo sapiens
  misc_feature (10)..(11): Xaa can be any naturally occurring amino acid
FYIIKTDRRXXCKPRPLSRELELQRQRDLHKIKQLQQTVRDLESKDEVPGSRLHLGSARRAAGSDADHLREQQRELEAMRQRLLSAARLLTSFTSQAVDRTVNDWTSSNEKAVMSLLHTLEELKSDLSRPTSSQKKMAAELQFQFVDVLLKDNVSLTKALSTVTQEKLELSRAVSKLEKLLKHHLQKGCSPSRSERSAWKPDETAPQSSLRRPDPGRLPPAASEEAHTSNVKMEKLYLHYLRAESFRKALIYQKKYLLLLIGGFQDSEQETLSMIAHLGVFPSKAERKITSRPFTRFRTAVRVVIAILRLRFLVKKWQEVDRKGALAQGKAPRPGPRARQPQSPPRTRESPPTRDVPSGHTRDPARGRRLAAAASPHSGGRATPSPNSRLERSLTASQDPEHSLTEYIHHLEVIQQRLGGVLPDSTSKKSCHPMIKQ

SEQ ID NO: 915673 - protein, 324 aa, Homo sapiens [sequence omitted]

SEQ ID NO: 915674 - protein, 324 aa, Homo sapiens [sequence omitted]

SEQ ID NO: 915675 - protein, 116 aa, Homo sapiens
VRPKHVKVWLAGAALTASHVQPRGIPQALCPALPGRALEGQLFLGASEHLHFNDSREAAPRWPRKPPTQPCTGPLGGRLPSGQGGSCEPVGRWCCPESQSRPVPLSRLCLPPACAL

SEQ ID NO: 915676 - protein, 91 aa, Homo sapiens
PALEETWSDVALPELDRTLSECAEMSSVAEISSHMRESFLMSPESVRECEQPIRRVFQSLSLAVDGLMEMALDSSRQVRPRLPGSCGDVNN

SEQ ID NO: 915677 - protein, 79 aa, Homo sapiens [sequence omitted]

SEQ ID NO: 915678 - protein, 149 aa, Homo sapiens
SLKMMGHLVDNVDCRLAWASLAAAPTLPSAIVWMCCPTFLCWKLNPQCSSVGRIVFSKKMMQLENYRTVLIFTQIRRGCIWRIDAKDVKSSAMSERAPHNFRVFLDIHLKEINCCSLNIPHTSVIIPLLTLIHKSYWNFLPTMSVVQNP

SEQ ID NO: 915679 - protein, 149 aa, Homo sapiens; identical to SEQ ID NO: 915678

SEQ ID NO: 915680 - protein, 182 aa, Homo sapiens
WLQTTQRMAHWLQPDMEEADSQCTSQFFQKLSRYRRQPTKTFAKAEFLRITGSTAFRCICGEVPSLVNRSRVKSLVDTTEAMELSTGRINQRFKSSVQRAGSKGHAVNQIWKKRKGFCQGKQPFVDRRKLREARERYSQTTGSRSEMDLLFNAVVGAARDGWEHDSRGHCDLASHRGKNPRS

SEQ ID NO: 915681 - protein, 156 aa, Homo sapiens
MTNVCKEWSLSQALSRLCEILFCQLFPRHVKAIKLPWKKKRRKRKKWKKKEKEKEEEERKRKRKRKKKEEEEEEEEEEEEEEEEEEEEEEAAADALRRHAWSRTFTVTTCSAQGSSTYSIPSYPGPFLSPDVFLLLSYLPGVALEDLPNLFSKIPE

SEQ ID NO: 915682 - protein, 156 aa, Homo sapiens; identical to SEQ ID NO: 915681

SEQ ID NO: 915683 - protein, 201 aa, Homo sapiens
PPSLVLRSSPLFCLTMLQHCLLLEGGILQKEVCSADNFLPLSHSAWGENFAENPNQTLRIPGISLFRGNKSSPRLGRALLQAPPPPRPTCGLLTGQALSYIQLTFQNQIKKLSNTFRKDRAWLLGSQVNRTARQGLAGEALRRPCMPCILGSWEGCSVTGRKMKLKKSKGPVGLNTVGETWAVCLKSPLGKTTPSWWTPSP

SEQ ID NO: 915684 - protein, 201 aa, Homo sapiens; identical to SEQ ID NO: 915683

SEQ ID NO: 915685 - protein, 122 aa, Homo sapiens
MYCCSLLVKLSQSEITVTTDNRLLKIWDRQKSQKSTIYSAPRALWVLKHSGQSVIETLLASGCPVHVTVESKQCNWRYIHMWTIMAIIYTKFTVSWKGGMGSWKNTKIASQLECDVGEAAHG

SEQ ID NO: 915686 - protein, 157 aa, Homo sapiens
MMTMAVLWNRKGGKRAAALNIYRIPPSSRKPALCPTPRDRLEYDEDRLEHSEDRPERPLGEPQGFQDGARACADADGRGEGLAYVRARELHTLEVTGLETVAQSKAHVASLEGLIPEDKVVLLAGSPLQNEATLGQCGVEALTTLEVVGRRLGVHNV

SEQ ID NO: 915687 - protein, 116 aa, Homo sapiens
MMTMAVLWNRKGGKRAAALNIYRIPPSSRKPALCPTPRDRLEYDEDRLEHSEDRPERPLGEPQGFQDGARACADADGRGEGLAYVRARELHTLEVTGLETVAQSKFTMSKSQLILC

SEQ ID NO: 915688 - protein, 158 aa, Homo sapiens
PQSVMFHFLCPCVLIVQFPPMSLNKRPITMLQKHMQELRPNKLLTKNSFHSECFMIFIETLMLYSSQNGSTCSTKEIFPYFLGVKHLSSTNDHTLSFSITLFKTNQLKEPTKEAPLLKLESHTFIRPGTESGEHRKYVFKEYHKEIPSYIFVIYIVRM

SEQ ID NO: 915689 - protein, 325 aa, Homo sapiens
MSKAQCIVANEAMAPVVNSAVSDCPTLKTKLLVSDKSYDGWLDFKKLIQVAPPKQTYMRTKSQDPMAIFFTKGTTGAPKMVEYSQYGLGMGFSQASRRWMDLQPTDVLWSLGDAFGGSLSLSAVLGTWFQGACVFLCHMPTFCPETVLNVLSRFPITTLSANPEMYQELLQHKCFTSYRFKSLKQCVAAGGPISPGVIEDWKRITKLDIYEGYGQTETGLLCATSKTIKLKPSSLGKPLPPYIVQIVDENSNLLPPGEEGNIAIRIKLNQPASLYCPHMVSWEEYASARGHMLYLTGDRGIMDEDGYFWWSGRVDDVANALGQRL

SEQ ID NO: 915690 - protein, 327 aa, Homo sapiens
GTGRTLLCIVANEAMAPVVNSAVSDCPTLKTKLLVSDKSYDGWLDFKKLIQVAPPKQTYMRTKSQDPMAIFFTKGTTGAPKMVEYSQYGLGMGFSQASRRWMDLQPTDVLWSLGDAFGGSLSLSAVLGTWFQGACVFLCHMPTFCPETVLNVLSRFPITTLSANPEMYQELLQHKCFTSYRFKSLKQCVAAGGPISPGVIEDWKRITKLDIYEGYGQTETGLLCATSKTIKLKPSSLGKPLPPYIVQIVDENSNLLPPGEEGNIAIRIKLNQPASLYCPHMVSWEEYASARGHMLYLTGDRGIMDEDGYFWWSGRVDDVANALGQRL

SEQ ID NO: 915691 - protein, 165 aa, Homo sapiens
TLKDCLLGKVWLSMKSNYSNLANKTLSAVIPPPPQAFSGLAPVTQSSPPCLCPCCPRTSPPARRLSTWWPQYDLPDLQALSLNNLPLSVDVQQTFGKVSLGPYSVGVTDRILKLLYFSGSHSPGNPGPDKASEGALMTQSPLKGPAPHDCHTGDSVPTPGICQTH

SEQ ID NO: 915692 - protein, 292 aa, Homo sapiens
MWNCRCWNSLEGSEEDTKMWESLELPRDLNGFDQNADKDMENEIQDEMVSDGDEELVGNWNPEAYEENVVLWAGPKVPVLCAWSPASQPLQPTERGQHRARAVASEGASIKPWQLPHGVEPASAEKSRIEVWKPLPRFQKMYGNIWMPRQKFAVGAGSSWRTSARAIQKGNVRSEPPHRVPTGAPPSGAVRRGPPSRHQNDRFTNSLHHAPGRPTDTQQQAMKAPGREAVSCKATGVELPKTMGTLLLHRCDLDVRHGVKGGHFGALRFDRPAEFRTCMGPVAPLFWQVSPI

SEQ ID NO: 915693 - protein, 151 aa, Homo sapiens
MVKPLWVPAVCSAQPQGPPTTLAALRQPRYRFPDFGTETTTPAPELLKAQVSQPGRKPATAAGSPAPRSAASSRTLSDAVLPWGHGRKKGPGWGTWPRRGGRGGSAGLPAAPARVPTRRHVTRRALSHREASGWAAGIGQSAGPSGAEGRW

SEQ ID NO: 915694 - protein, 193 aa, Homo sapiens
MMGTGKIAQVKMKKTSQGKTMVKANTVRIDGILEVLLCLQEHSFYFMCNENSSILALFKINDSEGILAPHKRLLDGMECDHRSTCDEPLSPQGRRTVAGTQSVPFSCSCGFFHCMDMGCEGMESLYRDIRCRWRAEQAGLQHQAPWDECSILTAMSALCLHSVCEAPSVMTRCWPAWPGQSSEEHYKNVEAIC

SEQ ID NO: 915695 - protein, 143 aa, Homo sapiens
MASTSASGESFSKLTIMMEGKGEAGGSTCTRKKKKQLYRACTVEEVSGWALASNGYWTFDVTFTLIKNGSWLLTWRHLPAGVDRHLIQESWHLAGAPLGRSFQRKEQAAIFAVLQPLLVIPRKTVWSGPPANSSRPAEEASEC

SEQ ID NO: 915696 - protein, 131 aa, Homo sapiens [sequence omitted]

SEQ ID NO: 915697 - protein, 109 aa, Homo sapiens
QAAALQRTRVPERPAGPAQLSLGAFSQKETRLRNNNRNGTALPMRSSLAPEASNQRFLSSLWPAGRGPRRLFFSLTEQLRPPFRGRQCGLAGPDRGDQGLIPSRVDCWK

SEQ ID NO: 915698 - protein, 395 aa, Homo sapiens
LPNPPCSSTSPFQHNPLPTPLPSPNHRSPSCRKKPMRRTPPERGVGKDPPKKHNLNPARKHPPQWEAPTLVDEQPLENYLDMEYFGTIGIGTPAQDFTVVFDTGSSNLWVPSVYCSSLACNNHPTNLSPSFTTQSLQTSTSPLPHSTISSTPIHLSPTQPSTISDTNQIFGLSETEPCSFLYYAPFDGILGLAYPSISSSGATPVFDNIWNQGLVSQDLFSVYLSADDQSGSVVIFGGIDSSYYTGSLNWVPVTVEGYWQITVDSITMNGEAIACAEGCQAIVDTGTSLLTGPTSPIANIQSDIGASENSDGDMVVSCSAISSLPDIVFTINGVQYPVPPSAYILQSEGSCISGFQGMNLPTESGELWILGDVFIRQYFTVFDRANNQVGLAPVA

SEQ ID NO: 915699 - protein, 122 aa, Homo sapiens
LPNPPCSSTSPFQHNPLPTPLPSPNHRSPSCRKKPMRRTPPERGVGKDPPKKHNLNPARKHPPQWEAPTLVDEQPLENYLDMEYFGTIGIGTPAQDFTVVFDTGSSYPGVYCLRYLIESYHV

SEQ ID NO: 915700 - protein, 396 aa, Homo sapiens
LPNPPCSSTSPFQHNPLPTPLPSPNHRSPSCRKKPMRRTPPERGVGKDPPKKHNLNPARKHPPQWEAPTLVDEQPLENYLDMEYFGTIGIGTPAQDFTVVFDTGSSNLWVPSVYCSSLACTNHNRFNPEDSSTYQSTSETVSITYGTGSMTGILGYDTVQVGGISDTNQIFGLSETEPCSFLYYAPFDGILGLAYPSISSSGATPVFDNIWNQGLVSQDLFSVYLSADDQSGSVVIFGGIDSSYYTGSLNWVPVTVEGYWQITVDSITMNGEAIACAEGCQAIVDTGTSLLTGPTSPIANIQSDIGASENSDGDMVVSCSAISSLPDIVFTINGVQYPVPPSAYILQSEGSCISGFQGMNLPTESGELWILGDVFIRQYFTVFDRANNQVGLAPVA

SEQ ID NO: 915701 - protein, 336 aa, Homo sapiens
VEFCTLSPHWYTEQPLENYLDMEYFGTIGIGTPAQDFTVVFDTGSSNLWVPSVYCSSLACTNHNRFNPEDSSTYQSTSETVSITYGTGSMTGILGYDTVQVGGISDTNQIFGLSETEPCSFLYYAPFDGILGLAYPSISSSGATPVFDNIWNQGLVSQDLFSVYLSADDQSGSVVIFGGIDSSYYTGSLNWVPVTVEGYWQITVDSITMNGEAIACAEGCQAIVDTGTSLLTGPTSPIANIQSDIGASENSDGDMVVSCSAISSLPDIVFTINGVQYPVPPSAYILQSEGSCISGFQGMNLPTESGELWILGDVFIRQYFTVFDRANNQVGLAPVA

SEQ ID NO: 915702 - protein, 139 aa, Homo sapiens
MKKKYLEPCPSSSLEDCGYSIILNYYLQLTFSMGPSPIELNMIHIINTQLSHFLQIYAIYFKYIYGKGVCVCVLWCVCVWCGVCVCVSTYFPAEVIVPNLWQVKKLGEGGHAYSSFIQYCKSFFVPPLVYLLCVQYTVS

SEQ ID NO: 915703 - protein, 223 aa, Homo sapiens
VPCPSWSEARGKASMVIQLQGQIRNQPVLPEDRGLCLLTTRNNWGPEGLDETDFKTTTSSEIPGVRRPVLCVPVSALPLTSNVTLMALLQLILGGSLSSSVDGSEMEPLPLPPEALYPSLQWPSGGADRPLDLHQEAATASECSEHSRSWGMEAFSSIRRRKEKQPPKRHLLSASCGREAEANPGFQWGGGGSTLTDKDNSVLQDFERYYKHNRGLRRIYQDP

SEQ ID NO: 915704 - protein, 120 aa, Homo sapiens
MEKSDMEVSNQITLVEDVLAKLCKTIYLLANLLARPLPEGVDPLKLEIYLTDEDFERKDVGLLQTSDNGCTPRIRSERWTCQGKASEASVPTISTMDALLTDQRPLFLILNWPLLSFCLY

SEQ ID NO: 915705 - protein, 1088 aa, Homo sapiens
MHSLSDPARWELRKGRPGRGRSPRTEFCFSTKDKEPRGRQLKDLLPAFCSLQKLPVTNRAAHGLCASLGPDFMTFKVPSSWRHSDSICREWFTLAGAPSRDVLLVSAIITVSLSVTVVLCGLCHWCQRKLEGHSSPEGAGRGSGAEPPAPHRAAPPSPQPTAPRAAAPQDLHSRPHSCRPAQKCGGTLGAAGGEGGDGGPGGVRDVWNRAGCPALFLGPLCLRLSQNFRKGGGGGWAMCLCVCEAPVCRLPLASFLCGFPALECVRVCIGMFAHVCVCVDLDRDFWNNNESTVQQKWSSYPPKEFILNISPYAPYGDPRLSLKASLAGEPPRQPYLAPPAGPGAHPTFCAVRMGLPVWVPPPRLWSLLPPRCVLPWLLGGRCGTLLSGAKVAAAAGLAVEREGRLGEKPAPVPPPGEDALRSGGAAPSEPGSGGKAGRGRWRTVQSHLAAGKLNLSKELWAYLAGQAWAGPWSLLGEAVAATAVATAPMEAWRGPAARTLHWGLLVLALGFFLFHCDPFICFSFLSSPPPAPSFEDSTLSTATTLESIPSSTGEPKCQRPRTLMRQQSLQQPLSQHQRGRQPSQPTTSQSLGQLQAHMASAPGPNPRAYGRGQARQGTSAGSKYRAAGGRSRSNPGSWDHVVGQIRNRGLDMKSFLEGRMVVLSLVLGLSEQDDFANIPDLQNPGTQQNQNAQGDKRYEHRRGPAAAAAEKEARRGRLPRPAPAAGRAVSGSFPSPCLPVLPAGGKAVNTAPVPGQTPHDESDRRTEPRSSVSDLVNSLTSEMLMADFCWCKRSGSTFPDCDGVANLAATEMALSQLSSEEDEAHEGCSRENLGRIQFSVGYNFQESTLTVKIMKAQELPAKDFSGTSDPFVKIYLLPDKKHKLETKVKRKNLNPHWNETFLFEGFPYEKVVQRILYLQVLDYDRFSRNDPIGEVSIPLNKVDLTQMQTFWKDLKPCSDGSGSRGELLLSLCYNPSANSIIVNIIKARNLKAMDIGGTSDPYVKVWLMYKDKRVEKKKTVTMKRNLNPIFNESFAFDIPTEKLRETTIIITVMDKDKLSRNDVIGKFPLHLPINNHITLGKWLGLSKL

SEQ ID NO: 915706 - protein, 166 aa, Homo sapiens
SFLNFLLYSRAQLQCASAWLHDTYYFYMGWPLKKKKALQWLGPHIPAEATCQEDDEEKKDDNVDDAILWLPQLFCGALCSQENLTVLCPFLSLWPPWLLPWAAEGSSDAREGALLAQPKVSGTGSPARSSSGTKDPAWAGARRLELPCRRHCFSCPHRPLLLLGNA

SEQ ID NO: 915707 - protein, 302 aa, Homo sapiens
MATVKSELIECFTSEEPFHHRKVSITGTGSVGMACATSILLKGLSDELAFVDLDEGKLKGETMDLQHDSPFMKMSNIVCSKDYLVTANPHLVIITAGARREKGEMRFNLVRQNVAIFKLMISSIVQQSPLCKLIIVSNPVDILTYVAWKLSAFPKNRVIGSGCNLDTVRFQFFIGQKLGIHSESCRGWILGEHGDSSVPVWSGMNIAGVLLKDLNSDIGTDKDPEKWKNVHKEVIASAYEIIEMKSSTSWAIGLSGADLTESILKNLRRKHPVSTIIKGLYGINEEVFLSIPSLERRVLPTL

SEQ ID NO: 915708 - protein, 708 aa, Homo sapiens
MFPVCFNLQEEGGVADDSAISNLLWRVTESRESQMMIEERKQLITVREEAWKTRGRGAANDSTQFTVAGRMVKKGLASPTAITPVASAICGKTRGTTPVSKPLEVGGMHETVLTVTGKSVKELMKPDDDETFAQFYRNVDCNMLRSPVELDEDFDVIFDPYAPKKYFVESKTPRSSRGGGVTDRDRGSASIRRLTSSVAEHKWAVRPKRQVQASKNPLKMLAAREDLLQEYTEQRLNVAFMESKRIKVEKREYLNPHPASVFGNGFFRCFTHCLVFCLVKANNGAQKALMNFSEVTLAGLASKENFSNVSLRSVNLTEQNSNNSAVPFKRLMLLQIKGRRHVQTRLVEPRASALNSGDCFLLLSPHCCFLWVGEFANAIEKAKVAAGDPKEDELYEAAIIETNCIYCLMDDKLVPDDDYWGKIPKCSLLQPKEVLVFDFGSEVYVWHGKEVTLAQRKIEFQLAKHLWNGTFDYENCDINPLDPGECNPLIRRKGQGRPDWAIFGRLTEHNETILFKEKFLDWTELKRPNEKNPGELAQHKEDSRADVKRNNVTRMVSVPQTTAGAILDRVNIGCGCGLVEGHHRRQFEITSVSVDVWYILEFDYSRLPKQSIGQFHEGDAYVVKWKFMTPLQNTHPDAWRWGKGESGELRRNHPFPCQGGAFPTALLTPSHLGEHAGHRDQVKISDPVSKTVIHDVKQVQEHPAGGSH

SEQ ID NO: 915709 - protein, 708 aa, Homo sapiens; identical to SEQ ID NO: 915708

SEQ ID NO: 915710 - protein, 174 aa, Homo sapiens
MNPCFCGFLVLLSCCLSLLDSQLHNLIALQITCFKDVEIPNFFCDPSQLPHHACCDTFTNNIVMYFPAAIFGFLPTSGILFSYYKIVSSILRVSSSGGNYKALSACGSHLSVVCLFYGTGVGGYLSSDVSSSPRKGAVASVMYTVVTPMLNPFIYSLRNRDIKSVLRRLHGRTV

SEQ ID NO: 915711 - protein, 271 aa, Homo sapiens
EVRLPSRRGPQLGEGSPRPQPSAQEVEAANMPSSPLDSRAHVLVHAGDLRASRLGGCGTPPERRGKTGPGGAGGAHAVAFLARRRFKKQNPEPHLHPHSGPRARPGRQCSGRPWVALSPPLLQTPPPENRSHPTRPGEPPTRGCVRLGSASVQPLRVRIPDPASRRRLAERRVPATPTSRRGHGDLRGAGGGRDSGRGEGTQLGCGARGRSPSGLRLGSLPTSPGPSQDSTSPSAFPLPPAVSTLRLVLLSAPSPTLSSPSCPPPPLFCSL

SEQ ID NO: 915712 - protein, 225 aa, Homo sapiens
MPSMRIFISVNVLLASAVSLGEPVNHADSLAPNQNLWDGIRRSKSGWGCLVTMGFTRSIPDYFAVNRTTHTVMQLHIQLGKHIGIEDAYFRNVPDCCSLHYVSNDEFLNGLVLGHALGTVRAANKLHVAMAHFGTTIVPSFLCRLGGPEKQIKLECYGDHYPCLLSFFKGGTNFCNSFQDVAFLLIYHHGWKRRYGMTKSSRLIPAPDMKSSIFPRSPSEITIWH

SEQ ID NO: 915713 - protein, 365 aa, Homo sapiens
PQFPHLPMRILKVVAASSDTLLVPNREFSKEPELMPKTPSQKNRRKKRRISYVQDENRDPIRRRKSRSSQLSSRRLRSKDSVEKLATVVGENGSVLRRVTRAAAAAAAATMALAAPSSPTPESPTMLTKKPEDNHTQCQLVPVVEIGISERQNAEQHVTQLMSTEPLPRTLSPTPASATAPTSQGIPTSDEESTPKKSKARILESITVSSLMATPQDPKGQGVGTGRSASKLRIAQVSPGPRDSPAFPDSPWRERVLAPILPDNFSTPTGSRTDSQSVRHSPIAPSSPSPQVLAQKYSLVAKQESVVRRASRRLAKKTAEEPAASGRIISRRCSCSHHLPKPGCYTQEGSWLPFSVPGLLSSLFS

SEQ ID NO: 915714 - protein, 217 aa, Homo sapiens
MGASLHSRPACALPECGAAMLRRLEDPQTPGDQRRCVHCAYFQCVQRESKPHMRKMLVYWMLEVCEEQCCEEEQCCKEEVFPLAMNHLHATCPTSPPTRKAQLQLLVAVSMRLASKLRKTGPMTIEKMCIYTDHAVSPCQLRDWEVMVLGKLKWDLAAVIAHDFLALILHRPTGLGQKACPDLFGCLQRKLTLWPPPEAHREHCQPTVDVHLGPKGS

SEQ ID NO: 915715 - protein, 139 aa, Homo sapiens
SGLGMATQAAAWLGGGAGQQPTHGRGAQSCYRETPAPALPAEPAKRSVRASQSPAHRRNRGPFEMHVPGPRPLAQGRQNSGGRGAAQLSPELRNSGKSVREPGLGSALRPPRWQRVRYGRPGTRGSGPGYGHLPPSPSR

SEQ ID NO: 915716 - protein, 179 aa, Homo sapiens
MRGQRSLLLGPARLCLRLLLLLGYRRRCPPLLRGLVQRWRYGKVCLRSLLYNSFGGSDTAVDAAFEPVYWLVDNVIRWFGVVFVVLVIVLTGSIVAIAYLCVLPLILRTYSVPRLCWHFFYSHWNLILIVFHYYQAITTPPGYPPQGRNDIATVSICKKCIYPKPARTHHCSICNRNQG

SEQ ID NO: 915717 - protein, 266 aa, Homo sapiens
MRGQRSLLLGPARLCLRLLLLLGYRRRCPPLLRGLVQRWRYGKVCLRSLLYNSFGGSDTAVDAAFEPVYWLVDNVIRWFGVVFVVLVIVLTGSIVAIAYLCVLPLILRTYSVPRLCWHFFYSHWNLILIVFHYYQAITTPPGYPPQGRNDIATVSICKKCIYPKPARTHHCSICNRCVLKMDHHCPWLNNCVGHYNHRYFFSFCFFMTLGCVYCSYGSWDLFREAYAAIETYHQTPPPTFSFRERMTHKSLVYLWFLCRYLFLIVL

SEQ ID NO: 915718 - protein, 477 aa, Homo sapiens
MPSVMEKPSAGSGILSRSRAKTVPNGGQPHSEDDSSEEEHSHDSMIRVGTNYQAVIPECKPESPARYSNKELKGMLVWSPNHCVSDAKLDKYIAMAKEKHGYNIEQALGMLLWHKHDVEKSLADLANFTPFPDEWTVEDKVLFEQAFGFHGKCFQRIQQMLPDKLIPSLVKYYYSWKKTRSRTSVMDRQARRLGGRKDKEDSDELEEGRGGVSEGEPDPADPKREPLPSRPLNARPGPGKKEVQVSQYRHHPLRTRRRPPKGMYLSPEGLTAVSGSPDLANLTLRGLDSQLISLKRQVQSMKQTNSSLRQALEGGIDPLRPPEANTKFNSRWTTDEQLLAVQGPDYIGLHVRAPISAPCATTPSTSHLAVPATPAAEATFAHGSHSAPTATPTAAGPLPPAPAGPQPAPTASHPPRSGCPPPQRPPWPSAPTHPDWNPSGAPSTLTLSPDVLHQPRAPGPLCWPSPGISGVTEDRRD

SEQ ID NO: 915719 - protein, 305 aa, Homo sapiens
VQGVHSGAERVEAASERRGPGKKEVQVSQYRHHPLRTRRRPPKGMYLSPEGLTAVSGSPDLANLTLRGLDSQLISLKRQVQSMKQTNSSLRQALEGGIDPLRPPEANTKFNSRWTTDEQLLAVQAIRRYGKDFGAIAEVIGNKTLTQVKTFFVSYRRRFNLEEVLQEWEAEQDGAPGAPVPMEEARRGAPLPAPALEEDDEVQITSVSTSVPRSVPPAPPPPPPPTSLSQPPPLLRPPLPTAPTLLRQPPPLQQGRFLQPRLAPNQPPPPLIRPALAAPRHSARPGPQPPPTLIGTPLEPPAPSL

SEQ ID NO: 915720 - protein, 484 aa, Homo sapiens
MPSVMEKPSAGSGILSRSRAKTVPNGGQPHSEDDSSEEEHSHVPPPGSTDSMIRVGTNYQAVIPECKPESPARYSNKELKGMLVWSPNHCVSDAKLDKYIAMAKEKHGYNIEQALGMLLWHKHDVEKSLADLANFTPFPDEWTVEDKVLFEQAFGFHGKCFQRIQQMLPDKLIPSLVKYYYSWKKTRSRTSVMDRQARRLGGRKDKEDSDELEEGRGGVSEGEPDPADPKREPLPSRPLNARPGPGKKEVQVSQYRHHPLRTRRRPPKGMYLSPEGLTAVSGSPDLANLTLRGLDSQLISLKRQVQSMKQTNSSLRQALEGGIDPLRPPEANTKFNSRWTTDEQLLAVQGPDYIGLHVRAPISAPCATTPSTSHLAVPATPAAEATFAHGSHSAPTATPTAAGPLPPAPAGPQPAPTASHPPRSGCPPPQRPPWPSAPTHPDWNPSGAPSTLTLSPDVLHQPRAPGPLCWPSPGISGVTEDRRD

SEQ ID NO: 915721 - protein, 262 aa, Homo sapiens
MPSVMEKPSAGSGILSRSRAKTVPNGGQPHSEDDSSEEEHSHDSMIRVGTNYQAVIPECKPESPARYSNKELKGMLVWSPNHCVSDAKLDKYIAMAKEKHGYNIEQALGMLLWHKHDVEKSLADLANFTPFPDEWTVEDKVLFEQAFGFHGKCFQRIQQMLPDKLIPSLVKYYYSWKKTRSRTSVMDRQARRLGGRKDKEDSDELEEGRGGVSEGEPDPADPKREPLPSRPLNARPASPPSRNLEKWGLGTYADMDLFFNIF

SEQ ID NO: 915722 - protein, 59 aa, Homo sapiens
WSLSGQAWVRSYNPLHQDPAPAAPAVDKYIAMAKEKHGYNIEQVSLGPQGLGNGVERCR

SEQ ID NO: 915723 - protein, 224 aa, Homo sapiens
MRGRRKASCFCRDWELSKGAEFNKPVGEPSTCTHILNITGVPRGVPDEFKTRNQIAVGFESALFWWSTTNKNVDWINYIYYNQQRFISYTRYTLKGVANQLDATSQMAWENRLALHKILAEKGGVCIMLDGKCCTLIPNNTAPDGTITNALQGLIVLVNELVENVGIDDPFTDWLENKCILILILIIIIGTKTGIDWALTTCREYAMSSAWSPDKIVVMSSDDI

SEQ ID NO: 915724 - protein, 224 aa, Homo sapiens; identical to SEQ ID NO: 915723

SEQ ID NO: 915725 - protein, 240 aa, Homo sapiens
SRGAAPVQAAAPPGASSGSMWRTREQLQAEVQRAQARIEDLEKALAEQGQDMKWIEEKQALYRRNQELVEKVMWHEAGAGLATGPGAGRPAGLSLPRTAQSPAKAPVLLACDVQPLLETFILDGLPSTSLSRGHPSSGPRYDRQAPGLWTNPNIPRAVRRFQGWVPGQPASPAASSCPIKQMETEEARLRHEVQDARDQNELLEFRILELEERERKSPAISFHHTPFVDGKSPLQVYCEA

SEQ ID NO: 915726 - protein, 153 aa, Homo sapiens
SRGAAPVQAAAPPGASSGSMWRTREQLQAEVQRAQARIEDLEKALAEQGQDMKWIEEKQALYRRNQELVEKIKQMETEEAQLWPAPQLVSSGSGVLPSSSPAALACWFLMNAPADSTSGLRTFPSTGTSPDVPVAPSWHLVLVPVLHSPSGPT

SEQ ID NO: 915727 - protein, 132 aa, Homo sapiens
SKVNVPADSMRAHPLHHMWPLLASSSLVGRGEQAPLGLLYEGTNPNHDSGALMTSSAPKGPTSYYPQGPERRPGGQGILGVIPVKDKRWRKQNWEEKPSAPDMNLTAAITARLDLCTSKEASLHPAQLGRSQ

SEQ ID NO: 915728 - protein, 166 aa, Homo sapiens
RPLIGGPMGSTSRPNTQTKSLWQLVNAFCSCRMAVLPPVLSLLSCLINSRVAGNFLEGAWQGEGTVVPTFQADSPLHLQTWGSPAIPTELLNRLLRAWQCSAQPLLILKRPQQAGSQKKGTANRLSHHECGTPSFNNLRQFFLGLNAPQSCDNVPEIQREQYDKIM

SEQ ID NO: 915729 - protein, 380 aa, Homo sapiens
MPSAPLALHASGTMEVSGHPQARRCCPEALGKLFPGLCFLCFLVTYALVGAVVFSAIEDGQVLVAADDGEFEKFLEELCRILNCSETVVEDRKQDLQGHLQKVKPQWFNRTTHWSFLSSLFFCCTVFSTVGYGYIYPVTRLGKYLCMLYALFGIPLMFLVLTDTGDILATILSTSYNRFRKFPFFTRPLLSKWCPKSLFKKKPDPKPADEAVPQIIISAEELPGPKLGTCPSRPSCSMELFERSHALEKQNTLQLPPQAMERSNSCPELVLGRLSYSIISNLDEVGQQVERLDIPLPIIALIVFAYISCAAAILPFWETQLDFENAFYFCFVTLTTIGFGDTVLEHPNFFLFFSIYIIVGMEIVFIAFNNLMDVPAFLEI

SEQ ID NO: 915730 - protein, 146 aa, Homo sapiens
GQSMRKLIAGLIFLKIWACTVRTSTDLPQTEGCSQCIHQVTEEIAAGAVECHAFVVPEQQSLQAPAADPLISAVQALHSLSLKGISFSIEEGELLCSCDPGEKGIPRFTFRTKIDPVENKTEERRRYAQQRGRHWLSLTNIADIPM

SEQ ID NO: 915731 - protein, 146 aa, Homo sapiens; identical to SEQ ID NO: 915730

SEQ ID NO: 915732 - protein, 193 aa, Homo sapiens
DHRAPLQCASSVCFLARLTERFVLGVDMFVETLWKVWTELLDVLGLDVSNLSQYFSPASVSSSPARALLLVGVVLLAYWFLSLTLGFTFSVLHVVFGRFFWIVRVVLFSMSCVYILHKYEGEPENAVLPLCFVVAVYFMTGPMGFYWRSSPSGPSNPSNPSVEEKLEHLEKQVRLLNIRLNRVLESLDRSKDK

SEQ ID NO: 915733 - protein, 252 aa, Homo sapiens
MVRAAPQAGPWPGPGSCCCCCCCCCSVLLAPGAQGARGRGGAEKNSYRRTVNTFSQSVSSLFGEDNVRAAQKFLARLTERFVLGVDMFVETLWKVWTELLDVLGLDVSNLSQYFSPASVSSSPARALLLVGVVLLAYWFLSLTLGFTFSVLHVVFGRFFWIVRVVLFSMSCVYILHKYEGEPENAVLPLCFVVAVYFMTGPMGFYWRSSPSGPSNPSNPSVEEKLEHLEKQVRLLNIRLNRVLESLDRSKDK

SEQ ID NO: 915734 - protein, 252 aa, Homo sapiens; identical to SEQ ID NO: 915733

SEQ ID NO: 915735 - protein, 210 aa, Homo sapiens
MVRAAPQAGPWPGPGSCCCCCCCCCSVLLAPGAQGARGRGGAEKNSYRRTVNTFSQSVSSLFGEDNVRAAQKFLARLTERFVLGVDMFVETLWKVWTELLDVLGLDALLHVVFGRFFWIVRVVLFSMSCVYILHKYEGEPENAVLPLCFVVAVYFMTGPMGFYWRSSPSGPSNPSNPSVEEKLEHLEKQVRLLNIRLNRVLESLDRSKDK

SEQ ID NO: 915736 - protein, 135 aa, Homo sapiens
MTTTVAEQRGTHSAESHSSYPVVLELDPSDLMRLKIYGFIKVKFLVTSNSNQSDQRNQPFQCEEYSHPFLLAGCEYWLPPQAPTTHPQALSQQCTKLSLPGHSSSWDVLLVGASHIFCTKRADVPEITSMPFKIQ

SEQ ID NO: 915737 - protein, 133 aa, Homo sapiens
MEKTVGMSQPRALAGRHHSVGIENIGFGLEFKEEERKRIARLVFNDFLVKLLQGRLRLFDVHGGRQMRNKVTFYMAAGKETVGGELPSIKPSDLMRLIHYHENSTGKIHPHDSITSHQVPPMTHGNYRSCNST

SEQ ID NO: 915738 - protein, 152 aa, Homo sapiens
YQLPQEEMLSRELGVLTQPENTQRGNSFSIQHLLKFGLFYQGPAKMGSLHTKTVKKVAWVIIEKYYMHPGNDFHMNKQVGEDCHYPQQEALQQDSRLSHASEEADSQGPNKSTQVLKLEKLHTPAEVHAICSGEEPVPVWRPGLQSVRRETC

SEQ ID NO: 915739 - protein, 169 aa, Homo sapiens
MTKSEKSLVRESTDFSLQTEENIPSFYDDFSGHLILTGSKMAAEVPAITLKLHPTERGKEEESALAHLFGDFLKNGNRDLKGCTTHYQLPIPRAIRFPGRKASDEFALQIENILSIATSPKDVYLNFSKAGFYMWMFLFKDQHSRFPAVSGVGAVVTKGLSQSHDGEEK

SEQ ID NO: 915740 - protein, 170 aa, Homo sapiens
AGTTEFTRTRSGSGSGSGSAVRRLENMSCVLKHSPEEAPYLCLRSHQGGSQLLLTLSKSAHKRFPSTLQKRPRRPVTSEIAVMAAKVLNVFAWIGLAPRASVMHHKKSIFWELLFLDTWCPEAPGTPSEAKPNQPAHKPVADTRESTRRCDVVWMFVPLKSHVDVILNPL

SEQ ID NO: 915741 - protein, 159 aa, Homo sapiens
KNWEQVKLIDVFASPSAMIISFLRPPHPYGTVSQFNLFIINYRVLEKDRKMWESLELPGDLKGSEDRKMWESLELPRDLLNGFDQNADSDKDNEVQDEIVSDRDEKLLGTWWPAFPLLRLQSCLRGANAQLESLLQRMQAQALAASTWSWPCVCAGDKN

SEQ ID NO: 915742 - protein, 228 aa, Homo sapiens
MTSYCKEDGHLLGGISQGLLLECDGFPWMAFHSGNRGIDFERNGLKSKPSGSHFHTTFADIDHLILGSSQEAKCRSCGALRGRSWSVEWLCADGSTCAPFSGPLSDFFPDKDLFISEESTSIIRKLGSSPQEVSGCKPRKRRVDAQTPSVCTKTSLPAAFTFLALDLGHIIDFTRSQAPPTAIQKKARVHVESPLCHMMICLRQSLHCSRARQEFKTSLANMVKPHLY

SEQ ID NO: 915743 - protein, 194 aa, Homo sapiens
NSIFPKREFMLDPTHYLDLKSCSMAPFGEDSPHYTTFYPGYPGAQYTLFYPFWTPTDIHPYQPRGLQQCNAGCTQQCVQVLSTLDHSELEKGKEEELVNRKQMVGYAIMTVEEFHVSLSNSSDLLCFCSVILSERPDGWFPEKGTQNPIKQELISREVLGNAIRTGSRGGKHSVVEEKAWDGIWVPNLNFIGNS

SEQ ID NO: 915744 - protein, 135 aa, Homo sapiens
MAHSESTGDSSFPEFMGCPGPDFGFGMTCQYRSDFLTIGGFDMEVKGWGGEDVHLYRKYLHGDLIVIRTPVSGLFHLWHEKRCADELTPEQYRMCIQSKAMNEASHSHLGMLVFREEIETHLHKQAYRTNSEAVG

SEQ ID NO: 915745 - protein, 202 aa, Homo sapiens
QLWVSCGLSATLLAIPGLRSSSHHHHHHLILITIITIIMALSSSSPDPHHHHYHHHHIITIITSSSSPSSPSSHYHHHHIIIFISLSLPSSSHHHHYHYIIITSSLSHYHHHIMIITIIISSSSYHYHHHHIITSPLSSNHHHHTITVIITSASSSYYRHHHVIIITTIIISSSQQAIQNPAECSTGNPSSSLTTREEHPES

SEQ ID NO: 915746 - protein, 134 aa, Homo sapiens
MLPVDPVKENFMFLKGKLFSIAFPTPFKSRVPLVAVSKEVLEDILDLDLSVSETDDFIQLVSGEKTVFGSIPLAHPYGGQQRCPVFTVTDIKPALSVCQKCYYFHMAVDTGPIISDIEMPLTIHYLLELYLAKI

SEQ ID NO: 915747 - protein, 138 aa, Homo sapiens
MRLPVIQVLLDYGSNQLTWRTQTNLPLKAITEDKEDLGFELSNFCGMNLGMALFSEISSCTGRSPQEPEPPINKWLGGRGPLLGIVRCAATQTVDKGMLGVLKEASSQVCSSPPLNSLRDGREEKMAPRGIQLLPNKS

SEQ ID NO: 915748 - protein, 181 aa, Homo sapiens
NPTRAGPEHEVGRHMPSQAHVWVYIPQGACREENGKAQTTPCLRKSKDALQWNSTYQCILGQKEKGREEKADGGHNINNGHSLRACDELAMVLGPRECKAGEKTKTGTNLRVSCIVQIFQDYWGTNAEHLVLKDFHCSGQLHFGRVELKISGPPAHRVMRIKGETTYEGVQQMSGMTFILF

SEQ ID NO: 915749 - protein, 120 aa, Homo sapiens
LLRPRGSAQTAGRRRPRSPRRWRVKACFQSIPRRSAKIRHLEFRPAKTTDALSQLGYLHFSFLQFPCFRGKTQDLDNCNHLVTNHESGMDHFHPAPCQAVSIFSQSSQESYRNKTYPPIY

SEQ ID NO: 915750 - protein, 137 aa, Homo sapiens
MLWEVRDPEWRDRLELRQRNINSPGHMAPLTYHSAHWEWWLWWGLKEANINFKERCFVHPSCPVDSPEDSGGKWPTSAALALKDMCQTWFWRFLIGWAGPIYSLTRKKPWVGQGSAKMPAGVTWKLCVTALNESVQN

SEQ ID NO: 915751 - protein, 1245 aa, Homo sapiens
MSKQDRNQRPSSMVSETSTAGTASTLEAKPGPKIIKSSSKVHSFGKRDQAIRRNPNVPVVVRGWLHKQDSSGMRLWKRRWFVLADYCLFYYKDSREEAVLGSIPLPSYVISPVAPEDRISRKYSFKAVHTGMRALIYNSSTAGSQAEQSGMRTYYFSADTQEDMNAWVRAMNQAAQVLSRSSLKRDMEKVERQAVPQANHTESCHECGRVGPGHTRDCPHRGHDDIVNFERQEQEGEQYRSQRDPLEGKRDRSKARSPYSPAEEDALFMDLPTGPRGQQAQPQRAEKNGMLPASYGPGEQNGTGGYQRAFPPRTNPEKHSQRKSNLAQVEHWARAQKGDSRSLPLDQTLPRQGPGQSLSFPENYQTLPKSTRHPSGGSSPPPRNLPSDYKYAQDRASHLKMSSEERRAHRDGTVWQLYEWQQRQQFRHGSPTAPICLGSPEFTDQGRSRSMLEVPRSISVPPSPSDIPPPGPPRVFPPRRPHTPAERVTVKPPDQRRSVDISLGDSPRRARGHAVKNSSHVDRRSMPSMGYMTHTVSAPSLHGKSADDTYLQLKKDLEYLDLKMTGRDLLKDRSLKPVKIAESDTDVKLSIFCEQDRVLQDLEDKIRALKENKDQLESVLEVLHRQMEQYRDQPQHLEKIAYQQKLLQEDLVHIRAELSRESTEMENAWNEYLKLENDVEQLKQTLQEQHRRAFFFQEKSQIQKDLWRIEDVTAGLSANKENFRILVESVKNPERKTVPLFPHPPVPSLSTSESKPPPQPSPPTSPVRTPLEVRLFPQLQTYVPYRPHPPQLRKVTSPLQSPTKAKPKVTVRTGRALEDDLTQLSHFAVGKTEAHQEEVSVLSRVEFVICREVCGCGRSCPHANLCANPQGALLQLHSLWAIFANKGLEETYLGIVCAWTSDEVSAQCWVKHMSSAALVFTIYLLPAIVQGPELDPGYGPAPSQRVTVDFSILRSPSQSQIQEVDWSSSPKTGEGKFQNKQQECLGQMAANIGQNAASWDRALCPCSGPHLAEGARARVGPMSRLRLSTAEWVDVTLQQEDEAPPRPPLPELYSPEDQPPAVPPLPREATIIRHTSVRGLKRQSDERKRDRELGQCVNGDSRVELRSYVSEPELATLSGDMAQPSLGLVGPESRYQTLPGRGLSGSTSRLQQSSTIAPYVTLRRGLNAESSKATFPRPKSALERLYSGDHQRGKMSAEEQLERMKRHQKALVRERKRTLGQGERTGLPSSRYLSRPLPGDLGSVC

SEQ ID NO: 915752 - protein, 969 aa, Homo sapiens
CDSRVKHRRKLNGMLPASYGPGEQNGTGGYQRAFPPRTNPEKHSQRKSNLAQVEHWARAQKGDSRSLPLDQTLPRQGPGQSLSFPENYQTLPKSTRHPSGGSSPPPRNLPSDYKYAQDRASHLKMSSEERRAHRDGTVWQLYEWQQRQQFRHGSPTAPICLGSPEFTDQGRSRSMLEVPRSISVPPSPSDIPPPGPPRVFPPRRPHTPAERVTVKPPDQRRSVDISLGDSPRRARGHAVKNSSHVDRRSMPSMGYMTHTVSAPSLHGKSADDTYLQLKKDLEYLDLKMTGRDLLKDRSLKPVKIAESDTDVKLSIFCEQDRVLQDLEDKIRALKENKDQLESVLEVLHRQMEQYRDQPQHLEKIAYQQKLLQEDLVHIRAELSRESTEMENAWNEYLKLENDVEQLKQTLQEQHRRAFFFQEKSQIQKDLWRIEDVTAGLSANKENFRILVESVKNPERKTVPLFPHPPVPSLSTSESKPPPQPSPPTSPVRTPLEVRLFPQLQTYVPYRPHPPQLRKVTSPLQSPTKAKPKVTVRTGRALEDDLTQLSHFAVGKTEAHQEEVSVLSRVEFVICREVCGCGRSCPHANLCANPQGALLQLHSLWAIFANKGLEETYLGIVCAWTSDEVSAQCWVKHMSSAALVFTIYLLPAIVQGPELDPGYGPAPSQRVTVDFSILRSPSQSQIQEVDWSSSPKTGEGKFQNKQQECLGQMAANIGQNAASWDRALCPCSGPHLAEGARARVGPMSRLRLSTAEWVDVTLQQEDEAPPRPPLPELYSPEDQPPAVPPLPREATIIRHTSVRGLKRQSDERKRDRELGQCVNGDSRVELRSYVSEPELATLSGDMAQPSLGLVGPESRYQTLPGRGLSGSTSRLQQSSTIAPYVTLRRGLNAESSKATFPRPKSALERLYSGDHQRGKMSAEEQLERMKRHQKALVRERKRTLGQGERTGLPSSRYLSRPLPGDLGSVC

SEQ ID NO: 915753 - protein, 1202 aa, Homo sapiens
GFTEEGASYFIEPNPHMSKQDRNQRPSSMVSETSTAGTASTLEAKPGPKIIKSSSKVHSFGKRDQAIRRNPNVPVVVRGWLHKQDSSGMRLWKRRWFVLADYCLFYYKDSREEAVLGSIPLPSYVISPVAPEDRISRKYSFKGYGEGGAEAVPQANHTESCHECGRVGPGHTRDCPHRGHDDIVNFERQEQEGEQYRSQRDPLEGKRDRSKARSPYSPAEEDALFMDLPTGPRGQQAQPQRAEKNGMLPASYGPGEQNGTGGYQRAFPPRTNPEKHSQRKSNLAQVEHWARAQKGDSRSLPLDQTLPRQGPGQSLSFPENYQTLPKSTRHPSGGSSPPPRNLPSDYKYAQDRASHLKMSSEERRAHRDGTVWQLYEWQQRQQFRHGSPTAPICLGSPEFTDQGRSRSMLEVPRSISVPPSPSDIPPPGPPRVFPPRRPHTPAERVTVKPPDQRRSVDISLGDSPRRARGHAVKNSSHVDRRSMPSMGYMTHTVSAPSLHGKSADDTYLQLKKDLEYLDLKMTGRDLLKDRSLKPVKIAESDTDVKLSIFCEQDRVLQDLEDKIRALKENKDQLESVLEVLHRQMEQYRDQPQHLEKIAYQQKLLQEDLVHIRAELSRESTEMENAWNEYLKLENDVEQLKQTLQEQHRRAFFFQEKSQIQKDLWRIEDVTAGLSANKENFRILVESVKNPERKTVPLFPHPPVPSLSTSESKPPPQPSPPTSPVRTPLEVRLFPQLQTYVPYRPHPPQLRKVTSPLQSPTKAKPKVTVRTGRALEDDLTQLSHFAVGKTEAHQEEVSVLSRVEFVICREVCGCGRSCPHANLCANPQGALLQLHSLWAIFANKGLEETYLGIVCAWTSDEVSAQCWVKHMSSAALVFTIYLLPAIVQGPELDPGYGPAPSQRVTVDFSILRSPSQSQIQEVDWSSSPKTGEGKFQNKQQECLGQMAANIGQNAASWDRALCPCSGPHLAEGARARVGPMSRLRLSTAEWVDVTLQQEDEAPPRPPLPELYSPEDQPPAVPPLPREATIIRHTSVRGLKRQSDERKRDRELGQCVNGDSRVELRSYVSEPELATLSGDMAQPSLGLVGPESRYQTLPGRGLSGSTSRLQQSSTIAPYVTLRRGLNAESSKATFPRPKSALERLYSGDHQRGKMSAEEQLERMKRHQKALVRERKRTLGQGERTGLPSSRYLSRPLPGDLGSVC

SEQ ID NO: 915754 - protein, 99 aa, Homo sapiens
GFTEEGASYFIEPNPHMSKQDRNQRPSSMVSETSTAGTASTLEAKPGPKIIKSSSKVHSFGKRDQAIRRNPNVPVVVRGWLHKQVRKPRSENPGGNGSG

SEQ ID NO: 915755 - protein, 163 aa, Homo sapiens
FLVQLKFSDPNNVPMVNKLLQLELNDEFIGNYTTDENGEAQFSIDTSDIFDPEFNLKATYVRPKSCYLPSWLTPQYLDAHFLVSRFYSRTNSFLKIVPEPKQLECNHQKVVTVHYSLNSEAYEDDSNVKFFYLMMVKGAILLSGQKEIRNKGIHNVFILKYVL

SEQ ID NO: 915756 - protein, 282 aa, Homo sapiens
MPYLAPLQHTGAPGPWQSCLRSLDPISKRGARPNLLSPHQGHPTPRGPGYPRTSRGVAETLAAECRPGCGPAGPGRGLRPGRGQGWALPELRRSRPARASPPPPVTWIPRFLRGGGGRKGHAQIKVCGPGKLQVLKSVHQGYFKARGRGCVIIYPVRPCTPASLAYTNTCLLGLSNRSHGSPNDVNIRTSEPPPEKYLRGEACAAPGRGCGRKPEVGSKARRLHGSCHPRCALSPMLAASIRQKLAQQTRQPQTCGPFLPSSPPRQPLKALEYEVIIAIIIS

SEQ ID NO: 915757 - protein, 282 aa, Homo sapiens; identical to SEQ ID NO: 915756

SEQ ID NO: 915758 - protein, 167 aa, Homo sapiens
MMLKLLKPNLPRAVSGIHRTLFPPLLNQTGQAPKQWSLALLPPPPRGSQKGSKHRTLSWPCLGLALGDSVFRAPLLLCARAFAFAGCPLIDVRAAGRLRRSPVRALPGAGFGAHATGQRGIQKLYIHFMFLKITHIFKLARVIEKFPKICTLSKPYFSNDFVDRAAF

SEQ ID NO: 915759 - protein, 345 aa, Homo sapiens
GKDILTGKGAKMGYRGCWVTFKSSSYEDLGKIPWVVVMSHEFPYIWRHFRGDGNLGRTRLIQNWWTRRKVRQEHGPERKISFPQWEKDYNLQPMNAYGLFDEYLEMILQFGFTTIFVAAFPLAPLLALLNNIIEIRLDAYKFVTQWRRPLASRAKDIGIWYGILEGIGILSVITNAFVIAITSDFIPRLVYAYKYGPCAGQGEAGQKCMVGYVNASLSVFRISDFENRSEPESDGSEFSGTPLKYCRYRDYRDPPHSLVPYGYTLQFWHVLAARLAFIIVFEHLVFCIKHLISYLIPDLPKDLRDRMRREKYLIQEMMYEAELERLQKERKERKKNGKAHHNEWP

SEQ ID NO: 915760 - protein, 175 aa, Homo sapiens
PSGLGVAMNLRFFPGVFYSSSVSVRLSAPTPDIFLQLHPPLPESTDTHPPTRLFPSPPPSVSGRVSPSNRQEPKRLSTDSSAPFPVVYSCTVRSTSQVQGHQLRHLSRDRTILICPEKDIPLIILNLWMDTYLLTRPSLFNENCLSFHSICEAPLDADMCLHRTSCPQPELARIH

SEQ ID NO: 915761 - protein, 146 aa, Homo sapiens
MTLTKGSFTYSSGEEYRGEWKEGRRHGFGQLMFADGGTYLGHFENGLFNGFGVLTFSDGSRYEGEFAQGKFNGVGVFIRYDNMTFEGEFKNGRVDGFGLLTFPDGSHGIPRNEGLFENNKLLRREKCSAIVQRAQSASKSARNLTA

SEQ ID NO: 915762 - protein, 146 aa, Homo sapiens; identical to SEQ ID NO: 915761

SEQ ID NO: 915763 - protein, 113 aa, Homo sapiens
MAWSRAGPMRSGVAPGCLGNSQWAAGIVPSAVAQDGGVKWGNRWWRWRRARWQPGAHQRKSPRRWNPASRRDGHPERPAPVSSFYPVICHHDPDKRFLHLLQWGGISWRVEGG

SEQ ID NO: 915764 - protein, 146 aa, Homo sapiens; identical to SEQ ID NO: 915761

SEQ ID NO: 915765 - protein, 146 aa, Homo sapiens; identical to SEQ ID NO: 915761

SEQ ID NO: 915766 - protein, 204 aa, Homo sapiens
MAWSRAGPMRSGVAPGCLGNSQWAAGIVPSAVAQDGGVKWGNRWWRWRRARWQPGAHQRKSPRRWNPASRRDGHPERPAPGRRHGFGQLMFADGGTYLGHFENGLFNGFGVLTFSDGSRYEGEFAQGKFNGVGVFIRYDNMTFEGEFKNGRVDGFGLLTFPDGSHGIPRNEGLFENNKLLRREKCSAIVQRAQSASKSARNLTA

SEQ ID NO: 915767 - protein, 245 aa, Homo sapiens
MSCIRDNQAAVGAATLLSLSEGRELSACAASAACLVAGLPGMVTARAPSWPKKSSKAFGARALSSFLNRNKDRGRARWLTPVIPAFWEVEADGLLEVMSSRPAWPTRWSLAPMLECSGVISADCNLRLPGSSDSPASASGVAGITAKISRRCMQEELNFRGHRLIFNTWQFTKQRRGVAMLPRLVSNSGAQAICLPRPFKVLRLQPEEERGNPGEKHLEFKLREEDTESQLRTQTGRRKIIFPSL

SEQ ID NO: 915768 - protein, 146 aa, Homo sapiens
MLEFYLLHGKSASAFTFYYNNLCTHIIMPTIFESIFTFPVPDRVLFTWKLLSKFLSHQVDNNAPLQNPHQFKPLQPVCCCCSSVPAQEPHGTLFCNFSGTSTHLPTFYFPPIQVFAETWALVGSAFCSPGSETGLPMVLPRLVLNS

SEQ ID NO: 915769 - protein, 248 aa, Homo sapiens
MPGPIAGAWTGLGMERGLGTEGQLLAKNRTHRETSSRILFILLFPTHSLVLMGSVPNICHPGKEGPWPKIPLGTMGPQVAGIPSLLRRMGHKSPSQARGKAAIQESFTEVAGRDVGRRQTIDSQAALGLHSEVCGWGSCWGLQLVSVPEPNGCVSPQPPSGSCYMCHPITKVLVTSYPLSPELLLPQPLEGGLTSLREEMMVLTNLSPKRRRNQKGDSRQVWMPGMERSEMVTEFSEFQSFFEQRKPG

SEQ ID NO: 915770 - protein, 248 aa, Homo sapiens; identical to SEQ ID NO: 915769

SEQ ID NO: 915771 - protein, 160 aa, Homo sapiens
GCIRPVILGVISTSRPLNMRKNITGWVYTSCSIMRSRICLLWGVISFSPFQDINNNFTGWVNTAGDAEIIIILSPSSPPGSQSPPHGLCSGLWQEDKLQFPAQNSTNNDPSSVTTQYWSSFDHGLQYQPLETFLKQVSKTPRSNILNDRKISLLVQIVST

SEQ ID NO: 915772 - protein, 285 aa, Homo sapiens
MSRPGGAVTFEHVRWTVVCQEVRGEGLAGESRLDSPALGAPRGKGTRQRGRGQRRPDEPEGSEVSPSTRQPAGMPLGQGCMSRVLLGHLSAPTALEAKPQPTSSCRQHWLQASSCSHGLLTKGYTGQWQEAAGVGDDHDDDGGGGDDDDDDDSGGGGGDYVLQSFDRTFLIQGRVGILPCLACGNLGGGPRERVANFQAQRNQAFRGGFAEKSCTRPFGSSSRTFLHQSFAKLHSVQLSLHPPGRAQGPIEVVSEQTKLLSPLLLPPHGGEFSSVKHTSSKVLLS

SEQ ID NO: 915773 - protein, 191 aa, Homo sapiens
GARATERGSARTGSSSAAGLESAGHVLASVRLVQRMALWGKDWVRELCQGRARRDAGSHSPRRAHGVRGLGCGDGLEGSEGSEGAAAAAATASSAGAAGAVRSWRLRKSCRARRFWKSMSASAMAAFQQLSPAQRKSISLWSVVTMVKYTYLPVRSTQSTLRMEWKRSSLGRARGLAGNRLRRSEMLMAAA

SEQ ID NO: 915774 - protein, 663 aa, Homo sapiens
PAVSSQVPAHTRKMLCKRRSLSLCWIQYRAAAVHELSLLLFFPCAFPTDASQGSTSFPKVSNNCDSIFVNGKEMKSKVDTIVNFTHQHFTSQFEVTVWAPRLPLQIEISDTELSQIKGWRIPVAANRRPTRESDDEDDEEKKGRGCSLQYQHATVRVLTQFVAESPDLGQLTYMLGPDWQFDITDLVTEFMKVEEPKIAQLQDGRTLAGREPGITTVQVLSPLSDSILAEKTVIVLDDRVTIAELGVQLVAGMSLSLQPHRADKRAIVSTAAALDVLQSPQQEAIVSSWILFSDGSVTPLDIYDPKDYSVTVSSLDEMVVSVQANLESKWPIVVAEGEGQGPLIKLEMMISEPCQKTKRKSVLAVGKGNVKVKFEPSSDEHQGGSNDIEGINREYKDHLSNSIEREGNQERAVQEWFHRGTPVGQEESTNKSTTPQSPMEGKNKLLKSGGPDAFTSFPTQGKSPDPNNPSDLTVTSRGLTDLEIGMYALLCVFCLAILVFLINCVAFAWKYRHKRFAVSEQGNIPHSHDWVWLGNEVELLENPVDITLPSEECTTMIDRGLQFEERNFLLNGSSQKTFHSQLLRPSDYVYEKEIKNEPMNSSGPKRKRVKFTSYTTILPEDGGPYTNSILFDSDDNIKWVCQDMGLGDSQDFRDYMESLQDQM

SEQ ID NO: 915775 - protein, 516 aa, Homo sapiens
HARCRLPGRRETMPQTSVVFSSILGPSCSGQVQPGMGERGGGAGGGSGDLIFQDGHLISGSLEALMEHLVPTVDYYPDRTYIFTFLLSSRVFMPPHDLLARVGQICVEQKQQLEAGPEKAKLKSFSAKIVQLLKEWTEAFPYDFQDEKAMAELKAITHRVTQCDEENGTVKKAIAQMTQSLLLSLAARSQLQELREKLRPPAVDKGPILKTKPPAAQKDILGVCCDPLVLAQQLTHIELDRVSSIYPEDLMQIVSHMDSLDNHRCRGDLTKTYSLEAYDNWFNCLSMLVATEVCRVVKKKHRTRMLEFFIDVARECFNIGNFNSMMAIISGMNLSPVARLKKTWSKVKTAKFDVLERGIWSRSEGHGAVMLTRSSLCPQHHMDPSSNFCNYRTALQGATQRSQMANSSREKIVIPVFNLFVKDIYFLHKIHTNHLPNGHINFKKFWEISRQIHEFMTWTQVECPFEKDKKIQSYLLTAPIYSEEALFVASFESEGPENHMEKDSWKTLRTTLLNRA

SEQ ID NO: 915776 - protein, 532 aa, Homo sapiens
RGGGRALLGARLRREGGAGATLARTEETMPQTSVVFSSILGPSCSGQVQPGMGERGGGAGGGSGDLIFQDGHLISGSLEALMEHLVPTVDYYPDRTYIFTFLLSSRVFMPPHDLLARVGQICVEQKQQLEAGPEKAKLKSFSAKIVQLLKEWTEAFPYDFQDEKAMAELKAITHRVTQCDEENGTVKKAIAQMTQSLLLSLAARSQLQELREKLRPPAVDKGPILKTKPPAAQKDILGVCCDPLVLAQQLTHIELDRVSSIYPEDLMQIVSHMDSLDNHRCRGDLTKTYSLEAYDNWFNCLSMLVATEVCRVVKKKHRTRMLEFFIDVARECFNIGNFNSMMAIISGMNLSPVARLKKTWSKVKTAKFDVLERGIWSRSEGHGAVMLTRSSLCPQHHMDPSSNFCNYRTALQGATQRSQMANSSREKIVIPVFNLFVKDIYFLHKIHTNHLPNGHINFKKFWEISRQIHEFMTWTQVECPFEKDKKIQSYLLTAPIYSEEALFVASFESEGPENHMEKDSWKTLRTTLLNRA

SEQ ID NO: 915777 - protein, 179 aa, Homo sapiens
MWEACTICHLVPYSALWGLTLYPLLPQAKLKSFSAKIVQLLKEWTEAFPYDFQDEKAMAELKAITHRVTQCDEENGTVKKAIAQMTQSLLLSLAARSQLQELREKLRPPAVDKGPILKTKPPAAQKDILGVCCDPLVLAQQLTHIELDRVSSIYPEDLMQIVSHMDSLDNHRPRGPDKN

SEQ ID NO: 915778 - protein, 146 aa, Homo sapiens
MAKMLFADKVPKTAENFRALSTGEKGFGYKGSCFHRIIPGFMCQGGDFTRHNGTGGKSIYGEKFEDENFILKHTGPGILSMANAGPNTNGSQFFICTAKTEWLDGKHVVFGKVKEGMNIVEAMERFGSRNGKTSKKITIADCGQLE

SEQ ID NO: 915779 - protein, 98 aa, Homo sapiens
RGPGCNFTRQDPQLSYSTDQHHEASHGPGILSMANAGPNTNGSQFFICTAKTEWLDGKHVVFGKVKEGMNIVEAMERFGSRNGKTSKKITIADCGQLE

SEQ ID NO: 915780 - protein, 165 aa, Homo sapiens; identical to SEQ ID NO: 879533

SEQ ID NO: 915781 - protein, 258 aa, Homo sapiens
MEGVLEAMFEGSIRHFFFRLSFSRPLQTMAIPVALVRRNDGLCMNFVEHGLVFTNAEESPFGLAPESLRPCCLSEKAAGPAATAGSQDGPSGAGLPRFGGPSCYTLCLGPGCVAFSDPQDWEGAWSTCPLEPWGRSVLEALISTSSLGALPRFGETRPGGGSSGPLADTVRAGGRGRGRLRAGVVPLAGAWAGRADPGEGEPRGRSDRLGVLAAAAHASQGLQAWAPGLDQSPGHGTPWLFCTRDLWRGKTLSWVTPR

SEQ ID NO: 915782 - protein, 258 aa, Homo sapiens; identical to SEQ ID NO: 915781

SEQ ID NO: 915783 - protein, 60 aa, Homo sapiens
MHELCRTWPCLHQRGGEPVRFQRGCCLISSLKEEEGEQVPSRSLVSAENSPRKKKMIGYR

SEQ ID NO: 915784 - protein, 258 aa, Homo sapiens; identical to SEQ ID NO: 915781

SEQ ID NO: 915785 - protein, 258 aa, Homo sapiens; identical to SEQ ID NO: 915781

SEQ ID NO: 915786 - protein, 117 aa, Homo sapiens
MTCVEQDKLGQAFEDAFEVLRQHSTGDLQYSPDYRNYLALINHRPHVKGNSSCYGVLPTEEPVYNWRTVIVGVQWCDYSSLKLQIPGVKGSSCLSFPSSWDYRHVPPGLEQCCGLLF

SEQ ID NO: 915787 - protein, 248 aa, Homo sapiens
MTCVEQDKLGQAFEDAFEVLRQHSTGDLQYSPDYRNYLALINHRPHVKGNSSCYGVLPTEEPVYNWRTVINSAADFYFEGNIHQSLQNITENQLVQPTLLQQKGGKGRKKLRLFEYLHESLYNPEMASCIQWVDKTKGIFQFVSKNKEKLAELWGKRKGNRKTMTYQKMARALRNYGRSGEITKIRRKLTYQFSEAILQRLSPSYFLGKEIFYSQCVQPDQEYLSLNNWNANYNYTYANYHELNHHDC

SEQ ID NO: 915788 - protein, 151 aa, Homo sapiens
MTTELGSFVFSRNGKGLRLVGHEIYMLKSKGEKCLADKAKTSHLGVTQMFPEDGRRVKNPTGSPLPGGEGAGAHCCHGMGTHPSQWAKESSKPSEDSCHWFLAAVTPQGKRQRATRSQLRKPCGQLRQGCGLKPKQVLVIVVPTDEETEPP

SEQ ID NO: 915789 - protein, 151 aa, Homo sapiens; identical to SEQ ID NO: 915788

SEQ ID NO: 915790 - protein, 141 aa, Homo sapiens
QQKTNWGLLKALTLIMGNLNNIWEHLEKSGQVKEVGGLKQLTAMQPKYMFPTEGELLPTIHVTIFPGPSSLQSLFGGLFTRTCMRFGAVTQIGGPPLGRSIRCPPVLCSMRKIHLRPRVLRLISPRNSSHQFQIGSPRLSG

SEQ ID NO: 915791 - protein, 141 aa, Homo sapiens
MAIHVDTKRARKYSLAVHLCAQEDKENKSGRKWQQPSLIKRPIWNQSPHYLYPTYNTRTHSIPLPNSCVSLAICRPRKTEENTTTSRWEAIKQQTGKSCPSFLSSFAVLLSSPLLEDPTTEQPGEAKMKFGRVLTTPSQRE

SEQ ID NO: 915792 - protein, 538 aa, Homo sapiens
MVKCPWFTFTCMWDQCGKVLFMWEGGPQITKNSPLPPSLKTSCASRPLSSHSAAKLLDKNPFSVSNPNPLLPSPASLQLAQLQAQLTLHRLKLAQTAVTNNTAAATVLNQVLSKVAMSQPLFNQLRHPSVITGPHGHAGVPQHAAAIPSTRFPSNAIAFSPPSQTRGPGPSMNLPNQPPSAMVMHPFTGVMPQTPGQPAVILGIGKTGPAPATAGFYEYGKASSGQTYGPETDGQPGFLPSSASTSGSVTYEGHYSHTGQDGQAAFSKDFYGPNSQGSHVASGFPAEQAGGLKSEVGPLLQGTNSQWESPHGFSGQSKPDLTAGPMWPPPHNQPYELYDPEEPTSDRTPPSFGGRLNNSKQGFIGAGRRAKEDQALLSVRPLQAHELNDFHGVAPLHLPHICSICDKKVFDLKDWELHVKGKLHAQKCLVFSENAGIRCILGSAEGTLCASPNSTAVYNPAGNEGEQGPTGQQLEAEVGYPQAHYVLSLITRTSLMSPSHGCRKQTDPKTLKCIGPAVWAHQYSLRYLRLESWLAFEV

SEQ ID NO: 915793 - protein, 145 aa, Homo sapiens
VLQSQPEVLMSTSMQTAKVQAAIYRSRGTLNTLSPNASYKWIQLRVRREKPSCSSEIHEVEVVVAPDPTALEPAQSNLGASEVPDCSTLATRRHTKLCRCRGKEGPSDLRRAEVPHGDHADLSHVHQGQPHSGPSQGFCRAVLRL

SEQ ID NO: 915794 - protein, 168 aa, Homo sapiens
MSQALCQKDKLKGPINGTTQPNGQMPQAADSVSAVLEEAQAHAETWKDKKPALGNHQEPGAPPAPQGPKSSLPHPLRCRGPVTPVAAPPHPPRPRAQAAWSSPPRPTTSCRHSHQCRPWSTQSSRCRPRTSWRPPWTSCSLPSLSPRGLLCPTPPTGTKHQCSQAANE

SEQ ID NO: 915795 - protein, 168 aa, Homo sapiens
MEGKTSKQLAYIPPSRPPGELLELRSSRPAWATEQGLISTRNQKISQDKKPALGNHQEPGAPPAPQGPKSSLPHPLRCRGPVTPVAAPPHPPRPRAQAAWSSPPRPTTSCRHSHQCRPWSTQSSRCRPRTSWRPPWTSCSLPSLSPRGLLCPTPPTGTKHQCSQAANE

SEQ ID NO: 915796 - protein, 168 aa, Homo sapiens; identical to SEQ ID NO: 915794

SEQ ID NO: 915797 - protein, 119 aa, Homo sapiens
MSVQTAQTQPAIYRSRVALNTLSHNANHKWGQLRVWWEKPSCSSEIHKVEIAVAPTPLLWRLPSRIWEPARDLTAAHWTPEDTQPPWTSCSLPSLSPRGLLCPTPPTGTKHQCSQAANE

SEQ ID NO: 915798 - protein, 145 aa, Homo sapiens; identical to SEQ ID NO: 915793

SEQ ID NO: 915799 - protein, 484 aa, Homo sapiens
MDTPRGIGTFVVWDYVVFAGMLVISAAIGIYYAFAGGGQQTSKDFLMGGRRMTAVPVALSLTASFMSAVTVLGTPSEVYRFGAIFSIFAFTYFFVVVISAEVFLPVFYKLGITSTYEYLELRFNKCVRLCGTVLFIVQTILYTGIVIYAPALALNQVTGFDLWGAVVATGVVCTFYCTLGGLKAVIWTDVFQIGIMVAGFASVIIQAVVMQGGISTILNDAYDGGRLNFWKYHDCDPWTAKKVSAPDQLMPYLVLDILQDYPGLPGLFVACAYSGTLSTVSSSINALAAVTVEDLIKPYFRSLSERSLSWISQGMSVVYGALCIGMAALASLMGALLQAALSVFGMVGGPLMGLFALGILVPFANSIGALVGLMAGFAISLWVGIGAQIYPPLPERTLPLHLDIQGCNSTYNETNLITTTEMPFTTSVFQIYNVQRTPLMDNWYSLSYLYFSTVGTLVTLLVGILVSLSTGQLFEYQMKQLACV

SEQ ID NO: 915800 - protein, 450 aa, Homo sapiens
GCTSTKLQISAHLIMAIITMTVGTSCLSGPFYTKLFFQETDQMGNNSMEFKRLGDLHIWRHQGGLAVNYLAGKQCEDEEDSKSLDPGALRETAGDGEEDEGDEDRLDNAVRGPGPKGPVGTVSEAQLARRLTKVKNSRRMLSNKPQDFQWTYSNGQWLNRPALNDFIPTAALGLYNPTPVPILGMTLGGSTQLVAPGIAQSCPGLVLAILIGEGNEATPEDPKDPTCWERLGNHPPSVLQIRVRVIEGRQLSGNNIRPVVKVHVCGQTHRTRIKRGNNPFFDELFFYNVNMTPSELMDEIISIRVYNSHSLRADCLMGEFKIDVGFVYDEPGHAVMRKWLLLNDPEDTSSGSKGYMKVSMFVLGTGDEPPPERRDRDNDSDDVESNLLLPAGIALRWVTFLLKIYRAEDIPQMDDAFSQTVKEIFGGNADKKNLVDPFVEVSFAGKKVCT

SEQ ID NO: 915801 - protein, 379 aa, Homo sapiens
MHLTHSLKACQFFTKRQCIHLLWLPRQSTQDQAAWTTDTDCPTVLEAGAGDQDPASDESPQLCLLPVRAPAGPLLARYPSAPAPARRGATAGRVQSLMGQPNPRGGQGQLQAAKAGEQGPPGRTARARLAPTMQAKAHGGRVSPMPSCIGCIVSPRFMRQSPDPQDVHVVAFGDGQPREEAGRGGVCRPTTEAPGEPCGAVVSTFPTVRAAPSRRCPALGVLLSSDGKNAQCHPQRLTSLQGRLHPAVKQGQGAGPGMWGPGSGTHAWDSCASGEPGGPKAPGRAPDCLHGPAAPWAALGPWVWVWGQIQVHLCCECLCCPNEREDGLRAQRGPCGVSVGLKVLQHPSSSVEGSGRGEGRREPAAMEGTAPRPWYAAGA

SEQ ID NO: 915802 - protein, 144 aa, Homo sapiens
RKGGMEEGREGGRKGKGRREKGEREKNERKGKEKKREKERKVKRKKRKESPQRCTVTLPVEGSRLPVAVTGSSWDSPQVYGERAQSCDGPILDEAGSLMVMESPGQVALGFWGMSVSEELNSVNDHVSFEADLSLVEPSDRQQP

SEQ ID NO: 915803 - protein, 944 aa, Homo sapiens
MEREDGKNRTFGSLMGPGCGEGKVKFVSENYTTNYTKPSSGYDCHVSENTNKVSNKTSHFRAFELSQYYFYELSGNTVIERPRQICPYVIVAFRYRESKTMAPPAHKSILERSENEGEERDCRIFLQLNFSFLFKAIIKCLEDRGFFILLTSSALLSEPDFGGKQMGLHGLHLFRSPLSTGVKDLKVEDDISMKVIPILSTLNCALLETKKSLPEERIHPNTLVKRHFQELYKADRSPSLSVAPQDRMKDPTFLGKLPSGFDLIPPAEKCPSESLTQLNSYFSDPSAYILEVSTALDLLAEHPQSPCVSDGICDAGFSLVMTPDPEFLVSEAEVRKETETKKDSEEMLKAKKRVFPLSPASNLRVQPKRKASMPHMVQSKKVNLCRPFPKRTASRADNSSDSPTTLKLVKGQFPQKRKRGAEVLTAQFVQKTKLDRKNQEAPISKDVPVPTNAKRARKQEKSPVKTVPRAKPPVKKSPQKQRVNIVKGNENPRNRKQLQPVKGETASKLQSEISRGCQEDGISINSVQPENTTAAHNDLPENSIVNYDSQALNMLADLALSSATSSTPVSEARNLHCSSELPQNDVLLSKENSLRGTSDHEYHRGVKTQKGELLPNPSSDRKSNSGSDLTVSQDEESLVPCSQAPAKAQSALTEEMLESSDASQSSSVSVEHSYALLLTEHSKKHLQEREILSPLFPRNGTKSPEAATPVGKVMPFRHQPGLLLQQKPPDDPVVKPKDRPPSARVKKSSCSRIVLSCDDSVKITFKCETEYAFSLDSKYTNNPLEKTVVRALHGPWNTDLPDNVEEVKLLLHMWVALFYSNQNKIIRSSRKVVEHSNPAKYVSINSTLESCELREIEESLGLEKCSADSLLETNEISRAHAAEVSFRDPNCLLPFIKTPLTQGLELCVQNEQKKTFARECDPDTQEDQNFICSYNNEVCKAEYR

SEQ ID NO: 915804 - protein, 968 aa, Homo sapiens
MEREDGKNRTFGSLMGPGCGEGKVKFVSENYTTNYTKPSSGYDCHVSENTNKVSNKTSHFRAFELSQYYFYELSGNTVIERPRQICPYVIVAFRYRESKTMAPPAHKSILERSENEGEERDCRIFLQLNFSFLFKAIIKCLEDRGFFILLTSSALLSEPDFGGKQMGLHGLHLFRSPLSTGVKDLKVEDDISMKVIPILSTLNCALLETKKSLPEERIHPNTLVKRHFQELYKADRSPSLSVAPQDRMKDPTFLGKLPSGFDLIPPAEKCPSESLTQLNSYFSDPSAYILEVSTALDLLAEHPQSPCVSDGICDAGFSLVMTPDPEFLVSEAEVRKETETKKDSEEMLKAKKRVFPLSPASNLRVQPKRKASMPHMVQSKKVNLCRPFPKRTASRADNSSDSPTTLKLVKGQFPQKRKRGAEVLTAQFVQKTKLDRKNQEAPISKDVPVPTNAKRARKQEKSPVKTVPRAKPPVKKSPQKQRVNIVKGNENPRNRKQLQPVKGETASKLQSEISRGCQEDGISINSVQPENTTAAHNDLPENSIVNYDSQALNMLADLALSSATSSTPVSEARNLHCSSELPQNDVLLSKENSLRGTSDHEYHRGVKTQKGELLPNPSSDRKSNSGSDLTVSQDEESLVPCSQAPAKAQSALTEEMLESSDASQSSSVSVEHSYALLLTEHSKKHLQEREILSPLFPRNGTKSPEAATPVGKVMPFRHQPGLLLQQKPPDDPVVKPKDRPPSARVKKSSCSRIVLSCDDSVKITFKCETEYAFSLDSKYTNNPLEKTVVRALHGPWNTDLPDNVEEVKLLLHMWVALFYSNQNKIIRSSRKVVEHSNPAKYVSINSTLESCELREIEESLGLEKCSADSLLETNEISRAHAAEVSFRDPNCLLPFIKTPLTQGLELCVQNEQKKTFARECDPDTQEDQNFICSYNNENLLRKGGHTEIEPQHFCQAFHRENDTLIIII

SEQ ID NO: 915805 - protein, 151 aa, Homo sapiens
MGMVSRTIRRQIWFQGEVGGFSAEIIRLKSLRVQLIMGMLSEKPRSGTPAEVAACERVQQKAAVTLARLSRDPDVAREAVRLSCMSRLIELCRSPSERNSSDAVLVACLAALRRLAGVCPEGLQDSDFQQLVQPRLVDSFLLCSNMEESFV

SEQ ID NO: 915806 - protein, 139 aa, Homo sapiens
MGMVSRTIRRQIWFQGEVGGFSAEIIRLKSLRVQLIMGMLSEKPRSGTPAEVAACERVQQKAAVTLARLSRDPDVAREAVRLSCMSRLIELCRSPSERNSSDAVLVACLAMGIQLQVKKTNISALLLWFLFWHIQGCSA

SEQ ID NO: 915807 - protein, 160 aa, Homo sapiens
MGWVAAGRLLFVLQAVFFNQWPATHWLGPEATGSLFNPVNLGFGCSQPQASRGMLANEKLMLKGGYLSHAYIKNTKISHKTTIEGSAGAVISSEVSTREGAASKLIQVIDGRIWFLMGCWTEDFSLSQYAGCSPHSVPCHKGLSIEQLGNRAAGFIRVKE

SEQ ID NO: 915808 - protein, 382 aa, Homo sapiens
MAAGQRRSSLPRRDGGQEEALLTFQTGQPGRGAPHKGGGAIMLGWNVGVFLGGGGGVGKATSLWGCGAWGIRGWRGSLGPSSGGGASSAQCHSLISSGSGVLLLSHFYHAIQPGHLQDTLQASKRNSFGSEWAQALKPAKNTKARRTLKFSRSLNDVGEKAQDTSESFAYVERTCSEGKLILPQDTCLRTNRFHHKEKRTLNHKPLGNSKHSCVSCLSAGRSTASEVEAGKGGRPGLLLEEKADGEATSRSRQLLQYLFSLSHGLSASSLHRFHELESCAARLHTAKSSSGLAGSMGFCSDEMGDDDVFEDSTSAKLKSRVLRAPLCSTEKDSDLDCPSPFSEKLPPISPVSTSGDVCSLRSLVPAVIISNIWIRDPLTKTA

SEQ ID NO: 915809 - protein, 192 aa, Homo sapiens
PVRVNCISNWMNVTLLMVKFSKYIKYLVAKERTAWGNQYWRYDSDKDQALTEDEQGKSYPKLISEGFPGIPSPLDTAFYDRRQKLIYFFKESLVFAFDVNRNRVLNSYPKRITEVFPAVIPQNHPFRNIDSAYYSYAYNSIFFFKGNAYWKVVNDKDKQQNSWLPANGLFPKKFISEKWFDVCDVHISTLNM

SEQ ID NO: 915810 - protein, 1012 aa, Homo sapiens
SLMREVFLLSLFNIKGKAHTGKELSQEIKAFLTGVDPILGHQLSAREHARCGLLLLRSLPPARAAVLDHLRGVFDESVRAHLAALDETPVAGPPHLRPPPPSHVPAGGPGLEDVVQEVQQVLSEFIRANPKAWAPVISAWSIDLMGQLSSTYSGQHQRVPHATGALNELLQLWMGCRATRTLMDIYVQCLSALIGSCPDACVDALLDTSVQHSPHFDWVVAHIGSSFPGTIISRVLSCGLKDFCVHGGAGGGAGSSGGSSSQTPSTDPFPGSPAIPAEKRVPKIASVVGILGHLASRHGDSIRRELLRMFHDSLAGGSGGRSGDPSLQATVPFLLQLAVMSPALLGTVSGELVDCLKPPAVLSQLQQHLQGFPREELDNMLNLAVHLVSQASGAGAYRLLQFLVDTAMPASVITTQGLAVPDTVREACDRLIQLLLLHLQKLVHHRGGSPGEGVLGPPPPPRLVPFLDALKNHVGELCGETLRLERKRFLWQHQLLGLLSVYTRPSCGPEALGHLLSRARSPEELSLATQLYAGLVVSLSGLLPLAFRSCLARVHAGTLQPPFTARFLRNLALLVGWEQQGGEGPAALGAHFGESASAHLSDLAPLLLHPEEEVAEAAASLLAICPFPSEALSPSQLLGLVRAGVHRFFASLRLHGPPGVASACQLLTRLSQTSPAGLKAVLQLLVEGALHRGNTELFGGQVDGDNETLSVVSASLASASLLDTNRRHTAAVPGPGGIWSVFHAGVIGRGLKPPKFVQSRNQQEVIYNTQSLLSLLVHCCSAPGGTECGECWGAPILSPEAAKAVAVTLVESVCPDAAGAELAWPPEEHARATVERDLRIGRRFREQPLLFELLKLVAAAPPALCYCSVLLRGLLAALLGHWEASRHPDTTHSPWHLEASCTLVAVMAEGSLLPPALGNMHEVFSQLAPFEVRLLLLSVWGFLREHGPLPQKFIFQSERGRFIRDFSREGGGEGGPHLAVLHSVLHRNIDRLGLFSGRFQAPSPSTLLRQGT

SEQ ID NO: 915811 - protein, 268 aa, Homo sapiens
MTQTLDTREDPLNLGGGGGGGCGCGWAHSASLSSWSSCHRRRPGAPAYNRPHRYSPKTEYGPPRKQPKQQHGRAFGSNHPCALTGGAGEGPGAHPLQDSGNSPARCKCSGCMAAPSLLLLLLLLERVLEPWLGEAPRQEEALGPQRPRPAPPPSPLLPAEPASGCEHAAAAAPPNTTQFIMNQIYEDMRQQEKVERQQEALRAQKATVSGEASPARSSGNDAPPGGSKETWGLQETLYGFVQNPSLAFSPNPEGKNFTCLWKCLYQSS

SEQ ID NO: 915812 - protein, 393 aa, Homo sapiens
MTQTLDTREDPLNLGGGGGGGCGCGWAHSASLSSWSSCHRRRPGAPAYNRPHRYSPKTEYGPPRKQPKQQHGRAFGSNHPCALTGGAGEGPGAHPLQDSGNSPARCKCSGCMAAPSLLLLLLLLERVLEPWLGEAPRQEEALGPQRPRPAPPPSPLLPAEPASGCEHAAAAAPPNTTQFIMNQIYEDMRQQEKVERQQEALRAQKATVSGEASPARSSGNDAPPGGSKETWGLQETLYGFVQNPSLAFSPNPEENQSLAPLLVEEEEEKKNDDEEEYDQEVCDAKEASEEEEEVEDEEEEVEDEEEEEVEEAEYVEEGEEELEEEELEEEEEVLEENEQRGEEFHLPLEMPLSIFVEAEEKRENFISCTFLNPEQIIPKVPQESLFMAQDFNC

SEQ ID NO: 915813 - protein, 138 aa, Homo sapiens
MDFVICIIAVLLMGKISKYLKDYYIHYHNTQRMKITYSFENWDTFYFESCRKPYDALHSSHSKFPGSKFKNSGQCLTVYSMGFTRLSLLRPRTKWASQIEIILIQIIFPQVSQCKTPQQRAHGDQERQHYHKHLYFLC

SEQ ID NO: 915814 - protein, 229 aa, Homo sapiens
LFPGSWAQMPVPLEGACCLGNAHSRLRGAPPTSSRAQHPLDRRREGGRKKSNSPVLPTWSADPRPTCPSSSRLTLLGPRWTRLYRYWLPPYGPIPVHTTEWQAPGRLELGWGLAPRASSGGACGFAPELPRSSQALRKWANPTRRTDPGLRPAVLLAHPRPLAPSAVPALELLGAFLSPLQGERTGLFSPLLRLFQGNCSRRRLRWHRKSPGGIAQPRFSDSSPPLPAL

SEQ ID NO: 915815 - protein, 112 aa, Homo sapiens
RAVKAKGPVMIPYPFFQSHVEDFYVEGLPKGIFFFFFLRWSFHSYRPGWGAMAQPCWSLQPLPPGFKKFSCLSLPSHWDYRCPPPYQANFCIFSGDAVSPCWPGQSRTPDVK

SEQ ID NO: 915816 - protein, 150 aa, Homo sapiens
MVSHCGILRRSSCLLAASPGPAPPASQWPLSAQPSSCLPAAFPSPAFDFRWPLQASTRPSLLPPEGLHRPSLCLTADSPRPASCCFTAASRVQSSCLSAASAGPGSRLPVASSGPWGSFLTTAFPGPVFPFRRPLRAQNLLKSASPDPLA

SEQ ID NO: 915817 - protein, 184 aa, Homo sapiens
MLLPPGSLSRPRTFSSQPLQTKLMTLNGLFRPIPYVTAASADEATASQQPPQAQLHRYNGLFRPSSCLPAFSPGPELSQVDLTRPSSCILVAPPGPASASRQPLQSQRLPHSRFFTPSIYLTVDPPSQAPNLSAASTHPLPPASGLFRPMGLIPDNGLSRPSFSLPAASPGPEPPQVGLSRPTC

SEQ ID NO: 915818 - protein, 397 aa, Homo sapiens
MHQVQWEALLESERSFQLRLVWEGSFWMHLSRGPQPLSHGAARSHTAGGGNIQLQENKLNTPTDSTLCQPLQTKLMTHNGLFRPIPYVTAASADEATASQQPPQAQLHRYNGLFRPSSCLPAFSPGPEHSQVSLCCPRLECSSAIAADCSLNLPGCSDPPTSTSHVAETTGACHYAQLIFGIFVYVDSRGVTAKRGTIQLQENKLNTPTDFYIMLLPPGSLSRPRTFSSQPLQTKLMTLNGLFRPIPYVTAASADEATASQQPPQAQLHRYNGLFRPSSCLPAFSPGPELSQVDLTRPSSCILVAPPGPASASRQPLQSQRLPHSRFFTPSIYLTVDPPSQAPNLSAASTHPLPPASGLFRPMGLIPDNGLSRPSFSLPAASPGPEPPQVGLSRPTC

SEQ ID NO: 915819 - protein, 112 aa, Homo sapiens; identical to SEQ ID NO: 915815

SEQ ID NO: 915820 - protein, 112 aa, Homo sapiens; identical to SEQ ID NO: 915815

SEQ ID NO: 915821 - protein, 184 aa, Homo sapiens; identical to SEQ ID NO: 915817

SEQ ID NO: 915822 - protein, 146 aa, Homo sapiens
MNRKKSSVDTSQTQLSLALESTFLSTVQCTVLTEGENPTVCDALPMSQSMKNVTRSRNFRAERDHLVQPIHFMGRELKPRENRNATTSVPDLLDAHLQEPYEDKNYHNLYPTYLKNPVHCALIGCPLNLDKCKASYQFLCTAMATR

SEQ ID NO: 915823 - protein, 127 aa, Homo sapiens
MNRKKSSVDTSQTQLSLALESTFLSTVQCTVLTEGENPTVCDALPMSQSMKNVTRSRNFRAERDHLVQPIHFMGRELKPRENRNATTSVPDLLDAHLQVRHLTSSYALQWPLDRFDANHLKSEFLHS

SEQ ID NO: 915824 - protein, 843 aa, Homo sapiens
MAGFCLLCLRRTAPMYWSLALTAQTEPTQELQDSHRSRLLNLLRYQGALIQGIKAGGKKATNTGKVSEVHQKPDESTSEFYEKLCEAYRLYTPFDPEVAGNQCMVNAAFLIQVATKVFVNQDEEAKWEAKHRVKEKAEFLAAALIEREAGFARGHGHGRGCSHGKGQARARPGQETRTGPEEPMVSMVVGGRKIDLMVDTGAEHSAVTQTIRVLSKLYANIIGATGRCELGQERKEIVCSIPQPDRRQQVQEFLGAAGFCQLWIPDYWLLAKPLYEATKGGEKEPLQPDRRQQVQEFLGAAGFCQLWIPDYWLLAKPLYEATKGGEKEPLLWGKEQDMAFKEIKKASIQAPALGLPDMTKPFYLMLRYQGLLCENPYITLEAVNTLNLATLLPIECAEHGKSLLCAPGYHCCVETVDEVFSSWEDLKDQPLRNPDVEYFTDGSSFISEGIKKARYAVVTLSSVAEACPLPVGTSAQKVELIALTRALFLVKGKSVNIYADSKYAFATLHAHGAIYDERGLLTTEGKEIKNKKEIEQLLEAVWAPKEVAVIHCKGQQTGRSDKATGNSKADKEARKTAMTEKTKKEETYAMPLLEPPLADTPNYSSNEKASFVQENGSYQKEGWWKFSDGRLTIPEAIAPQFIKQFHQGTHMGKTDLKILIGRYFIVPCLTAMTRAIYEQCVTCAQNNPRQGPTWPQGIQETGAVPCENLLVDFTELPQAGGYRYMLVFVCTFSRFGLPLTLGSENGPDFVAEVKGCKDELDTETTVEEVLPRDSFKVGPGIAHGPSLSQVYPYKINWVFTYEIVHGPPPPLISQVKGDLKEIGELTLGRQMQVLGEVMQEVQG

SEQ ID NO: 915825 - protein, 156 aa, Homo sapiens
MNESWLEKRVPDLNGCRDRQKYRDWLSLANAAAPSASLDPFMFCYIFHTDLPPPAFFASRTITRLKSQQAHLGAFSLLQRRLQLFTKITVHWGKGNNQTFWRLLDAAFNSRRTHTLLWPFSQSSCLWRPINQWSFSSDPSYSGPSGPQAHPMVIFP

SEQ ID NO: 915826 - protein, 351 aa, Homo sapiens
MADEGKSYSEHDDERVNFPQRKKKGRGPFRWKYGEGNRRSGRGGSGIRSSRLEEDDGDVAMSDAQDGPRVRYNPYTTRPNRRGDTWHDRDRIHVTVRRDRAPPERGGAGTSQDGTSKNWFKITIPYGRKYDKAWLLSMIQSKCSVPFTPIEFHYENTRAQFFVEDASTASALKAVNYKILDRENRRISIIINSSAPPHTILNELKPEQVEQLKLIMSKRYDGSQQALDLKGLRSDPDLVAQNIDVVLNRRSCMAATLRIIEENIPELLSLNLSNNRLYRLDDMSSIVQKAPNLKILNLSGNELKSERELDKIKGLKLEELWLDGNSLCDTFRDQSTYISAIRERFPKLLRL

SEQ ID NO: 915827 - protein, 373 aa, Homo sapiens
GVCMEMASVVKHDDERVNFPQRKKKGRGPFRWKYGEGNRRSGRGGSGIRSSRLEEDDGDVAMSDAQDGPRVRYNPYTTRPNRRGDTWHDRDRIHVTVRRDRAPPERGGAGTSQDGTSKNWFKITIPYGRKYDKAWLLSMIQSKCSVPFTPIEFHYENTRAQFFVEDASTASALKAVNYKILDRENRRISIIINSSAPPHTILNELKPEQVEQLKLIMSKRYDGSQQALDLKGLRSDPDLVAQNIDVVLNRRSCMAATLRIIEENIPELLSLNLSNNRLYRLDDMSSIVQKAPNLKILNLSGNELKSERELDKIKGLKLEELWLDGNSLCDTFRDQSTYISPTCSSPCPNILCHPCGVFGSWPKPDLAELMDTW

SEQ ID NO: 915828 - protein, 684 aa, Homo sapiens
RVHPSVSLEFDQQQGSVCPSESEIYEAVAGDRMAGAPMAAAVQPAEVTVEVGEDLHMHHVRDREMPEALEFNLSANPEASTIFQRNSQTDALEFNPSANPEASTIFQRNSQTDVVEKEEATVQTIVTLEIPHHITQRDADRSLSIPDEQLHSFAVSTVHITKNRNGGGSLNNYSSSIPSTPSTSQEDPQFSVPPTANTPTPVCKRSMRWSNLFTSEKGSDPDKERKAPENHADTIGSGRAIPIKQGMLLKRSGKWLKTWKKKYVTLCSNGVLTYYSSLGDYMKNIHKKEIDLQTSTIKVPGKWPSLATSACTPISSSKSNDLSKDMDTGLGDSICFSPSISSTTGPKLNPPPSPHANKKKHLKKKSTNNFMIVSATGQTWHFEATTYEERDAWVQAIQSQILASLQSCESSKSKSQLTSQSEAMALQSIQNMRGNAHCVDCETQNPKWASLNLGVLMCIECSGIHRSLGTRLSRVRSLELDDWPVELRKVMSSIGNDLANSIWEGSSQGQTKPSEKSTREEKERWILSKYEEKLFLAPLPCTDLSLGQQLLRATADEDLQTAILLLAHGSREEVNETCGEGDGCTALHLACRKGNVVLAQLLIWYGVDVMARDAHGNTALTYARQASSQECINVLLQYGCPDEQHPIDTGFPVSLEFFFLKAPVSAGLTHLKEHTLLCGSHTYS

SEQ ID NO: 915829 - protein, 572 aa, Homo sapiens
HSHQHYLTMTIISVTLEIPHHITQRDADRSLSIPDEQLHSFAVSTVHITKNRNGGGSLNNYSSSIPSTPSTSQEDPQFSVPPTANTPTPVCKRSMRWSNLFTSEKGSDPDKERKAPENHADTIGSGRAIPIKQGMLLKRSGKWLKTWKKKYVTLCSNGVLTYYSSLGDYMKNIHKKEIDLQTSTIKVPGKWPSLATSACTPISSSKSNDLSKDMDTGLGDSICFSPSISSTTGPKLNPPPSPHANKKKHLKKKSTNNFMIVSATGQTWHFEATTYEERDAWVQAIQSQILASLQSCESSKSKSQLTSQSEAMALQSIQNMRGNAHCVDCETQNPKWASLNLGVLMCIECSGIHRSLGTRLSRVRSLELDDWPVELRKVMSSIGNDLANSIWEGSSQGQTKPSEKSTREEKERWILSKYEEKLFLAPLPCTDLSLGQQLLRATADEDLQTAILLLAHGSREEVNETCGEGDGCTALHLACRKGNVVLAQLLIWYGVDVMARDAHGNTALTYARQASSQECINVLLQYGCPDEQHPIDTGFPVSLEFFFLKAPVSAGLTHLKEHTLLCGSHTYS

SEQ ID NO: 915830 - protein, 130 aa, Homo sapiens
RVHPSVSLEFDQQQGSVCPSESEIYEAVAGDRMAGAPMAAAVQPAEVTVEVGEDLHMHHVRDREMPEALEFNLSANPEASTIFQRNSQTDALEFNPSANPEASTIFQRNSQTDGETTLFFPPRERIKALV

SEQ ID NO: 915831 - protein, 285 aa, Homo sapiens
MGQKRSQGKGSLQLSSCSLCIGFIVGEQRGLVNGRQDGLKNTINNSKTITIIITNTIRNTTNTIITVTNTTMNTHTIMINTITNTIKNVVRNTITNSKMIITIVNTIRNTIIITTNTCFSDGVGDDDGDDFTVGDAVSNGVYDIVGIGDVIGVDEGYDLYNNNGVGGDDNGVSDCVDDGNDHFAVSNGISDNIFDGVGDGVDHDGVGVHGGIGHSDDGVGGVSDGVGDDYGDSFAVVDSVSGGIFDGVVFLIVLVMLMMLVMVVMVFLIVMVMVIMMKKAEDWVH

SEQ ID NO: 915832 - protein, 334 aa, Homo sapiens
MFVSLFVYNKNFFFTILFLFSPGVFDIVFATNSTQVIKMILNSSTEDGIKRIQDDCPKAGRHNYIFVMIPTLYSIIFVVGIFGNSLVVIVIYFYMKLKTVASVFLLNLALADLCFLLTLPLWAVYTAMEYRWPFGNYLCKIASASVSFNLYASVFLLTCLSIDRYLAIVHPMKSRLRRTMLVAKVTCIIIWLLAGLASLPAIIHRNVFFIENTNITVCAFHYESQNSTLPIGLGLTKNILGFLFPFLIILTSYTLIWKALKKAYEIQKNKPRNDDIFKIIMAIVLFFFFSWIPHQIFTFLDVLIQLGIIRDCRIADIVDTAMPITICIAYFTIA

SEQ ID NO: 915833 - protein, 150 aa, Homo sapiens
TRAKPGGIEASRKFRMLRCLEVDKLRANRGNERESGWQRIRKPEGQVVSQKARQETDNRWIHHHTLPTADKFISEPLTWCQPILTTSDTYEVAWNRRSRYGEQQMPKIQSSFMLGHIQKPARWTIWEEQSRLSIRLPHWGCFSLLPPIKE

SEQ ID NO: 915834 - protein, 289 aa, Homo sapiens
MWDLPLDPSDMVHTLPSGSAGVCMGEVFETSKSRRVCDPSEPHATSSENREVMVQTFLGPPDRTHREAAQLQLRHTPAPTAVLVTGPEHHVSSGVCVVGAVRGTTPGLLPGLRSPEPCSLPTPSPDACPGTHAVARTPVNPDRSLLLPPLRDGEAGECLGSQANPKDNPQTLFTQELECGEASKPPPWPQNLSHEGPQLACVTPLQHAQWPLNLLQETPTLGCNSLCNIGFHHSTVGTEPASKANGSRGDLPVKSDRAEAPPRDWGSDDLALDRHNDGAKDSVNEDRTC

SEQ ID NO: 915835 - protein, 527 aa, Homo sapiens
MGFNVIRLLSGSAVALVIAPTVLLTMLSSAERGCPKGCRCEGKMVYCESQKLQEIPSSISAGCLGLSLRYNSLQKLKYNQFKGLNQLTWLYLDHNHISNIDENAFNGIRRLKELILSSNRISYFLNNTFRPVTNLRNLDLSYNQLHSLGSEQFRGLRKLLSLHLRSNSLRTIPVRIFQDCRNLELLDLGYNRIRSLARNVFAGMIRLKELHLEHNQFSKLNLALFPRLVSLQNLYLQWNKISVIGQTMSWTWSSLQRLDLSGNEIEAFSGPSVFQCVPNLQRLNLDSNKLTFIGQEILDSWISLNDISLAGNIWECSRNICSLVNWLKSFKGLRENTIICASPKELQGVNVIDAVKNYSICGKSTTERFDLARALPKPTFKPKLPRPKHESKPPLPPTVGATEPGPETDADAEHISFHKIIAGSVALFLSVLVILLVIYVSWKRYPASMKQLQQRSLMRRHRKKKRQSLKQMTPSTQEFYVDYKPTNTETSEMLLNGTGPCTYNKSGSRECEEIISDDLPLEHPSAS

SEQ ID NO: 915836 - protein, 880 aa, Homo sapiens
MLPSPVTSTPFSVKDILNLEQQHQHFHGAHLQADLEHHFHSAPCMLAAAEGTQFSDGGEEDEEDEGEKLSYLNSLAAADGHGDSGLCPQGYVHTVLRDSCSEPKEHEEEPEVVRDRSQKSCQLKKSLETAGDCKAAEESERPKPRSRRKPRVLFSQAQVFELERRFKQQRYLSAPEREHLASSLKLTSTQVKIWFQNRRYKCKRQRQDKSLELGAHAPPPPPRRVAVPVLVRDGKPCVTPSAQAYGAPYSVGASAYSYNSFPAYGYGNSAAAAAAAAAAAAAAAAYSSSYGCAYPAGGGGGGGGTSAATTAMQPACSAAGGGPFVNVSNLGGFGSGGSAQPLHQGTAAGAARFRFAAVSPPQQIPRSRSPDCRGTQDSSRKTSRMRSKVGGGGRLNKLRTWWPTGGVEGSGPFEVPGFAVPPKFYPDAWTSCIDLRSVKSCTLPHLEGRQGKGSLARSPSCWPREGGSFPGCSQGYQRARGRCAAPHCGRALPLGRPPFSPGGRGFMRLLVTCGECLCEACAATRPIVSVPRRVNGEASERRAIVGPGLAERRLRAGKVRKEWLFIGVPNKRRQKDPRAEREPVHQTAGPAATRGRVPPLSRRPRTGTQPPTTWLVILTEETELVLWIGFRKFACLEILEASLDQPAPYPAPEPAVSRGVGTGARGGSWETGRHKDRKPQLRGRVSPQRSGRAIAGKPGTGGARRGLQGFDFGCIWDIRQKGKVEGRFLGEVRVLSSPPLQGGKGKEWKPGPSPRGFSRARARRRSDLGPRLCQGGAGWAGASLETRAGDREVQGPSRSRPVPRFLVQDASGDFPGASSQLQGPEPWKDCDLRARGGQSQLGRECPGEPRESLADSAVKKKKMMVVVGGFLEAERGHHVT

SEQ ID NO: 915837 - protein, 621 aa, Homo sapiens
MSVLKKNRRKDSDTPQEPSEKAKEQQAEAELRKLRQQFRKMVESRKSFKFRNQQKIASQYKEIKTLKTEQDEITLLLSLMKSSRNMNRSEKNYMELRLLLQTKEDYEALIKSLKVLLAELDEKILQMEKKIANQKQIFAKMQEANNPRKLQKQIHILETRLNLVTVHFDKMLTTNAKLRKEIEDLRFEKAAYDNVYQQLQHCLLMEKKTMNLAIEQSSQAYEQRVEAMARMAAMKDRQKKDTSQYNLEIRELERLYAHESKLKSFLLVKLNDRNEFEEQAKREEVKVPKSPSLKAKKHVKKNRGESFESYEVAHLRLLKLAESGNLNQLIEDFLAKEEKNFARFTYVTELNNDMEMMHKRTQRIQDEIILLRSQQKLSHDDNHSVLRQLEATGWQQSTCCPLRCSERHLPDIWVWGITGFQAGSRSTETLPKLGRCLGPTSFTRGHPESRLLLRLRLAPLYILAAQIPHLLYFLLLPALCSGGTTHSAPRPRSLGSHLGPASCSPAIIEKKTNDLLLLETYRRILEVEGAEAEIPPPFINPFWGGSALLKPPEPIKVIPPVLGADPFSDRLDDVEQPLDHSSLRQLVLDNYILKENRSKEVRGDSLPEKVDDFRSRKKVTM

SEQ ID NO: 915838 - protein, 542 aa, Homo sapiens
MKSSRNMNRSEKNYMELRLLLQTKEDYEALIKSLKVLLAELDEKILQMEKKIANQKQIFAKMQEANNPRKLQKQIHILETRLNLVTVHFDKMLTTNAKLRKEIEDLRFEKAAYDNVYQQLQHCLLMEKKTMNLAIEQSSQAYEQRVEAMARMAAMKDRQKKDTSQYNLEIRELERLYAHESKLKSFLLVKLNDRNEFEEQAKREEVKVPKSPSLKAKKHVKKNRGESFESYEVAHLRLLKLAESGNLNQLIEDFLAKEEKNFARFTYVTELNNDMEMMHKRTQRIQDEIILLRSQQKLSHDDNHSVLRQLEATGWQQSTCCPLRCSERHLPDIWVWGITGFQAGSRSTETLPKLGRCLGPTSFTRGHPESRLLLRLRLAPLYILAAQIPHLLYFLLLPALCSGGTTHSAPRPRSLGSHLGPASCSPAIIEKKTNDLLLLETYRRILEVEGAEAEIPPPFINPFWGGSALLKPPEPIKVIPPVLGADPFSDRLDDVEQPLDHSSLRQLVLDNYILKENRSKEVRGDSLPEKVDDFRSRKKVTM

SEQ ID NO: 915839 - protein, 147 aa, Homo sapiens
LFKKINCDATKILVQLGETGKVTDINLPQYFAIIEKKTNDLLLLETYRRILEVEGAEAEIPPPFINPFWGGSALLKPPEPIKVIPPVLGADPFSDRLDDVEQPLDHSSLRQLVLDNYILKENRSKEVRGDSLPEKVDDFRSRKKVTM

SEQ ID NO: 915840 - protein, 670 aa, Homo sapiens
FDQQQGSVCPSESETYEAGARDRMAGAPMAAAVQPAEVTVEVGEDLHMHHVRDREMPEALEFNLSANPESSTIFQRNSQTEALEFNPSANPEASTIFQRNSQTDVVEIRRSNCTNHVSAVRFSQQYSLCSTIFLDDSTAIQHYLTMTIISVTLEIPHHITQRDADRTLSIPDEQLHSFAVSTVHIMKKRNGGGSLNNYSSSIPSTPSTSQEDPQFSVPPTANTPTPVCKRSMRWSNLFTSEKGSDPDKERKAPENHADTIGSGRAIPIKQGMLLKRSGKWLKTWKKKYVTLCSNGMLTYYSSLGDYMKNIHKKEIDLQTSTIKVPGKWPSLATSACTPISSSKSNGLSKDMDTGLGDSICFSPSISSTTSPKLNPPPSPHANKKKHLKKKSTNNFMIVSATGQTWHFEATTYEERDAWVQAIQSQILASLQSCESSKSKSQLTSQSEAMALQSIQNMRGNAHCVDCETQNPKWASLNLGVLMCIECSGIHRSLGPHLSRVRSLELDDWPVELRKVMSSIVNDLANSIWEGSSQGQTKPSEKSTREEKERWIRSKYEEKLFLAPLPCTELSLGQQLLRATADEDLQTAILLLAHGSCEEVNETCGEGDGCTALHLACRKGNVVLAQLLIWYGVDVMARDAHGNTALTYARQASSQECINVLLQYGCPDECV

SEQ ID NO: 915841 - protein, 81 aa, Homo sapiens
FDQQQGSVCPSESETYEAGARDRMAGAPMAAAVQPAEVTVEVGEDLHMHHVRDREMPEGEEVIGAIYPRFASGCCCPHGSL

SEQ ID NO: 915842 - protein, 485 aa, Homo sapiens
MKKRNGGGSLNNYSSSIPSTPSTSQEDPQFSVPPTANTPTPVCKRSMRWSNLFTSEKGSDPDKERKAPENHADTIGSGRAIPIKQGMLLKRSGKWLKTWKKKYVTLCSNGMLTYYSSLGDYMKNIHKKEIDLQTSTIKVPGKWPSLATSACTPISSSKSNGLSKDMDTGLGDSICFSPSISSTTSPKLNPPPSPHANKKKHLKKKSTNNFMIVSATGQTWHFEATTYEERDAWVQAIQSQILASLQSCESSKSKSQLTSQSEAMALQSIQNMRGNAHCVDCETQNPKWASLNLGVLMCIECSGIHRSLGPHLSRVRSLELDDWPVELRKVMSSIVNDLANSIWEGSSQGQTKPSEKSTREEKERWIRSKYEEKLFLAPLPCTELSLGQQLLRATADEDLQTAILLLAHGSCEEVNETCGEGDGCTALHLACRKGNVVLAQLLIWYGVDVMARDAHGNTALTYARQASSQECINVLLQYGCPDECV

SEQ ID NO: 915843 - protein, 267 aa, Homo sapiens
FDQQQGSVCPSESETYEAGARDRMAGAPMAAAVQPAEVTVEVGEDLHMHHVRDREMPEALEFNLSANPESSTIFQRNSQTEALEFNPSANPEASTIFQRNSQTDVVEIRRSNCTNHVSAVRFSQQYSLCSTIFLDDSTAIQHYLTMTIISVTLEIPHHITQRDADRTLSIPDEQLHSFAVSTVHIMKKRNGGGSLNNYSSSIPSTPSTSQEDPQFSVPPTANTPTPVCKRSMRWSNLFTSEKGSDPDHRGHRDYYYRHHHDSKRRRS

SEQ ID NO: 915844 - protein, 670 aa, Homo sapiens; identical to SEQ ID NO: 915840

SEQ ID NO: 915845 - protein, 337 aa, Homo sapiens
GLTVLVITFFTKDISLQHVSVWLFDSAKVPSISSTTSPKLNPPPSPHANKKKHLKKKSTNNFMIVSATGQTWHFEATTYEERDAWVQAIQSQILASLQSCESSKSKSQLTSQSEAMALQSIQNMRGNAHCVDCETQNPKWASLNLGVLMCIECSGIHRSLGPHLSRVRSLELDDWPVELRKVMSSIVNDLANSIWEGSSQGQTKPSEKSTREEKERWIRSKYEEKLFLAPLPCTELSLGQQLLRATADEDLQTAILLLAHGSCEEVNETCGEGDGCTALHLACRKGNVVLAQLLIWYGVDVMARDAHGNTALTYARQASSQECINVLLQYGCPDECV

SEQ ID NO: 915846 - protein, 196 aa, Homo sapiens
MKKRNGGGSLNNYSSSIPSTPSTSQEDPQFSVPPTANTPTPVCKRSMRWSNLFTSEKGSDPDKERKAPENHADTIGSGRAIPIKQGMLLKRSGKWLKTWKKKYVTLCSNGMLTYYSSLGDYMKNIHKKEIDLQTSTIKVPGKWPSLATSACTPISSSKSNGLSKDMDTGLGDSICFSPSISSTTSPKLNPPPSPHA

SEQ ID NO: 915847 - protein, 148 aa, Homo sapiens
KFKEKKATKALRGGNINKPLQCYSEAIKLDPHNHVLYSNRSAAYAKKGDYQKAYEDGCKTVDLKPDWGKGYSRKAAALEFYNRHDSPEDVKRRAMADPEVQQIMSDPAMRLILEQMQKDPQALSEHLKNPVIAQKIQKLMDVGLIAIR

SEQ ID NO: 915848 - protein, 113 aa, Homo sapiens
TQGRAACYTKLLEFQLALKDCEECIQLEPTLIKGYTRKAAALEAMKDYTKAMDVYQKALDLDSSCKEAADGYQRCMMAQYNRHDSPEDVKRRAMADPEVRAWAQLAKRAELDL

SEQ ID NO: 915849 - protein, 245 aa, Homo sapiens
EATIPNNSGWNWAAEEKYKDAIHFYNKSLAEHRTPDVLKKCQQAEKILKEQERLAYINPDLALEEKNKGNECFQKGDYPQAMKHYTEAIKRNPKDAKLYSNRAACYTKLLEFQLALKDCEECIQLEPTFIKGYTRKAAALEAMKDYTKAMDVYQKALDLDSSCKEAADGYQRCMMAQYNRHDSPEDVKRRAMADPEVQQIMSDPAMRLILEQMQKDPQALSEHLKNPVIAQKIQKLMDVGLIAIR

SEQ ID NO: 915850 - protein, 271 aa, Homo sapiens
GDYNKCRELCEKAIEVGRENREDYRQIAKAYARIGNSYFKEEKYKDAIHFYNKSLAEHRTPDVLKKCQQAEKILKEQERLAYINPDLALEEKNKGNECFQKGDYPQAMKHYTEAIKRNPKDAKLYSNRAACYTKLLEFQLALKDCEECIQLEPTFIKGYTRKAAALEAMKDYTKAMDVYQKALDLDSSCKEAADGYQRCMMAQYNRHDSPEDVKRRAMADPEVQQIMSDPAMRLILEQMQKDPQALSEHLKNPVIAQKIQKLMDVGLIAIR

SEQ ID NO: 915851 - protein, 151 aa, Homo sapiens
GRVGRPTRSPRVRKLLEFQLALKDCEECIQLEPTFIKGYTRKAAALEAMKDYTKAMDVYQKALDLDSSCKEAADGYQRCMMAQYNRHDSPEDVKRRAMADPEVQQIMSDPAMRLILEQMQKDPQALSEHLKNPVIAQKIQKLMDVGLIAIR

SEQ ID NO: 915852 - protein, 271 aa, Homo sapiens; identical to SEQ ID NO: 915850

SEQ ID NO: 915853 - protein, 240 aa, Homo sapiens
EATIPNNSGWNWAAEEKYKDAIHFYNKSLAEHRTPDVLKKCQQAEKILKEQERLAYINPDLALEEKNKGNECFQKGDYPQAMKHYTEAIKRNPKDAKLYSNRAACYTKLLEFQLALKDCEECIQLEPTFIKGYTRKAAALEAMKDYTKAMDVYQKALDLDSSCKEAADGYQRCMMAQYNRHDSPEDVKRRAMADPEVQQIMSDPAMRLILEQMQKDPQALSEYVESERRPCWKWRTKAGR

SEQ ID NO: 915854 - protein, 109 aa, Homo sapiens
LSPLVSYLCYLGPAEAVSWVVLTRFTFVSSGLQEAADGYQRCMMAQYNRHDSPEDVKRRAMADPEVQQIMSDPAMRLILEQMQKDPQALSEYVESERRPCWKWRTKAGR

SEQ ID NO: 915855 - protein, 271 aa, Homo sapiens; identical to SEQ ID NO: 915850

SEQ ID NO: 915856 - protein, 271 aa, Homo sapiens; identical to SEQ ID NO: 915850

SEQ ID NO: 915857 - protein, 240 aa, Homo sapiens; identical to SEQ ID NO: 915853

SEQ ID NO: 915858 - protein, 184 aa, Homo sapiens
TKAHAFCLVVMYSSVSQTGIVPRYVFFITSASCRVQAVCLVWDDPSSGVVFPDVVPSVWCWDCEECIQLEPTFIKGYTRKAAALEAMKDYTKAMDVYQKALDLDSSCKEAADGYQRCMMAQYNRHDSPEDVKRRAMADPEVQQIMSDPAMRLILEQMQKDPQALSEYVESERRPCWKWRTKAGR

SEQ ID NO: 915859 - protein, 103 aa, Homo sapiens
FLSVASFKDCEECIQLEPTFIKGYTRKAAALEAMKDYTKAMDVYQKALDLDSSCKEAADGYQRCMMAQYNRHDSPEDVKRRAMADPEVLAPELQLAPELAARP

SEQ ID NO: 915860 - protein, 271 aa, Homo sapiens; identical to SEQ ID NO: 915850

SEQ ID NO: 915861 - protein, 271 aa, Homo sapiens; identical to SEQ ID NO: 915850

SEQ ID NO: 915862 - protein, 271 aa, Homo sapiens; identical to SEQ ID NO: 915850

SEQ ID NO: 915863 - protein, 212 aa, Homo sapiens
EATIPNNSGWNWAAEEKYKDAIHFYNKSLAEHRTPDVLKKCQQAEKILKEQERLAYINPDLALEEKNKGNECFQKGDYPQAMKHYTEAIKRNPKDAKLYSNRAACYTKLLEFQLALKDCEECIQLEPTFIKGYTRKAAALEAMKDYTKAMDVYQKALDLDSSCKEAADGYQRCMMAQYNRHDSPEDVKRRAMADPEVPWNRCRRTPRHSANT

SEQ ID NO: 915864 - protein, 271 aa, Homo sapiens; identical to SEQ ID NO: 915850

SEQ ID NO: 915865 - protein, 271 aa, Homo sapiens; identical to SEQ ID NO: 915850

SEQ ID NO: 915866 - protein, 115 aa, Homo sapiens
MTYSSSILGLDISLFIFYYSVLLRFMGAVVRRKFYSALKSAYVVDADDTASNMLSTSVRKAYSVEGSEVMRIGGEVRLPSRNLKNRTAPSSDSNTAFDSNIFLHINQMGEDFSCK

SEQ ID NO: 915867 - protein, 143 aa, Homo sapiens
MNIPGHSFCVLVSTFTWSKLWGKEHHEDLLLSECHFLFLSFCGLILNPFDRINHISQSHFPANVCLRAGDSVERSFSNKAELLFQLHGHQRESLSKKEAQVWRDKGLYFRKGLLDQAQTLIRADNMSSLHYCKNFFVYGSVVN

SEQ ID NO: 915868 - protein, 116 aa, Homo sapiens
MRIRTEGLRPSCLGAKHLLWDVAAEEGKAEGADSTASWGVVKASCGGPSLAAKWRTAPSMPGFVTRSFSMLSCWHIAAQLEMYGCPHLDLTESEVQPQERSLHPLGFLCSANTSGI

SEQ ID NO: 915869 - protein, 278 aa, Homo sapiens
MPGGLGRTARKRAFCPKDAASLLILSPQNLAVSFQPPVVGIPALSLRRRGERGGGKHPRGGEGPCGRGLHTKPLLSVTPLAVSSQVAASWPDAFRKYFEVIVAVDVGDFLFPLTCEAAHVEGGTPGPPALSGLACVPSSSGHFQTVQLVAKVTGRCRSFQSWMRIRTEGLRPSCLGAKHLLWDVAAEEGKAEGADSTASWGVVKASCGGPSLAAKWRTAPSMPGFVTRSFSMLSCWHIAAQLEMYGCPHLDLTESEVQPQERSLHPLGFLCSANTSGI

SEQ ID NO: 915870 - protein, 288 aa, Homo sapiens
MPGGLGRTARKRAFCPKDAASLLILSPQNLAVSFQPPVVGIPALSLRRRGERGGGKHPRGGEGPCGRGLHTKPLLSVTPLAVSSQVAASWPDAFRKYFEVIVAVDVGDFLFPLTCEAAHVEGGTPGPPALSGLACVPSSSGHFQTVQLVAKVTGRCRSFQSWMRIRTEGLRPSCLGAKHLLWDVAAEEGKAEGADSTASWGVVKASCGGPSLAAKWRTAPSMPGFVTRSFSMLSCWHIAAQLEMYGCPHLDLTESEVQPQERSPAWPIVTVASQLFNVYFPARDMTVH

SEQ ID NO: 915871 - protein, 144 aa, Homo sapiens
MRIRTEGLRPSCLGAKHLLWDVAAEEGKAEGADSTASWGVVKASCGGPSLAAKWRTAPSMPGFVTRSFSMLSCWHIAAQLEMYGCPHLDLTESEVQPQERSTSVSIKFYRDSAILMYLCIACEYFHTTRAELTGCSRDCDGPQA

SEQ ID NO: 915872 - protein, 278 aa, Homo sapiens; identical to SEQ ID NO: 915869

SEQ ID NO: 915873 - protein, 136 aa, Homo sapiens
MRACPYLCPQMADSNSMRVTAPMIQSPPSGSFPRHVGIMGTTVQDEIWVGTQPNYITDLNIYLHQALMSSFTIKYAYQEDINLFIQQLLKAYYVSGTLQVNKENGKGTARQVAENPREYSVTGTKKSVIRSHWPHV

SEQ ID NO: 915874 - protein, 208 aa, Homo sapiens
MVDKAAQKLWFSVLLLKGLNFRWLPGYLIQRPGLAELAVPNFAVRVIVKVKDADTFEPTPPKVGLWLSPETPPEHTPASASLQFSPMKQQFQDMHLPLKTKKERKKSILRPLWPELVVCPETLGGPTPPVWTVGVADPETTGVTGAASPGQISLSGAITPRPCCYRCLPRSLPDCPSGPIGARFLSPAQDGTPRRLGLAQPPYRQQHF

SEQ ID NO: 915875 - protein, 135 aa, Homo sapiens
MNISSTGRITIWNLERLFKMDSNGQATLDQDVPGTVEVGWVGLWIPGEHDDPLSACKYPPEPPHKETKESLVLKTSFGASAKTVGCSAAPKSPEVWWRWWVEVTSRFHARAVDGKRHVFRAASGFLAASSNISIP

SEQ ID NO: 915876 - protein, 146 aa, Homo sapiens
RSSMVMTELWLVQARMWSLPLQETECRAVWPLSAAQGSVPFSSSYRTFSTSLALVALALSPSFSSELHLFARATTLRHTATSRVVVQWGLGPGGLLAREAHAAAPVQTRSQRRRRGPSSCLLIVMKCMLRHMPWELSGSYTSLLWQ

SEQ ID NO: 915877 - protein, 146 aa, Homo sapiens; identical to SEQ ID NO: 915876

SEQ ID NO: 915878 - protein, 195 aa, Homo sapiens
MPPIDAFLCLPFSFALVSGKLYQWKEPVISSVHSKVKRTAEVKEEIVEKEMKKLVHSVFNMADYTFPLQAEAELRPGRTVTMAMTRALRAVAATQRDLGGDRGRACDGSGLSASAGLGKMLRPALPWLYLGLCSLLVGEAEAPSPVDPLERSRPYAVLRGQNLESLSPRLECNGAISARCNLRVWGSSDSPASAP

SEQ ID NO: 915879 - protein, 195 aa, Homo sapiens; identical to SEQ ID NO: 915878

SEQ ID NO: 915880 - protein, 195 aa, Homo sapiens; identical to SEQ ID NO: 915878

SEQ ID NO: 915881 - protein, 180 aa, Homo sapiens
MKGRLTEVRMWGFTKGAPHLARGRSHRRGREKLENLTGAMKKTNCDSGDISAFIFDVNGDTGRFQHFHGELLWKGTYEESTDCVCTCDFIRHPELLGFISILEIENPCTQRKQLLVTGQDSGDTQHKLSHFFPAALRNVQDKLGKHVTRDLGLEFPRNALFGYCNSASEESNPATREVTC

SEQ ID NO: 915882 - protein, 148 aa, Homo sapiens
MMSFDSRSHIQVMLMQEVGSHGLGQLRPCGLEVPNFSIFSYLLLSPSNCSNLCLLPNSKVASTFSEKNLRIVTRYAFQAVGRSQANRKRNEGKAPVRNCQYFIMTLLQRKCAEKCEIQGEESIKMSVSALAKFTVAAYSTSEEYLTSL

SEQ ID NO: 915883 - protein, 185 aa, Homo sapiens
MAPTPASPTERPMHCEIPQCYNRRPFHFHHLHGGPRSPDASGPQRCKNEVHMSSRAFETGHVGTESKVPRGSHTKVTGSSACFLTEEPRATQSRLSGALLFEILANPVLAWWPHDPDKRCSLNFQPQCPTGEQRFLDVTATHLHLHMYPGATFLTLAKSNKPLSPSTFVLVFGISYTSALSTHAS

SEQ ID NO: 915884 - protein, 185 aa, Homo sapiens; identical to SEQ ID NO: 915883

SEQ ID NO: 915885 - protein, 185 aa, Homo sapiens; identical to SEQ ID NO: 915883

SEQ ID NO: 915886 - protein, 316 aa, Homo sapiens
QGSPEERRPRTRGRMMRGVKGGEELGVTEAKRQKCKERQPVPPETRIRLQFEGQFDIELSVGGRVTGQSGVVESIGHLTLPYRDNLFCEWHLQGLSRHYLTNSFEDFNLQNSSGCEKDFVEIWDYHTSGNILGRYCANTIPDSIDTSSNTAVGSAGTSTSPNYPNLNPHGRIYEWRITAPEGRQITLTFSNLRLATHLSCNSEHVIGRVPIEGSRSGLGISPPRKYAVRWIVCLKVKLFFQQMDLGRMEDSLLLIPPVKMQIKWDVVNVLHFNQEEAAMVNLKLVMPLDELLAQFQSCYHEDWCDLFHIPWSIIWC

SEQ ID NO: 915887 - protein, 224 aa, Homo sapiens [sequence omitted]

SEQ ID NO: 915888 - protein, 150 aa, Homo sapiens [sequence omitted]

SEQ ID NO: 915889 - protein, 280 aa, Homo sapiens [sequence omitted]

SEQ ID NO: 915890 - protein, 280 aa, Homo sapiens [sequence omitted]

SEQ ID NO: 915891 - protein, 208 aa, Homo sapiens
MAKVKHRADVGPIVECEIVLDTVSWIVNADEVKVDSEKPSSRSYQCPLAEVSDPFYGVMKDSEEEEFLLSMAGKQGFASQHLSGKWQMLTLINNGPFKLDNDIHVPSHMLNAGDVAERAQRELTRGSGRPQRFRPTRGMALPAPGARGASLSVCPGVGVGGEWVENGQTAKSLLCPNESSGVVVEKGQTTLPATREHFFKATLVFRGC

SEQ ID NO: 915892 - protein, 1840 aa, Homo sapiens
HLSFRRILLWAGMGKCGLCVNMVMDPKGGSWGCQSQSSPRQVLQKEPFEIDGSSVQLAYSQDAYLKGNEAYSGNARNIPEPPPICYPWLPSAPSAMAQPVEISPPDSSLSKQQTSTPVLTQPGRAYRMEIQVPPSPTDVAKSNTAVCVCNESVRTVIVPSEKVVDLLSNRNNHTGPSHRTEEVRYGVSEQTSLKTVSRTTSPPLSIPTTHLIHQPAGSRSLEPSGILLKSGNYSGHSDGISSSRSQAVEAPSVSVNHYSPNSHQHIDWKNYKTYKEYIDNRRLHIGCRTIQERLDSLRAASQSTTDYNQVVPNRTTLQGRRRSTSHDRVPQSVQIRQRSVSQERLEDSVLMKYCPRSASQGALTSPSVSFSNHRTRSWDYIEGQDETLENVNSGTPIPDSNGEKKQTYKWSGFTEQDDRRGICERPRQQEIHKSFRGSNFTVAPSVVNSDNRRMSGRGVGSVSQFKKIPPDLKTLQSNRNFQTTCGMSLPRGISQDRSPLVKVRSNSLKAPSTHVTKPSFSQKSFVSIKDQRPVNHLHQNSLLNQQTWVRTDSAPDQQVETGKSPSLSGASAKPAPQSSENAGTSDLELPVSQRNQDLSLQEAETEQSDTLDNKEAVILREKPPSGRQTPQPLRHQSYILAVNDQETGSDTTCWLPNDARREVHIKRMEERKASSTSPPGDSLASIPFIDEPTSPSIDHDIAHIPASAVISASTSQVPSIATVPPCLTTSAPLIRRQLSHDHESVGPPSLDAQPNSKTERSKSYDEGLDDYREDAKLSFKHVSSLKGIKIADSQKSSEDSGSRKDSSSEVFSDAAKEGWLHFRPLVTDKGKRVGGSIRPWKQMYVVLRGHSLYLYKDKREQTTPSEEEQPISVNACLIDISYSETKRKNVFRLTTSDCECLFQAEDRDDMLAWIKTIQESSNLNEEDTGVTNRDLISRRIKEYNNLMSKAEQLPKTPRQSLSIRQTLLGAKSEPKTQSPHSPKEESERKLLSKDDTSPPKDKGTWRKGIPSIMRKTFEKKPTATGTFGVRLDDCPPAHTNRYIPLIVDICCKLVEERGLEYTGIYRVPGNNAAISSMQEELNKGMADIDIQDDKWRDLNVISSLLKSFFRKLPEPLFTNDKYADFIEANRKEDPLDRLKTLKRLIHDLPEHHYETLKFLSAHLKTVAENSEKNKMEPRNLAIVFGPTLVRTSEDNMTHMVTHMPDQYKIVETLIQHHDWFFTEEGAEEPLTTVQEESTVDSQPVPNIDHLLTNIGRTGVSPGDVSDSATSDSTKSKGSWGSGKDQYSRELLVSSIFAAASRKRKKPKEKAQPSSSEDELDNVFFKKENVEQCHNDTKEESKKESETLGRKQKIIIAKENSTRKDPSTTKDEKISLGKESTPSEEPSPPHNSKHNKSPTLSCRFAILKESPRSLLAQKSSHLEETGSDSGTLLSTSSQASLARFSMKKSTSPETKHSEFLANVSTITSDYSTTSSATYLTSLDSSRLSPEVQSVAESKGDEADDERSELISEGRPVETDSESEFPVFPTALTSERLFRGKLQEVTKSSRRNSEGSELSCTEGSLTSSLDSRRQLFSSHKLIECDTLSRKKSARFKSDSGSLGDAKNEKEAPSLTKVFDVMKKGKSTGSLLTPTRGESEKQEPTWKTKIADRLKLRPRAPADDMFGVGNHKVNAETAKRKSIRRRHTLGGHRDATEISVLNFWKVHEQSGERESELSAVNRLKPKCSAQDLSISDWLARERLRTSTSDLSRGEIGDPQTENPSTREIATTDTPLSLHCNTGSSSSTLASTNRPLLSIPPQSPDQINGESFQNVSKNASSAANAQPHKLSETPGSKAEFHPCL

SEQ ID NO: 915893 - protein, 1766 aa, Homo sapiens
MCNIPEPPPICYPWLPSAPSAMAQPVEISPPDSSLSKQQTSTPVLTQPGRAYRMEIQVPPSPTDVAKSNTAVCVCNESVRTVIVPSEKVVDLLSNRNNHTGPSHRTEEVRYGVSEQTSLKTVSRTTSPPLSIPTTHLIHQPAGSRSLEPSGILLKSGNYSGHSDGISSSRSQAVEAPSVSVNHYSPNSHQHIDWKNYKTYKEYIDNRRLHIGCRTIQERLDSLRAASQSTTDYNQVVPNRTTLQGRRRSTSHDRVPQSVQIRQRSVSQERLEDSVLMKYCPRSASQGALTSPSVSFSNHRTRSWDYIEGQDETLENVNSGTPIPDSNGEKKQTYKWSGFTEQDDRRGICERPRQQEIHKSFRGSNFTVAPSVVNSDNRRMSGRGVGSVSQFKKIPPDLKTLQSNRNFQTTCGMSLPRGISQDRSPLVKVRSNSLKAPSTHVTKPSFSQKSFVSIKDQRPVNHLHQNSLLNQQTWVRTDSAPDQQVETGKSPSLSGASAKPAPQSSENAGTSDLELPVSQRNQDLSLQEAETEQSDTLDNKEAVILREKPPSGRQTPQPLRHQSYILAVNDQETGSDTTCWLPNDARREVHIKRMEERKASSTSPPGDSLASIPFIDEPTSPSIDHDIAHIPASAVISASTSQVPSIATVPPCLTTSAPLIRRQLSHDHESVGPPSLDAQPNSKTERSKSYDEGLDDYREDAKLSFKHVSSLKGIKIADSQKSSEDSGSRKDSSSEVFSDAAKEGWLHFRPLVTDKGKRVGGSIRPWKQMYVVLRGHSLYLYKDKREQTTPSEEEQPISVNACLIDISYSETKRKNVFRLTTSDCECLFQAEDRDDMLAWIKTIQESSNLNEEDTGVTNRDLISRRIKEYNNLMSKAEQLPKTPRQSLSIRQTLLGAKSEPKTQSPHSPKEESERKLLSKDDTSPPKDKGTWRKGIPSIMRKTFEKKPTATGTFGVRLDDCPPAHTNRYIPLIVDICCKLVEERGLEYTGIYRVPGNNAAISSMQEELNKGMADIDIQDDKWRDLNVISSLLKSFFRKLPEPLFTNDKYADFIEANRKEDPLDRLKTLKRLIHDLPEHHYETLKFLSAHLKTVAENSEKNKMEPRNLAIVFGPTLVRTSEDNMTHMVTHMPDQYKIVETLIQHHDWFFTEEGAEEPLTTVQEESTVDSQPVPNIDHLLTNIGRTGVSPGDVSDSATSDSTKSKGSWGSGKDQYSRELLVSSIFAAASRKRKKPKEKAQPSSSEDELDNVFFKKENVEQCHNDTKEESKKESETLGRKQKIIIAKENSTRKDPSTTKDEKISLGKESTPSEEPSPPHNSKHNKSPTLSCRFAILKESPRSLLAQKSSHLEETGSDSGTLLSTSSQASLARFSMKKSTSPETKHSEFLANVSTITSDYSTTSSATYLTSLDSSRLSPEVQSVAESKGDEADDERSELISEGRPVETDSESEFPVFPTALTSERLFRGKLQEVTKSSRRNSEGSELSCTEGSLTSSLDSRRQLFSSHKLIECDTLSRKKSARFKSDSGSLGDAKNEKEAPSLTKVFDVMKKGKSTGSLLTPTRGESEKQEPTWKTKIADRLKLRPRAPADDMFGVGNHKVNAETAKRKSIRRRHTLGGHRDATEISVLNFWKVHEQSGERESELSAVNRLKPKCSAQDLSISDWLARERLRTSTSDLSRGEIGDPQTENPSTREIATTDTPLSLHCNTGSSSSTLASTNRPLLSIPPQSPDQINGESFQNVSKNASSAANAQPHKLSETPGSKAEFHPCL

SEQ ID NO: 915894 - protein, 131 aa, Homo sapiens
IIFNFGPMHIFSFFFFSLSSVYLEVSALNFIFLMTTAANYLFLSFIIHIHYELPAQIFLLIYTQDKTKKCTFKTTYNYKFIYSEHVITSVLYRQNPRKLQFSGINTEGKILEEINRRTNQKVVKETKRELH

SEQ ID NO: 915895 - protein, 428 aa, Homo sapiens
MRGPFPRVAGLGAVGSPLGSKSTPSPPEGGAAALALWRVGDSAPGWQPALAAFAALAIWPTSCVIFIHRILHYQTRGGLQVGAWTGAVDIRGRVPKSEPPRECAHGRPCEYNEHVRAFSDRPIFIVHQRTHIRKSHHEFNECERRSVHFAVSQSILYIRKQIQKKNSMNVVNVGKPSAINPLLSYSRGYTEERNPMNALNVGKLLDIGHALQYIKEHTRDKTYECNECGKNFCEKSNLHVHQRTHTGEKPYGCNECQKAFGDRSALKVHQRIHTGEKPYECKECGKTFSQKPNFINHQEHQRIHTGEKPYECNECEKMFYHKSSLTVHQRTHTGEKPYACSECGKTFYQKSSLTTHQRTHTREQPYEYNESFYQNPNFTKCQRDNIEETLVNILKAQKPSPSWTRSIAETTQVGHYLYSSHFSKISRK

SEQ ID NO: 915896 - protein, 151 aa, Homo sapiens
MPVPCKEFHLSFTELKRLNQTQHFQLPSKQQKIYLTVAMETRTGRHGKAARSANFKSQTATMEIRTLLHIGGRNLHVYTCIRCHIERMTGVVVNCLHQLDWATGCPDTWFNTVSGYAPRMFLDGISIGIGGLSKADGPAKCMWASSNPLRA

SEQ ID NO: 915897 - protein, 189 aa, Homo sapiens
YALLTVGYNPHNTMRKPSVIYLACTGDSGTQTSPFLLVPFRCPRAQLSRCLAFRGYCSSLRVPDSSNSCCPRLPRQLPPALPLPACQSPLAEERGTVTAEPAQMQASAGLPFWSSTLILGSMDVRGWIILCYGSGGCPVHYELSSLLSLSLLPPCEEGACFPFAFRHECKFPEVSQSYCWLSLQNGVLV

SEQ ID NO: 915898 - protein, 189 aa, Homo sapiens; identical to SEQ ID NO: 915897

SEQ ID NO: 915899 - protein, 189 aa, Homo sapiens; identical to SEQ ID NO: 915897

SEQ ID NO: 915900 - protein, 159 aa, Homo sapiens
WEAPKGLEWDGGVMQAAHQVPSGQSGRAPRFLSLHGGLCKDLLLPRLLLLVSWAAVTNYNELSDLKEQPSFFSQVLESRTLKLRCQQSCTSSRASRVEPMPCLWWLRVFLDLWLYTPMSAPTITWPSNCVCVDMTGLRNTYKTGKTVLLDVSVRVFQGD

SEQ ID NO: 915901 - protein, 150 aa, Homo sapiens
MDPCSVGVQLRTTNECHKTYYTRHTGFKTLQELSSNDMLLLQLRTGMTLSGNNTICFHHVKIYIDRFEDLQKSCCDPFNIHKKLAKKNLHVIDLDDATFLSAKFGRQLVPGWKLCPKCTQIINGSVDVDTEDRQKRKPESDVCVIVIFFY

SEQ ID NO: 915902 - protein, 259 aa, Homo sapiens
MDPCSVGVQLRTTNECHKTYYTRHTGFKTLQELSSNDMLLLQLRTGMTLSGNNTICFHHVKIYIDRFEDLQKSCCDPFNIHKKLAKKNLHVIDLDDATFLSAKFGRQLVPGWKLCPKCTQIINGSVDVDTEDRQKRKPESDGRTAKALRSLQFTNPGRQTEFAPETGKREKRRLTKNATAGSDRQVIPAKSKVYDSQGLLIFSGMDLCDCLDEDCLGCFYACPACGSTKCGAECRCDRKWLYEQIEIEGGEIIHNKHAG

SEQ ID NO: 915903 - protein, 259 aa, Homo sapiens; identical to SEQ ID NO: 915902

SEQ ID NO: 915904 - protein, 259 aa, Homo sapiens; identical to SEQ ID NO: 915902

SEQ ID NO: 915905 - protein, 259 aa, Homo sapiens; identical to SEQ ID NO: 915902

SEQ ID NO: 915906 - protein, 259 aa, Homo sapiens; identical to SEQ ID NO: 915902

SEQ ID NO: 915907 - protein, 259 aa, Homo sapiens; identical to SEQ ID NO: 915902

SEQ ID NO: 915908 - protein, 88 aa, Homo sapiens
RAVGKNVTAGLDRQVIPAKSKVYDSQGLLIFSGMDLCDCLDEDCLGCFYACPACGSTKCGAECRCDRKWLYEQIEIEGGEIIHNKHAG

SEQ ID NO: 915909 - protein, 164 aa, Homo sapiens
VGQIVSLISPNARTWMFQLKLLYLLAPFLPPSVLAFCDGWYSENLSKFLGWAFCVALSSLVLCSSWTPTALIAQLSLLNSVNPPASSRFPLPVLCPGNALKEGVGIVLVRMEEDLKEALTMGLEKSSVHTTEYVIHSPSPSKKNGSTAKRMGMDPHQAKDIFLK

SEQ ID NO: 915910 - protein, 198 aa, Homo sapiens
SADITNHTWLSRLLMVLSLLSRYTWSCRVVYIETLHPYCNLLHVRLWRPQASDMSATGFVFLWMRRGILVFGIFRLSALVSPHLCGFIYLWSLMLVTYTWSFGVDVLFVDVDGIPFCLLVFPLTFRPLSCRSVGVCWSSTPDVVCLGITSRGCRTANIAAQSFLWKLCPRGAPTCMRCLSAPTGRCLPVRLHGSQGPT

SEQ ID NO: 915911 - protein, 375 aa, Homo sapiens
GLPSKKVPMDYLTYSTPSTVISPEEFRSLRLSFSPNLDDYNPDIPEWRRDIGRVIKKSLVEKGELCTKTNKLTQQEEARAHGKFWPDVCKAEPHTCRDLKGPKGDATMEPRTNMGSLPLATGVPGQHILVAVLPGLPTTAELFVLPYQDPAGENKRSTDDLEQISELLIHTLNQNSVHFELKPGVRVLVHAAHLTAELAVSTGAQSLRARFSYAKDKRVNGNSNCDKESLTCPVLCSFFSALFPPQAPLVDLTPTHSGSAMLMLLSVVFVGLAVFVIYKFKRKIPGINVYAQMQNEKEQEMISPVSHSESRPNVPQTELRRPGQLIDEKVESQLIDCPLPEVVKWTFSYFNGSLSACEVGMGIQQRGIENLTFTC

SEQ ID NO: 915912 - protein, 67 aa, Homo sapiens
LSAASSPLLAPLGPCRDAVVLPLAGFSFGLAICPNTTLQLPQGLYWLVNRFPLYYKSQCFFFGSTYL

SEQ ID NO: 915913 - protein, 133 aa, Homo sapiens
MPLLLLFIAALDKARPCGVLRAFLPLSLPALHGHSQMRKLKIRELTHFPQGYTVSKRHYQDSNDLLLKFISYSLIASLKAEEWGGGETSRATELNLPPWPSQPRALPAVVGGVWASTIPSLSLSGGSWINRST

SEQ ID NO: 915914 - protein, 133 aa, Homo sapiens; identical to SEQ ID NO: 915913

SEQ ID NO: 915915 - protein, 147 aa, Homo sapiens
MENQTWMAGMFLNLQPMLHQSLPPCVTKTEKRFASTCFYSSTVVINISISFQGSCYRLSNSPATQDGITLQLGCHSRIVRFLGDHSLVVDPSLGTLELNRHPLITAGELSVNSAARTKVEALKQLVLLSSLQPTLVAGKVFLIIQTT

SEQ ID NO: 915916 - protein, 165 aa, Homo sapiens
MTMCSNMGETIRIVGCMDLLLLWPNRGISVFLPKGFKVSKSAIRMQLEAFILTDMETENQILHVLTYKQELNIGDRQQLASADLLPRELGKGPSPTVRGQGFGSENSKNENNKTKGKVLVSSFSLQNPHLPKNQDMKILLRSLEEAMWQVVHIYKIVSSQYCSYW

SEQ ID NO: 915917 - protein, 553 aa, Homo sapiens
IASTLARMVIRYQMKSAVEEGTASGSDGNFSEDVLSKFDEWTFIPDSSMDSVFAQSDDLDSEGSEGSFLVKKKSNSISVGEFYRDAVLQRCSPNLQRHSNSLGPIFDHEDLLKRKRKILSSDDSLTNELRDIDALSQKCCISVHLEHLEKLELHQNALTSFPQQLCETLKSLTHLDLHSNKFTSFPSYLLKMSCIANLDVSRNDIGPSVVLDPTVKCPTLKQFNLSYNQLSFVPENLTDVVEKLEQLILEGNKISGICSPLRLKELKILNLSKNHISSLSENFLEACPKVESFSARMNFLAAMPFLPPSMTILKLSQNKFSCIPEAILNLPHLRSLDMSSNDIQYLPGPAHWKSLNLRELLFSHNQISILDLSEKAYLWSRVEKLHLSHNKLKEIPPEIGCLENLTSLDVSYNLELRSFPNEMGKLSKIWDLPLDELHLNFDFKHIGCKAKDIIRFLQQRLKKAVPYNRMKLMIVGNTGSGKTTLLQQLMKTKKSDLGMQSATVGIDVKDWPIQIRDKRKRDLVLNVWDFAGISFYRILKFTFTICLEQGFKN

SEQ ID NO: 915918 - protein, 139 aa, Homo sapiens
MLPVLKHRTPNSSALGRTGFLAPQLADSRLWDLPLIYAYSHILGTCTFLRGGEIGRHTCKFPPQFGNRYCNPRKSCHKKSLANSLTAISWETSRQSDPEYHSLEAMKSMIKKPARLLSGSKMAYLFAASSREEEHCVLT

SEQ ID NO: 915919 - protein, 135 aa, Homo sapiens
MELLSTKMQKTLGGEICGGGRIGGQLGHTECDMSVKHPVKDAECGSQRDIAHVMVKITTLRWRDDPRLSGGPNLVTEVLRSRVSFPWWSEAEVTTGEWPERCKVAGFEDGGRGPLAKECGWLLEGGNGKETNSPL

SEQ ID NO: 915920 - protein, 347 aa, Homo sapiens
LQPRRVSVMAASCPLPVTPDLPTLRAKLQGLLQFLRDALSISNAHTVDFYTESVWEELVDLPPETVLAALRKSASETEALPSETRPLVEAEWEAGMTDFPKIFCETSQKLVSVEAFALAAKYYSVQNLGICTPFEQLLVALRGNQNQRIGENQKAVEFMNMKKSHEVQAMSELISSIADYYGIKQVIDLGSGKGYLSSFLSLKYGLKVYGIDSSNTNTHGAEERNRKLKKHWKLCHAQSRLDVNGLALKMAKERKVQNKVKNKADTEEVKAKNKQEETGLSDMMKWAGTYATKGFKAGEFNVNKGWCDDFRKTFGLKQIVKIIGEAADADQEAADKFPDAIKKTVEM

SEQ ID NO: 915921 - protein, 252 aa, Homo sapiens
MTDFPKIFCETSQKLVSVEAFALAAKYYSVQNLGICTPFEQLLVALRGNQNQRIGENQKAVEFMNMKKSHEVQAMSELISSIADYYGIKQVIDLGSGKGYLSSFLSLKYGLKVYGIDSSNTNTHGAEERNRKLKKHWKLCHAQSRLDVNGLALKMAKERKVQNKVKNKADTEEVKAKNKQEETGLSDMMKWAGTYATKGFKAGEFNVNKGWCDDFRKTFGLKQIVKIIGEAADADQEAADKFPDAIKKTVEM

SEQ ID NO: 915922 - protein, 144 aa, Homo sapiens
MSLCTGIIEYSSWHRVGSAITVFYGSLLWAKPVRDVAVPAWQTIGLCLPHRARHTAGAQEDTLLVYESLLTSNLLSTKGEIVISQWRGQADTTLTKGEDFTEEGIVGIGFYGCTGTCQIDKRKKGIPGRQASRTQKELKHLGKL

SEQ ID NO: 915923 - protein, 166 aa, Homo sapiens
MITLSSAFSAKQKTHAHKNTHACMCATDMANPKLVLHFEVIVALLSLLQTILSLLLGQRTWLAHLYVLSTENDALHTVGTQKHLLPHDWCFGKHCVSCRHHIFHRFCSIFSSTLKRSQGFEGYPNLNSLLQKGSALSLCSNGFEDHNDYSVLIHGCTLWHACELFS

SEQ ID NO: 915924 - protein, 166 aa, Homo sapiens; identical to SEQ ID NO: 915923

SEQ ID NO: 915925 - protein, 146 aa, Homo sapiens
LALLCMSFILLWTRHKHVLMLKINNELSLNVDFISIPFCYSEPSLFQIAIFFSLITSALLLLCLVGKEKKVSIISLLDCGMKQMGHFANIQSYLEISETYILNPSVLILTIVTIVINTFIFYLSHWTVGSLKTVEYCLSPYCQCPA

SEQ ID NO: 915926 - protein, 153 aa, Homo sapiens
MALCSLTLATVGVFAAETGKCCKVVTWWFHRVRSIPEYSVVDTKEAKRANSPSKADDLLWKIVKHMLWKFSLIFIPYAGSQDGATGRFFSSHEHILSLNPRAMICIIKDIGQASLRFFVLWDVLEAAVTLPRSVLWFLIIPLGSFGFQVIPLT

SEQ ID NO: 915927 - protein, 524 aa, Homo sapiens
MEFPEHSQQLLQSLREQRSQGFLCDCTVMVGSTQFLAHRAVLASCSPFFQLFYKERELDKRDLVCIHNEIVTAPAFGLLLDFMYAGQLTLRGDTPVEDVLAAASYLHMNDIVKVCKRRLQARALAEADSTKKEEETNSQLPSLEFLSSTSRGTQPSLASAETSGHWGKGEWKGSAAPSPTVRPPDEPPMSSGADTTQPGMEVDAPHLRAPHPPVADVSLASPSSSTETIPTNYFSSGISAVSLEPLPSLDVGPESLRVVEPKDPGGPLQGFYPPASAPTSAPAPVSAPVPSQAPAPAEAELVQVKVEAIVISDEETDVSDEQPQGPERAFPSGGAVYGAQPSQPEAFEDPGAAGLEEVGPSDHFLPTDPHLPYHLLPGAGQYHRGLVTSPLPAPASLHEPLYLSSEYEAAPGSFGVFTEDVPTCKTCGKTFSCSYTLRRHATVHTRERPYECRYCLRSYTQSGDLYRHIRKAHNEDLAKRSKPDPEVGPLLGVQPLPGSPTADRQSSSGGGPPKDFVLAPKTNI

SEQ ID NO: 915928 - protein, 232 aa, Homo sapiens
LPSYCQKVQRLTDRCHPCPACLWLFLCPVHRSLPCPYLALTKSASVVSQPPASLFPPPPSFLSPGLPASEVGTQRVQDAWSALWVLDGAPTSAKMTWRQAVLLSCFSAVVLLSMLREGTSVSVGTMQMAGEEASEDAKQKIFMQESDASNFLKRRGKRSPKSRDEVNVENRQKLRVDELRREYYEEQRNEFENFVEEQNDEQEERSREAVEQWRQWHYDGLHPSYLYNRHHT

SEQ ID NO: 915929 - protein, 162 aa, Homo sapiens
VSLRWWLKCGESLVKKLLAKGGGRMLGIKGCHYIPGSWSPYHSCPKGQEEPFGGDATPGLKDERRRWGILSDIYQQQTIQTSLVKYGPCQLGCQHQSGDGGGQTAAGHRGAQSCRPRVKALSDGPGFCSDTNVFGLFLSELKEPHMSDGFTRGRYKGQGRRA

SEQ ID NO: 915930 - protein, 162 aa, Homo sapiens; identical to SEQ ID NO: 915929

SEQ ID NO: 915931 - protein, 179 aa, Homo sapiens
MGIDSLGAQISAVQVQMSTLVKVTPTLIPSVGQGRDIWLVFGMLYPAYYSYKAVKTKNVKEYVRWMMYWIVFALYTVIETVADQTVAWFPLYYELKIAFVIWLLSPYTKGASLIYRKFLHPLLSSKEREIDDYIVQAKERGYETMVNFGRQGLNLAATAAVTAAVKDFWLTSAPLLQSI

SEQ ID NO: 915932 - protein, 189 aa, Homo sapiens
MSVQNAGPLWKGQAQRQGQVGKKEKQIEQSPTILPLLVGKQAQGRLLPRELFSSEGHCPRRLVSRASGILICHRSPEICAADCGGHGVCVGGTCRCEDGWMGAACDQRACHPRCAEHGTCRDGKCECSPGWNGEHCTIAPPRLHAEHSRSMRNICTMPKKQALPKRKDAYCHHLHPEVLKRKMQELMKS

SEQ ID NO: 915933 - protein, 151 aa, Homo sapiens
MITMTLEYLNNCITCTFSTLPPSTANYFIIYRVSVWLTLSHCKLCRSALSIFSDDLSAIGKFYAWKYITSHPLRRFLKCKNLHPEILIQWFGAKNLQNKMPRALDLTHFIINLSFLLVFSKEEADAEIVEKLAQVHIANKRQLVVFKPTGV

SEQ ID NO: 915934 - protein, 151 aa, Homo sapiens; identical to SEQ ID NO: 915933

SEQ ID NO: 915935 - protein, 463 aa, Homo sapiens
MPHKTCEESDGKLIEDSLIQLRCHFTWKLLIEAPEIPDLENRIWEEIQFLDTKYNVGIHNLLAYVKHLKGQNEEALVSLKKAEDLIQKEHANQADIRSLVTWGNFAWVYYHMGRLAEAQTYLDKVENTCKKFANPSRYRMECPEVDCEEGWALAKCGGKNYERAKTCFEKALEGNPENPEFNTGYAITVYRLDKFNTASGRNKAFSLHVLKRAVRLNPDDVYIRVLLALKLQDEGQEAEGEKYIEEALTSISSQAYVFQYAAKFYRRKGSVDKALELLKMALETTPTSAFLHHQMGLCYRAQMIQIKEATNWQPRGQDRETVDRLVQLAICKFEKTIMLKRTFEMAYVDLAETYAEIGHHRKAEEHFQKGLRMKIFEDQLKQEIHYHYGRFQEHHGKSQDKAITHYLKGLKIEKMSHSREKLLNALEKLAKRCIHQNVRVVESVSLLGLIHKLKGESLGVCIS

SEQ ID NO: 915936 - protein, 153 aa, Homo sapiens
ISSCLVKMPSSVPKSISWMTARQFCFCLKGLIYLPPMFMPSFPLACICLGFHGSDRKAPTELSESPEKGWQFPRDPAMYRVAVGSRKRQLLQDSQAPAGFLIHLPKKQGGVKGVEEMKCQGFTVRALTPGFNSQLQVRHCSGAPRIPQIFQER

SEQ ID NO: 915937 - protein, 269 aa, Homo sapiens
SRNQEVTVCPASHLTLDRDIKSPGSGGSTPAPPSHLLLYLLHPQSTRTMGCCGCSGGCGSGCGGLGSGCGGCGSGCGGRGSGCGGCGSGCGGCGSGCGGCGSGCGGCGGCGSGCCVPVCCCKPMCCCVPACSCSSCGKGGCGSCGGSKRGCVSCGVSKGACGSCGGSKGGCGSCGGSKGGCGSCGGSKGGCGSYGCSQCSCCKPCCCSSGCGSSCCQSSCCKPYCCQSSCCKPCSCFSGCGSSCCQSSCYKPCCCQSSCCVPVCCQCKI

SEQ ID NO: 915938 - protein, 154 aa, Homo sapiens
LGPPGRRGRGAGRPMPSHKCSWWRSWPGFRWGCITLPSGPLAYARTAGEETSQLPKKGGLVWVPSSLASTHRWPSIQKSLCCPLLPLEIFPCPWLAALASQGPPTCGLTDMQSPPGSSQREQMTYQSAGDAVSNTIARKLLSWKWCSHEDGKNT

SEQ ID NO: 915939 - protein, 154 aa, Homo sapiens; identical to SEQ ID NO: 915938

SEQ ID NO: 915940 - protein, 280 aa, Homo sapiens
  misc_feature (4)..(4): Xaa can be any naturally occurring amino acid
  misc_feature (6)..(6): Xaa can be any naturally occurring amino acid
PNCXLXRDNQPTPLSSLGVVLSRGHGEYILLGNTSVEEGLHDLLHPDLALAGDWIYCITDIDPDHRKLSQLEAMIRFLTRKDPDLECDEELVREVLFDAVVTAPMEAYWTALALNMSEESEHVVDMAFLGTRAGLLRSSLFVGSEKVSDRKFLTPEDEASVFTLDRFPLWYRQASEHPAGSFVFNLRWAEGPESAGEPMVVTASTAVAVTVDKRTAIAAAAGVQMKLEFLQRKFWAATRQCSTVDGPCTQSCEDSDLDCFVIDNNGFILISKRSRESDYV

SEQ ID NO: 915941 - protein, 441 aa, Homo sapiens
MKLEFLQRKFWAATRQCSTVDGPCTQSCEDSDLDCFVIDNNGFILISKRSRETGRFLGEVDGAVLTQLLSMGVFSQVTMYDYQAMCKPSSHHHSAAQPLVSPISAFLTATRWLLQELVLCVGVDTGLVEGCMRGWLRRVSLSRRLQGLQDNPLATRPRGRRAQSLGMDATSSLHAAPGRDLIAQPEPSSREEGVLEERGWAGGCQGYSSSLGTQVGRAQRSPRFSPVSDRFLLEWSVWGSWYDRGAEGECTELQGHVLKSSGILVTLKHRCSHLTLRGLLSSHPSLLALCVTSSWDTATPCAIITTTMTSCPHVPPCFPVPCPPCAGLMFRPAKSVFHHSHKHKKQDPLQPCDTEYPVFVYQPAIREANGIVECGPCQKRMPRTAAAPRTPQPRRPYSCCLCVPGGYCPNSCGDTTQPDLCFGKVILPEPSHKVSTDMGCS

SEQ ID NO: 915942 - protein, 508 aa, Homo sapiens
MKLEFLQRKFWAATRQCSTVDGPCTQSCEDSDLDCFVIDNNGFILISKRSRETGRFLGEVDGAVLTQLLSMGVFSQVTMYDYQAMCKPSSHHHSAAQPLVSPISAFLTATRWLLQELVLCVGVDTGLVEGCMRGWLRRVSLSRRLQGLQDNPLATRPRGRRAQSLGMDATSSLHAAPGRDLIAQPEPSSREEGVLEERGWAGGCQGYSSSLGTQVGRAQRSPRFSPVSDRFLLEWSVWGSWYDRGAEGECTELQGHVLKSSGILVTLKHRCSHLTLRGLLSSHPSLLALCVTSSWDTATPCAIITTTMTSCPHVPPCFPVPCPPCAGLMFRPAKSVFHHSHKHKKQDPLQPCDTEYPVFVYQPAIREANGIVECGPCQKVFVVQQIPNSNLLLLVTDPTCDCSIFPPVLQEATEVKYNASVKCDRMRSQKLRRRPDSCHAFHPEVRVEADRGWAGFSSPNPLCLGLCPSALRSQENAQDCGGASDTSASPPLLLLPVCAWGLLPQLLR

SEQ ID NO: 915943 - protein, 204 aa, Homo sapiens [sequence omitted]

SEQ ID NO: 915944 - protein, 267 aa, Homo sapiens
MKLEFLQRKFWAATRQDLDCFVIDNNGFILISKRSRETGRFLGEVDGAVLTQLLSMGVFSQVTMYDYQAMCKPSSHHHSAAQPLVSPISAFLTATRWLLQELVLFLLEWSVWGSWYDRGAEAKSVFHHSHKHKKQDPLQPCDTEYPVFVYQPAIREANGIVECGPCQKVFVVQQIPNSNLLLLVTDPTCDCSIFPPVLQEATEVKYNASVKCDRMRSQKLRRRPDSCHAFHPEENAQDCGGASDTSASPPLLLLPVCAWGLLPQLLR

SEQ ID NO: 915945 - protein, 288 aa, Homo sapiens
  misc_feature (4)..(4): Xaa can be any naturally occurring amino acid
  misc_feature (6)..(6): Xaa can be any naturally occurring amino acid
PNCXLXRDNQPTPLSSLGVVLSRGHGEYILLGNTSVEEGLHDLLHPDLALAGDWIYCITDIDPDHRKLSQLEAMIRFLTRKDPDLECDEELVREVLFDAVVTAPMEAYWTALALNMSEESEHVVDMAFLGTRAGLLRSSLFVGSEKVSDRKFLTPEDEASVFTLDRFPLWYRQASEHPAGSFVFNLRWAEGPESAGEPMVVTASTAVAVTVDKRTAIAAAAGVQMKLEFLQRKFWAATRQCSTVDGPCTQSCEDSDLDCFVIDNNGFILISKRSREPGIKLRKKPIQT

SEQ ID NO: 915946 - protein, 478 aa, Homo sapiens
MKLEFLQRKFWAATRQCSTVDGPCTQSCEDSDLDCFVIDNNGFILISKRSRETGRFLGEVDGAVLTQLLSMGVFSQVTMYDYQAMCKPSSHHHSAAQPLVSPISAFLTATRWLLQELVLCVGVDTGLVEGCMRGWLRRVSLSRRLQGLQDNPLATRPRGRRAQSLGMDATSSLHAAPGRDLIAQPEPSSREEGVLEERGWAGGCQGYSSSLGTQVGRAQRSPRFSPVSDRFLLEWSVWGSWYDRGAEGECTELQGHVLKSSGILVTLKHRCSHLTLRGLLSSHPSLLALCVTSSWDTATPCAIITTTMTSCPHVPPCFPVPCPPCAGLMFRPAKSVFHHSHKHKKQDPLQPCDTEYPVFVYQPAIREANGIVECGPCQKVFVVQQIPNSNLLLLVTDPTCDCSIFPPVLQEATEVKYNASVKCDRMRSQKLRRRPDSCHAFHPEENAQDCGGASDTSASPPLLLLPVCAWGLLPQLLR

SEQ ID NO: 915947 - protein, 506 aa, Homo sapiens
  misc_feature (4)..(4): Xaa can be any naturally occurring amino acid
  misc_feature (6)..(6): Xaa can be any naturally occurring amino acid
PNCXLXRDNQPTPLSSLGVVLSRGHGEYILLGNTSVEEGLHDLLHPDLALAGDWIYCITDIDPDHRKLSQLEAMIRFLTRKDPDLECDEELVREVLFDAVVTAPMEAYWTALALNMSEESEHVVDMAFLGTRAGLLRSSLFVGSEKVSDRKFLTPEDEASVFTLDRFPLWYRQASEHPAGSFVFNLRWAEGPESAGEPMVVTASTAVAVTVDKRTAIAAAAGVQMKLEFLQRKFWAATRQCSTVDGPCTQSCEDSDLDCFVIDNNGFILISKRSRETGRFLGEVDGAVLTQLLSMGVFSQVTMYDYQAMCKPSSHHHSAAQPLVSPISAFLTATRWLLQELVLFLLEWSVWGSWYDRGAEAKSVFHHSHKHKKQDPLQPCDTEYPVFVYQPAIREANGIVECGPCQKVFVVQQIPNSNLLLLVTDPTCDCSIFPPVLQEATEVKYNASVKCDRMRSQKLRRRPDSCHAFHPEENAQDCGGASDTSASPPLLLLPVCAWGLLPQLLR

SEQ ID NO: 915948 - protein, 265 aa, Homo sapiens
  misc_feature (4)..(4): Xaa can be any naturally occurring amino acid
  misc_feature (6)..(6): Xaa can be any naturally occurring amino acid
PNCXLXRDNQPTPLSSLGVVLSRGHGEYILLGNTSVEEGLHDLLHPDLALAGDWIYCITDIDPDHRKLSQLEAMIRFLTRKDPDLECDEELVREVLFDAVVTAPMEAYWTALALNMSEESEHVVDMAFLGTRAGLLRSSLFVGSEKVSDRKFLTPEDEASVFTLDRFPLWYRQASEHPAGSFVFNLRWAEGPESAGEPMVVTASTAVAVTVDKRTAIAAAAGVQMKLEFLQRKFWAATRQDLDCFVIDNNGFILISKRSRESDYV

SEQ ID NO: 915949 - protein, 495 aa, Homo sapiens
MKLEFLQRKFWAATRQCSTVDGPCTQSCEDSDLDCFVIDNNGFILISKRSRETGRFLGEVDGAVLTQLLSMGVFSQVTMYDYQAMCKPSSHHHSAAQPLVSPISAFLTATRWLLQELVLCVGVDTGLVEGCMRGWLRRVSLSRRLQGLQDNPLATRPRGRRAQSLGMDATSSLHAAPGRDLIAQPEPSSREEGVLEERGWAGGCQGYSSSLGTQVGRAQRSPRFSPVSDRFLLEWSVWGSWYDRGAEGECTELQGHVLKSSGILVTLKHRCSHLTLRGLLSSHPSLLALCVTSSWDTATPCAIITTTMTSCPHVPPCFPVPCPPCAGLMFRPAKSVFHHSHKHKKQDPLQPCDTEYPVFVYQPAIREANGIVECGPCQKVFVVQQIPNSNLLLLVTDPTCDCSIFPPVLQEATEVKYNASVKCDRMRSQKLRRRPDSCHAFHPEVRVEADRGWAGFSSPNPLCLGLCPCRQEHIGMPMNTPVPVLLGGNIRVYAL

SEQ ID NO: 915950 - protein, 133 aa, Homo sapiens
YTWTANPMLTGSTFCFACFRASPSGSKFLNVSRRMMKEMGPTLSELSTVEAEDTESSIAATVMDGIDRENPTKELDFSHESAVSSEKVKFYQMILGSPSKGFQRENATYQESCLSCCRVEVNKIKKSPMLTQF

SEQ ID NO: 915951 - protein, 133 aa, Homo sapiens; identical to SEQ ID NO: 915950

SEQ ID NO: 915952 - protein, 156 aa, Homo sapiens
MGKDSSRQQRKGASMRLTMAGSTPPCDAVRGQTNAGTENQIAHVLTYKWEPNDENTWTQRGTTHTGAHLRLEGGGGRGAEKITIGVAPAENLLQSPVQKEDVEPQPGPGKSIPPSHKPVAPTYSGQATPKGSRVVKSPGSPGKRFLDSTWGGIYLD

SEQ ID NO: 915953 - protein, 160 aa, Homo sapiens
WRRMEAVVQQPVHSGGAGAHGGPWRVRDRALLLPAAVAHAGGWRGCARAPAQAASLEVILRRLYFPGSSLRLPIQQPQSRRLGMANPALLPSSCRLPHLLCALPPARRPHGAGLEHASPGRGIGDPRAPPAGAPAARLPLIPRPRDFKRGFLASQTGPRH

SEQ ID NO: 915954 - protein, 141 aa, Homo sapiens
MRGAAFTIPSLKQRPCMVCPERRGRTKSSLAPPARSPDAGPQISKDLEPPPHGCQEADRGGSWGATTPRPFRQNLSDLGRHSVLPLKRNLCPGGSSLGAPPPRTPQRRVTLAAQRWLSRPQRRAVGLGELDQGARLAALGL

SEQ ID NO: 915955 - protein, 134 aa, Homo sapiens
MLWDEILALSGSVCDGPVGFRGDRLGSVGLQLLSQEDLGRSQSESLGLEFQGLWEWLPGNTEDCQETTGSYEEARQDSPTSAGGSVALLAPPFQTAGYQSHKTINFSGFKSPSFWTRGLLLIYIYGKVEGILQM

SEQ ID NO: 915956 - protein, 148 aa, Homo sapiens
MVMYFIKHSSQFKRQSPKTNRGYPFKTVSTLWKLCTFTLLNKACSFFSLSVHVSFTHCGQLPHHFFGVAWQEPQVLHLGEPDRRLQKRYLDHHADQSHQATNDLTNGTSNELSSRLLPRTPGSTRWSLNYPRKFPSGGHQTAGPLLHP

SEQ ID NO: 915957 - protein, 179 aa, Homo sapiens
MVMYFIKHSSQFKRQSPKTNRGYPFKTVSTLWKLCTFTLLNKACSFFSLSVHVSFTHCGQLPHHFFGVAWQEPQVLHLGEPDRRLQKRIKAIKLQMILQMEPQMSSAHGFYRGPLDQPAGPSITLENSPLEDTKLQGPFFTPNQQEVARTTATRFPTAVGVSCLEAGLRGGASWASWVK

SEQ ID NO: 915958 - protein, 128 aa, Homo sapiens
MVMYFIKHSSQFKRQSPKTNRGYPFKTVSTLWKLCTFTLLNKACSFFSLSVHVSFTHCGQLPHHFFGVAWQEPQVLHLGEPDRRLQKRGDFPVPVQCLQRKIIHLPFYCLVRMLEPARPTAEILFRNC

SEQ ID NO: 915959 - protein, 170 aa, Homo sapiens
AQDIQKFCSLSEDMLSQNMALWHIKCFKLKEFEKQQVKERFSDPPLMQAIKPSHEKYPPYAQRKGTSLSPKTQGHGDDEQALLSFLHSITLSLYLYPTTFFHDSPVFIKPGIKTLRLNHFFGSSFPYEGSSAGIVKGTTFQTLQFQCGTEGFQNSGDNEIRFAHCDNTGL

SEQ ID NO: 915960 - protein, 170 aa, Homo sapiens; identical to SEQ ID NO: 915959

SEQ ID NO: 915961 - protein, 395 aa, Homo sapiens
MHRQKADEAYLYRRGLAPVQAYLHIPDIIKVAKENNVDAVHPGYGFLSERADFAQACQDAGVRFIGQAQKWIRKMGDKVEARAIAIAAGVPVVPGTDAPITSLHEAHEFSNTYGFPIIFKAAYGGGGRGMRVVHSYEELEENYTRAYSEALAAFGNGALFVEKFIEKPRHIEVQILGDQYGNILHLYERDCSIQRRHQKVVEIAPAAHLDPQLRTRLTSDSVKLAKQVGYENAGTVEFLVDRHGKHYFIEVNSRLQVEHTVTEEITDVDLVHAQIHVAEGRSLPDLGLRQENIRINGCAIQCRVTTEDPARSFQPDTGRIEVGGARAEGDASSPVHRFCLVPGAAVPSCHSPAVREDPHVGSEVDIEYTEAGSAQRRGGASQGKRLLGAQVRRKP

SEQ ID NO: 915962 - protein, 273 aa, Homo sapiens
KTLSYYQARLLSLRMKTCTQAASHSGMAATHQKAVKIIAYKNGDGYRNGKLIVAGTFPMDKSLKLLSVALYNLVLWRRVAACQPATMVPTKSPVQPVVVEGGWTEQTQQEIKLMELIRHTEAHLSEIQEMESKINFPIATKRIAVKPSNLYKQPNTKRVWIYLNGGRPEDGTYAWGKTISELLQDCSSRLKMTHPARALYTPSGEPIQSWDDIERDMVICVSMGHGFKTPKELKQLMEIRANYARIRRQQGPQATDIVVSPSTKLLSLAHLHN

SEQ ID NO: 915963 - protein, 142 aa, Homo sapiens
MCPQECFHWCCDFLQAHYGNMTIRWAKKSTALQTGKNSRLKGKGGVAAGPVLESAKKLGEERLGEGLKTQNERPRLKTYNTPLKNNTIKVLEENIGSDVSYTFSREGLPKYHKKPNLKLEISKNKSNRLSQFCVCYKQNTID

SEQ ID NO: 915964 - protein, 220 aa, Homo sapiens
MKEKLSLTKVKLLERELLLRLSRLPPLLKARSLQLGDVSEFMSDASDFRAGSITGSRAGASSPFCGNSSLLETPNTNDNGANGHTRVYGAAQATRSSCHSPERAGFAKRQSHIPAAEPCRLFLYDVSCIHFPSGPTPKFRTILARAYIIATAIVFICFVLLYKEQTYLACGLGGWEIQDPGPHLLKAFLLYRNITGGITGERERAQERAKLAFIVNPLLQ

SEQ ID NO: 915965 - protein, 164 aa, Homo sapiens
MAWLSDMSLCCTRLCTLYSASEVACAGPCVIKGFVCFPTRLLAGPAYQPVAGACTAPGPCIPGLASCHALSTSLLLRGAASVAWGLPIVAQACSSDLSWHLVLQRSSPFCWPSAFAHLDLLRELGCPVCAYLCVPAPGTGRAQSGCLLEARGWVSSAVSCGVSA

SEQ ID NO: 915966 - protein, 242 aa, Homo sapiens
MMLPVSSPLRHKTLLSLSLGKTLLWRIPPVSPLLELNKTPIDQRQCSCGESFVIHEPAPGQLGKLWEIEQGPNENPSVFLKILREWLQDYTLWKPEDPEKLSSAWFPIHLSEYPRYSEETPKLVINPGTLPSQLIDIAFKINKNRDVASDKREDKKMERQAHFLAVALQTTSGEPGGRKKKAWISKQRPRHGTQRVPKLGPTQCAYCKQEGHWKRKCPDPPRRGKKEDKPKHQFPVNGEKTD

SEQ ID NO: 915967 - protein, 115 aa, Homo sapiens
MLETGFHHVGQAGLKLLISGDPLLSASQSAEITGVSHHAHLFKTFLRTVPDLPGNLGHQNPNIVLVLPKVPDTGFTHRHSDLIDDIANSGKTGWRWVVRSLLGPRLDFGNLEFIL

SEQ ID NO: 915968 - protein, 362 aa, Homo sapiens
MEIKKQITGMRRLLNDSTGRIYQRVGKEGEKLKEEPQDLDLVWPPRLNSSAEAPQSLHPSSRGVWNELPPQSGQFSGQYGTRSRTFQSQPHPTTSSNGELPVVNSSAGSNCCTCNCQSTLQAILQELKTMRKLMQIQAVGTQNRQQPPISLICSQRTAVSRKRNKKKKVPPKTVEPLTVKQKPSGSEMEKKSVVASELSALQAAEHTSPEESRVLGFGIVLESPSSDPEVQLAEGFDVFMPKSQLDSILSNYTRSGSLLFRKLVCAFFDDKTLANSLPNGKRKRGLNDNRKGLDQNIVGAIKVFTEKYCTANHVDKLPGPRDWVQILQDQIKLARRRLKRGSEIADSDERLDGIALPPTGLY

SEQ ID NO: 915969 - protein, 375 aa, Homo sapiens
MEIKKQITGMRRLLNDSTGRIYQRVGKEGEKLKEEPQDLDLVWPPRLNSSAEAPQSLHPSSRGVWNELPPQSGQFSGQYGTRSRTFQSQPHPTTSSNGMVVNKHSEGSHGGELPVVNSSAGSNCCTCNCQSTLQAILQELKTMRKLMQIQAVGTQNRQQPPISLICSQRTAVSRKRNKKKKVPPKTVEPLTVKQKPSGSEMEKKSVVASELSALQAAEHTSPEESRVLGFGIVLESPSSDPEVQLAEGFDVFMPKSQLDSILSNYTRSGSLLFRKLVCAFFDDKTLANSLPNGKRKRGLNDNRKGLDQNIVGAIKVFTEKYCTANHVDKLPGPRDWVQILQDQIKLARRRLKRGSEIADSDERLDGIALPPTGLY

SEQ ID NO: 915970 - protein, 278 aa, Homo sapiens
GLFGVCHSFLSCSGELPVVNSSAGSNCCTCNCQSTLQAILQELKTMRKLMQIQAVGTQNRQQPPISLICSQRTAVSRKRNKKKKVPPKTVEPLTVKQKPSGSEMEKKSVVASELSALQAAEHTSPEESRVLGFGIVLESPSSDPEVQLAEGFDVFMPKSQLDSILSNYTRSGSLLFRKLVCAFFDDKTLANSLPNGKRKRGLNDNRKGLDQNIVGAIKVFTEKYCTANHVDKLPGPRDWVQILQDQIKLARRRLKRGSEIADSDERLDGIALPPTGLY

SEQ ID NO: 915971 - protein, 139 aa, Homo sapiens
NGAVKALIIVKYQRETSTVCHMESVIYSFMNHTFIPAYYVPAVNGRRDLCPCFELAVLMNTGHCYFKKSLVNELRVMELVCIFPIHSYFATCVPVNPIHYCFVSCLQICGHSITRSAITLSESFPRYPLPPNNGSVCTQ

SEQ ID NO: 915972 - protein, 363 aa, Homo sapiens
MEIKKQITGMRRLLNDSTGRIYQRVGKEGEKLKEEPQDLDLVWPPRLNSSAEAPQSLHPSSRGVWNELPPQSGQFSGQYGTRSRTFQSQPHPTTSSNGELPVVNSSAGSNCCTCNCQSTLQAILQELKTMRKLMQIQAVGTQNRQQPPISLICSQRTAVSRKRNKKKKVPPKTVEPLTVKQKPSGSEMEKKSVVASELSALQAAEHTSPEESRVLGFGIVLESPSSDPEVQLAEGFDVFMPKSQLDSILSNYTRSGSLLFRKLVCAFFDDKTLANSLPNGKRKRGLNDNRKGLDQNIVGAIKVFTEKYCTANHVDKLPGPRDWVQILQDQIKLARRRLKRGSEIADSDERLDGIALPPTGKKA

SEQ ID NO: 915973 - protein, 139 aa, Homo sapiens; identical to SEQ ID NO: 915971

SEQ ID NO: 915974 - protein, 489 aa, Homo sapiens
MVQTDVLLPEPAPQTVSPCELPCKEYDVARNMGNCYARYHQAFADCNQSERELQGRESQQLAAETQALAQPTQQDSTCRVGERLQDTHSWKSELQHEVEVLAAETDLLLAQKQRLERALDAMEVPFSIATDNMQCSQRHQHANLVRDYVETELLKAYPPAPSQCLKNCCSSRKPSACNKGACEVMETLTVQEEANPGTEGCRTRALAHKEEAEPIRNIQELLKRAIVQAVSQIHLQHGGSPVGPSLATHQGPAPPRPRLNREHTEICEMDWLDKVEAYNLDETCGRHHSQSTEVQAHPALHHLPREGGPSSAPVLALAVVSPPSAWGPQRRSFPQPGPDAFPPDGFVGNPRSASTPETRTKFTQDNLCRAQRKRLDSANLWVLVDCILRDTSEDLGLQCDAMNLAFGRRCEELEDARHKLQHHLHKMLREITDQEHNVVALKEAIKDKEEPLHIAQTRLYLPSHRPNMQLCREAAQFSPSSHPPTPPSW

SEQ ID NO: 915975 - protein, 124 aa, Homo sapiens [sequence omitted]

SEQ ID NO: 915976 - protein, 98 aa, Homo sapiens
SHWSGPPSGHSPRSWVGPDWSPHSICPGMGALAQGALSCLQMLREITDQEHNVVALKEAIKDKEEPLHIAQTRLYLPSHRPNMQLCREAAQFRYCLGL

SEQ ID NO: 915977 - protein, 177 aa, Homo sapiens
SAVVELSSPGVWFYVPVAMFPVSSGCFQEQQETNKSLPRSASTPETRTKFTQDNLCRAQRKRLDSANLWVLVDCILRDTSEDLGLQCDAMNLAFGRRCEELEDARHKLQHHLHKMLREITDQEHNVVALKEAIKDKEEPLHIAQTRLYLPSHRPNMQLCREAAQFSPSSHPPTPPSW

SEQ ID NO: 915978 - protein, 195 aa, Homo sapiens
SAVVELSSPGVWFYVPVAMFPVSSGCFQEQQETNKSLPRSASTPETRTKFTQDNLCRAQRKRLDSANLWVLVDCILRDTSEDLGLQCDAMNLAFGRRCEELEDARHKLQHHLHKPQLTPPNTPKLVSEVEELYKSITVPREKLLQAEQSLCNLEDIHMSLEKDITAMTNSLFIDRQKCMAHRTCYPTILQLAGYQ

SEQ ID NO: 915979 - protein, 164 aa, Homo sapiens
TIFFHFLYFQLVWIQVMGQVKYIRGHQTLGHRPVHDLLATRPHSRRLFKARNENGPQTCEKIYSSLLIIIQMSIKIIPRIYQKPKNLTTSSVVWKQEYPCIAYGNATSFNAYGEEHSNIWKNFREFITLTQLATCRSLSQIYTSKLIKLLRHKIIIYGYICNAT

SEQ ID NO: 915980 - protein, 314 aa, Homo sapiens
MKRQNQSCVVEFILLGFSNFPELQVQLFGVFLVIYVVTLMGNAIITVIISLNQSLHVPMYLFLLNLSVVEVSFSAVITPEMLVVLSTEKTMISFVGCFAQMYFILLFGGTECFLLGAMAYDRFAAICHPLNYPVIMNRGVFMKLVIFSWISGIMVATVQTTWVFSFPFCGPNEINHLFCETPPVLELVCADTFLFEIYAFTGTILIVMVPFLLILLSYIRVLFAILKMPSTTGRQKAFSTCASHLTSVTLFYGTANMTYLQPKSGYSPETKKLISLAYTLLTPLLNPLIYSLRNSEMKRTLIKLWRRKVILHTF

SEQ ID NO: 915981 - protein, 406 aa, Homo sapiens
MVQEGDLEEEKSDIVCPGCHCRPPDYEKGVLILLLFCLLRGIIVMYNSWESWVCTAAEECGYGSWLCPKLKAHSWPDTVPVVSEEEGRKEAGSKKKAPDMLLLAKKFSFPDTLEPAELLGRYSVCPHPSPEWRSPGVQREPCAEGWCQIASRLWQHFPVSGPVSRMRASWEELLSSAEGRGEGAEARHCLENSGQWPEMALAIRSCVTLVKCDNSSKLWFPFLQSGVNSSTQEACCVVISLGSGADEPTSPKRPKSISEPQHSDAEGDAASPLPSEWTSVRISPGEEAAGQDVLAVRVLVTSEDSSSDTESDYGGSEGSHTEPCEEKPWRPGSPHLPHTSLGEALSRAVSPQCPEEPRAVHAALQRANSFQSPTPSKYQNWRREFWWSESLALWGWEAGAGQKISG

SEQ ID NO: 915982 - protein, 452 aa, Homo sapiens
MVQEGDLEEEKSDIVCPGCHCRPPDYEKGVLILLLFCLLRGIIVMYNSWESWVCTAAEECGYGSWLCPKLKAHSWPDTVPVVSEEEGRKEAGSKKKAPDMLLLAKKFSFPDTLEPAELLGRYSVCPHPSPEWRSPGVQREPCAEGWCQIASRLWQHFPVSGPVSRMRASWEELLSSAEGRGEGAEARHCLENSGQWPEMALAIRSCVTLVKCDNSSKLWFPFLQSGVNSSTQEACCVVISLGSGADEPTSPKRPKSISEPQHSDAEGDAASPLPSEWTSVRISPGEEAAGQDVLAVRVLVTSEDSSSDTESDYGGSEGSHTEPCEEKPWRPGSPHLPHTSLGEALSRAVSPQCPEEPRAVHAALQRANSFQSPTPSKYQNWRREFWWSLTPVNKRTMSPPKDPSPSLPLPSSSSHSSSPPSSSSTSVSGNAPDGSSPPQVSVPEGPAQVSGS

SEQ ID NO: 915983 - protein, 152 aa, Homo sapiens
NLILSANYNVEMQILKTHWGLVNQKLCSKGVLRHQPCTSTLLQHEREPCLGVEGSSGSATYFCYTEVRIYWDQSRTDTGSLGSPPHKCIPGKVICVLIDISVGCGPFLTPGRSHLYWPLPILLVHMVSPLMADTFPLKKPRFRGGLIKCTDV

SEQ ID NO: 915984 - protein, 162 aa, Homo sapiens
WSPELCRALLGSLLFPAGHLPAGAGMLYGEAFPSMTSFSVCLSLGAQELVRMDSSRQALGMFDPNAINSIDQRETCPQIPEAEVLEVSVIFGFLAVPGVDGPGDVFFPSLEFGCQTPGLAAAVWRGRRPAAEQPPHFLLSFLWCGPALSSLDPFTTERIWAS

SEQ ID NO: 915985 - protein, 367 aa, Homo sapiens
  misc_feature (4)..(4): Xaa can be any naturally occurring amino acid
LHGXGHEILRQPERLLFILDGFDELQRPFEEKLKKRGLSPKESLLHLLIRRHTLPTCSLLITTRPLALRNLEPLLKQARHVHILGFSEEERARYFSSYFTDEKQADRAFDIVQKNDILYKACQVPGICWVVCSWLQGQMERGKVVLETPRNSTDIFMAYVSTFLPPDDDGGCSELSRHRVLRSLCSLAAEGIQHQRFLFEEAELRKHNLDGPRLAAFLSSNDYQLGLAIKKFYSFRHISFQDFFHAMSYLVKEDQSRLGKESRREVQRLLEVKEQEGNDEMTLTMQFLLDISKKDSFSNLELKFCFRISPCLAQDLKHFKEQMESMKHNRTWDLEFSLYEAKIKNLVKEPLKRSMQETECYDFQCQE

SEQ ID NO: 915986 - protein, 416 aa, Homo sapiens
TLARKMVLDWATGTLYPGRFDYVFYVSCKEVVLLLESKLEQLLFWCCGDNQAPVTEILRQPERLLFILDGFDELQRPFEEKLKKRGLSPKESLLHLLIRRHTLPTCSLLITTRPLALRNLEPLLKQARHVHILGFSEEERARYFSSYFTDEKQADRAFDIVQKNDILYKACQVPGICWVVCSWLQGQMERGKVVLETPRNSTDIFMAYVSTFLPPDDDGGCSELSRHRVLRSLCSLAAEGIQHQRFLFEEAELRKHNLDGPRLAAFLSSNDYQLGLAIKKFYSFRHISFQDFFHAMSYLVKEDQSRLGKESRREVQRLLEVKEQEGNDEMTLTMQFLLDISKKDSFSNLELKFCFRISPCLAQDLKHFKEQMESMKHNRTWDLEFSLYEAKIKNLVKEPLKRSMQETECYDFQCQE

SEQ ID NO: 915987 - protein, 527 aa, Homo sapiens
MSLQMVTVSNNIALIQPGFSLMNFDGQVFFFGQKGWPKRSCPTGVFHLDVKHNHVKLKPTIFSKDSCYLPPLRYPATCTFKGSLESEKHQYIIHGGKTPNNEVSDKIYVMSIVCKNNKKVTFRCTEKDLVGDVPEARYGHSINVVYSRGKSMGVLFGGRSYMPSTHRTTEKWNSVADCLPCVFLVDFEFGCATSYILPELQDGLSFHVSIAKNDTIYILGGHSLANNIRPANLYRIRVDLPLGSPAVNCTVLPGGISVSSAILTQTNNDEFVIVGGYQLENQKRMICNIISLEDNKIEIREMETPDWTPDIKHSKIWFGSNMGNGTVFLGIPGDNKQVVSEGFYFYMLKCAEDDTNEEQTTFTNSQTSTEDPGDSTPFEDSEEFCFSAEANSFDGDDEFDTYNEDDEEDESETGYWITCCPTCDVDINTWVPFYSTELNKPAMIYCSHGDGHWVHAQCMDLAERTLIHLSAGSNKYYCNEHVEIARALHTPQRVLPLKKPPMKSLRKKGSGKILTPAKKSFLRRLFD

SEQ ID NO: 915988 - protein, 164 aa, Homo sapiens
MGRAIYRPPPLARSLHKGQGLRAALLLSAFPPLPAGFHPHVVHLTVTSWLLPFNITSKFTDRWATLNSQDTFRGASKGCTPSSSEQKTKVYKKGQRSGRDSAVGPRGPFALGAFHSLSGCVQGNKPHPHVSQKTWFLVCTLKPISCATLAFSLLILSSTYKRVG

SEQ ID NO: 915989 - protein, 237 aa, Homo sapiens
MPHNNQEIILKRAADIAEALYSVPRNHNQIPTLGNNPAHTGMMGVNSFSSQLAVNVSETSQANDQVGYSRNTSSVSPRGYVPSSTPQQSNYNTVSTSMNGYGSGAMASLGVPGSPGFLNGSSANSPYGIVPSSPTMAASSVTLPSNCSSTHGIFSFSPANVISAVKQKSAFAPVVRPQASPPPSCTSANGNGLQGSLLGAEDVAAEKTNWPFCEVGGIFHFDELMLKKGTGKLCLGW

SEQ ID NO: 915990 - protein, 237 aa, Homo sapiens; identical to SEQ ID NO: 915989

SEQ ID NO: 915991 - protein, 237 aa, Homo sapiens
MPHNNQEIILKRAADIAEALYSVPRNHNQIPTLGNNPAHTGMMGVNSFSSQLAVNVSETSQANDQVGYSRNTSSVSPRGYVPSSTPQQSNYNTVSTSMNGYGSGAMASLGVPGSPGFLNGSSANSPYGIVPSSPTMAASSVTLPSNCSSTHGIFSFSPANVISAVKQKSAFAPVVRPQASPPPSCTSANGNGLQGEGGAGPWASAGSSPGVGMGVGVGARPFSWHLCDCCMFSRGPP

SEQ ID NO: 915992 - protein, 194 aa, Homo sapiens
MPYDRYVAICNPLIYTAIMTQRVCRELVIGVYTYGFRNSVIQTALTFQLSFCNSDVIHHFYCADPPLLALSCSDTHNKEKQLMIFSAVNLTGSLLTIFISYICILFSIIKIQSSEGKCRAFSTRASHLTVVTIFYGTLFFMYLQQPKAGNSWKPNKVVSVFYSLVIPMLNPLIYRLRNTEVKDALKKMLEGKEL

SEQ ID NO: 915993 - protein, 147 aa, Homo sapiens
MAENDIIQNKKLAELLLIQICQGYGIPLAVAPHRLLLRRCSCLRVTHNKEILASTVSLGVEGYMLGGGSRINSSNLNDGEEECSPDSLLVWKKKSLLLWMSSLPSLGEKYFKRILRWREHWKSSGPIPLCNSKLLCKKNAPRSLFAS

SEQ ID NO: 915994 - protein, 120 aa, Homo sapiens
VVRSGVLGILRRCSCLRVTHNKEILASTVSLGVEGYMLGGGSRINSSNLNDGEEECSPDSLLVWKKKSLLLWMSSLPSLGEKYFKRILRWREHWKSSGPIPLCNSKLLCKKNAPRSLFAS

SEQ ID NO: 915995 - protein, 426 aa, Homo sapiens
MMDYPISGLDSNIGGSPNKFKARNQIPTGFESALFWWSTIKIVNWINYIYCNQQRFISYTWNALKGMVYVSCGELWINPDLSIAQQKKQIFLRNLESDIAKIQIFCSTHKIEEVQSDIVSGSKLAVHKPVAIFGEEKQVTEPEEKQMQEDPLTTENASSEILYAWQETSHDFDEDDSLPKKTEKGLFENVEPQKKHSCSPKHSKLHKHCHQQFEYRDGQIISHAAPQLVLGVQGPNLRSGMEVVLVEKKSDGSHQRWIHQEDSSNPDLVLAVSMTKTRNEVCGYPVIVQKYKPYNNGAANQKWHYMKNIKALVAFHSTALDKEITSANYAGVCTSSVIKEENIDQPGYCYLSPDGKRKTMLCLACGQSMRTEKGLKQLLPGVPFLCISGTKTQKPFLQGPFKVISVAEVCNDLSSANACMATIWKL

SEQ ID NO: 915996 - protein, 387 aa, Homo sapiens
VERRGGPPEPGRVGGGTRVRPGRARGEGLPGLRPGVVRGAQRPPGRAMGNRSTADADGLLAGRGPAAGASAGASAGLAGQGAAALVGGVLLIGAVLAGNSLVCVSVATERALQTPTNSFIVSLAAADLLLALLVLPLFVYSEVSRVRPHEHPHLLLGSPSLSLRRTRRDPAPFWCGASSWGGGRGAAPCPSAIHPPPPPRDLPPAALSVPRPSFLFSFPVCLGVCYPGDARPSIQGPRKQATLSSPVPSVAGFHLQGSQLDRQADAGSAPWLPWAHTHTHCHSHCPPHTPSADAGTPPEGGSQLAGETWAGQNPGEGRVCGDQAPAENPGGKPEGELGDGAHTPHQVWPSSGSALVPAPLRPEKSSLGLSWRRGVPDCGGGGLEVSP

SEQ ID NO: 915997 - protein, 500 aa, Homo sapiens
VERRGGPPEPGRVGGGTRVRPGRARGEGLPGLRPGVVRGAQRPPGRAMGNRSTADADGLLAGRGPAAGASAGASAGLAGQGAAALVGGVLLIGAVLAGNSLVCVSVATERALQTPTNSFIVSLAAADLLLALLVLPLFVYSEVQGGAWLLSPRLCDALMAMDVMLCTASIFNLCAISVDRCAALPARAPAPPRPARRPHRGLCAVRRPLGAPRRFVAVAVPLRYNRQGGSRRQLLLIGATWLLSAAVAAPVLCGLNDVRGRDPAVCRLEDRDYVVYSSVCSFFLPCPLMLLLYWATFRGLQRWEVARRAKLHGRAPRFPSGPGPPSPTPPAPRLPQDPCGPDCAPPAPGLPRGPCGPDCAPAAPSLPQDPCGPDCAPPAPGLPPDPCGSNCAPPDAVRAAALPPQTPPQTRRRRRAKITGRERKAMRVLPVVVGAFLLCWTPFFVVHITQALCPACSVPPRLVSAVTWLGYVNSALNPVIYTVFNAEFRNVFRKALRACC

SEQ ID NO: 915998 - protein, 340 aa, Homo sapiens
MDVMLCTASIFNLCAISVDRCAALPARAPAPPRPARRPHRGLCAVRRPLGAPRRFVAVAVPLRYNRQGGSRRQLLLIGATWLLSAAVAAPVLCGLNDVRGRDPAVCRLEDRDYVVYSSVCSFFLPCPLMLLLYWATFRGLQRWEVARRAKLHGRAPRFPSGPGPPSPTPPAPRLPQDPCGPDCAPPAPGLPRGPCGPDCAPAAPSLPQDPCGPDCAPPAPGLPPDPCGSNCAPPDAVRAAALPPQTPPQTRRRRRAKITGRERKAMRVLPVVVGAFLLCWTPFFVVHITQALCPACSVPPRLVSAVTWLGYVNSALNPVIYTVFNAEFRNVFRKALRACC

SEQ ID NO: 915999 - protein, 188 aa, Homo sapiens
PGGETMVLLTVSKRLYSPPVIVSNIQGMYTTLVILFLICRGKDNDITVRITGGVQQAPRDIIPNIHGKKEYYNITEVVNPLCDIVPNIKDRRYYKYRKGCTPLLILLLISVGGVDDITSNITGHVHPTCDIVPNILGGDYDITGNIAGCVHSRDIVPNVQQGRKYYSQYGGGVHFPCDIVPNIHGGKG

SEQ ID NO: 916000 - protein, 170 aa, Homo sapiens
VPFAMQKLFSLIKSQLFIFVFIAFAFGFLVMKSLRISRRFLEESIGFSKQKIISSATSDSLTSSLPIWISSISFFCLIALARTSSTMLKKSGESGLLVLFQFSKGMLSPFPHSVLCWLWVCIDGFYYIKGSWHKLQFPPCPWKMRSPWKMRSPLKMRSLLKMIPWRAGWW

SEQ ID NO: 916001 - protein, 87 aa, Homo sapiens
APAPALCDFARAELRSSQHRQGEHRQGGGIMAQVAVSTLPMEDEESMEDEESIEDEESVEDDSVESRMVVTFLISAPESTVRPSVLT

SEQ ID NO: 916002 - protein, 260 aa, Homo sapiens
AGQSMAGPIDPCNKLLRVSWMLKIACQVPSLLLSQQSTNSSLEEINCHGFSLAAYHWDTSDWMPGARLSDIEEVPNYENQDGGSAHQGSTRELESDYYLGGYDIDSEYPPPHEEEFLSQDQLPPPLPEDFPDQYEALPPSQPVSLASTLSPDCRRRPQFHPSQYLPPHPFPNETDLVGPPASCEFSTFAVSMNQGTEPTGPADSVSLSLHNSRGTSSSDVSANCGFDDSEVAMSDYESVGELSLASLHIPFVETQHQTQV

SEQ ID NO: 916003 - protein, 167 aa, Homo sapiens
MLNKEEELELLEALWSFSTSPAHSLLLPGRGGAGPIERRKPVSQAFSRPQQFLSRALLEFFGKSHPPPHRLFRKSLNVGLHYSHIPFLTTCLHFLRKRLQKGEVGLSVETSKPQVPVGGLSRKIPQEPWATVMEKRLQEAQLYKEEGNQRYREGKYRDALVSFRWSP

SEQ ID NO: 916004 - protein, 173 aa, Homo sapiens
MLNKEEELELLEALWSFSTSPAHSLLLPGRGGAGPIERRKPVSQAFSRPQQFLSRALLEFFGKSHPPPHRLFRKSLNVGLHYSHIPFLTTCLHFLRKRLQKGEVGLSVETSKPQVPVGGLSRKSSQPQSFTCSFTSQFRKNRGRQLWRSVCRRLSCTRRKGTSATGKGSTEML

SEQ ID NO: 916005 - protein, 171 aa, Homo sapiens
MEKRLQEAQLYKEEGNQRYREGKYRDAVSRYHRALLQLRGLDPSLPSPLPNLGPQGPALTPEQENILHTTQTDCYNNLAACLLQMEPVNYERVREYSQKVLERQPDNAKALYRAGVAFFHLQDYDQARHYLLAAVNRQPKDANVRRYLQLTQSELSSYHRKEKQLYLGMFG

SEQ ID NO: 916006 - protein, 171 aa, Homo sapiens; identical to SEQ ID NO: 916005

SEQ ID NO: 916007 - protein, 155 aa, Homo sapiens
MEKRLQEAQLYKEEGNQRYREGKYRDAVSRYHRALLQLRGLDPSLPSPLPNLGPQGPALTPEQACLLQMEPVNYERVREYSQKVLERQPDNAKALYRAGVAFFHLQDYDQARHYLLAAVNRQPKDANVRRYLQLTQSELSSYHRKEKQLYLGMFG

SEQ ID NO: 916008 - protein, 171 aa, Homo sapiens; identical to SEQ ID NO: 916005

SEQ ID NO: 916009 - protein, 171 aa, Homo sapiens; identical to SEQ ID NO: 916005

SEQ ID NO: 916010 - protein, 303 aa, Homo sapiens
MLNKEEELELLEALWSFSTSPAHSLLLPGRGGAGPIERRKPVSQAFSRPQQFLSRALLEFFGKSHPPPHRLFRKSLNVGLHYSHIPFLTTCLHFLRKRLQKGEVGLSVETSKPQVPVGGLSRKIPQEPWATVMEKRLQEAQLYKEEGNQRYREGKYRDAVSRYHRALLQLRGLDPSLPSPLPNLGPQGPALTPEQENILHTTQTDCYNNLAACLLQMEPVNYERVREYSQKVLERQPDNAKALYRAGVAFFHLQDYDQARHYLLAAVNRQPKDANVRRYLQLTQSELSSYHRKEKQLYLGMFG

SEQ ID NO: 916011 - protein, 130 aa, Homo sapiens [sequence omitted]

SEQ ID NO: 916012 - protein, 171 aa, Homo sapiens; identical to SEQ ID NO: 916005

SEQ ID NO: 916013 - protein, 173 aa, Homo sapiens
METKDQKKQRKKNSGPKDEKKKKRHLQDLQLGDEEDAQKRNPKAFAVQSAVWMARSFHRTQDLKTKKHRIPVVDRTPLEPPPIVVVVTGPPKLEEHFDIMPHSELHWQKLTEIRGPVMIVSGQGLRGLQGPPGKMGPPGNTGTSGIPGPRGQKGDRGDNSVAEAKLANLERKL

SEQ ID NO: 916014 - protein, 153 aa, Homo sapiens
CFSIKLSDFMQPDILKKKLTNSVITNLLATDSQDQKKQRKKNSGPKDEKKKKRHLQDLQLGDEEDAQKRNPKAFAVQSAVWMARSFHRTFCKHMKPGNCRKEEEGNHGSFGTLERNPSNPGAKAHTGNEFSSPLSGPLYPGLMDNPQALWAVK

SEQ ID NO: 916015 - protein, 176 aa, Homo sapiens
WDKDMNRQFSKEDIKVANKHKKKCSTSLIIREILLKELKVELPFDLAIPLLGIPQRKRSHYMKKTLAHACLEQYYLQFPKYGTSLNAYQSSLSLAQPYPKQGSKHCPSKRQQSKYLNLFNSVKSERSKEVWKKLIPTLMDDFEGFKISVEEVIVDMAEIAKEPEFELEPKDVTELL

SEQ ID NO: 916016 - protein, 319 aa, Homo sapiens
MTEVTAARRWLSRRRRNGCWAADGQELTRLACSELRLLCPGPGFSELSYIKYTEMKRKVVNTHKLRLSPNEEAFILKEDYERRRKLRLLQVREQERDIALQIREDIKQRRNQQFTRLAEELRAEWEESQTQKIQNLEKLYLASLRSMGEGHRQAKENEPDLDALAQRAAERKRKADLRHKEALKVQKNQKEILLKQKTCLWNQTRGFLEPMTYIFLTLLYYNIITERLIDDISCFLRHIKARKEALLVEKERSAKITSLPPPPPTLFENIEVKRISAVKTNSSTYHHLHTFVNRETDTKRVIDLLFLHALALLFLCALN

SEQ ID NO: 916017 - protein, 412 aa, Homo sapiens
RCSFWSRQSSRPRPGLCGRRRQGGVTRDGGQGSRWARRLAGVGAGPGLREREAVDGQVGAVGEDPRGRSLAAWDPVLTEDLRGASVTPTPQPRPPHRGPAPTSPLGLRSSVAQPRMERRGTGSRLEDARSGFLALRVASPQTWRGVERRVRGGRAGPSGPGSRAGAHRDVVPRGQQRARREAVQALREAAHQLLQHHAAQVGRALLRRVEDADELLPAAHSHDLQACRAGKRGDAVRRCGRSTRTAARPARKPAPVRRRRLGSLAPYLCRSSGLQWSGSVQGWGDRTGSPCLACGPPTRSGPAAGGRTSASSAARPPSPGACGWSAAAAPPGAPSPAPRGPVGPTPSTHLRPDLQAGLGGKGCIPLPWIPAPRRGGAVCYQEPPGRPQTRPLETGSCSAVQAGMLRCDDSAR

SEQ ID NO: 916018 - protein, 393 aa, Homo sapiens
RCSFWSRQSSRPRPGLCGRRRQGGVTRDGGQGSRWARRLAGVGAGPGLREREAVDGQVGAVGEDPRGRSLAAWDPVLTEDLRGASVTPTPQPRPPHRGPAPTSPLGLRSSVAQPRMERRGTGSRLEDARSGFLALRVASPQTWRGVERRVRGGRAGPSGPGSRAGAHRDVVPRGQQRARREAVQALREAAHQLLQHHAAQVGRALLRRVEDADELLPAAHSHDLQACRAGKRGDSCEEMRPVHPHSCAPRPETSSSPAPEAWVTRPLPLQEFRAPVVRVCAGLGRQDRLAVPGMRPTHEERASCRRQDFCKFCSSASISWSVRVVCSSRSSRCSFSCSERACGPYPQHSPEARPPSRPGREGLYTVAMDTSTQKGWGCLLPGASRETPDQAPR

SEQ ID NO: 916019 - protein, 850 aa, Homo sapiens
GRTHTMVVEGQMSEAMDQPAGGPGNPRPGEGDDGSMEPGTCQELLHRLRELEAENSALAQANENQRETYERCLDEVANHVVQALLNQKDLREECIKLKKRVFDLERQNQMLSALFQQKLQLTTGSLPQRWMPYPRSSEEGPDSGEPINGELCGPPQPEPSPWAPCLLLGPGNLGGLLHWERLLGGLGGEEDTGRPWGPSRGPPQAQGTSSGPNCAPGSSSSSSSDEAESYPYGSPQEKSLDKAGSESPHPGRRTPGNSSKKPSQGSGRRPGDPGSTPLRDRLAALGKLKTREGALGSEKNGVPARPGTEKTRGPGKSGESAGDMVPSIHRPLEQLEAKGGIRGAVALGTNSLKQQEPGLMGDPGARVYSSHSMGARVDLEPVSPRSCLTKVELAKSRLAGALCPQVPRTPAKVPTSAPSLGKPNKSPHSSPTKLPSKSPTKVVPRPGAPLVTKESPKPDKGKGPPWADCGSTTAQSTPLVPGPTDPSQGPEGGSHSAIEEKVMKGIEENVLRLQGQERAPGAEVKHRNTSSIASWFGLKKSKLPALNRRTEATKNKEGAGGGSPLRREVKMEARKLEAESLNISKLMAKAEDLRRALEEEKAYLSSRARQRLVAQPQGPTRGWGRVDGKELPSKSWREPKPEYGDFQPVSSDPKSPWPACGPGMAWWPSSGLRKTSWKGGHWSYTGTNPSLPSGYSPHLHPFPKPRADQATAAGSPTWVPPARPPPLTKVPRRAHTLEREVPGIEELLVSGRHPSMPAFPALLPAAPGHRGHETCPDDPCEDPGPTPPVQLAKNWTFPNTRAAGSSSDPLMCPPRQLEGLPRTPMVRIAAEERERTREQEGVMWGDQFLQ

SEQ ID NO: 916020 - protein, 153 aa, Homo sapiens
MGVKAGVWAASPVNQSAQPELSRHWDDQLQRGATNSRASSLLRDADVGMPSCRMEVPTPGHPLSCSVTQYSFSLLTLNLSVYLIIPGEERRKKELWLYGNPDLGAPEARAVTPAIGPYGSWSLQASRHEPPHPATHSYTTTFVSILAIGLSSP

SEQ ID NO: 916021 - protein, 169 aa, Homo sapiens
MLTFIPMVTTAEIGTGKDFMMKMPKSIATKAKIDKWDLIKLKSFCTAKETIIRVNRQPIEREKIFAIYPSDKEYGQKKQRFYQRDVQKANKNIKRQSTLLPIWEMEIKTPMRYQCISIRITKTVTPNVGQLKKLQALASWLALQSCIAQNMFGLDCGFKKNPQHILKKY

SEQ ID NO: 916022 - protein, 365 aa, Homo sapiens
CASIDVQLIMDGEVNEAQEGQDAKPQARARNILELSSLHKARTPERQMHLFMKMGTKALNRLNDAHLPWGGPSALLGPPVQMLISSGNILTDTPRNNVSSDIWASCCLVKLIHKINHHSKIVDISSNTVSPWFTHLEKGNNNTGLLEFMSSQAKAVIKTTDDYLQSQFGPNRLVHSAAVSEGSGLQDCSTHQTASDHSHDEISDLDSYKSNSKNNSCSISASKRNRPVSAPVGQLRVAEFSSLKFQSARNWQKLSQRHKLQPRVIKVTAYKNGSRTVFARVTVPTITLLLEECTEKLNLNMAARRVFLADGKEALEPEDIPHEADVYVSTGEPFLNPFKKIKGKKDLKNTLPPHILNCLRGAIKK

SEQ ID NO: 916023 - protein, 157 aa, Homo sapiens
ESRENFEDMLLLDFCFNSILRQEYTFRKGLSGSPLPHIQSFLFNLCTVSTASKAATPVVPGPQLPEDLMLVSGAMWVDVKQPIWYDVHFLYSKQTAGGLPSYCLLTGKSARKSRMWWAMQDHRKTADVIEVENRTVITKDWGEEGRWENGERLVNRR

SEQ ID NO: 916024 - protein, 176 aa, Homo sapiens
SGHLGRRAEARLPSLLFRADGSHAEVRDERQSVFGKAVQALSRISDEFWLDPSKKGLALRCVNSSRSAYGCVLFSPVFFQHYQWSALVKMSENELDTTLHLKCKLGMKSILPIFRCLNSLERNIEKCRIFTRSDKCKVVIQFFYRHATWMELEVTMLSEISQAWKVKYCMFSQCGR

SEQ ID NO: 916025 - protein, 393 aa, Homo sapiens
SGHLGRRAEARLPSLLFRADGSHAEVRDERQSVFGKAVQALSRISDEFWLDPSKKGLALRCVNSSRSAYGCVLFSPVFFQHYQWSALVKMSENELDTTLHLKCKLGMKSILPIFRCLNSLERNIEKCRIFTRSDKCKVVIQFFYRHGIKRTHNICFQESQPLQVIFDKNVCTNTLMIQPRLLADAIVLFTSSQEEVTLAVTPLNFCLKSSNEESMDLSNAVHSEMFVGSDEFDFFQIGMDTEITFCFKELKGILTFSEATHAPISIYFDFPGKSDLIEKKAGKNVTGQALECISKKAAPRRLYPKETLTNISALENCGSPAMKRVDGDVSEVSESSVSNTEEVPGSLCLRKFSCMFFGAVSSDQQEHFNHPFDSLARASDSEEDMNNGSFSIF

SEQ ID NO: 916026 - protein, 185 aa, Homo sapiens
FPSFTMGFGTSQSQSDAPSRNPVCLCIPAVQADCAVLFVAGGWAEAGIFKNPQTHELALLANWRDVTQLIVIFNEIDSTEPAYSGSRLQVITKEVSACIKKIGYNWLPGLQSISSWHGDSMLEPSTDASVARVGRDSRGGGERTTPRTHLPSTSRRCPGSSAGRRTDAKACILLPSLESLGISQV

SEQ ID NO: 916027 - protein, 179 aa, Homo sapiens
MTCLQKGATHCGSSLSWELSRCWDDLLAERSYPLQISCKLYCCSIKHLFALLTLQLSAYLILPACGTRTWDPPNGGTKKADLVEQLNWPVLAHHPSPGNIREILNLEMDKAGQEDHFGESRQHGVLTCKWEREREYFSFEPSKSGVLDLLESLTSIPGSEECEDWYGTCQKNFTEEQEG

SEQ ID NO: 916028 - protein, 179 aa, Homo sapiens; identical to SEQ ID NO: 916027

SEQ ID NO: 916029 - protein, 706 aa, Homo sapiens
MVYVSCGELWINPDLSIAQQKKQIFLRNLESDIAKIQIFCSTHKIEEVQSDIVSGSKLAVHKPVAIFGEEKQVTEPEEKQMQEDPLTTENASSEILTVSSASTGIVPEDFGNLIMLVVTSNYDKHLGDQSVPENFIYSCSPKHSKLHKHCHQQFEYRDGQIISHAAPQLVLGVQGPNLRSGMEVVLVEKKSDGSHQRWIHQEDSRTFHLVSNPDLVLAVSMTKTRNEVCGYPVIVQKYKPYNNGAANQKWHYMKNIKALVAFHSTALDKEITSANYAGVCTSSVIKEENIDQPGYCYLSPDGKRKTMLCLACGQSMRTEKGLKQLLPGVPFLCISGTKTQKPFLQGPFKVISVAEVDLSCDKAEKTLSYYQARLLSLRMKTCTQAASHSGMAATHQKAVKIIAYKNGDGYRNGKLIVAGTFPMLLTECTEQLGLARAASKVYTKDGTPIFTLRDLVLWALDESFLQRDSEKQKQDAAPVGKEQIIVESMEENPRMKVKNRLFAKSVTSDSLDGIDKSLLTLILRNPIAIWVSCGEPFLPPNALQKAEKLEKQNWLKKDRILADLDTMRHKMRQLKGRRVAACQPATMVPTKSPVQPVVVEGGWTEQTQQEIKLMELIRHTEAHLSEIQEMESKINFPIATKRIAVKPSNLYKQPNTKRVWIYLNGGRPEDGTYAWGKTISEVSLLYLKTWIFIWSRKVFFYFLITA

SEQ ID NO: 916030 - protein, 414 aa, Homo sapiens
MFSSLITADGKRKTMLCLACGQSMRTEKGLKQLLPGVPFLCISGTKTQKPFLQGPFKVISVAEVDLSCDKAEKTLSYYQARLLSLRMKTCTQAASHSGMAATHQKAVKIIAYKNGDGYRNGKLIVAGTFPMLLTECTEQLGLARAASKVYTKDGTPIFTLRDLVLWALDESFLQRDSEKQKQDAAPVGKEQIIVESMEENPRMKVKNRLFAKSVTSDSLDGIDKSLLTLILRNPIAIWVSCGEPFLPPNALQKAEKLEKQNWLKKDRILADLDTMRHKMRQLKGRRVAACQPATMVPTKSPVQPVVVEGGWTEQTQQEIKLMELIRHTEAHLSEIQEMESKINFPIATKRIAVKPSNLYKQPNTKRVWIYLNGGRPEDGTYAWGKTISEVSLLYLKTWIFIWSRKVFFYFLITA

SEQ ID NO: 916031 - protein, 1181 aa, Homo sapiens
MQMKETQPKELEKMVIQTPMTLSPRWKSVLKDVQRSYEGKEFQRNLKTLENLPDEKEPISITPPPSLQYSLPGALPISGQPLTKCIHLTPQQAQEVGITLTPQQAQAQGITLTLQQAQELGIPLTPQQAQALEILFTPQQAQALGIPLTPQQTQVQGITLTPQQDQAPGISLTTQQAHKLGIPLTPQQAQALGIPLTPQQAQELGIPLTPQQAQALRVSLTPQQAQELGIPLTPQQAQALGITLTLQQAQQLGIPLTPQQAQALGITLTPKQVQELGIPLTPQQAQALGITLTPKQAQELGIPLNPQQAQTLGIPLTPKQAQALGIPFTPQQAQALGIPLTPQQAQTQEITLTPQQAQALGMPLTTQQAQELGIPLTPQHAQALGMPLTTQQAQELGIPLTPQQAQALGMPLTTQQAQELGIPLTPQQAQELGIPFTPQQAQAQEITLTPQQAQALGMPLTAQQAQELGITLTPQQAQELGIPLTPQQAQALGIPLIPPQAQELGIPLTPQQAQALGILLIPPQAQELGIPLTPQQAQALGIPLIPPQAQELGIPLTPQQVQALGIPLIPPQAQELEIPLTPQQAQALGIPLTPQQAQELGIPLTPQQAQELGIPLTPQQAQAQGIPLTPQQAQALGISLTPQQAQAQGITLTPQQAQALGVPITPVNAWVSAVTLTSEQTHALESPMNLEQAQEQLLKLGVPLTLDKAHTLGSPLTLKQVQWSHRPFQKSKASLPTGQSIISRLSPSLRLSLASSAPTAEKSSIFGVSSTPLQISRVPLNQGPFAPGKPLEMGILSEPGKLGAPQTLRSSGQTLVYGGQSTSAQFPAPQAPPSPGQLPISRAPPTPGQPFIAGVPPTSGQIPSLWAPLSPGQPLVPEASSIPGDLLESGPLTFSEQLQEFQPPATAEQSPYLQAPSTPGQHLATWTLPGRASSLWIPPTSRHPPTLWPSPAPGKPQKSWSPSVAKKRLAIISSLKSKSVLIHPSAPDFKVAQVPFTTKKFQMSEVSDTSEETQILRDTFAIESFRTFQSHFTKYRTPVYQTPYTDERALLTLMKPTTSPSSLTTLLRTSQISPLEWYQKSRFPPIDKPWILSSVSDTKKPKVMVPPSSPQELEEKRYFVDVEAQKKNLILLNQAIKTCGLPSQLHTMARTLIIEILHMDTVQLGYLFRKYIAYRLIQHAR

SEQ ID NO: 916032 - protein, 122 aa, Homo sapiens
MPKILSFQHVTHIKIIGEMHSYFSHTKFSKAGKLRHRGVDDPRYTLRTVAPTTVPLALLELVKRSLARVVPALHSEPCSRERPQCSKVLAKNVHSASAELEAHHFWMTFCERSVLYEILRAI

SEQ ID NO: 916033 - protein, 104 aa, Homo sapiens
MTAWSRVFLPTGITTPHSCERETSVFLMRFLSFGCFCANTANPGPTYKVMCFSCEFFKLLQIFKHFSNKFTEKNPHISGTPTSLNLCCSRVSYFYEVFSKVYGK

SEQ ID NO: 916034 - protein, 430 aa, Homo sapiens
MGIRAPASWDMLGSQLSPGTHGHSLSSLPLGVFSGKPRPAVLRLYLGEEPGSGRACLSSHWRKWGHRQAPRPPVLSLLSVGLLAEWGPISGFSDESGMLQAELLLTPGGALVCGELPLLGCLERARMCGVVSVAQASTLPAPASLLLRPGGLWGKGPVLMGSRTQSRMWGQNMKSLHRPLGSSHRSCFSCPNHLDTLLLPRLVPKVALIPPSRALSLPRASSPWPAPIPAPAHSCPAQGTSVPDPQRLLGVSLGRHGWVTPISHHSTGAFLVDSEVQTPVSSSRWGHRGFWEVDSAGGTIRRSAARPGLMCSGTDWGPPAWPLGPLSPSLQPPVVWRATKLMVCNPSHFFSKSVNPDLCGHRHHCQNQVKGSSLVHRAGPLLLLTGGSPDALGSYQPHPCLHRRAVCAPLTLLMTRGSPDTEARYHHAHP

SEQ ID NO: 916035 - protein, 140 aa, Homo sapiens
CKQPKAPTMEAQLRSLCLENTTERKHSRNVICEWADLSGKAIGADPRMQLSAELSLPDFKQLKKGWENIKAWTKTIMAHERREKVKGSVSPLLSNQVLGKEITSMLLEQLYFLQSTPSTPPPGGGAQIPRHGPRIICCFK

SEQ ID NO: 916036 - protein, 473 aa, Homo sapiens
MELKKSPDGGWGWVIVFVSFLTQFLCYGSPLAVGVLYIEWLDAFGEGKGKTAWVGSLASGVGLLASSKVWNHWFMSQAVGVIKSLMSGLMRGGEGKEASEVVSPVCEMEGSSVGLFIYAALQRMLVEFYGLDGCLLIVGALALNILACGSLMRPLQSSDCPLPKKIAPEDLPDKYSIYNEKGKNLEENINILDKSYSSEEKCRITLANGDWKQDSLLHKNPTVTHTKEPETYKKKVAEQTYFCKQLAKRKWQLYKNYCGETVALFKNKVFSALFIAILLFDIGGFPPSLLMEDVARSSNVKEEEFIMPLISIIGIMTAVGKLLLGILADFKWINTLYLYVATLIIMGLALCAIPFAKSYVTLALLSGILGFLTGNWSIFPYVTTKTVGIEKLAHAYGILMFFAGLGNSLGPPIVGWFYDWTQTYDIAFYFSGFCVLLGGFILLLAALPSWDTCNKQLPKPAPTTFLYKVASNV

SEQ ID NO: 916037 - protein, 213 aa, Homo sapiens
MYYNSLKICVEHQCQPCLHEPAPRVPGSSPSPITGWPLQTQARGPSPVPGKPLWIQAPPNEPRLQAHPPTDLGTRPAHQQLCQSVHTESIDRLSGEGLSLPKLISKVWRRCLCLPMCRYQHKATRIKNNRVGNDFQRGCINVSHNFGSREGVSVLRKEKAMGLEDGENTNRDIPRSVSLEGILLPSHGYDLTENETNVEESKDKRGESKRTRV

SEQ ID NO: 916038 - protein, 322 aa, Homo sapiens
MALRGVGNGNAGVGNGNAAEGDGMQQRKMGLQQREMECRNGKWEYSRERECRSGKWDCSKGRWNSAVGNGNAGMVNGIAAEGNGNAAEGDGMQAWEMEMQENGKMKQREMECSSGKWECWNGKWDCSRGKWECSRGRWNAGVGDGNAAEGDGMQEWEMGMQQREMECSRGRWNAGVGDGNAAEGNGMQQREMECSRGRWNAAEGDGMQQREMECRSGRWECSRGRWNAAEGDGMQQREMECSRGRWNAAEGNGMQQREMECRSGRWECRSGKWNAAKGKENALERHGNPTGENGTAEEENSHAAVENAAEGKATGSVGSLAS

SEQ ID NO: 916039 - protein, 322 aa, Homo sapiens; identical to SEQ ID NO: 916038

SEQ ID NO: 916040 - protein, 135 aa, Homo sapiens
MRNFRLTTDPSSHLPSFPNSIFAIPSNAEVELRESVEEKKREETGGQSKDTGPGAVTVLLPSFHPHVNNSKQDDSVKPASALPFKKTQPAFLLLVSLSCFFFEHSLIPVAGVVSKLQTDTNIRDLEIRSKFSRIP

SEQ ID NO: 916041 - protein, 151 aa, Homo sapiens
MFWKTGKLISLNEQNLVDCSGPQGNEGCNGGFMDNPFRYVQENGGLDSEASYPYEGKVKTCRYNPKYSAANDTGFVDIPSQEKDLAKAVATVGPISVAAGASHVSFQFYKKGIYFEPRCDPEGLDHAMLLVGYSYEGADSDNNKYWLVKNS

SEQ ID NO: 916042 - protein, 187 aa, Homo sapiens
MDASHTSLTNSRGLSGLLQQPNIGTLDSSLPKAQAPVTLHPAHSLTCLLNALSCLLKLLFLLSGPIYNSRLEDFFFYCSSMKQSFSSLPSLAGQLTSSNPISERSQLVGGRAWPPGELEKVRGCGAKVPFPPAPHGIRHRHESSSSLVLPKSGNRNRKDFEDLADIIEESSLANGEVPDAHTCWSHR

SEQ ID NO: 916043 - protein, 281 aa, Homo sapiens
MDKILEAVVTSSYPVSVKQGLVRRVLEAARQPLEREQCLALLALGARLYVGGAEELPRRVGCQLLHVAGRHHPDVFAEFFSARRVLRLLQGGAGPPGPRALACVQLGLQLLPEGPAADEVFALLRREVLRTVCERPGPAACAQVARLLARHPRCVPDGPHRLLFCQQLVRCLGRFRCPAEGEEGAVEFLEQAQQLWRAQPAAILPCLKELFAVISCAEEEPPSSALASMVQHLPLELMDGVVRNLSNDDSVTDSQMLTAISRAFLDSLPLVGKSVGSRGLL

SEQ ID NO: 916044 - protein, 138 aa, Homo sapiens
MERFLNSKARRLGSCSHPAFYLLCVPDEDTSCSTIYLPLKRRADPDQLFSDLLGGTQRLWSNRFGNEESFPGRVRALVDTFCWIARAPPLGNPLRLEERIAWRIQRLKSGQTALIEKKKQKIEEDVRHQCQQTTCDRC

SEQ ID NO: 916045 - protein, 156 aa, Homo sapiens
MERFLNSKARRLGSCSHPAFYLLCVPDEDTSCSTIYLPLKRRADPDQLFSDLLGGTQRLWRYSSNAQVSGMYNLLLISSNRFGNEESFPGRVRALVDTFCWIARAPPLGNPLRLEERIAWRIQRLKSGQTALIEKKKQKIEEDVRHQCQQTTCDRC

SEQ ID NO: 916046 - protein, 158 aa, Homo sapiens
MNVLRCSFKISARECYLARPLRIYLKIILLVTQYETYSLYLSLKMILLVTSQQRHEGQERQWSLQGSSHTQHTLRETKQKQKQTKKHTKKRFSLYYPQTSLHQRIKGHSLGLLRIFFDCILLMCVQGRYNTFVEGSRDIFYKFYPGFRTTFSDLCGHA

SEQ ID NO: 916047 - protein, 428 aa, Homo sapiens
MGKKIKKEVEPPPKDVFDPLMIESKKAATVVLMLNSPEEEILAKACEAIYKFALKGEENKTTLLELGAVEPLTKLLTHEDKIVRRNATMIFGILASNNDVKKLLRELDVMNSVIAQLAPEEEVVIHEFASLCLANMSAEYTSKVQIFEHGGLEPLIRLLSSPDPDVKKNSMECIYNLVQDFQCRAKLQELNAIPPILDLLKSEYPVIQLLALKTLGVIANDKESRTMLRDNQGLDHLIKILETKELNDLHIEALAVIANCLEDMDTMVQIQQTGGLKKLLSFAENSTIPDIQKNAAKAITKAAYDPENRKLFHEQEVEKCLVALLGSENDGTKIAASQAISAMCENSGSKDFFNNQGIPQLIQLLKSDNEEVREAAALALANLTTCNPANAKVPFSNNARNCVFILTPSGRLGGRWGRGKKGNGRMVL

SEQ ID NO: 916048 - protein, 398 aa, Homo sapiens
IASFSRMGKKIKKEVEPPPKDVFDPLMIESKKAATVVLMLNSPEEEILAKACEAIYKFALKGEENKTTLLELGAVEPLTKLLTHEDKIVRRNATMIFGILASNNDVKKLLRELDVMNSVIAQLAPEEEVVIHEFASLCLANMSAEYTSKVQIFEHGGLEPLIRLLSSPDPDVKKNSMECIYNLVQVFIANDKESRTMLRDNQGLDHLIKILETKELNDLHIEALAVIANCLEDMDTMVQIQQTGGLKKLLSFAENSTIPDIQKNAAKAITKAAYDPENRKLFHEQEVEKCLVALLGSENDGTKIAASQAISAMCENSGSKDFFNNQGIPQLIQLLKSDNEEVREAAALALANLTTCNPANAKVPFSNNARNCVFILTPSGRLGGRWGRGKKGNGRMVL

SEQ ID NO: 916049 - protein, 318 aa, Homo sapiens
MTATHGEMRVQIGTQQLDLEQQDLQQLDWEQQGLQQLDREQQDLQQLDREHQDLQQLDREQQGLQQLDWEQKFVLEIPTLLFPGSISSRLDLWPLENRQRAALEDPGSQWWLRSWFLVITEQHWPGLVGSDLASQSAEGEEEDGPHPSAGNTMAVGWVPASRQGHLLHQGNMHFRSEEAEGRAQWRAEPWKEQQGLQQLDWQHTGTQQLDWQQQGLQQLDWQQDPQPEEQQQGLQQLHWEQPQEPQPPLEPPQEPQPPLEPPQEPQPPLEPPQEPQSPLEPPQEPQLEQEQAGTQQHTGLQQQTGTQQLEPQPPQPEP

SEQ ID NO: 916050 - protein, 237 aa, Homo sapiens
QKSMTVSDHIGNMAQSDFLYPENPKRREEVNRLHQQLLDCLSDSFDVTNKLTEVLNMHLGCRLASIEMKRDGTIKENCDLIIQAIMKIQKELQKVDEALKDKLEPTLYRKLQDIKEKETDKIAIVQKVISVILGEATSAASAVAVKLVGSNVTTGIINKLVTVLAQIGASLLGSIGVAVLGLGIDMIVRAILGAVEKTQLQAAIKSYEKHLVEFKSASEKYNHAITEVINTVKHQMK

SEQ ID NO: 916051 - protein, 358 aa, Homo sapiens
RPPESAALGGLGPGLCCWVSVFSCLSLACSYVGSLYVWKSELPRDHPAVIKRRFTSVLVVSSLSPLCVLLWRELTGIQVRRRRGKGNGGESSGVFRGGSKTDAPFPVAQPGTSLLTLMGFRLEGIFPAALLPLLLTMVSAPAVFFLLVFVISLMGSAVDSCFWFLVDGRQDFEMAPGSSAPRSWARCLTDMRWLRNQVIAPLTEELVFRACMLPMLAPCMGLGPAVFTCPLFFGVAHFHHIIEQLRFRQSSVGNIFLSAAFQFSYTAVFGAYTAFLFIRTGHLIGPVLCHSFCNYMGFPAVCAALEHPQRRPLLAGYALGVGLFLLLLQPLTDPKLYGSLPLCVLLERAGDSEAPLCS

SEQ ID NO: 916052 - protein, 325 aa, Homo sapiens
AARVGGAGRPGPRAVLLGVSVLLPQPRLLLRGQPLRLEERTAQGPSRGHQATLHQRPGGVQSLTPVRAALEGTHRHPGTSLLTLMGFRLEGIFPAALLPLLLTMVSAPAVFFLLVFVISLMGSAVDSCFWFLVDGRQAFEMAPGSSAPRSWARCLTDMRWLRNQVIAPLTEELVFRACMLPMLAPCMGLGPAVFTCPLFFGVAHFHHIIEQLRFRQSSVGNIFLSAAFQFSYTAVFGAYTAFLFIRTGHLIGPVLCHSFCNYMGFPAVCAALEHPQRRPLLAGYALGVGLFLLLLQPLTDPKLYGSLPLCVLLERAGDSEAPLCS

SEQ ID NO: 916053 - protein, 504 aa, Homo sapiens; identical to SEQ ID NO: 769574

SEQ ID NO: 916054 - protein, 130 aa, Homo sapiens
MGSVACTLLKPWAWVRSLGDLREKRGNRPEHFQGLTAGREERSLSKREGEPLPRDVWVLEVHRVLEVHRLERTEEAETEYVSGLTESIQEMGESHKIELRKECCALTEELGKMGSGALQEEVLPPCMHVY

SEQ ID NO: 916055 - protein, 331 aa, Homo sapiens
MRARLSKEGTLIFFSLSHSLSCVCRETGKHGGGTRRCVATGAQVSSTRAGVRSRRSCTAPPRRSKARRDQINAEIRNLKELLPLAEADKVRLSYLHIMSLACIYTRKGVFFAGGEHAGATADPSCQAPETLELREPAGAGSPVAFGALPMVLTAAGPPLAGPTGLLSAQELEDIVAALPGFLLVFTAEGKLLYLSESVSEHLGHSMVDLVAQGDSIYDIIDPADHLTVRQQLTLPSALDTDRLFRCRFNTSKSLRRQSAGNKLVLIRGRFHAHPPGAYWAGNPVFTAFCAPLEPRPRPGPGPGPCPASLFLAMFQSRHAKDLALLDISESG

SEQ ID NO: 916056 - protein, 200 aa, Homo sapiens
MTPTAEKQLEKPLENGSELQEGDSLTVPTKLSQYERQGEIKTSLHGKPKTDIAAFENGVNDVQPVKKPHFKGVKKRKWIYDEPQNFPNSGMQRAVQAPRPQNKMSYHRNNKNRNAENASYIHVQRDAVRTVALNAPSRSRPTHGSYNKVHANREPKPNLSPDKYTSTSYNDSAWRKRIPFSKTYSKSEKIYPEPRRNGSK

SEQ ID NO: 916057 - protein, 150 aa, Homo sapiens
MDLLRDLLSDMKYLGYPKFTSKPKRRAYRIKQLPQYLHYPLFFYSGPDFVLSDWYFPKHTSKLPWRNALGYCLTSHICPGAHHHLLQPKVKCINLSQQDVDRSASVKDARGAIQRVPPISVCVHPLNWNLLHKGISQVTSRPTKISLLRC

SEQ ID NO: 916058 - protein, 183 aa, Homo sapiens
MRDTSLFISDWLMQVTVYFLSPYDEMGTGSSCVAGGLVQVLDFAAQKKSYFESESNVKVSKRGYCKVNVHSDSRSEWAAQRYCPCDQHSQKDVGFPGQEVTCAMSSLSPDVPADSSGAWRVTRTPSNILSLLHMGPQAQQREPRDGGVHLLTPQPPPPPSDSPEDLWALLLTGSRLLAFSSSW

SEQ ID NO: 916059 - protein, 161 aa, Homo sapiens
HPSITSLFCRSQVQLGMAAAYFAQDVRGKRQGIGWFKFLSEGSGGIPNSKSIQVVCMIWFLSVKELVPRSSSASINVEVTLCCDAFFMSVYSHKNRAFQKRRLSLSYLQFSPQCLGCLAHGRFSIFPSDGLKVWHFLPHSLSLSCCIVKKLLASLSPSAVS

SEQ ID NO: 916060 - protein, 161 aa, Homo sapiens; identical to SEQ ID NO: 916059

SEQ ID NO: 916061 - protein, 161 aa, Homo sapiens; identical to SEQ ID NO: 916059

SEQ ID NO: 916062 - protein, 161 aa, Homo sapiens; identical to SEQ ID NO: 916059

SEQ ID NO: 916063 - protein, 161 aa, Homo sapiens; identical to SEQ ID NO: 916059

SEQ ID NO: 916064 - protein, 161 aa, Homo sapiens; identical to SEQ ID NO: 916059

SEQ ID NO: 916065 - protein, 161 aa, Homo sapiens; identical to SEQ ID NO: 916059

SEQ ID NO: 916066 - protein, 161 aa, Homo sapiens; identical to SEQ ID NO: 916059

SEQ ID NO: 916067 - protein, 161 aa, Homo sapiens; identical to SEQ ID NO: 916059

SEQ ID NO: 916068 - protein, 197 aa, Homo sapiens
MVKEGRNGGPKTAADGLEGTTAMPEVKAARMAMSIRRKHGHSEACADPILRELPASSKHSINAVGRVKQTVLTRYSGAIFGFSSNLAGTRKTNPDEVGMKEKNLGATQVPERTKSAGSKIIEEGFREEMREKDKQSFERQAEGCHETGKQQAQGEEEARQSPREDQAQGGDPTSGSAGTGSEGEATALWMAASRWMI

SEQ ID NO: 916069 - protein, 132 aa, Homo sapiens
PHRFAGGRESVPELILLQEEKVRFQLNLTIQILLKQGQVELENFQLVLEYSDAILINKNIIEDLNSVIRTQGQKKVASMMESKDVHKRILQIEWEHKKMEMEREDLNQKAWDIQMLFFSRDRQKVNSPYPPT

SEQ ID NO: 916070 - protein, 318 aa, Homo sapiens
MIVEVVGQNSVVTYEAVRKSREDLDVCKEHYDNLLAEDKVKQKAADLLEMATFLQKRVEEEEKVQQEIERVFHELILLQEEKVRFQLNLTIQILLKQGQVELENFQLVLEYSDAILINKNIIEDLNSVIRTQGQKKVASMMESKDVHKRILQIEWEHKKMEMEREDLNQKAWDIQMLFFSRDRQKYLNEPNYEALISIQIGIMEQTIAVLDKMHKKNVENCKKLLKKLGKFSNQKDIANYALSCNLREELVAVSERKDICNAMGSKLTCEKIVKERYENMMQQQKLTNISKQQAEQISILQTEVERLRMKTFPALVQM

SEQ ID NO: 916071 - protein, 117 aa, Homo sapiens
MCPKANGQLVFDDPRLVRTESVPCDINNPLRKPPRYSDLHISQTLPKTNKINKDHIPVPYQPDSSSNPSSTTSSTPSSPAPPLPPSATPPSPLHPSPQCTRQQKNFNLPGTSMLGET

SEQ ID NO: 916072 - protein, 788 aa, Homo sapiens
NFGKNGLSGMEPRTGSQCINRKVVYSLADSAGGVFSIDSSSGIIILEQPLDREQQSSYNISVRATDQSPGQSLSSLTTVTITVLDINDNPPVFERRDYLVTVPEDTSPGTQVLAVFATSKDIGTNAEITYLIRSGNEQGKFKINPKTGGISVSEVLDYELCKRFYLVVEAKDGGTPALSAVATVNINLTDVNDNPPKFSQDVYSAVISEDALVGDSVILLIAEDVDSQPNGQIHFSIVNGDRDNEFTVDPVLGLVKVKKKLDRERAVDSGIPAMSSTATVNIDISDVNDNSPVFTPANYTAVIQVLSVLYFSVFLGAESPTLGGSGNLAQENCQCRGLREDRVICMTWRATGGCGKQPKIRNMTLTDTNMFSEDKENKPVGTSILQLVVTDRDSFHNGPPFSFSILSGNEEEEFVLDPHGILRSAVVFQHTESLEYVLCVQAKDSGKPQQVSHTYIRVRVIEESTHKPTAIPLEIFIVTMEDDFPGGVIGKIHATDQDMYDVLTFALKSEQKSLFKVNSHDGKIIALGGLDSGKYVLNVSVSDGRFQVPIDVVVHVEQLVHEMLQNTVTIRFENVSPEDFVGLHMHGFRRTLRNAVLTQKQDSLRIISIQPVAGTNQLDMLFAVEMHSSEFYKPAYLIQKLSNARRHLENIMRISAILEKNCSGLDCQEQHCEQGLSLDSHALMTYSTARISFVCPRFYRNVRCTCNVKAIAAQSHMPVVIDEKHCPLSLFLRLTCGAINSLPPSKKIAARVFLASVNLVQRDHGQREAICKTSFSVQYSSMLYKPVA

SEQ ID NO: 916073 - protein, 666 aa, Homo sapiens
MKRYSLAVGPPKKDPKVKGVQSAAVQAFLKRKEEELRRKALEEKRRKEELVKKRIELKHDKKARAMAKRTKDNFHGYNGIPIEEKSKKRQATESHTSQGTDREYEMEEENEFLEYNHAESEQEYEEEQEPPKVESKPKVPLKSAPPPMNFTDLLRLAEKKQFEPVEIKVVKKSEERPMTAEELREREFLERKHRRKKLETDGKLPPTVSKKAPSQKESVGTKLSKGSGDRHPSSKGMPLPHAEKKSRPSMANEKHLALSSSKSMPGERIKAGSGNSSQPSLREGHDKPVFNGAGKPHSSTSSPSVPKTSASRTQKSAVEHKAKKSLSHPSHSRPGPMVTPHNKAKSPGVRQPGSSSSSAPGQPSTGVARPTVSSGPVPRRQNGSSSSGPERSISGSKKPTNDSNPSRRTVSGTCGPGQPASSSGGPGRPISGSVSSARPLASSRGPGGPVSSPHELRRPVSGLGPPGRSVSGPGRSISGSIPAGRTVSNSVPGRPVSSLGPGQTVSSSGPTIKPKCTVVSETISSKNIISRSSNGQMNGMKPPLSGYRAAQGPQRLPFPTGYKRQREYEEEDDDDDEYDSEMEDFIEDEGEPQEEISKHIREIFGYDRKKYKDESDYALRYMESSWKEQQKEEAKSLRLGMQEDLEEMRREEEEMQRRRAKKLKRR

SEQ ID NO: 916074 - protein, 303 aa, Homo sapiens
TRLKSQQTPKENIILFSVFMRSVFSHFMYRTLLYSFNICTFGLLSGTSFQYQDQMKYFSLHLINYINHCFFLSSFFLNAAGFSHMSNRLRVCLFLFKNEGWGSGIGISSDILVSSTDVQIGYSTKRKFCMLVVCLSCYNITSTRTGNLPVLFTVIPTPLPRKCLEIEELSKYFLEQKPQSFMNSQSIPFCDNRVEKNFLWVCNPIPAQKGCHHLTKREDQDRRTISQWFSLVCCQQNQNHLEAGDMDGLGSHYPQETHARTENQPLHVLTYKWELNDENIWMHQGEQDTLGPVGAWEEEEHQE

SEQ ID NO: 916075 - protein, 199 aa, Homo sapiens
LLQIKNIRLGAFEKCRLHLAVLPLPSSLGPVSSCGDTWLSPSSPWQTQMGLAVVAFFDFPQAPEQPHLLRGSHLVWLQGHGQRRGQRLLSMGVVPLALPSAGLPVEEAWLASETNSLSSAPCKPCGWKFVSTSTQVLAAWVLPWRESCWASMVFRGASLGCEEPGLGKSSRGWDESEQSFREATQGSAAYTDRRAPGHP

SEQ ID NO: 916076 - protein, 148 aa, Homo sapiens
MINVSNKYCGGTDDRLHWQGEGIREGFGRQQPLYRRPGQIHMAPFGAWMSGKLPAKEERSDKEQGLQNQVNLGVNFSPTTFYLWTDHPSNHSLISKCRYSTYAVPDAVTASLFEKEEELAKGDGREMPRILQEEGECSLTCWKDSGDV

SEQ ID NO: 916077 - protein, 145 aa, Homo sapiens
SITPMPSATKSFSGQGVVFRTQDPGPRTHHPFFWPRVAWMCVGSLDLHCKFLLQLLCFCHLRGTTTSPGPEILTITALFMMGVVDPLEPKTRTDMRDLYQLKVSPRSSLVRSCHAGPSTIWIPTTQGIEHCTFQKHLFLRGYTTS

SEQ ID NO: 916078 - protein, 152 aa, Homo sapiens
TEAGAAKMKFNPFVTSDRSKNRKRHFNAPSHIRRKIMSSLLSKELRQKYNERSMPIRKDDEVQVVRGHYEGQQIGKVVQVYRKKYVIYIEWVQREKANGTTVHIGIHSSKVVITRLKLDKDSKKILERKAKSRQVGKEKGKYKEETIEKMEE

SEQ ID NO: 916079 - protein, 173 aa, Homo sapiens
TEAGAAKMKFNPFVTSDRSKNRKRHFNAPSHIRRKIMSSLLSKELRQKYNERSMPIRKDDEVQVVRGHYEGQQIGKVVQVYRKKYVIYIEWVQREKANGTTVHIGIHSSKVVITRLKLDKDSKKILERKAKSRQVGKEKGKYKEEDPERKAKSRQVGKEKGKYKEETIEKMEE

SEQ ID NO: 916080 - protein, 359 aa, Homo sapiens
MGSQCPATLREIAGAEGPILVWVPFSMIDIQQCKEKLGSYSEDSGKFADGFQTLTLAFDLSWRDVQFTLATCCTSSEKERIFEAALREVDELFTQNRKLLMAQRFISQSTPDIRRKLQKLHMGPQTNQNQLLGTAFMVYNNRDLEEGEGKQSKEKRQAKIMLAITGDALNAQRLSKGNSKGHKDNASKGSCFKCNKSAIGHRNPLSPRQSPAVNVKAPVVAPGPGELTVPAPTKGLKIKGHIWMTGEMLTKYQPMLLDNPDITLKTCNTLNPASLLPTGPIIDHSCEQVIAHTYVSQPDLKDEALPDSEADRLTDGSSSLSNGEHRAGYAAVNHDTIIEAQPVGSKVTPEKANEVLRSS

SEQ ID NO: 916081 - protein, 245 aa, Homo sapiens
MDKNELVQKAKLAEQAERYDDMAACMKSVTEQGAELSNEERNLLSVAYKNVVGAHRSSWRVVSSIEQKTEGAEKKQQMAREYREKIETELRDICNDVLSLLEKFLIPSASQAESKVFYLKMEGDYYRYLAEVAAGDDKKGIVDQSQQAYQEAFEISKKEMQPTHPIRLGLALNFSVFYYEILNSPEKACSLAKTAFDEAIAELDTLSEESYKDSTLIMQLLRDNLTLWTSDTQADEGEAGEGTQL

SEQ ID NO: 916082 - protein, 380 aa, Homo sapiens
MSSTASSLACLVGVISDVIYSILIGDVLYGVLISDVVYSVLVSNALYSVLVSNVIYSVLISDGLYTVLISDVVYSILVSVPCTVSLAMSYTAALIGDVLYGAVISDVVYSVLVSDGLYGVLVSDVVYSVLITDALYGVLISDVVYSVLVSVPCTVSLVMSYTAPSLAMSYTESSLAMSCTVSADVIYNVLITDALYGVLISDVVYSVLVSVPCTVSLAMSYTAPSLAMSYTESSLAMSCTVSTLACLVGAISNVSVLVSDVIYNVLITNALYGVLISDVVYSVLVSVPCTVSLAMSYMASSLAMSDAVHGILVSNAVGSVLLGDAVGGVLLGDALDGVLVGDALGGVLVGDALGGVLVGDALVGGLVSDAVDSVLVSDIV

SEQ ID NO: 916083 - protein, 237 aa, Homo sapiens
AGRWLRRPPAPRRKRRAEGRGRRRPGGRHRAAGQAYRGSQFGSAAEMLSEQTAALGTGWESMNVQLDGAEPQVERGSQEERPWRTVPGPLEHLCCDLEEEPQSLQEKAQSAPWVPAIPQEGNTGDWEMAAALLAAGSQVSSASLGVSCGPITAAFVLLSHQPIDELAHMIINGPGNHQGCVTVLLSGGVAEPGPLSDRLLWRICHAGKLWDSSLSEISNSQTGHAFSTRRRRRTMGP

SEQ ID NO: 916084 - protein, 301 aa, Homo sapiens
AGRWLRRPPAPRRKRRAEGRGRRRPGGRHRAAGQAYRGSQFGSAAEMLSEQTAALGTGWESMNVQLDGAEPQVERGSQEERPWRTVPGPLEHLCCDLEEEPQSLQEKAQSAPWVPAIPQEGNTGDWEMAAALLAAGSQGLVTIKDVSLCFSQEEWRSLDPSQTDFYGEYVMQENCGIVVSLRFPIPKLDMLSQLEGGEEQWVPDPQDLEERDILRVTYTGDGSEHEGDTPELEAEPPRMLSSVSEDTVLWNPEHDESWDSMPSSSRGMLLGPPFLQEDSFSNLLCSTEMDSLLRPHTCPQC

SEQ ID NO: 916085 - protein, 138 aa, Homo sapiens
MGHHSGDNASEAQAPVSTSPLLSAYMHICFPRSLLKTFLGPTFSLSFNFNHLPFPLLPNFLKEYSVLAASTSLFTPSTAIWQRSLPTSIEIAQSTVSHGILTAKSNGLFQRSSTSSSLITLLTGDEKNVGQSLSRELA

SEQ ID NO: 916086 - protein, 292 aa, Homo sapiens
MGLGLIQLLQLSVLSDLIHLQLSVLSDLINLQLSVLWDLIHLLQLAVLPDLIYLQLSVLRDLIHLLQLSLSVLWDLIHLLQLAVLPDLIYLPLSVLQDLIHLLQLSVLQDLIHLLQLSLSVLPDLIYLQLSVLRDLIHLLQLAVLPDLIYLQLSVLRDLIHLLQLSVLRDLIHLQLSVLWDLIHLLQLSVLRDLIHLQLSVLWDLIHLLQLAVLPDLIYLQLSVLQDLIHLLQLSVLRDLIDLQLSVLWDLIHLLQLSVLPDIIHLQLSVFWDLIHLLQLVVLSDLIHLLHQ

SEQ ID NO: 916087 - protein, 366 aa, Homo sapiens
VKCFKDAIFIWGSQFQLPTLHMGITIQEPDKWTVLKPQVYWETGAQITSPHDKEILKCIEECVEPWNGSWNDNLVDTSPLKRDPLQDICRRYMEDLKKICFYRVKLFNPFVRFILAIFNYFGASLEKEHIWVQQDLGYWRVKVARLTYKKETLPGFKWIGSRIIDLLENGKEVLFAFEESIGFLCGTSVLDKDGVSAAVVVAEMASYLETMNITLKQQLVKVYEKYGYHISKTSYFLCYEPPTIKSIFERLRNFDSPKEYPKFCGTFAILHVRDVTTGYDSSQPNKKSVLPVSKNSQMITFTFQNGCVATLRTSGTEPKIKYYAEMCASPDQSDTALLEEELKKLIDALIENFLQPSKNGLIWRSV

SEQ ID NO: 916088 - protein, 366 aa, Homo sapiens; identical to SEQ ID NO: 916087

SEQ ID NO: 916089 - protein, 163 aa, Homo sapiens
FSLYVKIMWSQLGQPDIWIVGFIRGSLAVLCHNHLIKGCLVHPASQKWSPEKKMPSFVLVLSSLELEYHGGPTEECKGWGGRHSFSRCLLSTCYMPGYALGVREIMGNKKLEEFAITEHTFLECLRKRYWLKTVWAGQKMIVAFFFITNPDPKTSMGGWGMSY

SEQ ID NO: 916090 - protein, 435 aa, Homo sapiens
MNSRGSMGVGPSESCTGYNLLVCRLLRPLEKRSIRIGNVCWELYCLEHGIQPDGQMPSDKTIGGGDDSFNTFSETGAGKHVPRAVFVDLEPMVIDEVCTGTYRQLFHPEQLITGKEDAANNYARGHYTIGKEIIDLVLDRIRKLANQCTGFQGFLVFHSFGGGTGSGFTSLLIERLLVDYGKKSKLEFSNYPAPQVSTAVVEPYNSILTTHTTLEHSDCAFMVDNEAICDICCRNLNIERPTYTNLNHLISQIVSSITASLRFDGALNVDLTEFQTNLVPYSHIHFPLATYAPVISAEKAYHEQLSVAEITNASFEPANQMVKCDPRHGKYMACCLLCHGDVVPKDANAAIATIKTKRSIQFVDWCPTGFKAWARLDHKFDLMYAKRAFVHWYVGEGMEEGEFSEAREDMAALEKDYEEVGVDSVEGEEAEDEGK

SEQ ID NO: 916091 - protein, 368 aa, Homo sapiens
MSWHTSGMGGCPGLASSSPASSWPARASPWARAWRQSWKTSGPSSSSSLSCGGIVTAEDLNNYCAELIEHPLNISLGDAVLYMPSARLSGPVLALILNILKGYNFSRESVETPEQKGLTYHRIVEAFRFAYAKRTLLGDPKFVDVTEASSGVSAGGPNMTSEFFAAQLRSQISDHTTHPISYYKPEFYTLDDGGTAHLSVVAEDGSAVSATSTINLYFGSKVCSPVSGILFNNEVDDFSSPSITNEFGAPPSPANFIQPGKQPLLSMCPTIMVGQDGQVRMVVGAAGGTQITTDTALVCVTPFLPGPAHSAQPPSHADHTPMPQAIIYNLWFGYDVKRAVEEPRLHNKLLPNVTTVERNIDQLHLDAD

SEQ ID NO: 916092 - protein, 139 aa, Homo sapiens
MHPASLYKRGRETSPISTSQKMGNRITQGMARNDQRESSSSVQHALPAPFWKRTDLIDLTKTRIVFRQRKSKEQTRGSDHQRLHLLGNVAALLEEELDHDGQCLEVKKHLLPWKGLVRAIIVTGHVFSLTISWNFRVTK

SEQ ID NO: 916093 - protein, 142 aa, Homo sapiens
MLSGTELGRRPRETEAEIGGKWLQAKECLEPPDDEEGSPHKVWCSGPWGGQPLLKRGRLRPRDHFRPSLAAPRLGAADSSNSGQCLHLRPHLQAFPLVLPALHPPCSVRHCPPSSDWLPARQALVRAGVGSPAMPRVWVLRR

SEQ ID NO: 916094 - protein, 175 aa, Homo sapiens
MQNNLAFSLFFPLLPDSALHGGWGFSYLQPKKKKKKNKEEEEDEEEEEGRRRRGRRRRRKKKKRKRKRKKKKKKKRKQQQQKQQQQQQQLEGPLSFPKPYHYLESLLGIRTIEEGALTSNFSRVIKTKENLIFDLTRLKRAKQEKERRGGGGDREVEIKKKQKSWRRERIKAWEF

SEQ ID NO: 916095 - protein, 175 aa, Homo sapiens; identical to SEQ ID NO: 916094

SEQ ID NO: 916096 - protein, 505 aa, Homo sapiens
LTGNMSGRARVKARGIARSPSATEVGRIQASPLPRSVDLSNNEASSSNGFLGTSRISTNDKYGISSGDAGSTFMERGVKNKQDFMDLSICTREKLAHVRNCKTGSSGIPVKLVTNLFNLDFPQDWQLYQYHVTYIPDLASRRLRIALLYSHSELSNKAKAFDGAILFLSQKLEEKVTELSSETQRGETIKMTITLKRELPSSSPVCIQVFNIIFRKILKKLSMYQIGRNFYNPSEPMEIPQHNADVSYKVLRNETVLEFMTALCQRTGLSCFTQTCEKQLIGLIVLTRYNNRTYSIDDIDWSVKPTHTFQKRDGTEITYVDYYKQQYDITVSDLNQPMLVSLLKKKRNDNSEAQLAHLIPELCFLTGLTDQATSDFQLMKAVAEKTRLSPSGRQQRLARLVDNIQRNTNARFELETWGLHFGSQISLTGRIVPSEKILMQDHICQPVSAADWSKDIRTCKILNAQSLNTWLILCSDRTEYVAESFLNCLRRVAGSMGFNVDYPKM

SEQ ID NO: 916097 - protein, 511 aa, Homo sapiens
SWAPGESVRGADAQEGAEDARRVGGWVGPEPLKAEPPPALAIPELSRRRRWLLPDPEFPLSLDGAELWAARAAQLSGDRCTLSSLGKTQRRLGIFLGGRGPAPRRHHVPGDPVLRAAALGFWALSARRPLTMAGLPRAQRAPGAQSAAALLLGKRLSFSRAERVAGAGGGPGARVVAQARMPRGGGPTGRENGLPDGREVDPLPEQGAPEGWSSIPDPGARPRPEQGRPGSPPAALRLPPLCPADLLLSAEVSGGDRLDCVKASDQCLKEQSCSTKYRTLRQCVAGKETNFSLASGLEAKDECRSAMEALKQKSLYNCRCKRGMKKEKNCLRIYWSMYQSLQGTTAAGVCWADQHCWACCWKTHEEDGGWGEGHPRDPADLSETWSEHGRRIPLKGPKEPTTSFQGEPAWGFRWPLNNNRKACPASGNDLLEDSPYEPVNSRLSDIFRVVPFISGAWNMKRAGGHTGESAPVQEDVGGEAGTQKCPRIPEGRAVWALRGSEAEATVSGNKN

SEQ ID NO: 916098 - protein, 405 aa, Homo sapiens
MFLATLYFALPLLASGHSPPGGPLTMAGLPRAQRAPGAQSAAALLLGKRLSFSRAERVAGAGGGPGARVVAQARMPRGGGPTGRENGLPDGREVDPLPEQGAPEGWSSIPDPGARPRPEQGRPGSPPAALRLPPLCPADLLLSAEVSGGDRLDCVKASDQCLKEQSCSTKYRTLRQCVAGKETNFSLASGLEAKDECRSAMEALKQKSLYNCRCKRGMKKEKNCLRIYWSMYQSLQGTTAAGVCWADQHCWACCWKTHEEDGGWGEGHPRDPADLSETWSEHGRRIPLKGPKEPTTSFQGEPAWGFRWPLNNNRKACPASGNDLLEDSPYEPVNSRLSDIFRVVPFISGAWNMKRAGGHTGESAPVQEDVGGEAGTQKCPRIPEGRAVWALRGSEAEATVSGNKN

SEQ ID NO: 916099 - protein, 765 aa, Homo sapiens
MACKQKFIILLNHPRLQGEKELGELGQLQTQASDTSVVLSMDNNRYLDFSSIITEVRARYEEIARSSKAEAEALYQTKYQELQVSAQLHGDRMQETKVQISQLHQEIQRLQSQTENLKKQNASLQAAITDAEQRGELALKDAQAKVDELEAALRMAKQNLARLLCEYQELTSTKLSLDVEIATYRRLLEGEECRMSGECTSQVTISMRSSVSRQTYSTKGGFSSNSASGGSGSQARTSFSSVTVSRSSGSGGGAHCGPGTGGFGSRSLYNLGGHKSISVSVAGGALSGRALGGFGFGSRAFMGQGAGRQTFGPACPPGGIQEVTVNQSLLTPLHVEIDPEIQRVRTQEREQIKTLNNKFASFIDKVRFLEQQNKVLETKWALLQEQGQNLGVTRNNLEPLFEAYLGSMRSTLDRLQSERGRLDSELRNVQDLVEDFKNKYEDEINKHTAAENEFVVLKKDVDAAYMGRMDLHGKVGTLTQEIDFLQQLYEMELSQVQTHVSNTNVVLSMDNNRNLDLDSIIAEVKAQYELIAQRSRAEAEAWYQTKYEELQVTAGKHGDNLRDTKNEIAELTRTIQRLQGEADAAKKQCQQLQTAIAEAEQRGELALKDAQKKLGDLDVALHQAKEDLTRLLRDYQELMNVKLALDVEIATYRKLLESEESRWWPLLPDPESWVGPALGESPGSLLRAVTGNSTTVCGGGAASFGGGISLGGSGGATKGGFSTNVGYSTVKGGPVSAGTSILRKTTTVKTSSQSPHIQSARKIHT

SEQ ID NO: 916100 - protein, 444 aa, Homo sapiens
AARRGAAGRGPRAMAAELAMGAELPSSPLAIEYVNDFDLMKFEVKKEPPEAERFCHRLPPGSLSSTPLSTPCSSVPSSPSFCAPSPGTGGGGGAGGGGGSSQAGGAPGPPSGGPGAVGGTSGKPALEDLYWMSGYQHHLNPEALNLTPEDAVEALIGSGHHGAHHGAHHPAAAAAYEAFRGPGFAGGGGADDMGAGHHHGAHHAAHHHHAAHHHHHHHHHHGGAGHGGGAGHHVRLEERFSDDQLVSMSVRELNRQLRGFSKEEVIRLKQKRRTLKNRGYAQSCRFKRVQQRHILESEKCQLQSQVEQLKLEVGRLAKERDLYKEKYEKLAGRGGPGSAGGAGFPREPSPPQAGPGGAKGTADFFLYGAGPRARAAVAGDKFAQASRGLGSDSAVQDVDTRPGPAVLAPVPSLRARGWRPLRSRSPFARVGPGRRPEPPFPCLF

SEQ ID NO: 916101 - protein, 448 aa, Homo sapiens
AARRGAAGRGPRAMAAELAMGAELPSSPLAIEYVNDFDLMKFEVKKEPPEAERFCHRLPPGSLSSTPLSTPCSSVPSSPSFCAPSPGTGGGGGAGGGGGSSQAGGAPGPPSGGPGAVGGTSGKPALEDLYWMSGYQHHLNPEALNLTPEDAVEALIGSGHHGAHHGAHHPAAAAAYEAFRGPGFAGGGGADDMGAGHHHGAHHAAHHHHAAHHHHHHHHHHGGAGHGGGAGHHVRLEERFSDDQLVSMSVRELNRQLRGFSKEEVIRLKQKRRTLKNRGYAQSCRFKRVQQRHILESEKCQLQSQVEQLKLEVGRLAKERDLYKEKYEKLAGRGGPGSAGGAGFPREPSPPQAGPGGAKGTADFFLYGAGPRARAAVAGDKFAQASRGLGSDSAVQDVDTRPGPAVLAPVPSLRARGWRPLRSRSPFARVGPGRRPEVERRTVISKET

SEQ ID NO: 916102 - protein, 339 aa, Homo sapiens
AARRGAAGRGPRAMAAELAMGAELPSSPLAIEYVNDFDLMKFEVKKEPPEAERFCHRLPPGSLSSTPLSTPCSSVPSSPSFCAPSPGTGGGGGAGGGGGSSQAGGAPGPPSGGPGAVGGTSGKPALEDLYWMSGYQHHLNPEALNLTPEDAVEALIGSGHHGAHHGAHHPAAAAAYEAFRGPGFAGGGGADDMGAGHHHGAHHAAHHHHAAHHHHHHHHHHGGAGHGGGAGHHVRLEERFSDDQLVSMSVRELNRQLRGFSKEEVIRLKQKRRTLKNRGYAQSCRFKRVQQRHILESEKCQLQSQVEQLKLEGEGAKVRRLLHRESQTESCALIHLWNL

SEQ ID NO: 916103 - protein, 289 aa, Homo sapiens
MAAMVMLFMVVVVLVAVMVMIVVMLVVVLMAMMVVMLVVVVMVMVMVMMVLMLVVVVLVMMVVMLVVVVTVMIVVILVVVVLVMTVVMLVVVVVTVMIVVILVVVVMVMLVVMLVVVVVMVVMVMMVVMLVVVVMVMMVVMLLVVVVTAMIVVILVVVVMVMMLVMLVLVVVMLVVVMLVVVILVMVVMLVVVMVMMVVMLVVVVMVLMVMLMVVILVMMVMLVMVVVVMLVVMLVVVVMVMIVVMLFLLVMMVVILLMVIVMVIDGGSDVTSNDAGGDGVRGFKMIKG

SEQ ID NO: 916104 - protein, 171 aa, Homo sapiens
DIELRIRWFRHRTISASAGKQLWPGGLLLDLPMLTQQLKRIFGYKQCALKVKEPPGLQELDFYCCTFKYPPWTELGAEAKSQFLIWIGLTFEHEIGQSMGTGTKMNSKTLPSLPRLLAQQEWLVQACIHKWQSTPDFETCMVVISRVTTWAKESHCKEERPLGKWSRKRKQ

SEQ ID NO: 916105 - protein, 141 aa, Homo sapiens
MENYLNSFLYPIATRVPCRPHGCYPVGRCQTRNVTQMEPKEDFPEQPTLEMSRGSVSKVISMKMISHQSDVYCMSSRHISEKQTYSSPAQYTEDTDKHKSLDERRSWLQSTQYIEKRPVKNNLSSWQLKQEEFHWHAKTKL

SEQ ID NO: 916106 - protein, 224 aa, Homo sapiens
TRSGGDGAMSPLLGLRSELQDTCTSLGLMLSVVLLMGLARVVARQQLHRPVAHAFVLEFLATFQLCCCTHELQLLSEQHPAHPTWTLTLVYFFSLVHGLTLVGTSSNPCGVMMQMMLGGMSPETGAVRLLAQLVSALCSRYCTSALWSLGLTQYHVSERSFACKNPIRVDLLKAVITEAVCSFLFHSALLHFQEVRTKLRIHLLAALITFLVYAGGIDRFGYSY

SEQ ID NO: 916107 - protein, 183 aa, Homo sapiens
VNLGPIWTLLYVTVMILCSSMSSDLAPYFTSEPLSTVQKHGGPAELHCSAKPDNRNDVSCDRTENPEEFSRGDSCVYSETDSNNLHWNPLILPPISEDGAEKTTWPPPGVPLDSPSGVLQQPQETGGCANNQSSSDFKPGWKIQPVGNLGIATLDLLFRGGDSTLSVEVMKDRYTGKAAHRKP

SEQ ID NO: 916108 - protein, 128 aa, Homo sapiens
WRVLGKFRLSPEVNLYDLHAGLHMSSPGAAGGGWDGSTEKARHRLRSEPQDVGRLLQMTSLVASSSPPGGRRPYLEPRGMSVRNSYEVVGVQVGLPVVQPGGECSCGPWQQVSILRWHGVLGKRGSPP

SEQ ID NO: 916109 - protein, 122 aa, Homo sapiens
MKSIPEPAIFIPRSSLPVSSPGAAGGGWDGSTEKARHRLRSEPQDVGRLLQMTSLVASSSPPGGRRPYLEPRGMSVRNSYEVVGVQVGLPVVQPGGECSCGPWQQVSILRWHGVLGKRGSPP

SEQ ID NO: 916110 - protein, 146 aa, Homo sapiens
QVMTVPLMSHVTSGGHLFESKLFCGPEKKDAQVSLERVVLIYKNTWSLVSRQPSSLALTLSQQTGLTKSFPSDTCSWLGNECDRTQTLSFKGRIHKRSGMAIKLMTLLLLESHKKFPSCSSPEQIRALQLLVPWQGSSWGYYIPPS

SEQ ID NO: 916111 - protein, 158 aa, Homo sapiens
MSKALVAVSSSTVNTNNVQSAGCPFAFRHDCKFPEASPEAEQMLAACFMYSLQNLPRCDYEAAWDTDCVPWEPCPVVGTQAKEMLKNCAQWFSLLGPADSIPWEDVGPAKGSSGEMGSCRGLRLRPRTDHCRAQWIPPPGCNAPGGRAWSRHALNRCP

SEQ ID NO: 916112 - protein, 618 aa, Homo sapiens
MSASQATPQTQDSYKKEIVARPWGEHQHQFRGRANLHVFEDWCGSSIQQLRRNLHFPLYPHIRTTLRKLAVSPKWTNYGLRIFGYLHPFTDGKIQFAIAADDNAEFWLSLDDQVSGLQLLASVGKTGKEWTAPGEFGKFRSQISKPVSLSASHRYYFEVLHKQNEEGTDHVEVAWRRNDPGAKFTIIDSLSLSLFTNETFLQMDEVGHIPQTAASHVDSSNALPRDEQPPADMLRPDPRDTLYRVPLIPKSHLRHVLPDCPYKPSYLVDGLPLQRYQGLRFVHLSFVYPNDYTRLSHMETHNKCFYQENAYYQDRLRDTEWGRKVTLQRALREPGELPGPGFSFQEYIKIDQPEKQGLEQPEESQYGEVAEETPASNNQNARMLEGRQTPASTLEQDATDYRLRSLRKLLAQPREGLLAPFSKRNSTASFPGRTSHIPVQQPEKRKQKPSPEPSQDSPHSDKWPPGHPVKNLPQMRGPRPRPAGDSPRKTQWLNQVESYIAEQRRGDRMRPQAPGRGWHGEEEVVAAAGQEGQVEGEEEGEEEEEEEDMSEVFEYVPVFDPVVNWDQTFSARNLDFQALRTDWIDLSCNTSGNLLLPEQEALEVTRVFLKKLNQRSRG

SEQ ID NO: 916113 - protein, 162 aa, Homo sapiens
  misc_feature (153)..(153): Xaa can be any naturally occurring amino acid
MGSPRAARPPLLLRPVKLLRRRFRLLLALAVVSVGLWTLYLELVASAQVGGNPLNRRYGSWRELAKALASRNIPAVDPHLQFYHPQRLSLEDHDIDQGVSSNSSYLKWNKPVPWLSEFRGRANLHVFEDWCGSSIQQLRRNLHFPLYPHSVHXPDNSRDGTG

SEQ ID NO: 916114 - protein, 315 aa, Homo sapiens
MFLPGKRLLPRPVRDTEWGRKVTLQRALREPGELPGPGFSFQEYIKIDQPEKQGLEQPEESQYGEVAEETPASNNQNARMLEGRQTPASTLEQDATDYRLRSLRKLLAQPREGLLAPFSKRNSTASFPGRTSHIPVQQPEKRKQKPSPEPSQDSPHSDKWPPGHPVKNLPQMRGPRPRPAGDSPRKTQWLNQVESYIAEQRRGDRMRPQAPGRGWHGEEEVVAAAGQEGQVEGEEEGEEEEEEEDMSEVFEYVPVFDPVVNWDQTFSARNLDFQALRTDWIDLSCNTSGNLLLPEQEALEVTRVFLKKLNQRSRG

SEQ ID NO: 916115 - protein, 501 aa, Homo sapiens
MLVGSVDKTGKEWTAPGEFGKFRSQISKPVSLSASHRYYFEVLHKQNEEGTDHVEVAWRRNDPGAKFTIIDSLSLSLFTNETFLQMDEVGHIPQTAASHVDSSNALPRDEQPPADMLRPDPRDTLYRVPLIPKSHLRHVLPDCPYKPSYLVDGLPLQRYQGLRFVHLSFVYPNDYTRLSHMETHNKCFYQENAYYQDRLRDTEWGRKVTLQRALREPGELPGPGFSFQEYIKIDQPEKQGLEQPEESQYGEVAEETPASNNQNARMLEGRQTPASTLEQDATDYRLRSLRKLLAQPREGLLAPFSKRNSTASFPGRTSHIPVQQPEKRKQKPSPEPSQDSPHSDKWPPGHPVKNLPQMRGPRPRPAGDSPRKTQWLNQVESYIAEQRRGDRMRPQAPGRGWHGEEEVVAAAGQEGQVEGEEEGEEEEEEEDMSEVFEYVPVFDPVVNWDQTFSARNLDFQALRTDWIDLSCNTSGNLLLPEQEALEVTRVFLKKLNQRSRG

SEQ ID NO: 916116 - protein, 616 aa, Homo sapiens
GVCTARITGCRADLVPKARPWGEHQHQFRGRANLHVFEDWCGSSIQQLRRNLHFPLYPHIRTTLRKLAVSPKWTNYGLRIFGYLHPFTDGKIQFAIAADDNAEFWLSLDDQVSGLQLLASVGKTGKEWTAPGEFGKFRSQISKPVSLSASHRYYFEVLHKQNEEGTDHVEVAWRRNDPGAKFTIIDSLSLSLFTNETFLQMDEVGHIPQTAASHVDSSNALPRDEQPPADMLRPDPRDTLYRVPLIPKSHLRHVLPDCPYKPSYLVDGLPLQRYQGLRFVHLSFVYPNDYTRLSHMETHNKCFYQENAYYQDRLRDTEWGRKVTLQRALREPGELPGPGFSFQEYIKIDQPEKQGLEQPEESQYGEVAEETPASNNQNARMLEGRQTPASTLEQDATDYRLRSLRKLLAQPREGLLAPFSKRNSTASFPGRTSHIPVQQPEKRKQKPSPEPSQDSPHSDKWPPGHPVKNLPQMRGPRPRPAGDSPRKTQWLNQVESYIAEQRRGDRMRPQAPGRGWHGEEEVVAAAGQEGQVEGEEEGEEEEEEEDMSEVFEYVPVFDPVVNWDQTFSARNLDFQALRTDWIDLSCNTSGNLLLPEQEALEVTRVFLKKLNQRSRG

SEQ ID NO: 916117 - protein, 706 aa, Homo sapiens
MGSPRAARPPLLLRPVKLLRRRFRLLLALAVVSVGLWTLYLELVASAQVGGNPLNRRYGSWRELAKALASRNIPAVDPHLQFYHPQRLSLEDHDIDQGVSSNSSYLKWNKPVPWLSEFRGRANLHVFEDWCGSSIQQLRRNLHFPLYPHIRTTLRKLAVSPKWTNYGLRIFGYLHPFTDGKIQFAIAADDNAEFWLSLDDQVSGLQLLASVGKTGKEWTAPGEFGKFRSQISKPVSLSASHRYYFEVLHKQNEEGTDHVEVAWRRNDPGAKFTIIDSLSLSLFTNETFLQMDEVGHIPQTAASHVDSSNALPRDEQPPADMLRPDPRDTLYRVPLIPKSHLRHVLPDCPYKPSYLVDGLPLQRYQGLRFVHLSFVYPNDYTRLSHMETHNKCFYQENAYYQDRLRDTEWGRKVTLQRALREPGELPGPGFSFQEYIKIDQPEKQGLEQPEESQYGEVAEETPASNNQNARMLEGRQTPASTLEQDATDYRLRSLRKLLAQPREGLLAPFSKRNSTASFPGRTSHIPVQQPEKRKQKPSPEPSQDSPHSDKWPPGHPVKNLPQMRGPRPRPAGDSPRKTQWLNQVESYIAEQRRGDRMRPQAPGRGWHGEEEVVAAAGQEGQVEGEEEGEEEEEEEDMSEVFEYVPVFDPVVNWDQTFSARNLDFQALRTDWIDLSCNTSGNLLLPEQEALEVTRVFLKKLNQRSRG

SEQ ID NO: 916118 - protein, 92 aa, Homo sapiens
ETFLQMDEVGHIPQTAASHVDSSNALPRDEQPPADMLRPDPRDTLYRGKASASAWRPFWGHCTARSTADGGEGLRDLPSIPITVELFIVLVT

SEQ ID NO: 916119 - protein, 143 aa, Homo sapiens
MLSLQQLSGKKQSRVALKERTQMSLPWWMPFLPADGSAEPSGKPMDSQRRDEQEARGLVATAPATGSHFQHTSNITHDQNLARPGTLQGALKGHTPPSALVFFITLSAPDGFCLLPKKEKISHYKNSRTNEHQALKPVPKRRQ

SEQ ID NO: 916120 - protein, 179 aa, Homo sapiens
MRFLALPRKQFKGKLEVKVNRPGMVGVTTPFHGNDPTTQNCERRSAVDKMLPNSIACYGEIFCERKKLNVASFILGIRAKLHLKKKKKKEEIATATSAFSHHHPDQSAATNKTFHQQRDPNFLKPQVIAGTFYQYLSFLFVCFLIFETESHSLAQAGMYEPRSRHCTPAWMTEQDSVSK

SEQ ID NO: 916121 - protein, 137 aa, Homo sapiens
TSFSQYYMRFLALPRKQFKGKLEVKVNRPGMVGVTTPFHGNDPTTQNCERRSAVDKMLPNSIACYGEIFCERKKLNVASFILGIRAKLHLKKKKKKEEIATATSAFSHHHPDQSAATNKTFHQQRDPNFLKPQHYRG

SEQ ID NO: 916122 - protein, 505 aa, Homo sapiens
MLGWGMTRSACLLFPEMEQKEGKLSEDGTTVSPAADNPEMSGGGAPAEETKGTAGKAINEGPPTESGKQEKAPAEDGMSAELQGEANGLDEVKVESQREAGGKEDAEAELKKEDGEKEETTVGSQEMTGRKEETKSEPKEAEEKESTLASEKQKAEEKEAKPESGQKADANDRDKPEPKATVEEEDAKTASQEETGQRKECSTEPKEKATDEEAKAESQKAVVEDEAKAEPKEPDGKEEAKHGAKEEADAKEEAEDAEEAEPGSPSEEQEQDVEKEPEGGAGVIPSSPEEWPESPTGEGHNLSTDGLGPDCVASGQTSPSASDVPQSPPESPSSGEKKEKAPERRVSAPARPRGPRAQNRKAIVDKFGGAASGPTALFRNTKAAGAAIGGVKNMLLEWCRAMTKKYEHVDIQNFSSSWSSGMAFCALIHKFFPDAFDYAELDPAKRRHNFTLAFSTAEKLADCAQLLDVDDMVRLAVPDSKCVYTYIQELYRSLVQKGLVKTKKK

SEQ ID NO: 916123 - protein, 144 aa, Homo sapiens
RQVAFTANLIMVQLTVKSTCQRGGSRAMCVCHGGGGRMQGLFPVKKMKTDSNCEQCFVNMSHGKDDNDRDRKQPRVPSETPPSNLKQPEGWKIGLPPALLVFEPSAQMSLPGGAFLNGTECGIGAGNDDVRTGSKEAHHLSKNL

SEQ ID NO: 916124 - protein, 133 aa, Homo sapiens
MVSLPLILIQNLFIALSIPVDSSIAVDWSTTSTSQGGPLEGGRGHSWKTEKWASFGMDVRTILIATSQSAEERQQKGSMEKNKNFNNSVQNLQESMFMQCRDWQTSLKDQIINISGFANLYLQSSCNYSTLTS

SEQ ID NO: 916125 - protein, 174 aa, Homo sapiens
SDFLCHSEAKTLVMLTQCFEKGRIRCHQYWPEDNKPVTVFGDIVITKLMEDVQIDWTIRDLKIERHGDCMTVRQCNFTAWPEHGVPENSAPLIHFVKLVRASRAHDTTPMIVHCSAGVGRTGVFIALDHLTQHINDHDFVDIYGLVAELRSERMCMVQNLDQILDLKQATYPGD

SEQ ID NO: 916126 - protein, 212 aa, Homo sapiens [sequence omitted]

SEQ ID NO: 916127 - protein, 156 aa, Homo sapiens
MGSNYLCIIKQLRKGPWPKLMMLFRVCTLLLAHICWPSLETRKLPKVIESLEQLPLPGKECARFHSPSILQGPSTGRQGCLQTILQVSESPYSFCLSCPSWLCGRWRGEGTPQNASTRGACRIFQPTGIPGPKKQSDQPEAPGPALGRLDPRVTGS

SEQ ID NO: 916128 - protein, 131 aa, Homo sapiens
MSHCIAERKADPHIPFLKNKVTVIHAFSVLFITTKDRTLKTSFPIPENVCRTFCLRFLRPEKWKLIEQCHVISIQLALMSNECLLVCIMQNWPVCALHVGMGACPGREHQQAQGSVGEETYHGPTHIHLLI

SEQ ID NO: 916129 - protein, 159 aa, Homo sapiens
VLSFLHSKLQAGQEGTRECHWQTQMAFRARFSLRLGGYPSVAAGSSSAGSASGAQQKRGGYGLQEFKHSSQPALQGCQGRDLLLKTTEFFVSISARSGAHSPPRTHCCSLKAREPELRSRNPLSGLARAADRQSGQGRPQDQRQREEWSERDQCWTQDD

SEQ ID NO: 916130 - protein, 430 aa, Homo sapiens
QGMAALRDSLGEEDESSSSIQGGCGQPYGAVKSGGWMDMWLWSSEMAFPCRRSLTAKTLACLLVGVSFLALQQWFLQAPRSPREERSPQEETPEGPTDAPAADEPPSELVPGPPCVANASANATADFEQLPARIQDFLRYRHCRHFPLLWDAPAKCAGGRGVFLLLAVKSAPEHYERRELIRRTWGQERSYGGRPVRRLFLLGTPGPEDEARAERLAELVALEAREHGDVLQWAFADTFLNLTLKHLHLLDWLAARCPHARFLLSGDDDVFVHTANVVRFLQAQPPGRHLFSGQLMEGSVPIRDSWSKYFVPPQLFPGSAYPVYCSGGGFLLSGPTARALRAAARHTPLFPIDDAYMGMCLGARRPGAQRPRGHPGPSACSLPGAQQSSFDPCMYRELLLVHRFAPYEMLLMWKALHSPALSCDRGHRVS

SEQ ID NO: 916131 - protein, 130 aa, Homo sapiens
MLTWTLCQTCGVGRVGKRCRSAGPRPPGGRPCLHQTAASFDSGGLSKLRSFRGPVPGGGDLPVTSDSGPAQDEGTAEGAFDKCTVRVVNVATFAFRGPCGQEADEDECCRAQKTFETLTSATPATPSVEH

SEQ ID NO: 916132 - protein, 207 aa, Homo sapiens
MPRTLAGTGKGGQGWKGAGGCQAWRSGAGRGAAGRGGPGAAPASGRTHLARGAGCRRLRGAGHRSDVRTRRGLEPGGGLEGRGGPAKERGCDGEEVPTRRGPAGEGTRTGRGSGTGVKAALGEDGRGWRALVSRKPSWGPLRAAEPVRTLLPPPPSASVRLAAALERILLSPPRVRSAALPGAVGEKFAGVALSRARETTSEALIQP

SEQ ID NO: 916133 - protein, 132 aa, Homo sapiens [sequence omitted]

SEQ ID NO: 916134 - protein, 153 aa, Homo sapiens
MWSEEERGPADERVSKPTRLQGCFQSNQTKGLSRPSNRLSPCPWLPVSEPPAVEATFPHSSVFIMPRFPNAILHPNLQKWVQPLPQVTLKPASLEQQTQVRGQRRQPRASPFLRGPAFSKGCEADCSCLGSSLVLRKTPSLAQPSVLTPITSC

SEQ ID NO: 916135 - protein, 153 aa, Homo sapiens; identical to SEQ ID NO: 916134

SEQ ID NO: 916136 - protein, 141 aa, Homo sapiens
MARICVPSQISCRIVIPSVGGAPWEVMSCLFVTHPFLTGPSRNLGWVLVPLVLKLLECTLSARHQGGTVKETLLSQGSYSWGRLRSGPEAQGPSWDWATRHKSEAKDRAGVDLCLDLAGSREGFPRSSIWGDTSIDPGKRM

SEQ ID NO: 916137 - protein, 387 aa, Homo sapiens
MRKLTGVNLPQGGQALWGYQTEAAMPVVWPTLLDLSRDECKRILRKLELEAYAGVISALRAQGDLTKEKKDLLGELSKVLSMSGPNSSSEWSIEGRRLVPLMPRLVPQTAFTVTANAVANAAIQHNASLPVPAETGSKEVVVCYSYTSTTSTPTSTPVPSGSIATVKSPRPASPASNVVVLPSGSTVYVKSVSCSDEDEKPRKRRRTNSSSSSPVVLKEVPKAVVPVSKTITVPVSGSPKMSNIMQSIANSLPPHMSPVKITFTKPSTQTTNTTTQKVIIVTTSPSSTFVPNILSKSHNYAAVTKLVPTSVIASTTQKPPVVITASQSSLVSNSSSGSSSSTPSPIPNTVAVTAVVSSTPSVVMSTVAQVPKSNPQNQVCSEKSVYL

SEQ ID NO: 916138 - protein, 402 aa, Homo sapiens
MPVVWPTLLDLSRDECKRILRKLELEAYAGVISALRAQGDLTKEKKDLLGELSKVLSISTERHRAEVRRAVNDERLTTIAHKMNLSLYLGERPSYSMSGPNSSSEWSIEGRRLVPLMPRLVPQTAFTVTANAVANAAIQHNASLPVPAETGSKEVVVCYSYTSTTSTPTSTPVPSGSIATVKSPRPASPASNVVVLPSGSTVYVKSVSCSDEDEKPRKRRRTNSSSSSPVVLKEVPKAVVPVSKTITVPVSGSPKMSNIMQSIANSLPPHMSPVKITFTKPSTQTTNTTTQKVIIVTTSPSSTFVPNILSKSHNYAAVTKLVPTSVIASTTQKPPVVITASQSSLVSNSSSGSSSSTPSPIPNTVAVTAVVSSTPSVVMSTVAQVPKSNPQNQVCSEKSVYL

SEQ ID NO: 916139 - protein, 388 aa, Homo sapiens
MPVVWPTLLDLSRDECKRILRKLELEAYAGVISALRAQGDLTKEKKDLLGELSKVLSISTERHRAEVRRAVNDERLTTIAHNMSGPNSSSEWSIEGRRLVPLMPRLVPQTAFTVTANAVANAAIQHNASLPVPAETGSKEVVVCYSYTSTTSTPTSTPVPSGSIATVKSPRPASPASNVVVLPSGSTVYVKSVSCSDEDEKPRKRRRTNSSSSSPVVLKEVPKAVVPVSKTITVPVSGSPKMSNIMQSIANSLPPHMSPVKITFTKPSTQTTNTTTQKVIIVTTSPSSTFVPNILSKSHNYAAVTKLVPTSVIASTTQKPPVVITASQSSLVSNSSSGSSSSTPSPIPNTVAVTAVVSSTPSVVMSTVAQVPKSNPQNQVCSEKSVYL

SEQ ID NO: 916140 - protein, 229 aa, Homo sapiens
SSSSTPSPIPNTVAVTAVVSSTPSVVMSTVAQGVSCSDEDEKPRKRRRTNSSSSSPVVLKEVPKAVVPVSKTITVPVSGSPKMSNIMQSIANSLPPHMSPVKITFTKPSTQTTNTTTQKVIIVTTSPSSTFVPNILSKSHNYAAVTKLVPTSVIASTTQKPPVVITASQSSLVSNSSSGSSSSTPSPIPNTVAVTAVVSSTPSVVMSTVAQVPKSNPQNQVCSEKSVYL

SEQ ID NO: 916141 - protein, 137 aa, Homo sapiens
MTLFSRLVVLRLQQDQNQRGAQIAETDSSSDSAGQSEARESAFNRFPGDADVAGPKMTLGATDLIYLIRQLGGATDLGQTCRVSAGLTQLLWLQPLATWVEGCLVQAVISLDHLSLLYAVSHLPVENCACPHDMRGF

SEQ ID NO: 916142 - protein, 357 aa, Homo sapiens
MPEPGPDAAGTASAQPQPPPPPPPAPKESPFSIKNLLNGDHHRPPPKPQPPPRTLFAPASAAAAAAAAAAAAAKGALEGAAGFALSQVGDLAFPRFEIPAQRFALPAHYLERSPAWWYPYTLTPAGGHLPRPEASEKALLRDSSPASGTDRDSPEPLLKADPDHKELDSKSPDEIILEESDSEESKKEGEAAPGAAGASVGAAAATPGAEDWKKGAESPEKKPACRKKKTRTVFSRSQVFQLESTFDMKRYLSSSERAGLAASLHLTETQVKIWFQNRRNKWKRQLAAELEAANLSHAAAQRIVRVPILYHENSAAEGAAAAAAGAPVPVSQPLLTFPHPVYYSHPVVSSVPLLRPV

SEQ ID NO: 916143 - protein, 142 aa, Homo sapiens
MALFPHERNGGHKRSAARGRRVPPGKRGSRARGRRLPSTGAGPTPPSRCVLSLQVGRCRPSRSLCLQTARALTWIGCWTKLSPGGRLQQLLLSSPGQHRTGGAGASEQGGRRAASAEGECWQPVARDVKHCGEKRRKKLLEL

SEQ ID NO: 916144 - protein, 381 aa, Homo sapiens
MLVWGQRLPREGVSNGEHVSESTASMKKHHNEEHVSESMASMGKHCNEEHVSESTASMRRHHNEEHVSESTASMRKHHNEEHVLESMASMRKHHNEEHVSESTASMGKHRNEEHVSESTASMRRYHNEEHVSESTASMRKHHNEEHVSESTASMGKHHNEEHVSESTASMGKHHNEEHVSESTASMGKHRNEEHVSESMASMGKHHNEEHVSESMASMGKHHNEEHVSESTASMGKHHNEEHVLESMASMGKHHNEEHVLESMASMGKHHNEDHVLESMASMGKHHNEEHVSESTASMGKHHNEEHVSESTASMGKHHNEEHVLESMASVGKHHNEEHVLESMASMGKHHNEEHVSESTASMGKHHNEEHASHAIMAPFLL

SEQ ID NO: 916145 - protein, 314 aa, Homo sapiens
SPSDFLPAPPHCLPAAPPSTQITQIVSKGSSWFPSISYEPRMGSKEDAGKGCPAAGGVSSFTIQSILGGGPSEAPREPVGWPARKRSLSVSSEEEEPDDGWKAPACFCPDQHGPKEQGPKHHPPIPFPCLGTPKGSGGSGPGGLERTPFLSPSHSDFKEEKERLLPAGSPSPGSERPRDGGAERQAGAAKKKTRTVFSRSQVYQLESTFDMKRYLSSSERACLASSLQLTETQVKTWFQNRRNKWKRQLSAELEAANMAHASAQTLVSMPLVFRDSSLLRVPVPRSLAFPAPLYYPGSNLSALPLYNLYNKLDY

SEQ ID NO: 916146 - protein, 133 aa, Homo sapiens
VKMSYPPQSRCGCGGMGAAGPPSLTVHQELCGAYSPDGTTEALPLASWPRARPSPAKAPAYDTAKLPALIGCGSRRPPGVNPGASSLKPGACVSEGAGPTGHLNQQAHDPPPPCPRLVFALDLQLGLTTNSVM

SEQ ID NO: 916147 - protein, 238 aa, Homo sapiens
  misc_feature (1)..(1): Xaa can be any naturally occurring amino acid
  misc_feature (229)..(229): Xaa can be any naturally occurring amino acid
XPAAGIRHDVLYFCECLQNKKLKKKYKTSTHETEVCLVVFCNRFTIVNPSSVLLLPIQVAITGQLGVKPQTGNSIPLTATNFRIQGKDVLRLPPSSITTDAKGQTVLRITPDMMATLAKSQVTTVKLTQDLFGTGGNTTGKGISATLHVTSNPVHAADSPAKASSASAPSSTPTGTTVVKVTPDLKPTEASSSAFRLMPALGVSVADQKGQWLSEHTLPVTYAAGASCXGLTAYYVAT

SEQ ID NO: 916148 - protein, 673 aa, Homo sapiens
YLLHLFSFWVSGTVRCWGTQWLLRQCAPLVGPKERYRYSQPHKAFTFRMHGFESVVGPVKGVFDKETSLNKAREHSLLRSDRPAYVTILSLVRDAAARLPNGEGTRAEICELLKDSQFLAPDVTSTQVNTVVSGALDRLHYEKDPCVKYDIGRKLWIYLHRDRSEEEFERIHQAQAAAAKARKALQQKPKPPSKVVRVVAQPSLPAVPQQSGGPAQTLPQMPAGPQIRVPATATQTKVVPQTVMATVPVKAQTTAATVQRPGPGQTGLTVTSLPATASPVSKPATSSPGTSAPSASTAAVIQNVTGQNIIKQVAITGQLGVKPQTGNSIPLTATNFRIQGKDVLRLPPSSITTDAKGQTVLRITPDMMATLAKSQVTTVKLTQDLFGTGGNTTGKGISATLHVTSNPVHAADSPAKASSASAPSSTPTGTTVVKVTPDLKPTEASSSAFRLMPALGVSVADQKGKSTVASSEANQLHDRIVQGLGVMPPKAGQTITVATHAKQGASVASGSGNCPYFSGVLTHISTGAPTVRQVPVSTTVVSTSQAGKLPTRITVPLSVISQPMKGKSVVTAPIIKGNLGANLSGLGRNIILTTMPAGTKLIAGNKPVSFLTAQQLQQLQQQGQATQKCNFGTIQPVGGMAIAENGNFLLELFTVTAQDLCHTCFLHMLASGF

SEQ ID NO: 916149 - protein, 212 aa, Homo sapiens
MFFKPLSLGYIFGVCYIGKLMSHGFVVQIMSSPRKFTVIKTNGQGLRWPLGAINCFLEAFKLMNYEMQKSMETYFKKETASIISDVRTSLWSRRLCLEAAQPSGGGRSLQAQIPSTDIPDLLLTGSVHGAKLTPLSTDSLAAEVGMTTAYLFSLFCRLANLKQRKTADFSCIALVPKIPTAQPFALHGEENLTQIPRKDELGPLFHYLFENI

SEQ ID NO: 916150 - protein, 333 aa, Homo sapiens
MRSHSRARILATMGSSVSTLAGASWRPSVQPQPTLTEQLEHRHPGHSFQIMKCYFTDHRGEQSPTDGTTLSLTSPESTEESVEVFWPGTIQREGSSPRPGPAIPREEGLYFAARDRGMRDWSSSPSSESSEYQSYSQYQSCCSCMCDEDNAAPQSVCAFYTHVQTVRGVAVAWETEAGFEPVTRKPRIHEAQFIKRQRWNGSSFEMASNTDMRWDLEACKSNCSPEPEDIDLLECCLQELREPPDWLVTTNYGVRCVACCRVLPSLDALLEHAQHGIREGFSCQIFFEEMLERRRAQGQAHDQQLEEEQSPSDNSECSRPQGEVLSAQQQEKQ

SEQ ID NO: 916151 - protein, 163 aa, Homo sapiens [sequence omitted]

SEQ ID NO: 916152 - protein, 193 aa, Homo sapiens
CCTFFQLEQLVPFTMGLHMLVAQNSQKSPVLSAMVNPTVFFDTEPLGRISFELFADKFPKTAGNFHALSTGEKGFGYKGSCFHRIVPGFMCQGGDFTCHDGTGGKSIYREKFDDKNFIRKHTVSGILSMANAGPNANSSQFFICAAKTEWLDGKHVVFSKVKEGMNIVETMECFGSRNGKTSKKITIADCGQL

SEQ ID NO: 916153 - protein, 255 aa, Homo sapiens
MVKGEKGPKGKKITLKVARNCIKITFDGKKRLDLSKMGITTFPKCILRLSDMDELDLSRNLIRKIPDSISKFQNLRWLDLHSNYIDKLPESIGQMTSLLYLNVSNNRLTSNGLPVELKQLKNIRAVNLGLNHLDSVPTTLGALKELHEVGLHDNLLNNIPVSISKLPKLKKLNIKRNPFPKPGESEIFIDSIRRLENLYVVEEKDLCAACLRKCQNARDNLNRIKNMATTTPRKTIFPNLISPNSMAKDSWEDWR

SEQ ID NO: 916154 - protein, 187 aa, Homo sapiens
RHCHHGPFSMSCWVHLPDRVVAGQRGSSLPSRGGRAEAPLTSRTGRLAGRGADPSPPSGTGWLPGGDAPHFPDGVAAGRRGSSLLRRGGCWAEGLLTSQMGWLPGRGLLISQTGRLGRDGPHLPDGVAAGQRRSSHPRRGGGAEALPTSQTMETGLALSLKLEYGGVILAHCILELLGSSNPPASVS

SEQ ID NO: 916155 - protein, 152 aa, Homo sapiens
MPVSINLWVPARGQSRDSCDHYKVMKKLHLKSLSDLPGLGYISRKFREVYGYRITSTQNIRPPKQKLPGFKHFAIDHSEEPEDAAPPHHFLIYTDWANHYLAKSGHKRLIRDLQQDVTDGVLLAQIIQVVANEKIEDINGCPKNRSQMVSGA

SEQ ID NO: 916156 - protein, 131 aa, Homo sapiens
MLLMVDEVISRAGIGKKDKYIHGGAIEVYLMEHVEVHIGSFLDGGKRAMAIPGFMSAPSRRREREEKFAQVSYFPTPPENFLLALKQSRDLRDPGGHQTYDHTGYCWDVTVSPCVVFKRLPSPAFVLASGV

SEQ ID NO: 916157 - protein, 648 aa, Homo sapiens
MEDRVAREDTEDCGARRCVSSVCSVSHRAGACDCSVNSQMQLSMMLLNICSDSQGLEGLLSGSELQSLLIATTCLREHSCCFWKEPTFCVLRAISKAQNLSIIQYLQATDCVRLSLQNLSRLTDTLPAPEVSEAVSLILGFVKDSYPVSSALFLEFENSEGYPLLLKVLLRYDGLTQSEVDPHLEELLGLVVWLTTCGRSELKVFDSITYPQLEGFKFHHEASGVTVKNLQAFQVLQNVFHKASDSVLCIQVLSVIRTMWAWNARNFFLLEWTLQPISQFVEIMPLKPAPVQEHFFQLLEALVFELHYVPHEILRKVQHLIKESPGPSCTLMALQSILSIAGGDPLFTDIFRDSGLLGLLLAQLRKQAKIMRKSGNKVSTPGVQDPERELTCVMLRIVVTLLKGSVRNAVVLKDHGMVPFIKIFLDDECYREASLSILEQLSAINAEEYMSIIVGALCSSTQGELQLKLDLLKSLLRILVTPKGRAAFRVSSGFNGLLSLLSDLEGSLQEPPLQAWGAVSPRQTLELVLYTLCAVSAALHWDPVNGYFFRRNGLFEKLAEDLCLLGCFGALEEEGNLLRFGGSLPPRIQSCLQILGFLDSMASGTLHLRGDLKESLRTKQGPVVDVQKGETGSDPQRNFKQWPDLEER

SEQ ID NO: 916158 - protein, 129 aa, Homo sapiens
MIGNTSGPWLLVFSIDYKAANIHINVYTVNEPWLFSLAWCSRINSVTTDNIGLLSQLDHPHFFMGQDQGKRDPESRHSLTGPVTASRPSGRQEKSLTSYYGGLVSFLEMTLKGALDGRSLSTGGAFPPT

SEQ ID NO: 916159 - protein, 183 aa, Homo sapiens
RSSPFTDAPERPPSCPAASFLGKWDQQAAGDLGDILLLQESCAEQRREQFGKCRGPTLLLVGGREQVGPNLGGQCLPPFCAFCIGLNWFSRDSHESPTFVPEKNTEPQRGQAIGPRSHSLQETEMGLRPWSIWLPCALLLCYTHPSSLLLGHQLGWEANSPNQKSFIEKQMTNKSCIYSRYTM

SEQ ID NO: 916160 - protein, 150 aa, Homo sapiens
MWQHQGSQRLGQDPGAAFWGAGLVEPGGRNQALFPMGTRLERRTSSNEETHQTLVSFGGPELRKAQGGSCQHHVSLYAAADELTLREAEGEPDEVGVDCTQLTFFPALHESLHSEDFLELCRERQVILQELLDKEKSRTDLSSSPNLATY

SEQ ID NO: 916161 - protein, 273 aa, Homo sapiens
LWHSVVCVYRAASQDLVRDSSFQTSAVLKRKLSLADCVAMEESPEKGARPRTATLWVSVLLIHSLPLPVGDWYCVPRVDHNVVFLSFASVPIYVPFLIVGSVFVAFIILGSLVAACCCRCLRPKQDPQQSRAPGGNRLMETIPMIPSASTSRGSSSRQSSTAASSSSSANSGARAPPTRSQTNCCLPEGTMNNVYVNMPTNFSVLNCQQATQIVPHQGQYLHPPYVGYTVQHDSVPMTAVPPFMDGLQPGYRQIQSPFPHTNSEQKMYPAVTV

SEQ ID NO: 916162 - protein, 632 aa, Homo sapiens
MSGLDSVAQVSGMCGVGWAKPQGNSETLIYLPRMSWPIDLAIYLWALLALTRVWKAGQLFPVVHRLLRAEAAHAEARSRPSVFGVSSFWWVRGLAGSGVKLQTFAVSVTALKISFEDVAVDFTLEEWQLLNPTQKNLYRDVMLENYSNLVFLGFQILKPDAMFKLEQQDPWIIGQEILNQNFSGEKPYQCSECGKAFSQKSLLTVHQRTHSGEKPHGCSECQKAFSRKSLLILHQRIHTGEKPYGCSECGKAFSRKSQLKRHQITHTIEKPYSCSECGKAFSQKLKLITHQRAHTGEKPYPCSHCGKAFFWKSQLITHQRTHTGKKPYGCGECQKAFSRNSLLIRHQRIHTGEKPYECNECGEAFIRKPQLIKHQITHTGEKNYRCSDCEEAFFKKSELIRHQKIHLGEKPYGCIQCGKTFFGKSQLLTHHRTHTGEKPYECSECGKAFTQKSSLISHQRTHTGEKPYECSECRKTFSEKSSLIHHQRTHTGEKPFECSECRKAFAWKPQLLRHQRIHTGEKPYECSECGKAFVQKVQLIKHQRNHTGEKTYGCSDCAKAFFEKAQLIIHQRIHTGERPYKCGECGKSFTRKSHLMRHQRIHTGDKYYGCNECGTTFNRKSQLMIHQRNHII

SEQ ID NO: 916163 - protein, 152 aa, Homo sapiens
VFGTMCTHPYANFSDLMLKNFLPDSILAQVFLAKSSIVYRGYVLWVKLSCPLQVAFSKADIWWLGSPVSLEEALEGSWVLPPPDPRGLEPGSSGSQLCLGTSAFTSRAPSHAEEEGAQRHNNLTMPPQWQRQEPGSTSLLRGEGKALLVSGG

SEQ ID NO: 916164 - protein, 213 aa, Homo sapiens
MPGGRRLVCFQAYWESGFAYESPSSDGLFGAVGKGMQTWAQTLTLALSRHIQGPGYLHTNCFELSIYVGCDKYPHESQLPEEWENNRESLIVFMEQVHRGIKGLVRDSHGKGIPNAIISVEGINHDIRTANDGDYWRLLNPGEYVVTAKAEGFTASTKNCMVGYDMGATRCDFTLSKTNMARIREIMEKFGKQPVSLPARRLKLRGRKRRQRG

SEQ ID NO: 916165 - protein, 213 aa, Homo sapiens; identical to SEQ ID NO: 916164

SEQ ID NO: 916166 - protein, 213 aa, Homo sapiens; identical to SEQ ID NO: 916164

SEQ ID NO: 916167 - protein, 213 aa, Homo sapiens; identical to SEQ ID NO: 916164

SEQ ID NO: 916168 - protein, 213 aa, Homo sapiens; identical to SEQ ID NO: 916164

SEQ ID NO: 916169 - protein, 216 aa, Homo sapiens
MPEPPTPSVGSCAAQASSTSPTPCSMVSSPINDPRVEECRHRARDWQAAPSAAPVRDPLGEASWAPESAGDLKVCEHTNQHPVSSSGFVNAPIDILYLATLVGPWRTFVCSFTPEARETRSPPGGTSNSRRAALRAVTLTTKVCSFTPEPARSRTHQKEETPNTSEHQKEQTLDTPPLRTVTLTARVRGFILEEELVVFKSLVQNTVSTASLDQGS

SEQ ID NO: 916170 - protein, 159 aa, Homo sapiens
MALFSSPSQGKGVLPVLFKLRLVGGQLPHLNAESSEKYTKSHETLMVVVDLSVLSNKILILRRINSQLKHGSQNLIVKRSEIEKQGKKSVSWSIFCCYNRMPQIRKPVPRLLYQSKEETIVVETRDVALEGLAHADMVAEKFHNQLSATAVSGMSLSAV

SEQ ID NO: 916171 - protein, 137 aa, Homo sapiens
MKADKNIYSRALFALSSSVSNAGGFFCINLVKLKQLIPEFLLYIFPSSSSDTWLQTHRGYSCIEATFPMVLQDAPFMVDFRDWTQSQIVHWLLTHILFLQLVAWTSATQFLLNCVRSNCHHKHLTHTYHDSDSLAES

SEQ ID NO: 916172 - protein, 432 aa, Homo sapiens
MYSPLKKSPCTNIRNSSEGPDQTLMCTAQDPLIHNVALLALSSAQNLNEGNPQGAPPQGGNKPQGPPSPPGKPQGPPPQGGNQPQGPPPPPGKPQGPPPQGGNKPQGPPPPGKPQGPPPQGDKSRSPRSPPGKPQGPPPQGGNQPQGPPPPPGKPQGPPPQGGNKPQGPPPPGKPQGPPPQGDNKSRSSRSPPGKPQGPPPQGGNQPQGPPPPPGKPQGPPPQGGNKPQGPPPPGKPQGPPPQGDNKSQSARSPPGKPQGPPPQGGNQPQGPPPPPGKPQGPPPQGGNKPQGPPPPGKPQGPPPQGGSKSRSSRSPPGKPQGPPPQGGNQPQGPPPPPGKPQGPPPQGGNKPQGPPPPGKPQGPPPQGGSKSRSARSPPGKPQGPPQQEGNNPQGPPPPAGGNPQQPQAPPAGQPQGPPRPPQGGRPSRPPQ

SEQ ID NO: 916173 - protein, 170 aa, Homo sapiens
FQLPEAAHMPLLMAPSIFKASHSNLSFRGHSTFSHPLISLLSGPFLLEECKGILEKPDSHSKELELSRRRRKRPRESGHSSREPGDVLLHVSRSGSKQAWNLSPGKQGESTLLRNQPRRQSRQEPRLRKCNGKTTPDSDATQEMSLLWPNSCFLSIFSCQIAKVELLEEV

SEQ ID NO: 916174 - protein, 822 aa, Homo sapiens
WWRMPVVLPTQKAEEGVIFPHPNPMRHLQCLETFLGCHNWERATGIWSKKDTEIQGSLYQPSSKPKSDTSISDFLSEEDDIVPSKKISQSTALARSSKVLESSDHKLKKRSAGKRNRNLVEQQMLSETPEDAQTMTLSVDRLALLGRTHSVRIIIETMGVPPDSPQMTPGKKSYAGPPPKVTTAKKRTFFVEYHFPVGFSESGLGKTALITEVVRLASSKITDGKVKFQQRFVFPVQFGGPMIEHWWNSNLTFQIYVKKTPQKKPEVIGSVSLSLRAVIQSELLSFSDQLPVQQENGQSPFGPLKVTMELITDNKDFTGINTKLSGNTHYTPLCAPTSPNKALPELNQDMTCTKNPQNLNQIHEETAKKAQNLVLPNRKSPSPVAPHPSTFVATPASHNLVNQTNGTTKESALLLHVLLMVPDGKDFISGESEKQSPCNVYLNCKLFSTEEVTRSVIAWGTTQPVFNFSQVIPVSLSSKYLERLKNNVMVIETWNKVRSPGQDKLLGLVKLPLHQFYMSFKDAKISRLLLDAQYPVVAVDSYMPVIDVFSGHQNGSLRVFLAMGSSNQIMALQRLKNEEGTLPPFSPRPAHFLDQPTAASVAMAEDRGNGLMEHCFEIHIEMVKGLAPLQATVWGEADCYVQYYFPVQHSQSSVLKGPEFLENDPIFNSEHHHSLLLPAEVPVQRLLLSAFSAQGLVPGGGVQFEIWCRYYYPNVRDQKVAKGTLPLSRICAMVTTQHREDVGIQTFNLPLTPRIENRKELRNQSSGLLDVGLRYRRSPRTAEGVLAARTVSISVQIIRACGLQAAAKHNIYFMVYYCMDAH

SEQ ID NO: 916175 - protein, 163 aa, Homo sapiens
MSNHYNPSGIHKCQSICPKKQPGTKVIVDFHIHSLTTWCNRPLRRRRPTDGCCPAAVSQHTGSFRFSWTEAQPGRREDSEGLSAEDRPLRPRRLHPGRKGHWGVGARSTCSPLRPHTRSLMLKLVQPPVQCPRKMKYPHDRHEAEFKFPLLSHLPEEEEKWYR

SEQ ID NO: 916176 - protein, 339 aa, Homo sapiens
ATMNSWNAGLAGLLVGTIGVSLLSNALVLLCLLHSADIRRQAPALFTLNLTCGNLLCTVVNMPLTLAGVVAQRQPAGDRLCRLAAFLDTFLAANSMLSMAALSIDRWVAVVFPLSYRAKMRLRDAALMVAYTWLHALTFPAAALALSWLGFHQLYASCTLCSRRPDERLRFAVFTGAFHALSFLLSFVVLCCTYLKVLKVARFHCKRIDVITMQTLVLLVDLHPSVRERCLEEQKRRRQRATKKISTFIGTFLVCFAPYVITRLVELFSTVPIGSHWGVLSKCLAYSKAASDPFVYSLLRHQYRKSCKEILNRLLHRRSIHSSGLTGDSHSQNILPVSE

SEQ ID NO: 916177 - protein, 854 aa, Homo sapiens
MWRAKLRRGTCEPAVKGSPSACYSPSSPVQVLEDSTYFSPDFQLYSGRHETSALTVEATSSIREKVVEDPLCNFHSPNFLRISEVEMRGSEDAAAGTVLQRLIQEQLRYGTPTENMNLLAIQHQATGSAGPAHPTNNFSSTENLTQEDPQMVYQSARQEPQGQEHQVDNTVMEKQVRSSSLQQNNEELPTYEEAKAQSQFFRGQQQQQQQQGAVGHGYYMAGGTSQKSRTEGRPTVNRANSGQAHKDEALKELKQGHVRSLSERIMQLSLERNGAKQHLPGSGNGKGFKVGGGPSPAQPAGKVLDPRGPPPEYPFKTKQMMSPVSKTQEHGLFYGDQHPGMLHEMVKPYPAPQPVRTDVAVLRYQPPPEYGVTSRPCQLPFPSTMQQHSPMSSQTSSASGPLHSVSLPLPLPMALGAPQPPPAASPSQQLGPDAFAIVERAQQMVEILTEENRVLHQELQGYYDNADKLHKFEKELQRISEAYESLVKSTTKRESLDKAMRNKLEGEIRRLHDFNRDLRDRLETANRQLSSREYEGHEDKAAEGHYASQNKEFLKEKEKLEMELAAVRTASEDHRRHIEILDQALSNAQARVIKLEEELREKQAYVEKVEKLQQALTQLQSACEKREQMERRLRTWLERELDALRTQQKHGNGQPANMPEYNAPALLELVREKEERILALEADMTKWEQKYLEESTIRHFAMNAAATAAAERDTTIINHSRNGSYGESSLEAHIWQEEEEVVQANRRCQDMEYTIKNLHAKIIEKDAMIKVLQQRSRKDAGKTDSSSLRPARSVPSIAAATGTHSRQTSLTSSQLAEEKKEEKTWKGSIEWDNGESTLEEVLSRIRIAAGEGAP

SEQ ID NO: 916178 - protein, 854 aa, Homo sapiens; identical to SEQ ID NO: 916177

SEQ ID NO: 916179 - protein, 96 aa, Homo sapiens
LGKEHHEHASAPLLPPPPTSALSSIASTTAASSAHAKTGSKDSSTQTDKSAELFWPSMASLPSRGRLSTTPAHSPVLKHPAAKGTAEKLGMWATPP

SEQ ID NO: 916180 - protein, 956 aa, Homo sapiens
MWRAKLRRGTCEPAVKGSPSACYSPSSPVQVLEDSTYFSPDFQLYSGRHETSALTVEATSSIREKVVEDPLCNFHSPNFLRISEVEMRGSEDAAAGTVLQRLIQEQLRYGTPTENMNLLAIQHQATGSAGPAHPTNNFSSTENLTQEDPQMVYQSARQEPQGQEHQVDNTVMEKQVRSSSLQQNNEELPTYEEAKAQSQFFRGQQQQQQQQGAVGHGYYMAGGTSQKSRTEGRPTVNRANSGQAHKDEALKELKQGHVRSLSERIMQLSLERNGAKQHLPGSGNGKGFKVGGGPSPAQPAGKVLDPRGPPPEYPFKTKQMMSPVSKTQEHGLFYGDQHPGMLHEMVKPYPAPQPVRTDVAVLRYQPPPEYGVTSRPCQLPFPSTMQQHSPMSSQTSSASGPLHSVSLPLPLPMALGAPQPPPAASPSQQLGPDAFAIVERAQQMVEILTEENRVLHQELQGYYDNADKLHKFEKELQRISEAYESLVKSTTKRESLDKAMRNKLEGEIRRLHDFNRDLRDRLETANRQLSSREYEGHEDKAAEGHYASQNKEFLKEKEKLEMELAAVRTASEDHRRHIEILDQALSNAQARVIKLEEELREKQAYVEKVEKLQQALTQLQSACEKREQMERRLRTWLERELDALRTQQKHGNGQPANMPEYNAPALLELVREKEERILALEADMTKWEQKYLEESTIRHFAMNAAATAAAERDTTIINHSRNGSYGESSLEAHIWQEEEEVVQANRRCQDMEYTIKNLHAKIIEKDAMIKVLQQRSRKDAGKTDSSSLRPARSVPSIAAATGTHSRQTSLTSSQLAEEKKEEKTWKGSIGLLLGKEHHEHASAPLLPPPPTSALSSIASTTAASSAHAKTGSKDSSTQTDKSAELFWPSMASLPSRGRLSTTPAHSPVLKHPAAKGTAEKLENSPGHGKSPDHRGRVSSLLHKPEFPDGEMMEVLI

SEQ ID NO: 916181 - protein, 368 aa, Homo sapiens
MWRAKLRRGTCEPAVKGSPSACYSPSSPVQVLEDSTYFSPDFQLYSGRHETSALTVEATSSIREKVVEDPLCNFHSPNFLRISEVEMRGSEDAAAGTVLQRLIQEQLRYGTPTENMNLLAIQHQATGSAGPAHPTNNFSSTENLTQEDPQMVYQSARQEPQGQEHQVDNTVMEKQVRSSSLQQNNEELPTYEEAKAQSQFFRGQQQQQQQQGAVGHGYYMAGGTSQKSRTEGRPTVNRANSGQAHKDEALKELKQGHVRSLSERIMQLSLERNGAKQHLPGSGNGKGFKVGGGPSPAQPAGKVLDPRGPPPEYPFKTKQMMSPVSKTQEHGLFYGDQHPGMLHEMVKPYPAPQPVRTDVAVLRYHATP

SEQ ID NO: 916182 - protein, 139 aa, Homo sapiens
MGQNWKRQQKLWNVPQLPFIRVPPSIYDTSLLKALNQGQQRYFYSIMRIYNSRPQWEALQTRYIHSLQHQQLLGYITQREALSYALVLRDSTKRASAKVAPQRTIPRKTSAMTRRCPSVLPVSVVLPRAQSKRRQVLRN

SEQ ID NO: 916183 - protein, 169 aa, Homo sapiens
MAHRPQITDAARRPQITDVARRLQITDTARRPQITDAAHRPQITDAACRPQITNTAYRPQITDAARRPQITDVARRPQITDMARRPQITDAARRPQITDTARRPQITDAACRPQITDAARRPQITDTAWTGELWRRHLESWTLLDVFSLVGPVVYPSVETNHTQERRRC

SEQ ID NO: 916184 - protein, 1101 aa, Homo sapiens
VACSFCPEFSHHVEFTCNLVTQHCSGEACFLAELLEFAEVIFAVYHENTKSASDIISIESCKEYLLGVVKVPTKELLIKRSGITGWYPIILPEDGGLPHGLELMQKIVGGLELSISFTHRGDRERVLEAAEHLGWSFENSLKDFVRMDEGEPATVTISTPRLWLPIHCVLLAGHNHIHKNTYCYLRYKFYDHEAFWTPLKKPKESVNKKQIMVTFKASKRAEVTRGPSLLWYFREERLEIQVWRAYGNDSVERPHQTDSWIGSAYVDLARLGERSARTLTVSGVYPLFGRNASNLSGAALRVHVVLSSLSSHLEPTHELDSMDCSSHSESEQLPRRNDEVQLSPPEVISCHQKSPASTQVPCSSTTAEVRLTQEGPADLDGTFAVSILVERAMHLSLKGSPLTERKVSIPSCCVSFATADESSPVYTQVVENTDSPIWNFQQQSRLSKELLLDPQQTLVFKVWHKGDEERVIGFASVDLSPLLSGFQFVCGWYNITDFSGECQGQIKVAVSPLESLIHFKEERQARRGVETSKSLIPIYSPFSFPASDTYAAFSSHMARQTLDQLAHASSKELDFSSPGRSDTTRSQASRHEEHVQNIRRFHESLHLQGEAPLPCDDKLTTSPLSSQTSILTSLRKNLSELDQIQRYFRQKLTKPFLPLSPQTQTAISQHQESCRDHLGPGASSLDPGSQCILEKSSNLVLQVSSLITDLQTITRDSQAALSSHRARSRSNKATTLPDAQDTEALQERCTMPDEPLVRAPDKGTDSPSPPPLEETSNGGRMLHESLRHAVPITRMQSSEDTEAGPAYSDEDYEEDIIEPRTLNEITTVTDKTSPWSSVISDTSEVISPQPDEVQREGPSCPSPGPFCREELMVKSSFLSSPERAVNPHLPRQGSPSQSLVACECEASKARVGGESASANPQPIPCPTLSGAQQSSTFVGWSSPQTDQNKEPKSEAPAENEAATSELGDSADSFKKLPLNLASQSRRENHKGPPIDSSDIRQRQVTTGSETSTKQSLLLPGPIVVPNFFLPPQQLEASLRMLSLSATLPPAATTDQDKSEATRGALSQRPCRPRPNSLPLNLPEEETLRIARIFSSQYSQKD

SEQ ID NO: 916185 - protein, 998 aa, Homo sapiens
MQKIVGGLELSISFTHRGDRERVLEAAEHLGWSFENSLKDFVRMDEGEPATVTISTPRLWLPIHCVLLAGHNHIHKNTYCYLRYKFYDHEAFWTPLKKPKESVNKKQIMVTFKASKRAEVTRGPSLLWYFREERLEIQVWRAYGNDSVERPHQTDSWIGSAYVDLARLGERSARTLTVSGVYPLFGRNASNLSGAALRVHVVLSSLSSHLEPTHELDSMDCSSHSESEQLPRRNDEVQLSPPEVISCHQKSPASTQVPCSSTTAEVRLTQEGPADLDGTFAVSILVERAMHLSLKGSPLTERKVSIPSCCVSFATADESSPVYTQVVENTDSPIWNFQQQSRLSKELLLDPQQTLVFKVWHKGDEERVIGFASVDLSPLLSGFQFVCGWYNITDFSGECQGQIKVAVSPLESLIHFKEERQARRGVETSKSLIPIYSPFSFPASDTYAAFSSHMARQTLDQLAHASSKELDFSSPGRSDTTRSQASRHEEHVQNIRRFHESLHLQGEAPLPCDDKLTTSPLSSQTSILTSLRKNLSELDQIQRYFRQKLTKPFLPLSPQTQTAISQHQESCRDHLGPGASSLDPGSQCILEKSSNLVLQVSSLITDLQTITRDSQAALSSHRARSRSNKATTLPDAQDTEALQERCTMPDEPLVRAPDKGTDSPSPPPLEETSNGGRMLHESLRHAVPITRMQSSEDTEAGPAYSDEDYEEDIIEPRTLNEITTVTDKTSPWSSVISDTSEVISPQPDEVQREGPSCPSPGPFCREELMVKSSFLSSPERAVNPHLPRQGSPSQSLVACECEASKARVGGESASANPQPIPCPTLSGAQQSSTFVGWSSPQTDQNKEPKSEAPAENEAATSELGDSADSFKKLPLNLASQSRRENHKGPPIDSSDIRQRQVTTGSETSTKQSLLLPGPIVVPNFFLPPQQLEASLRMLSLSATLPPAATTDQDKSEATRGALSQRPCRPRPNSLPLNLPEEETLRIARIFSSQYSQKD

SEQ ID NO: 916186 - protein, 553 aa, Homo sapiens
VACSFCPEFSHHVEFTCNLVTQHCSGEACFLAELLEFAEVIFAVYHENTKSASDIISIESCKEYLLGVVKVPTKELLIKRSGITGWYPIILPEDGGLPHGLELMQKIVGGLELSISFTHRGDRERVLEAAEHLGWSFENSLKDFVRMDEGEPATVTISTPRLWLPIHCVLLAGHNHIHKNTYCYLRYKFYDHEAFWTPLKKPKESVNKKQIMVTFKASKRAEVTRGPSLLWYFREERLEIQVWRAYGNDSVERPHQTDSWIGSAYVDLARLGERSARTLTVSGVYPLFGRNASNLSGAALRVHVVLSSLSSHLEPTHELDSMDCSSHSESEQLPRRNDEVQLSPPEVISCHQKSPASTQVPCSSTTAEVRLTQEGPADLDGTFAVSILVERAMHLSLKGSPLTERKVSIPSCCVSFATADESSPVYTQVVENTDSPIWNFQQQSRLSKELLLDPQQTLVFKVWHKGDEERVIGFASVDLSPLLSGFQFVCGWYNITDFSGECQGQIKVAVSPLESLIHFKEERQARRGVETSKSLQPPLPCAVLRSPASPASR

SEQ ID NO: 916187 - protein, 162 aa, Homo sapiens
LPPPSSIKGESGTFMLIPSLTFVIQEYFGWIASLKYEDFEVIYPNQPDHFLRVNIPWKTCPAFSSVTMDYILYKAVWEANICHKTNMVPAPMELIFEWRKCQQVSHGVNTSKGEAQVRKSNLDTVEETIAVIQAQDGGASSLRITNGDRFKRHLESAANRAE

SEQ ID NO: 916188 - protein, 855 aa, Homo sapiens
AAPPQGRPGRASPGCGGAPCRPRRAERGEGTRAGLPPCPNRCRRRSFSGPRVLAERPPRRPPRPGALRSRRAARAHLKRPGQALPRSSARPPRPAPAFTLERPRQPQQGRRRRIEELSRSSRERLLQSRDRMFSKFTSILQHAVEALAPSLPLQEDFVYHWKAITHYYIETSDDKAPVTDTNIPSHLEQMLDILVQEENERESGETGPCMEYLLHHKILETLYTLGKADCPPGMKQQVLVFYTKLLGRIRQPLLPHINVHRPVQNKMKSLASKGVPNVISEDTLKGQDSLSTDTGQSRQPEELSGATGMEQTELEDEPPHQMDHLSTSLDNLSVTSLPEASVVCPNQDYNLVNSLLNLTRSPDGRIAVKACEGLMLLVSLPEPAAAKCLTQSTCLCELLTDRLASLYKALPQSVDPLDIETVEAINWGLDSYSHKEDASAFPGKRALISFLSWFDYCDQLIKEAQKTAAVALAKAVHERFFIGVMEPQLMQTSEMGILTSTALLHRIVRQVTSDVLLQEMVFFILGEQREPETLAEISRHPLRHRLIEHCDHISDEISIMTLRMFEHLLQKPNEHILYNLVLRNLEERNYTEYKPLCPEDKDVVENGLIAGAVDLEEDPLFTDISPENTLPNQEWLSSSPPATPDHPKNDGKTEVHKIVNSFLCLVPDDAKSSYHVEGTGYDTYLRDAHRQFRDYCAICLRWEWPGSPKALEKCNLEAAFFEGHFLKVLFDRMGRILDQPYDVNLQVTSVLSRLSLFPHPHIHEYLLDPYVNLAPGCRSLFSVIVRVVGDLMLRIQRIQDFTPKLLLVRKRLLGLEPEGPIIDHITLLEGVIVLEEFCKELAAIAFVKYHASSTP

SEQ ID NO: 916189 - protein, 855 aa, Homo sapiens; identical to SEQ ID NO: 916188

SEQ ID NO: 916190 - protein, 836 aa, Homo sapiens
AAPPQGRPGRASPGCGGAPCRPRRAERGEGTRAGLPPCPNRCRRRSFSGPRVLAERPPRRPPRPGALRSRRAARAHLKRPGQALPRSSARPPRPAPAFTLERPRQPQQGRRRRIEELSRSSRERLLQSRDRMFSKFTSILQHAVEALAPSLPLQEDFVYHWKAITHYYIETSDDKAPVTDTNIPSHLEQMLDILVQEENERESGETGPCMEYLLHHKILETLYTLGKADCPPGMKQQVLVFYTKLLGRIRQPLLPHINVHRPVQNKMKSLASKGVPNVISEDTLKGQDSLSTDTGQSRQPEELSGATGMEQTELEDEPPHQMDHLSTSLDNLSVTSLPEASVVCPNQDYNLVNSLLNLTRSPDGRIAVKACEGLMLLVSLPEPAAAKCLTQSTCLCELLTDRLASLYKALPQSVDPLDIETVEAINWGLDSYSHKEDASAFPGKRALISFLSWFDYCDQLIKEAQKTAAVALAKAVHERFFIGVMEPQLMQTSEMGILTSTALLHRIVRQVTSDVLLQEMVFFILGEQREPETLAEISRHPLRHRLIEHCDHISDEISIMTLRMFEHLLQKPNEHILYNLVLRNLEERNYTEYKPLCPEDKDVVENGLIAGAVDLEEDPLFTDISPENTLPNQEWLSSSPPATPDHPKNDGKTEVHKIVNSFLCLVPDDAKSSYHVEGTGYDTYLRDAHRQFRDYCAICLRWEWPGSPKALEKCNLEAAFFEGHFLKVLFDRMGRILDQPYDVNLQVTSVLSRLSLFPHPHIHEYLLDPYVNLAPGCRSLFSVIVRVVGDLMLRIQRIQDFTPKLLLVRKRLLGLEPEGPISDLEPVEALTVSSIC

SEQ ID NO: 916191 - protein, 306 aa, Homo sapiens
AAPPQGRPGRASPGCGGAPCRPRRAERGEGTRAGLPPCPNRCRRRSFSGPRVLAERPPRRPPRPGALRSRRAARAHLKRPGQALPRSSARPPRPAPAFTLERPRQPQQGRRRRIEELSRSSRERLLQSRDRMFSKFTSILQHAVEALAPSLPLQEDFVYHWKAITHYYIETSDDKAPVTDTNIPSHLEQMLDILVQEENERESGETGPCMEYLLHHKILETLYTLGKADCPPGMKQQVLVFYTKLLGRIRQPLLPHINVHRPVQKLIRLCGEVLATPTENEEIQFLCIVCAKLKQDPYLVNFFLEV

SEQ ID NO: 916192 - protein, 828 aa, Homo sapiens
AAPPQGRPGRASPGCGGAPCRPRRAERGEGTRAGLPPCPNRCRRRSFSGPRVLAERPPRRPPRPGALRSRRAARAHLKRPGQALPRSSARPPRPAPAFTLERPRQPQQGRRRRIEELSRSSRERLLQSRDRMFSKFTSILQHAVEALAPSLPLQEDFVYHWKAITHYYIETSDDKAPVTDTNIPSHLEQMLDILVQEENERESGETGPCMEYLLHHKILETLYTLGKADCPPGMKQQVLVFYTKLLGRIRQPLLPHINVHRPVQNKMKSLASKGVPNVISEDTLKGQDSLSTDTGQSRQPEELSGATGMEQTELEDEPPHQMDHLSTSLDNLSVTSLPEASVVCPNQDYNLVNSLLNLTRSPDGRIAVKACEGLMLLVSLPEPAAAKCLTQSTCLCELLTDRLASLYKALPQSVDPLDIETVEAINWGLDSYSHKEDASAFPGKRALISFLSWFDYCDQLIKEAQKTAAVALAKAVHERFFIGVMEPQLMQTSEMGILTSTALLHRIVRQVTSDVLLQEMVFFILGEQREPETLAEISRHPLRHRLIEHCDHISDEISIMTLRMFEHLLQKPNEHILYNLVLRNLEERNYTEYKPLCPEDKDVVENGLIAGAVDLEEDPLFTDISPENTLPNQEWLSSSPPATPDHPKNDGKTEVHKIVNSFLCLVPDDAKSSYHVEGTGYDTYLRDAHRQFRDYCAICLRWEWPGSPKALEKCNLEAAFFEGHFLKVLFDRMGRILDQPYDVNLQVTSVLSRLSLFPHPHIHEYLLDPYVNLAPGCRSLFSVIVRVVGDLMLRIQRIQDFTPKLLLVRKRLLGLEPEGPMQTLPSWW

SEQ ID NO: 916193 - protein, 423 aa, Homo sapiens
MGPGARLAALLAVLALGTGDPERAAARGDTFSALTSVARALAPERRLLGLLRRYLRGEEARLRDLTRFYDKVLSLHEDSTTPVANPLLAFTLIKRLQSDWRNVLLKDGYEKVEQDLPAFEDLEGAARALMRLQDVYMLNVKGLARGVFQRVTGSAITDLYSPKRLFSLTGDDCFQVGKVAYDMGDYYHAIPWLEEAVSLFRGSYGEWKTEDEASLEDALDHLAFAYFRGRKCFVCPQPLSGVSSLQYVMDKREASHSISFWDALRVMQRGQQATGSSANAWGILQPKWVQTGPDNKRMARNVLKYERLLAESPNHVVAEAVIQRPNIPHLQTRDTYEGLCQTLGSQPTLYQIPSLYCSYETNSNAYLLLQPIRKEVIHLEPYIALYHDFVSDSEAQKIRELAEPWGRGTCGCMHLSKLTKWST

SEQ ID NO: 916194 - protein, 434 aa, Homo sapiens
MGPGARLAALLAVLALGTGDPERAAARGDTFSALTSVARALAPERRLLGLLRRYLRGEEARLRDLTRFYDKVLSLHEDSTTPVANPLLAFTLIKRLQSDWRNVVHSLEASENIRALKDGYEKVEQDLPAFEDLEGAARALMRLQDVYMLNVKGLARGVFQRVTGSAITDLYSPKRLFSLTGDDCFQVGKVAYDMGDYYHAIPWLEEAVSLFRGSYGEWKTEDEASLEDALDHLAFAYFRGRKCFVCPQPLSGVSSLQYVMDKREASHSISFSDALRVMQRGQQATGSSANAWGILQPKWVQTGPDNKRMARNVLKYERLLAESPNHVVAEAVIQRPNIPHLQTRDTYEGLCQTLGSQPTLYQIPSLYCSYETNSNAYLLLQPIRKEVIHLEPYIALYHDFVSDSEAQKIRELAEPWGRGTCGCMHLSKLTKWST

SEQ ID NO: 916195 - protein, 387 aa, Homo sapiens
  misc_feature (247)..(247): Xaa can be any naturally occurring amino acid
  misc_feature (249)..(250): Xaa can be any naturally occurring amino acid
  misc_feature (253)..(253): Xaa can be any naturally occurring amino acid
MGPGARLAALLAVLALGTGDPERAAARGDTFSALTSVARALAPERRLLGLLRRYLRGEEARLRDLTRFYDKVLSLHEDSTTPVANPLLAFTLIKRLQSDWRNVVHSLEASENIRALKDGYEKVEQDLPAFEDLEGAARALMRLQDVYMLNVKGLARGVFQRVTGSAITDLYSPKRLFSLTGDDCFQVGKVAYDMGDYYHAIPWLEEAVSLFRGSYGEWKTEDEASLEDALDHLAFAYFREEMLRVTXTXXEFXLYSPDNKRMARNVLKYERLLAESPNHVVAEAVIQRPNIPHLQTRDTYEGLCQTLGSQPTLYQIPSLYCSYETNSNAYLLLQPIRKEVIHLEPYIALYHDFVSDSEAQKIRELAEPWGRGTCGCMHLSKLTKWST

SEQ ID NO: 916196 - protein, 154 aa, Homo sapiens
TAARLNHLTESAHALMSLIPWVKEAPCQRTLEVLRMELPRIPMGHVTRQLETSPNALKETFPNLREKSLLHFHGKQEKGKPQQQSPRRDAIHHGQDGWSPQYPTMEQGAPAGTHPCCHSSSYQQASSDISEHGLSLLTLSYAEREKVQPSERSA

SEQ ID NO: 916197 - protein, 398 aa, Homo sapiens
TGKTETTKDLAKALGLLCVVTNCGEGMDYRAVGKIFSGLAQCGAWGCFDEFNRIDASVLSVISSQIQTIRNALIHQLTTFQFEGQEISLDSRMGIFITMNPGYAGRTELPESVKALFRPVVVIVPDLQQICEIMLFSEGFLEAKVGGLGSARSCSADFTRVCFQTGDLGRTLAKKMTVLYKLAREQLSKQYHYDFGLRALKSVLVMAVTVLNVARTHARTHTHTHGHTHAHTHTDTCTRTHDVVLMRALRDMNLPKFVFEDVPLFLGLISDLFPGLDCPRVRYPDFNDAVEQVLEENGYAVLPIQVDKVVQMFETMLTRHTTMVVGPTRGGKSVVINTLCQAQTKLGLTTKLYILNPKAVSVIELYGILDPTTRDWTDGVLSNIFREINKPTDKKERK

SEQ ID NO: 916198 - protein, 261 aa, Homo sapiens
MAQASLLACEGLAGVSLVPTAASKKMMLSQIASKQAENGERAGSPDVLRWFTLIYEFCLRAALGLISCSEMGYEFRFDLSSKGHRKDSDKSRSRKDDDSLSEASHSKKTVKKADSIREVPFSNSWKWTQSRTVSPGRGQWWPHDMPDYCPQVVVVEQNGSFQVKIPKNFVCEHCFGAFRSSYHLKRHILIHTGEKPFECDICDMRFIQKYHLERHKRVHSGEKPYQCERCHQCFSRTDRLLRHKRMCQGCQSKTSDGQFSL

SEQ ID NO: 916199 - protein, 156 aa, Homo sapiens
SHNSFLGFLWDITLLSFNMCRLIEDDFIFGSKESLMTQNRIIRALNFLVHTYWFRGGIFSAIALLNPTELTIKKKFGLGNGQMKIRGQKLKAHRSQTEKHQIVPPNIMKSAGLKALHSLLICSANKGFAVVQEALIFPQNVLSSLLGTRDAKRKSL

SEQ ID NO: 916200 - protein, 147 aa, Homo sapiens
MSLLIAVVGSLCSGAKLDLSPLCQPEIWKADHSRQLEIPSPLFFNVFAVEVSAPEKGFSTERIKNWIILDLKVEWSSGKSCGGERAKSSQCLVFEGTCGCHVDSTRGYVSAAGRELLAADSCTARYLDAKTRTKDPFPLGELSASRT

SEQ ID NO: 916201 - protein, 172 aa, Homo sapiens
MEIQRQQRDCTVALDCKAFTKSRRNNIQYAVFTLGALHWKMQQILFLIFEKDKRAACLESLFPLSINKRPLYLQGFHMMLPKKKKEKACKVFHSKCAHQIWLYRLITEDPEGKPRVLENVVSGCAAAGRRVKAKATADGVSLLLPRLVCNGVLSTHCNLHFSGSSDSPASTC

SEQ ID NO: 916202 - protein, 172 aa, Homo sapiens; identical to SEQ ID NO: 916201

SEQ ID NO: 916203 - protein, 686 aa, Homo sapiens
MNAPGPGLPGAPGDGPAPPSAPSPALALGIARRLAGPGSCAHPAATPAARPPGLLPSPNEEEAGPAPAIPTIYASLDGPLVRPPAGAALGRELLLLPGQPQTPVFPSTHDPRTVTLDFRNAGIPAPPPPLPPQPPPPPPPPPVEPTKLPFKELDNQWPSEAIPPGPRGRDEVTEEYMELAKSRGPWRRPPKKRHEDLVPPAGSPELSPPQPLFRPRSEFEEMTILYDIWNGGIDEEDIRFLCVTYERLLQQDNGMDWLNDTLWVYHPYILLAWGALHLLGCRKSLLTSLGPTTQSVAARGAHEAKKKKRDDGIREHVTGCARSEGFYTIDKKDKLRYLNSSRASTDEPPADTQDTGDDRDPEPRVGPPRTRPAPLSPAHRPLQGMSIPAQPHASTRAGSERRSEQRRLLSSFTGSCDSDLLKFNQLKFRKKKLKFCKSHIHDWGLFAMEPIAADEMVIEYVGQNIRQVIADMREKRYEDEGIGSSYMFRVDHDTIIDATKCGNFARFINHSCNPNCYAKVITVESQKKIVIYSKQHINVNEEITYDYKFPIEDVKIPCLCGSENCRGTLNWPRHQTQRMSAVALGLPSVEPLAPGPAPAPAPISGAVLYPAAIQGLAPTLPPGAPGSAPPRERASLSFSPRLSHFNKRPFQDFCLTPASASLSPSLLPSLSSLSLLSPTITLGLFL

SEQ ID NO: 916204 - protein, 143 aa, Homo sapiens
MLKIWKPKFMFFQSAPLFWEKMLKRVLMGKTPWILLPSQIFRRFSKNNSISDSLNFDEETDGEEEEGKKIRSQATYSEKERPNSTSSLHSTTDANASGSYAAAQPAGNELGEVEELEDFASVFDFAAQPLHNRLREVEGLEDF

SEQ ID NO: 916205 - protein, 128 aa, Homo sapiens
MAENEEQVYLANLPTYKHSTWTSPTKRKLRNKIGITTVLWEAKSATNNHSSKNLKMRADEGFSETCCRCSAGLEEVKTVAERKAVKLHHKIQVRKQTHTEVKQLPQRRMAKSGYLSPCHAVLREGFLH

SEQ ID NO: 916206 - protein, 128 aa, Homo sapiens; identical to SEQ ID NO: 916205

SEQ ID NO: 916207 - protein, 236 aa, Homo sapiens
VLITMTFAVIYYNSSRKQTVLMMSTCHEWRDPDHWIRAHRSSLRITSGKTLFPNKVHSVFPETHGFLRGKETSSDDGSDDGDDDGDDGEHDGDDGEDGDDDGDGDVMMVVMMVMVVMVTVVMMMVMVIDDGDGGDDGDDGDGGDDDGDGDDGNNDGGSDGDDDQIKDWLKNRKEVKAALHKTRPPVQCQFTIAMGTPIRHAYQCYVSLPLPWQHPEVTAPFARQRPRSSHPFSRNF

SEQ ID NO: 916208 - protein, 426 aa, Homo sapiens
MVLSVPVIALGATLGTATSILALCGVTCLCRHMHPKKGLLPRDQDPDLEKAKPSLLGSAQQFNVKKSTEPVQPRALLKFPDIYGPRPAVTAPEVINYADYSLRSTEEPTAPASPQPPNDSRLKRQVTEELFILPQNGVVEDVCVMETWNPEKAASWNQAPKLHYCLDYDCQKAELFVTRLEAVTSNHDGGCDCYVQGSVANRTGSVEAQTALKKRQLHTTWEEGLVLPLAEEELPTATLTLTLRTCDRFSRHSVAGELRLGLDGTSVPLGAAQWGELKTSAKEPSAGAGEVLLSISYLPAANRLLVVLIKAKNLHSNQSKELLGKDVSVKVTLKHQARKLKKKQTKRAKHKINPVWNEMIMFELPDDLLQASSVELEVLGQDDSGQSCALGHCSLGLHTSGSERSHWEEMLKNPRRQIAMWHQLHL

SEQ ID NO: 916209 - protein, 426 aa, Homo sapiens; identical to SEQ ID NO: 916208

SEQ ID NO: 916210 - protein, 426 aa, Homo sapiens; identical to SEQ ID NO: 916208

SEQ ID NO: 916211 - protein, 391 aa, Homo sapiens
MGAAIGWMGRWMEEFNVKKSTEPVQPRALLKFPDIYGPRPAVTAPEVINYADYSLRSTEEPTAPASPQPPNDSRLKRQVTEELFILPQNGVVEDVCVMETWNPEKAASWNQAPKLHYCLDYDCQKAELFVTRLEESPTPVLFSLPAAVTSNHDGGCDCYVQGSVANRTGSVEAQTALKKRQLHTTWEEGLVLPLAEEELPTATLTLTLRTCDRFSRHSVAGELRLGLDGTSVPLGAAQWGELKTSAKEPSAGAGEVLLSISYLPAANRLLVVLIKAKNLHSNQSKELLGKDVSVKVTLKHQARKLKKKQTKRAKHKINPVWNEMIMFELPDDLLQASSVELEVLGQDDSGQSCALGHCSLGLHTSGSERSHWEEMLKNPRRQIAMWHQLHL

SEQ ID NO: 916212 - protein, 426 aa, Homo sapiens; identical to SEQ ID NO: 916208

SEQ ID NO: 916213 - protein, 426 aa, Homo sapiens; identical to SEQ ID NO: 916208

SEQ ID NO: 916214 - protein, 424 aa, Homo sapiens
CGYYLFGCDHHLLRCGYHLPGFTTSLVMVITPPFAVITSLGVVITSLVVIITCLVLVITALGVVITSLGVVVTSLVMVITPLVAVITPLGVVITSLVVVITSLVMVITSLTVVITSSIVVITPLVMVITSLTVIITSLFVVITPLVMVITFLIVVNTSLVVVLITLIVSLVVVITFLVVAITSLVVVITSLVVVITSLVVVIPPSLWLSLPWVWSSFPWLWFSPPWLWFLPLLFVVTTSLVVVLTSLIVSITSLFVVIIPLVVVITSLIVVITSLVVVLIAVIVVTPSLIVVISSLVVVIASLVVVFISLIVVISSLIVVITSLVVVITSLVVVITSLIVVITSLVVVITSLVVVITSLIVVIIPLVVVITSFVVRESWLQGLLFPRMLQQKPIINGEATCKGHVASTAITMKTDTARTAGGHI

SEQ ID NO: 916215 - protein, 424 aa, Homo sapiens; identical to SEQ ID NO: 916214

SEQ ID NO: 916216 - protein, 145 aa, Homo sapiens
SQKPDSDMDNKVQAEVVSDGDEELVGNWSKSDSVIVLEAAVSLGGEDLTPFYGLLSGGREGKFYRELEDYFYYSQLRSQGIDTMETRKVSEHICLSELPFVMRAIGFYPSEEKVLMGHLWKLGACLDCGARRVQPSLMTVLQKHP

SEQ ID NO: 916217 - protein, 192 aa, Homo sapiens
MPWAKPTISGLSLWAVIAMELGTIVALLSFLNAKPTISGLSPWAVIAMELGTIVALLSFLNAKPTISGLSPWAVIAMELGTTSPRNSGKGARVVNTDAVNTSCVPSRVLVTEGHIEGLCRRAVNDLEHHFSKVARCSMKSTGLRAQSSEFQVWFIHTSTHVGYDSTKEGVKTQFRRDKVKETSKMRNDCTGP

SEQ ID NO: 916218 - protein, 192 aa, Homo sapiens; identical to SEQ ID NO: 916217

SEQ ID NO: 916219 - protein, 192 aa, Homo sapiens; identical to SEQ ID NO: 916217

SEQ ID NO: 916220 - protein, 192 aa, Homo sapiens; identical to SEQ ID NO: 916217

SEQ ID NO: 916221 - protein, 192 aa, Homo sapiens; identical to SEQ ID NO: 916217

SEQ ID NO: 916222 - protein, 826 aa, Homo sapiens
PRAAACHLLELLEMQVLRSPLDQKLGVEPSVQQALLVILMRTITLKRKELRLRDGAYITTPQCILWSSTRLSGWRTAEHGDCLEALKKKVLEREGDKGTPVLRGFSSVSGSWSRRMPPFLLLTCLFITGTSVSPVALDPCSAYISLNEPWRNTDHQLDESQGPPLCDNHVNGEWYHFTGMAGDAMPTFCIPENHCGTHAPVWLNGSHPLEGDGIVQRQACASFNGNCCLWNTTVEVKACPGGYYVYRLTKPSVCFHVYCGHFYDICDEDCHGSCSDTSECTCAPGTVLGPDRQTCFGKKLIKDENECEQNNGGCSEICVNLKNSYRCECGVGRVLRSDGKTCEAMLLVQGAHLDWPGNRGSSITTGRQLCFPNFPAAEKHLGLLRLAPPRPSPGALASEELRWGLRVCVFNKLFPFLLVSTADVEGCHNNNGGCSHSCLGSEKGYQCECPRGLVLSEDNHTCQVPVLCKSNAIEVNIPRELVGGLELFLTNTSCRGVSNGTHVNILFSLKTCGTVVDESSQGTNTGAVKTSGTWIQVEVCVWFTQQRGKERAFQIGNNFLIIFIIIIIIFIIIFIFFIVIIIIIIIFLSSKFVEDQRVVVNDKIVASNLVTGLPKQTPGSSGDFIIRTSKLLIPVTCEFPRLYTISEGYVPNLRNSPLEIMSRNHGIFPFTLEIFKDNEFEEPYREALPTLKLRDSLYFGIEPVVHVSGLESLVESCFATPTSKIDEVLKYYLIRDGCVSDDSVKQYTSRDHLAKHFQVPVFKFVGKDHKEVFLHCRVLVCGVLDERSRCAQGCHRRMRRGAGGEDSAGLQGQTLTGGPIRIDWED

SEQ ID NO: 916223 - protein, 147 aa, Homo sapiens
HFLFSEARPVLRMLQGPSLIPDTRPTWTVPPNNVSSLLSSVQSYSYSPFSIHTKPYPGHHQSFYTTNVSSNNLTISPLTTRSSFSLISPTLGSHTATNPARSSPEKHRPFSLHTTPKNLRHPNTSTLFCFIFLINSIRCGMGLNQAN

SEQ ID NO: 916224 - protein, 173 aa, Homo sapiens
MFSLIIYFYDMIFFFIPSLFPLVSERQDYVYSVFSESKQPSCEAGWPKSSSLWHTKDHTWLCIYLKDNENAAYNTGISINHGLLHNVTNTAKMMCFNWMLLAQDTCDWKIGVGGKKIELVYAHRTNVPPLAAKLLLFTIFSTLREITVLTKLEVVSIVILSMQTEVEDRSSSS

SEQ ID NO: 916225 - protein, 142 aa, Homo sapiens
MAAAAGRSLLLLLSSRGGGGGGAGGCGALTAGCFPGLGVSRHRQQQHHRTVSERARRLRGGRGGAGVWEPPAGRPPGQQASYLNSRPLRRLPGTEEPPTGDTRAGKARDLNLSPTRPQSRSLPSSFLTALPQGSLNGARWKL

SEQ ID NO: 916226 - protein, 174 aa, Homo sapiens
MLCLWRPNSATHSGKQSQAPDASFLGLPRVQRKFTNSLVAEAKNKFSGSHRLLCCFLRNRDGTWCRRKRQRLGRRRKSAERRKTHRKERRVAKRKSQGDGSRRRKESQLLSEIRWEVYPVNSTFRVLVSGATRTETLLQRPTTDDNHQAQELKRNGANVAEGLGFYIYCRVWFS

SEQ ID NO: 916227 - protein, 171 aa, Homo sapiens
MVFKIRSMVNPGRCHQQCSVSMMAKSWYLMKPQEDHLSEQTRNKDRAFLLRRSNIQITLPCAVGYPAEVSGSRLVLGSVCKEPCDVTCYQLPHSLHPERLVSLLLCSCNSTKYISRQLVSRAENLPQTTSLPAEKAQLLSCPTEPAVAIHLLQKFCEFSQLSWNTSYRMGQ

SEQ ID NO: 916228 - protein, 189 aa, Homo sapiens
MQSRLLLLGAPGGHGGPASRRMRLLLRQVVQRRPGGDRQRPEVRLLHAGSGADTGDTVNIGDVSYKLKIPKNPELVPQNYNLPLGPAGNLSVNSGAYSYPPNPHYTAWCPGYTAEIGVCRKGILEYRIKLFGIILTSVYYYVDSWKELTKREVEYIALSRDTTETDLKQRREIRAGTAFYIDQASSVTL

SEQ ID NO: 916229 - protein, 91 aa, Homo sapiens
MQSRLLLLGAPGGHGGPASRRMRLLLRQVVQRRPGGDRQRPEVRLLHAGSGADTGDTVNIGDVSYKLKIPKNPELVPQNYISDSLAQSVVQ

SEQ ID NO: 916230 - protein, 156 aa, Homo sapiens
MQQHHGWKGPEGKSQGSSSFLNSSFAFFLSLALISSKETQKRSLITSHMVMLPKSLLVAQSGIKVPQGGQHCSETRNNLPGSMCRSSALAGGLSKSFRESTAVLCLGVCDTGQREWLNMQQQRRLQPWSQGQGTAVLILTNATDKQCDLGQVTLPL

SEQ ID NO: 916231 - protein, 168 aa, Homo sapiens
MLKKCHLQREVTMQQHHGWKGPEGKSQGSSSFLNSSFAFFLSLALISSKETQKRSLITSHMVMLPKSLLVAQSGIKVPQGGQHCSETRNNLPGSMCRSSALAGGLSKSFRESTAVLCLGVCDTGQREWLNMQQQRRLQPWSQGQGTAVLILTNATDKQCDLGQVTLPL

SEQ ID NO: 916232 - protein, 142 aa, Homo sapiens
MKTSTMPDVPALLQACQGARGSGAEPGHLSLGSAVNCCANEQVIHLLNKYWLGRGHHVKCQGSRDDNNRVPTLRGSYPTRGDREVNKQDKYRLTSAKREVRGCGNREEEYLTSLEYLEDFLKEEKTPGLNLKGRPEATQGKK

SEQ ID NO: 916233 - protein, 142 aa, Homo sapiens; identical to SEQ ID NO: 916232

SEQ ID NO: 916234 - protein, 134 aa, Homo sapiens
MVCSLGSERLHVLVTWPLTSPRGSDPQREQEGDYPDFHDLVTEVTHHCFCHALFLRSESLSLAHTQGGGISFHLLKGGTSNNALYFKATRDLFRKWGSTLACGASELVKGSASTPEAGGTCGNSARSHDVHIST

SEQ ID NO: 916235 - protein, 173 aa, Homo sapiens
MLGISLLAISTEGRTLILEGLEKAERNVLPVLNNLLENREMQLEDGRFLMSAEPLTDPCVYGVRVKRVLFQEDGVVLVKQHHVFGELQLGDGLEHRDHTKKELDSWKIVRVSENFRVIALGLPVPRYSGNPLDPPLRSRFQARDIYYLPFKKDLQQLLLEEKARRHKRECKQI

SEQ ID NO: 916236 - protein, 604 aa, Homo sapiens
FPQNSRHPQNTQSKSNNLCKCNLQTSPPTLPGRDRFWRRRGTAKGAATDPERPCEPAMSRSGTPHAGRGGAHAHARPRLPGVGRGGRRGGAVTSVARVALAAQEQLVPPRAVGERAGVGRWGAGRAALREQAAGTAALHHRIMSGQLERCEREWHELEGEFQELQVGPGPPGPATLLPAVQRLALPEPPGPGGGDSQGLGSAPERPWGRTGGMDQPPPITRRFSSSSTWGAGSQPPLPPPSHWLSAPRTPFAAESWSVASEASSRRVHLWGWFKENSPAPTSAGSPQISPRPLPSAFGSSAPTPCSGGAALSCSSVLGGVLKSCSPGTSRLCLGIRDPYFLSLGALTLLQADFGVESICQFGQLSSLTQLIGETPSSILLARSLTRGGVRAGVRRGSPERMALLLVTGLFFGGLALPEITLHTITPVLSFGAVTLSLSMYLFDARALKAMVKILAFTANDMYIRLAAVYRIDIRETGSKQEDQHYFINNPMKLILESLFYRVTVALIGQVTVTYLLLKPKSGISATTLHETSWGGMVPGRKIKKLGYGIQFFGPKEYYEGDWCGSQRSDVGRMYYSNGDIYEGQWENDKPNGEGMLRLSQNPRP

SEQ ID NO: 916237 - protein, 122 aa, Homo sapiens
MIDFGRDEAPEPTQFPIPEVKILDPDGVLAEPWPCSGRQRKEIDAREHKRFRRNSSLCHPIAQTSAALAGGVSSSSRHDPGTLIGPLTTPSTGSFLANRKAGASLPGCPRDPLHSLISSWNA

SEQ ID NO: 916238 - protein, 189 aa, Homo sapiens
MVFRIDLKRERLALYLCALPSRTCTCSHMHIGPQYLANCQATVWHLNYNVLRELYLPLHVLVALPQLSYHLGENNVWLVVPWHQHCAIVGQAFNGLWVMRLGGAGVGDAHTVTLPWILPSVNIDLPLFPLGTWLGRYRIDAVTAEKEKNIQSIHVVPAECQYCMLWGFHSCPYGRGVNFSKTSSSRGRS

SEQ ID NO: 916239 - protein, 141 aa, Homo sapiens
MSRSLSFPNERDTQHQLSISQDFRGETVDFHKSRKTAGSVKKKLLQQLESRRTNRYTDYIFIVHQSHSTHYHSSSPSHEFCPFIQQPSSSVLSCSLGQEWANVEAICLLPPSLSQDSASLKYTPAICSTGSHLREETRTSH

SEQ ID NO: 916240 - protein, 75 aa, Homo sapiens
HGLILSILKSRKGVLNSFFNLECCVSGTHSMDLVALAPFGEYTVLPGLDCTFSKCVPEPLPRQSSHQAPQGTGAG

SEQ ID NO: 916241 - protein, 536 aa, Homo sapiens
AAARDLELAPDLPATQKPSDCPDRAMESTGSVGEAPGGPRVLVVGGGIAGLGAAQRLCGHSAFPHLRVLEATARAGGRIRSERCFGGVVEVGAHWIHGPSRGNPVFQLAAEYGLLGEKELSQENQLVETGGHVGLPSVSYASSGASVSLQLVAEMATLFYGLIDQTREFLHAAETPVPSVGEYLKKEIGQHVAGWTEDEETRKLKLAVLNSFFNLECCVSGTHSMDLVALAPFGEYTVLPGLDCTFSKGYQGLTNCMMAALPEDTVVFEKPVKTIHWNGSFQEAAFPGETFPVSVECEDGDRFPAHHVIVTVPLGFLREHLDTFFDPPLPAEKAEAIRKIGFGTNNKIFLEFEEPFWEPDCQLIQLVWEDTSPLEDAAPELQDAWFRKLIGFVVLPAFASVHVLCGFIAGLESEFMETLSDEEVLLCLTQVLRRVTGNPRLPAPKSVLRSRWHSAPYTRGSYSYVAVGSTGGDLDLLAQPLPADGAGAQLQILFAGEATHRTFYSTTHGALLSGWREADRLLSLWAPQVQQPRPRL

SEQ ID NO: 916242 - protein, 351 aa, Homo sapiens
SLRLRPPPRAPDLPATQKPSDCPDRAMESTGSVGEAPGGPRVLVVGGGIAGLGAAQRLCGHSAFPHLRVLEATARAGGRIRSERCFGGVVEVGAHWIHGPSRGNPVFQLAAEYGLLGEKELSQENQLVETGGHVGLPSVSYASSGASVSLQLVAEMATLFYGLIDQTREFLHAAETPVPSVGEYLKKEIGQHVAGWTEDEETRKLKLAVLNSFFNLECCVSGTHSMDLVALAPFGEYTVLPGLDCTFSKGYQGLTNCMMAALPEDTVVFEKPVKTIHWNGSFQEAAFPGETFPVSVECEDGDRFPAHHVIVTVPLGLSTFSVGSLPDLSLSSWRLCRMKKYFCVSPKCSGE

SEQ ID NO: 916243 - protein, 239 aa, Homo sapiens
SLRLRPPPRAPDLPATQKPSDCPDRAMESTGSVGEAPGGPRVLVVGGGIAGLGAAQRLCGHSAFPHLRVLEATARAGGRIRSERCFGGVVEVGAHWIHGPSRGNPVFQLAAEYGLLGEKELSQENQLVETGGHVGLPSVSYASSGASVSLQLVAEMATLFYGLIDQTREFLHAAETPVPSVGEYLKKEIGQHVAGWTEDEETRKLKLAVLNSFFNLECCGLSRTHKLHDGRPAGGHCSF

SEQ ID NO: 916244 - protein, 537 aa, Homo sapiens
SLRLRPPPRAPDLPATQKPSDCPDRAMESTGSVGEAPGGPRVLVVGGGIAGLGAAQRLCGHSAFPHLRVLEATARAGGRIRSERCFGGVVEVGAHWIHGPSRGNPVFQLAAEYGLLGEKELSQENQLVETGGHVGLPSVSYASSGASVSLQLVAEMATLFYGLIDQTREFLHAAETPVPSVGEYLKKEIGQHVAGWTEDEETRKLKLAVLNSFFNLECCVSGTHSMDLVALAPFGEYTVLPGLDCTFSKGYQGLTNCMMAALPEDTVVFEKPVKTIHWNGSFQEAAFPGETFPVSVECEDGDRFPAHHVIVTVPLGFLREHLDTFFDPPLPAEKAEAIRKIGFGTNNKIFLEFEEPFWEPDCQLIQLVWEDTSPLEDAAPELQDAWFRKLIGFVVLPAFASVHVLCGFIAGLESEFMETLSDEEVLLCLTQVLRRVTGNPRLPAPKSVLRSRWHSAPYTRGSYSYVAVGSTGGDLDLLAQPLPADGAGAQLQILFAGEATHRTFYSTTHGALLSGWREADRLLSLWAPQVQQPRPRL

SEQ ID NO: 916245 - protein, 537 aa, Homo sapiens; identical to SEQ ID NO: 916244

SEQ ID NO: 916246 - protein, 537 aa, Homo sapiens; identical to SEQ ID NO: 916244

SEQ ID NO: 916247 - protein, 512 aa, Homo sapiens
SLRLRPPPRAPDLPATQKPSDCPDRAMESTGSVGEAPGGPRVLVVGGGIAGLGAAQRLCGHSAFPHLRVLEATARAGGRIRSERCFGGVVEVGAHWIHGPSRGNPVFQLAAEYGLLGEKELSQENQLVETGGHVGLPSVSYASSGASVSLQLVAEMATLFYGLIDQTREFLHAAETPVPSVGEYLKKEIGQHVAGWTEDEETRKLKLAVLNSFFNLECCVSGTHSMDLVALAPFGEYTVLPGLDCTFSKGYQGLTNCMMAALPEDTVVFEKPVKTIHWNGSFQEAAFPGETFPVSVECEDGDRFPAHHVIVTVPLGFLREHLDTFFDPPLPAEKAEAIRKIGFGTNNKIFLEFEEPFWEPDCQLIQLVWEDTSPLEDAAPELQDAWFRKLIGFVVLPAFASVHVLCGFIAGLESEFMETLSDEEVLLCLTQVLRRVTAPDPVCGGSHTSHVLLHDARGSAVGMEGGRPPPQSVGPAGAAAQAEALAGPSLLCSTRVGGRLGPSFLLTDFSLA

SEQ ID NO: 916248 - protein, 314 aa, Homo sapiens
MRGFNCRGGQTGPLPVAGWLPGTRCRGYQGLTNCMMAALPEDTVVFEKPVKTIHWNGSFQEAAFPGETFPVSVECEDGDRFPAHHVIVTVPLGFLREHLDTFFDPPLPAEKAEAIRKIGFGTNNKIFLEFEEPFWEPDCQLIQLVWEDTSPLEDAAPELQDAWFRKLIGFVVLPAFASVHVLCGFIAGLESEFMETLSDEEVLLCLTQVLRRVTGNPRLPAPKSVLRSRWHSAPYTRGSYSYVAVGSTGGDLDLLAQPLPADGAGAQLQILFAGEATHRTFYSTTHGALLSGWREADRLLSLWAPQVQQPRPRL

SEQ ID NO: 916249 - protein, 304 aa, Homo sapiens
MIKVWNYENKQYLFSRVFEKGLGVQSLTYNPEGALLGAGFTEGTVYILDAMSLENESPEPFKYSRTSVTHISFSHDSQYMATADRSFTVAVYMLVVRNGQRVWEYLARLRSHRKSIRSLLFGVYLDSNEPRLLSLGTDRLLIEYDLLRSYKDHLEVLDIHHTDQGCYPTCMVWYPPLTRELFLLICNSGYKVKLFNATTKMCRKTLLGPAYGSPIEQTQVLPVRSMAELQKRYLVFINRDKLGLQILPVDGNPHKTSAIVCHPNGVAGMAVSYDGCYAFTAGGHDRSVVQWKITLRVTPSLGWS

SEQ ID NO: 916250 - protein, 486 aa, Homo sapiens
PVSRVSPAVNFNSLYTRDTLDGKLVVWDIHRPPSSASTFLGFPYIKPCKLVHLQKEGITVLTTIDSYIVTGDIKGNIKFYDHTLSIVNWYSHLKLGAIRTLSFSKTPATPPTEKSNYPPDCTLKGDLFVLRNFIIGTSDAAVYHLTTDGTKLEKLFVEPKDAICAISCHPYQPLIAIGSICGMIKVWNYENKQYLFSRVFEKGLGVQSLTYNPEGALLGAGFTEGTVYILDAMSLENESPEPFKYSRTSVTHISFSHDSQYMATADRSFTVAVYMLVVRNGQRVWEYLARLRSHRKSIRSLLFGVYLDSNEPRLLSLGTDRLLIEYDLLRSYKDHLEVLDIHHTDQGCYPTCMVWYPPLTRELFLLICNSGYKVKLFNATTKMCRKTLLGPAYGSPIEQTQVLPVRSMAELQKRYLVFINRDKLGLQILPVDGNPHKTSAIVCHPNGVAGMAVSYDGCYAFTAGGHDRSVVQWKITLRVTPSLGWS

SEQ ID NO: 916251 - protein, 481 aa, Homo sapiens
SLQDLNLTQILSATMEGKLVVWDIHRPPSSASTFLGFPYIKPCKLVHLQKEGITVLTTIDSYIVTGDIKGNIKFYDHTLSIVNWYSHLKLGAIRTLSFSKTPATPPTEKSNYPPDCTLKGDLFVLRNFIIGTSDAAVYHLTTDGTKLEKLFVEPKDAICAISCHPYQPLIAIGSICGMIKVWNYENKQYLFSRVFEKGLGVQSLTYNPEGALLGAGFTEGTVYILDAMSLENESPEPFKYSRTSVTHISFSHDSQYMATADRSFTVAVYMLVVRNGQRVWEYLARLRSHRKSIRSLLFGVYLDSNEPRLLSLGTDRLLIEYDLLRSYKDHLEVLDIHHTDQGCYPTCMVWYPPLTRELFLLICNSGYKVKLFNATTKMCRKTLLGPAYGSPIEQTQVLPVRSMAELQKRYLVFINRDKLGLQILPVDGNPHKTSAIVCHPNGVAGMAVSYDGCYAFTAGGHDRSVVQWKITLRVTPSLGWS

SEQ ID NO: 916252 - protein, 145 aa, Homo sapiens; identical to SEQ ID NO: 874740

SEQ ID NO: 916253 - protein, 532 aa, Homo sapiens
MLEFWLLFHRTVAVCWGSTAVLSHFGFSSTYLKGLQAGTAESSKQQRWWPLLPTGTLSQVGVTLLPLVSWNSKPVGLILCGAMEVGSADRYCLLPWIQPPSQGSFLVGADTRQTGQCGDRGGALPVGATGLSEVAQALAAALVGGEFDLEMNFIIQDAESITCMTELLEHCDVTCQAEIWSMFTAILRKSVRNLQTSTEVGLIEQVLLKMSAVDDMIAVDMLGVLASYSITVKELKLLFSMLRGESGIWAIALPPIAKWPYQNGFTLNTWFRMDPLNNINVDKDKPYLYCFRTSKGVGYSAHFVGNCLIVTSLKSKGKGFQHCVKYDFQPRKWYMISIVHIYNRWRNSEIRCYVNGQLVSYGDMAWHVNTNDSYDKCFLGSSETADANRVFCGQLGAVYVFSEALNPAQIFAIHQLGPGYKSTFKFKSESDIHLAEHHKQVLYDGKLASSIAFTYNAKATDAQLCLESSPKENASIFVHSPHALMLQDVKAIVTHSIHSAIHSIGGIQVLFPLFAQLDNRQLNDSQVETTVW

SEQ ID NO: 916254 - protein, 724 aa, Homo sapiens
CFSASESMVSGPAIMEDDDQEVDSADESVSNDMMTATDEPSKMSSATGRRIRRFKQEWLKKFWFLRYSPTLNEMWCHVCRQYTVQSSRTSAFIIGSKQFKIHTIKLHSQSNLHKKCLQLYKLRMHPEKTEEMCRNMTLLFNTAYHLALEGRPYLDFRPLAELLRKCELKVVDQYMNEGDCQILIHHIARALREDLVERIRQSPCLSVILDGQSDDLLADTVAVYVQYTSSDGPPATEFLSLQELGFSSTESYLQALDRAFSALGIRLQDEKPTVGLGVDGANITASLRASMFMTIRKTLPWLLCLPFMVHRPHLEILDAISGKELPCLEELENNLKQLLSFYRYSPRLMCELRSTAATLCEETEFLGDIRAVRWIIGEQNVLNALIKDYLEVVAHLKEVSSQTQRADASAIALALLQFLMDYQSIKLIYFLLDVIAVLSRLAYIFQGEYLLVSQVDDKIEEAIQEISRLADSPGEYLQEFEENFRESFNGIAMKNLRVAEAKFQSIREKICQKTQVILAQRFDSRSRIFVKACQVFDLAAWPRSSEELMSYGKEDMVQIFDHLEAIPTFSRDVCREGLDPRGSLLMEWRELKADYYTKNGFKDLISHICKYKQRFPLLNKIIQVLKVLPTSTACCEKGRNALQRVRKNHRSRLTLEQLSDLLTIAVNGPPITNFDAKRALDSWFEEKSGNSYALSAEVLSRMSALEQKPALQTMDHGTEFYPDI

SEQ ID NO: 916255 - protein, 112 aa, Homo sapiens
MGVEGGGRRRRRRQRAGWGREGRRRTSAQSHEGTASQSWVKLTLPGKWRAGIPVSQPPSGRQQPGRGTHSVIPSWLEGSGLVDPASSLMEKVAPDADPYRPGPQALAGSACF

SEQ ID NO: 916256 - protein, 776 aa, Homo sapiens
MHLEPCSHLPEHGSGALALGAGAGGRCARVPSHCGFSLSIARSGLFGLPPLAPLPQVDESPVNDSHGRAPEEGDAEVMQLGSSSPPPARGVQPPETTRPEPPPPLVPPLPAGSLPPYPPYFEGAPFPHPLWLRDTYKLWVPQPPPRTIKRTRRRLSRNRDPGRLILSTIRLRPRQVLCEKCKSTLSPPEASPGPPAAPRARRRLGSGPDRELRKPEEPENGEPTAAATARRSKRERREEDRAPAEQVPRSPVIKISYSTPQGKGEVVKIPSRVHGSLEPFRPQQAPQDDGSQDPEVLDRESRDRPSCAPSASIPKLKLTRPVPAGADLPPPKIRLKPHRLGDSEHEPVYRAELVGELNGYLRDSSPAPCADGPAGGLADLSSGSSGEDDDFKSCPQGPQGREGLAFLVSCPEGRADCASESACSSDSLDEARSSGSEGTPADTGDLSPGHGASAPSVSREARQTVPPLTVRLHTQSVSECITEDGRTVAVGDIVWGKIHGFPWWPARVLDISLGQKEDGEPSWREAKVSWFGSPTTSFLSISKLSPFSEFFKLRFNRKKKGMYRKAITEAANAARHVAPEIRELLTQFESNWFPDQVTDDEGAPAVLELPISVRGPCEPSGRLRAEPTGHGGRPGVRPPGDRQCVQGGDGPEPSGSSLLSVFLPTTQRMAALAHEAVGTRDLLAAGCCCLARWGSMEELGLPPRPHLLPACWGPMEEPGLAPRPRPAAGVGSCSLPRSVLEAAVSQTQLGLPQASEKPNCTCGILPQPLGAGSLCT

SEQ ID NO: 916257 - protein, 178 aa, Homo sapiens
HLLVAPGIPWFMAASLQSLPLFSHGFLLCFCVSNLPLLILIKSSVIGFRALPKSRIMCQTSESSTEKQLLKVITDPPSDYFPGVLRCLLPCGCTEGSTGTSGSGPVWVVHLCKTSAALKENWCPYERRKRQVHKVWSCEDRGRDWCYAATNQGVPEATRSWKKQKQETLISDFWLLEL

SEQ ID NO: 916258 - protein, 126 aa, Homo sapiens
MFLYNYIGQDGIASSIVMLIICGGLVNGPYALITTAVSADLGTHKSLKGNAKALSTVTAIIDGTGSIGAALGPLLAGLISPTGWNNVFYMLISADVLACLLLCRLVYKEILAWKVSLSRGSGYKEI

SEQ ID NO: 916259 - protein, 513 aa, Homo sapiens
ADAVPSCRFRGLILLLTFLIYACYHMSRKPISIVKWLSSPGAPFEFIPQDSCVGGCGWNKRAGPLGYVDAAHGSDVAAFPCSQFLQEESRLHQNCSEQIKPINDTHSLNDTMWCSWAPFDKDNYKELLGGVDNAFLIAYAIGMFISGVFGERLPLRYYLSAGMLLSGLFTSLFGLGYFWNIHELWYFVVIQVCNGLVQTTGWPSVVTCVGNWFGKGKRGFIMGIWNSHTSVGNILGSLIAGIWVNGQWGLSFIVPGIITAVMGVITFLFLIEHPEDVDCAPPQHHGEPAENQDNPEDPGNSPCSIRESGLETVAKCSKGPCEEPAAISFFGALRIPGVVEFSLCLLFAKLVSYTFLYWLPLYIANVAHFSAKEAGDLSTLFDVGGIIDVPVQLHWQDGIASSIVMLIICGGLVNGPYALITTAVSADLGTHKSLKGNAKALSTVTAIIDGTGSIGAALGPLLAGLISPTGWNNVFYMLISADVLACLLLCRLVYKEILAWKVSLSRGSGYKEI

SEQ ID NO: 916260 - protein, 269 aa, Homo sapiens
SCVSPMQRNRCNGEPAENQDNPEDPGNSPCSIRESGLETVAKCSKGPCEEPAAISFFGALRIPGVVEFSLCLLFAKLVSYTFLYWLPLYIANVAHFSAKEAGDLSTLFDVGGIIGGIVAGLVSDYTNGRATTCCVMLILAAPMMFLYNYIGQDGIASSIVMLIICGGLVNGPYALITTAVSADLGTHKSLKGNAKALSTVTAIIDGTGSIGAALGPLLAGLISPTGWNNVFYMLISADVLACLLLCRLVYKEILAWKVSLSRGSGYKEI

SEQ ID NO: 916261 - protein, 171 aa, Homo sapiens
MEKTESFCPEVPPQDCGASPRPSLRSLPKNQGSLLQFDRQAPGRISTSPTLRRLRTRGCGTRQDAWQVTTWGSWGAPVGFPCYLSKSLPGSPKDSSHLLSPLRLHSRLTSEPERALNAADSLEPQTRPTDKYLPPELQPVNEGSLHQASLRQQEGHFLPSPTLRHPSPQAL

SEQ ID NO: 916262 - protein, 197 aa, Homo sapiens
MCPRRVCVHAGYVSTQGLCPRRLCVHAGYVSTQVLCPRRFCVHTGYVSTQVLCPRRLCVHAGSVSTQVLCPRRFCVHTGYVSTQGYVSMQVLCPRRLCVHAGYVSMQVLCPRRFCVHTGYVSTQVLCPRRFCVHAGYVSTQASGLSGGCFYDALPPTSPAGRDDCSEAVRVPGALKVPEPKEHLSGKCSAAWALSDR

SEQ ID NO: 916263 - protein, 157 aa, Homo sapiens
LFPQSLMPCLAQDFYSWLTIAVNSLVLLSSGEGGSGIGSQNCCCRCRFEILREILQLTPEKLARTCLKMGNILEAEVLSGKEFNVMSSRFIHVVAFVRIFFLLKAEEQSVVCTYRILFIHSSIDRHLSCFHIFAIAHNAAMNMGISCSCFFSKKMTS

SEQ ID NO: 916264 - protein, 161 aa, Homo sapiens
DEHPAAGHMLPPPLRACGSRLSLPCAALSPRFPREPSNRFSAREKDGSGGKSEGVEREVRAFAFSPHSSGGVRSSGWNVLAAAVTAATAREAPEPYTLQLERKGWPRRKSQGREATTEIRPGKAFSTLGTLSGGGGKRQEVADPTARLPHSSLALPSGDDK

SEQ ID NO: 916265 - protein, 193 aa, Homo sapiens
MDLGLLWLWTRLFRLGTYLTHTGAPWDMRGGPAISIPFPNRALSFQRASLGGGRAEEAVSLLQWLCSHVSTVAIVDSRTLLLLQLLRPPGRPHLSLRTVSPPPFSPHSQAPGTLSFGCIYHSQGEPGPLATGPSLLLFPTCSCPSLEPSNHKKMNPASNLNELGADTSQSLQKGAQPLDISTAACETLRGGRG

SEQ ID NO: 916266 - protein, 135 aa, Homo sapiens
MDEAGNHHSQQTIARTKNQTPHVLTHRSMNPVVNCAYGKSRLCAPYENLTNTWRKKSKLFPVILTSKHLGDDIFVTFIVKNKISHFILHFEKGDRRREESWTPWAQHRRWLCQFSQPRAAPAPALSLHVSSGDLA

SEQ ID NO: 916267 - protein, 135 aa, Homo sapiens; identical to SEQ ID NO: 916266

SEQ ID NO: 916268 - protein, 386 aa, Homo sapiens
EPSFLPGEPLGRPTCWSTATMGDQFIMLSCEWPGGEPPATLGWLDEQQQPLGGSSSSMAVHLLQAQEDLAGREFTCRGTHLLRTPDPHCHLQLGSKGTNRGVPEKMLRHRQALKHQPPPQVWILHKKPGFSSECHHHSDCNTIRPKEEDANRLREGRWDLGRALLSDFGHKTNVAKTPTTTSLNTQSSQLVQGPAAVSLSDMVTREALAHLVEDRGGRTRKRTHNGETGISGCGGGRQGASRGEMWTSGRRSHKQSSARGGQRAASLAAELEPRRNSTAGIDHSIRNGTGSIQRVNHNAFGKQYGKMGGAQIMAPDKLDELWGLNELTVTSTEHSAWYTVVIQHVLVLSPTLYHVLSFPGEVTLGRTVWVPVQGRANSRLGRTHTA

SEQ ID NO: 916269 - protein, 179 aa, Homo sapiens
MAASEAAVVSSPSLKTDTSPVLETAGTVAAMAATPSARAAAAVVAAAARTGSEARVSKAALATKLLSLSGVFAVHKPKGPTSAELLNRLKEKLLAEAGMPSPEWTKRKKQTLKIGHGGTLDSAARGVLVVGIGSGTKMLTSMLSGSKRYTAIGELGKATDTLDSTGRVTEEKPYGMKLI

SEQ ID NO: 916270 - protein, 349 aa, Homo sapiens
MAASEAAVVSSPSLKTDTSPVLETAGTVAAMAATPSARAAAAVVAAAARTGSEARVSKAALATKLLSLSGVFAVHKPKGPTSAELLNRLKEKLLAEAGMPSPEWTKRKKQTLKIGHGGTLDSAARGVLVVGIGSGTKMLTSMLSGSKRYTAIGELGKATDTLDSTGRVTEEKPYDKITQEDIEGILQKFTGNIMQVPPLYSALKKDGQRLSTLMKRGEVVEAKPARPVTVYSISLQKFQPPFFTLDVECGGGFYIRSLVSDIGKELSSCANVLELTRTKQGPFTLEEHALPEDKWTIDDIAQSLEHCSSLFPAELALKKSKPESNEQVLSCEYITLNEPKREDDVIKTC

SEQ ID NO: 916271 - protein, 349 aa, Homo sapiens; identical to SEQ ID NO: 916270

SEQ ID NO: 916272 - protein, 349 aa, Homo sapiens; identical to SEQ ID NO: 916270

SEQ ID NO: 916273 - protein, 84 aa, Homo sapiens
SEARVSKAALATKLLSLSGVFAVHKPKGPTSAELLNRLKEKLLAGTAARVGTRLRRSLREGKHIRLFATLVIQETKGGERETDH

SEQ ID NO: 916274 - protein, 150 aa, Homo sapiens
LCMRKRSGPGQPPPRRPAAGSRAPRGPIPPGLQPSLRGAQRLVPPASPASPGTARLARGALRAATLPGSPARLSSPSLCLASNFASRYPLRRRPLSRRSPGWSPAPRGRRGYGKFGDWREKGFGGGPRRGARGASSLPFMGCHTCVSLLP

SEQ ID NO: 916275 - protein, 143 aa, Homo sapiens
MNTIWSLLLGNSLFWSGGSQRDDWVPGALRILSAKLSWDQGLPGAIGGRPGDQGLFPGVKLTVPQPAQWGVTVIPTVESQPDWIHGSEALNLHCGTTWGATGTSPTEKPGHAPKDGPRRLSLPHIRTDTKINKISEKMTKILN

SEQ ID NO: 916276 - protein, 216 aa, Homo sapiens
AWTRVMVEERAHKSDSSYMLEVKLTGPCDRWDVVDEEGEGVRMVSCGADWLGEPFTEATINATVKEDILLSVEYSCHGVPTIEWTYSSNWGTQKIVEWKPGTQANISQSHKDRVCTFDNGSIQLFSVGVRDSGYYVITVTERLGSSQFGTIVLHVSEILYEDLHFVAVILAFLAAVAAVLISLMWVCNKCAYKFQRKRRHKLKGNPLGLVIIHEWF

SEQ ID NO: 916277 - protein, 205 aa, Homo sapiens
AALLLLFGRPRKLPWTLHLMDQLAPPRSLRVAPTQQLTQCKRTALTPYDFISDPTNQYSHPRHPTSQTILKNSDPRIFRETDLIFQWIFRELMSEVHLRAAPADASPDSPGNLIALRYEMVDEFVYANVGGKTLIGHTPRYIKTLQQMYGNASALGLGEIAAPAPGGKDSLLIKGVTVSAACTESEYLREMPTPTLPSAMSKKAP

SEQ ID NO: 916278 - protein, 155 aa, Homo sapiens
MLRSHSNKEINVCSHYCAFLSLKARNQLTLSLPAPHLPRQQGQEPWACSPIPDTSLLFQTGAVALPWGSCSGRARTQDGETGAGHPEVESAAGSPHFISIGTSKGDRRRFPVWGVGESNEWPVCTGHQGQSNLTLRDHLPFCSIAELGGKGNSRP

SEQ ID NO: 916279 - protein, 172 aa, Homo sapiens
MYRNWKKNGDCQGLVKGRNKELLLIVVEFPFYQMKKFWRLVIQQCWKGTLLGVAMATVNAMIAEYGCSLEDIVVVLGPSVGPCCFTLPRESAEAFHNLHPACVQLFDSPNPCIDIRKATRILLEQGGILPQNIQDQNQDLNLCTSCHPDKFFSHVRDGLNFGTQIGFISIKE

SEQ ID NO: 916280 - protein, 172 aa, Homo sapiens; identical to SEQ ID NO: 916279

SEQ ID NO: 916281 - protein, 172 aa, Homo sapiens; identical to SEQ ID NO: 916279

SEQ ID NO: 916282 - protein, 354 aa, Homo sapiens
QIVSGRGKMPPVSLLKHNKSHLYSSSQQKIECVRNLEVYRLSFLSFEKRPNSHPASPGNPAQPTSLHYMNPYQLNAYGMALKAVGEIVQDYDSDKMFPALGFGAKLPPDGRISHEFALILLSTVKLSDDCSPVPQKIMSVNVYYSHLFQLIFMEIYFFTVVLFCFAYKFLQNGNPQNPYCDGIEGVMEAYYRSLKSVQLYGPTNFAPVINHVARYASSVKDGSQYFVLLIVTDGVISDMAQTKESIVNASKLPMSIIIVGVGPAEFDAMVELDGDDVRVSSRGKYAERDIVQFVPFRDYIDRSGNHILSMARLAKDVLAEIPEQFLSYMRARGIKPSPAPPPYTPPPAIKCSIG

SEQ ID NO: 916283 - protein, 287 aa, Homo sapiens
KYTNSGTVTLLSFLVETEVSFLDYIKGGTQINFTVAIDFTASNGNPAQPTSLHYMNPYQLNAYGMALKAVGEIVQDYDSDKMFPALGFGAKLPPDGRISHEFALNGNPQNPYCDGIEGVMEAYYRSLKSVQLYGPTNFAPVINHVARYASSVKDGSQYFVLLIVTDGVISDMAQTKESIVNASKLPMSIIIVGVGPAEFDAMVELDGDDVRVSSRGKYAERDIVQFVPFRDYIDRSGNHILSMARLAKDVLAEIPEQFLSYMRARGIKPSPAPPPYTPPPAIKCSIG

SEQ ID NO: 916284 - protein, 240 aa, Homo sapiens
KYTNSGTVTLLSFLVETEVSFLDYIKGGTQINFTVAIDFTASNGNPAQPTSLHYMNPYQLNAYGMALKAVGEIVQDYDSDKMFPALGFGAKLPPDGRISHEFALNGNPQNPYCDGIEGVMEAYYRSLKSVQLYGPTNFAPVINHVARYASSVKDGSQYFVLLIVTDGVISDMAQTKESIVNASKLPMSIIIVGVGPAEFDAMVELDGDDVRVSSRGKYAERDIVQFVPFSSNSRGILIEQ

SEQ ID NO: 916285 - protein, 152 aa, Homo sapiens
MAAPRWSASGPWIRGNGQGCGSLFTLVSKPFCAAAAASTAINAQRLAEKLRAQKREQDTKKEPVSTNAVQRRVQEIVRFTRQLQRVHPNVLAKALTRGILHQDKNLVVINKPYGLPVHGKDHAGKVEGPAAAFCYNRGKLRHVACSCQGQLK

SEQ ID NO: 916286 - protein, 84 aa, Homo sapiens
VLSTALLRGQSGNEFGTSKHAMQPGKLLLYSSHEDLHTPEPNRHLSILMVPDNCIAFDRVLSILLVYFHFSKYSFFSLSRPPPI

SEQ ID NO: 916287 - protein, 140 aa, Homo sapiens
MGLCYLPQRVSVMIVKMHIKYLPHNSFSKNSRNITMGDASPSNPAHSLDSPPGAFQPRQTVLFLLECQSDGVEASGLFTYSTCAVGSQKAKRRNFGSIQKPAVQGSLVDEGPRSQNKYLTFILKHCPCVAVTIVLDKMWS

SEQ ID NO: 916288 - protein, 300 aa, Homo sapiens [sequence omitted]

SEQ ID NO: 916289 - protein, 163 aa, Homo sapiens
LPGLGREAGGFSGYKAAEMWSFLPGAESVSMGPVPGVSSLGACWTHDQDSGRAEDRPQAPRITQYTWVLSFLFTEKPQTRSTSPISHQGQPQTTRALSLRQPQHPSAPASGRPRPPHSSGPDLAEAAPVVDQASQAAGRASSGLGLWEQASVSQGFRNAAFEA

SEQ ID NO: 916290 - protein, 192 aa, Homo sapiens
MRDCVLRDCAIWPRYYTFSMVFATHRPGDSLGCLHHQGSGFQAQNWAAVWADANGTWNPSETEPFTPLERGLKPGSQVVLLSRSHPHRAQQAKYPLARNSHCQRRNLKSTWYTQGQSFQRKEQAAIFAVLQPLLVIPRQTGSGVDLQQTPADLEKRGLTVRRKTNKQKAITSTKRMPTQKPHPKVISIKDQR

SEQ ID NO: 916291 - protein, 145 aa, Homo sapiens
WEIQEAPMGQGILGYKPSVSTPLLLQKGLKETMNWRGSAAPESHVLESSGRHRAGSRQVPPGVSRHLVAACPEAPISTGAPQGVRAGATVRSQKVHHPQLQSSCHPRVETSSSTLLHCELGCKDCMVRVKSPSTQEATLLKRGLP

SEQ ID NO: 916292 - protein, 140 aa, Homo sapiens
ADLRGGMNERETPGQLGLGNASGVSDAEARQPGKSPPFSMNWVVGSADLEIINATTGRRSCGGPSRLCKHVLSARWARLYGRLSTRTPSPGDTPSMYCEAKLGAHTYQSVKQQLFKAFQKAGLGTWVRKPPEQQQFLLTL

SEQ ID NO: 916293 - protein, 221 aa, Homo sapiens
SGEKRAAFVSTHGPVEPSPRQQCPQSPSDGWVGSGALPGSSPRWNVLGLQGALLSHFVEPVYLQSIVVGSLHHTGHLARVMSHRMEGVGQLPASYRHNRPLLSGVSDAEARQPGKSPPFSMNWVVGSADLEIINATTGRRSCGGPSRLCKHVLSARWARLYGRLSTRTPSPGDTPSMYCEAKLGAHTYQSVKQQLFKAFQKAGLGTWVRKPPEQQQFLLTL

SEQ ID NO: 916294 - protein, 267 aa, Homo sapiens
GFDQNADSNMDNKVQAEVVSDGKEELVGNSSKGDYCYVLAKRLVTFCPCPGDLWNFELEGDNSGEKSKPAAEICISNEELNINHQDNGNNIFSACQRLLQQALSSQAWKMYGNAWMPRQKFAAGAGPSWRNSAKAMWKRNVGLESLHRVPTEALPSGAVRRGPPFSRPQNGRSTKGLHCVTGKATDTQHQPLKATGEVWGAIPCKVTRAELPNVMEAHLVHQHDLDVRHGFKGDRFGVLKFDCLTGFWTCMGPWMTSKTRANQNETK

SEQ ID NO: 916295 - protein, 149 aa, Homo sapiens
MCFVKQVLEGSMLVKNPIEMKKTKRKFNGSPSPPHSPPGLLARREQVLQPPQLPVDCRNAGGSIMIASNTYRPWFIALGSPAQAGERKFHHISEQGDQVYTLEKFDSMGQQTCLAHPAQFSPDDKYSRHRITIKKRLKVLMTQQPRPVL

SEQ ID NO: 916296 - protein, 192 aa, Homo sapiens
MNTNEQAVAEACHLLPSASGEASGSCQSWRKVKGSQCITRQEQEQERCQAPSNNQLSSELTEQDLTHLQGASPCRPAGVQGTTSAHCNFHLSSSSNSPASASRVAGITDTHDHTCLIFVFLDSIAQTPVTRYAEQRYGQQQTTCTMVVWVNPVYDVHTTTKSPKDTLLRKCLLIVKQCMMNFVQNICFRFDQ

SEQ ID NO: 916297 - protein, 404 aa, Homo sapiens
LDWSASWMLIVGNERLQDGDSLQGVGPERVSLQILQASPHPQLFASPRKALLNSPTPVERRVLRGTSGGFLSMDPTTPAWGTESTTVNGNDQALLLLCGKETLIPVFLILFIALVGLVGNGFVLWLLGFRMRRNAFSVYVLSLAGADFLFLCFQIINCLVYLSNFFCSISINFPSFFTTVMTCAYLAGLSMLSTVSTERCLSVLWPIWYRCRRPRHLSAVVCVLLWALSLLLSILEGKFCGFLFSDGDSGWCQTFDFITAAWLIFLFMVLCGSSLALLVRILCGSRGLPLTRLYLTILLTVLVFLLCGLPFGIQWFLILWIWKDSDVLFCHIHPVSVVLSSLNSSANPIIYFFVGSFRKQWRLQQPILKLALQRALQDIAEVDHSEGCFRQGTPEMSRSTPTYK

SEQ ID NO: 916298 - protein, 107 aa, Homo sapiens
MIVSGKKLRLTIIECGCDINMMIDLAEVADLVLMLIDASFGFEMETFEFLNICQVHGFPKIMGVLTHLDFFKHNKQLKKTKKRLKHRFWTEVYLAGVQWRDLGSLQP

SEQ ID NO: 916299 - protein, 107 aa, Homo sapiens; identical to SEQ ID NO: 916298

SEQ ID NO: 916300 - protein, 110 aa, Homo sapiens
MIVSGKKLRLTIIECGCDINMMIDLAEVADLVLMLIDASFGFEMETFEFLNICQVHGFPKIMGVLTHLDFFKHNKQLKKTKKRLKHRFWTEVYLVAKLFCLSGMVHGEYQ

SEQ ID NO: 916301 - protein, 163 aa, Homo sapiens
SSGMVGCGPSLPRPAGPACCSECGPAPTPTRNWHWPAIAARSPDSRPHLSLHTSPQAEGASSGLGQPRKGLPQCSGGLKGSSSMARVGVKAEEVPRVSEGSLKAVRPLISHFTPLYFCVYVLNSSSSIGLESPRASWSRQVASIRGGSNPGQRVAGATVGMEN

SEQ ID NO: 916302 - protein, 230 aa, Homo sapiens
MLFHCLSNVIAASFAYCALPNVVCLAPVVLPWLTSHACVDQNPAEDFTWARCTAQEFLLGATFLIFVNSACKYQLPWPPPESLLHGTSSGSSPGFNWRSSQGPARLPLVARHQLRHKTTLDPGECGAWNANKHLATRTGYQGLENQEASLGNKVLPKHSLAFHPGNKTAPGFTLARQEAVCCQNDQQGAQRPRQAPAGLRENRKGTRKPTPAVLSLQGNVPGHCSPDSRQ

SEQ ID NO: 916303 - protein, 132 aa, Homo sapiens
MPYFSCRGRGLEALGTAHAAGLNASGAGTCGGQSPLHELVKNSIIEGHKTEGLDSELFRGTLEWGSGPVAFDLILSPLQQMLWRHLKVMLGLRLPTDQEQFREFAEQMNRDLWNEQNALWEHWGAVRSHDSE

SEQ ID NO: 916304 - protein, 188 aa, Homo sapiens
MWDGGSLTWTRGLCSLPEGRGKPTEPHRVLLGVMRGGCSDPTGRHGLKVVLGCSDLDLRAKSSGFNTSPSISAEVAQPLQAHPGLWESWDLGLPGTPGAVGILGPGPPKHSWGCGNPGTQLFRELLGLWESWDPGLPGTPGAVGILGLGPPKHSWGCGNPGTRVFQAHLGLWESWDLAPSGTPGTVES

SEQ ID NO: 916305 - protein, 159 aa, Homo sapiens
LQLVSSQWPLKMGRCHHQFEVSGSSCDITFYDTILAYKAGDATLLPPARAAGLLEFARGPLQTLFAWVSAAVSAEQQIFVNCECCCLIVTLEVLSQRSTRPCEVSVCPYWDLQLRAGRTTALFKAVRQGHLSLQRLLLSFCLSVPCRPVVEPTEAGRPP

SEQ ID NO: 916306 - protein, 159 aa, Homo sapiens; identical to SEQ ID NO: 916305

SEQ ID NO: 916307 - protein, 159 aa, Homo sapiens; identical to SEQ ID NO: 916305

SEQ ID NO: 916308 - protein, 159 aa, Homo sapiens; identical to SEQ ID NO: 916305

SEQ ID NO: 916309 - protein, 142 aa, Homo sapiens
GVELPKSMGTHILYQHDLVVRREVKGEHFGALRFAFPAGFQTCMGPVAPLFWPIFPIQNGCIYPLPVTPLYLQAWDTRREKLVLQRLGLNPLSGSLSGSRVTYGRKGMKKDHAAAQVSREPQAISQGQAQAKCIWRTRRNLA

SEQ ID NO: 916310 - protein, 137 aa, Homo sapiens
MAQVAVSTLPMEDEESMEDEESVEDDSVESRMVVTFLVSALESTPVKNSHSSGCEFRTLDFYHSFSYYFSCARIMAQVAVSTLPIEDEESVEDEESLESRMVVTFLSALDSMVRPSVLTFCSSVGLGATQTFSNSSC

SEQ ID NO: 916311 - protein, 172 aa, Homo sapiens
ANKLENLEEMIKYLDTCQSGKIELGKNKKLKETYNIIRLNQILSPLGENLSSVLTAMLSDSLLDDLGPIQLYPILAENFTNFKTFSVEKANGEEVKIDSFIIINGNHNTQANQWLANTKQGEESHPYVKIVARVLFKDNFNLMFKEISMKIQLDFKFQEFIRSGKILTSVVK

SEQ ID NO: 916312 - protein, 161 aa, Homo sapiens [sequence omitted]

SEQ ID NO: 916313 - protein, 209 aa, Homo sapiens
GPHPEPWEGRGTMGPPAAARITTQGTRPSVALARLRIWPKTNLLGAASQYLGPVHSRQELGCVPPLGLQSKHRGFYSTVGFSGAKRQTTGHLEEDSGKSFLVYVDDVQNVGLVLSQALELDQAIHFSIDAFHSVSELFASQSRKDLDPAMDLLVLSQGHQTNILDIIHIHKEALTKVMESRQHVAEGKTEVQRLMMSESQEQDFFGHFG

SEQ ID NO: 916314 - protein, 185 aa, Homo sapiens
MGSRRFGCLAFPACSNPNPCLRCFVTVALAVHCTVDGNMFSGSGEWDVDIFGGLLVCLPQVGSVKKRPCSSCLHLAGSTATEFAAVPAQKREFPAQGHRRASQLECGQRQTLGLQGSGPQGAGAGAKVLRQDLSRCRCKGPEAGPEQEPPAYFPHVSGQKWITGLPRITQAQRVQCGPHYMVDRI

SEQ ID NO: 916315 - protein, 146 aa, Homo sapiens
MCIVILNFYCAQVEKGAWRAKAVTGRVYVFCWVPRCSMDNCGSRGLDDSCSWLLSPPDDDRLELLQNPDWDSHFPDADHLPDYAFGRWLFQQTPLEETACACQQAGCIYMFSHKTRSSSTLKSKSSKPVATESNLYSITQQERGEL

SEQ ID NO: 916316 - protein, 78 aa, Homo sapiens
LMIRMWLKCKCVSLWFLLCSPLDCLPQGLPVTRALKLPAERPIRGASKVPPTAGTNLPTIREEDPPAPVKLANGCGSG

SEQ ID NO: 916317 - protein, 134 aa, Homo sapiens
MSKSGGQRMTRRGAERPSSAWRFGEHSQHAHTSFFRCSYDRRMVLSHPYTCEASVLPLSPVVALEGKASSSESAARWRFFHLISFVLDKTQWGQEPKAVVKEPEDPCPQTLPIGKRPQSYVSAPRLGRPLQARV

SEQ ID NO: 916318 - protein, 139 aa, Homo sapiens
QFCMHRTRLSMNMPNEVHKDSYYPNRDIPLVLDSHRWKFSLPPGNEDKLFSFFSHEDCCPPLRHFLLYEPKLVKGSGLLTSSLLSSRGKFKEICERPNGSCRDFCLETEIHVGRCLNSQPCCLPLGHQPRIESTTPKKD

SEQ ID NO: 916319 - protein, 209 aa, Homo sapiens
FLTQSSDMASKHPGIYYKYAEVTLALPEEDRKIWNSLELPRDLLNGFEQVADNDTGNEIQAEVVSDGDEELVGNWSKGDPFLCFHKKTGSIFAPAIEAVGAQRLSTEALPSGAVRRGPLSSRLQNGRSTNSLHHATGKDADTQTQPLKASGSCTLQVTGAELPKIMGIHFLHQHDLDDSTLHTSAQCSLATPAVADAAPGGAHATVPEG

SEQ ID NO: 916320 - protein, 209 aa, Homo sapiens; identical to SEQ ID NO: 916319

SEQ ID NO: 916321 - protein, 209 aa, Homo sapiens; identical to SEQ ID NO: 916319

SEQ ID NO: 916322 - protein, 163 aa, Homo sapiens
MNASGCQQEQNSVQPCSSIWRVPLTPGPPEVKPGVPMGTGWGHGGGQDGFGKGNIRAGKQECMFLLWATGPGLRVDINIMDADRKHKIPGSETKDFVTHNTVCLFITSPTLNSHGYEAMWAQEETVHTVGLRRGGSSQMRNTMLGEPTPFAQKESHFIVCREM

SEQ ID NO: 916323 - protein, 167 aa, Homo sapiens
MVLCFPILVHFIKRGAEVCQHAAVPASKSKRLLTLLHWAVQRNVCDHAPATGVGKCCDPRAMLKEPGGCVLKKCAEVNSQLKKENEEIIPGRWKSDSKAPEKGGCRTYLWSRKKTSVAQSTDEDSFSKKHSIHNTYPFTTQPSVVNGASTAYEIAKTEKTPKLNDNC

SEQ ID NO: 916324 - protein, 88 aa, Homo sapiens
GGRGNLSHFNTTAVAACGCHKKKNPFFGTAEAGLFSLFSRAPALPLLTQWGCQHHSLPLLLCLGGRKMPALVLTPASPSISGFLYLPS

SEQ ID NO: 916325 - protein, 180 aa, Homo sapiens
MMRTVSRVLAPYLTWAYAKDVKCGIDAQALMLQGAELLADAVAITMGSKGRAVIIQQSCGDPKVTKDGVTVEKSIDLKDEYNSIGVKLVQDVANNTSEEAGDDTTTVLFWHALLPRMASRRLSIVPALEVANAHHKTLVIIVEDIDGEALSTFVLNRLKVGLHIIAVKAPGFDEQLKEPA

SEQ ID NO: 916326 - protein, 345 aa, Homo sapiens
SPASLAIGCELSSLKRRRRRRRRRRRRQQRGSVSGPFTPRFLQPPLQPRGGGSLLAASRRSSLVPLQRKGERGDVFEVVSARISRAPLTPWSPCLPAVAPLVLGSLAHPLPLQGAVLGGVGSVLFLAGRNGVPKRGSLVGLAPPSPAPMSARAPKELRLALPPCLLNRTFASPNASGSGNTGARGPGAVGSGTCITQVGQQLFQSFSSTLVLIVLVTLIFCLIVLSLSTFHIHKRRMKKRKMQRAQEEYERDHCSGSRGGGGLPRPGRQAPTHAKETRLERQPRDSPFCAPSNASSLSSSSPGLPCQGPCAPPPPPPASSPQGAHAASSCLDTAGEGLLQTVVLS

SEQ ID NO: 916327 - protein, 140 aa, Homo sapiens
MCNLGRLGSPATSSEKPHHPWSGACPPSLGYLAHPAEPATLLLNLLSRKHPSTLPSPPPASHSFPNHPDWMTKGAEQREGFGPFISALHAASKGPILPSLIYTREKDLQSAELCANVGKTCLSCVSVSETYQKVFNSASC

SEQ ID NO: 916328 - protein, 235 aa, Homo sapiens
MPPNPIPPPSLQTLSYDPCPRDTSLHHATLMTGTPLQQLSHEAPTGPAGTTYSAANCLLSDLMKTTNHQTPETATGSSPQTEPVAKTKLIFRISQCLVICSAKELPITQAFDGDHPSILRKSIPWPKSADRPLPGARLLSRALTVGKIGEDPPEYDSPQATGARTVNRNYMCGAQGGGGGQNSEDQIQTHSRSYASASGSSWKRPPLTSSPHTAASWPGTDTSGAGWGQEKETAP

SEQ ID NO: 916329 - protein, 153 aa, Homo sapiens
MPNIPISYGLDFKDSQPEAVHLASFEWVTVPPSLFIVNFRPTCVAARSLFLLPASAHGAQAVALHLPGHLHRRLTAHSGLPVGQRTPEAIRSSPSRSSPSVAHRSTATSVTICRPVPRPEPQRNWAAASGGQGRLACLVRTRRAQRESWGIPG

SEQ ID NO: 916330 - protein, 125 aa, Homo sapiens
MPNKSPHLPRRGRTDSPPDTVPGSQGKPDGQVPSCQLPGGGRERPGPPGVLGANAAGPARELGNPGMSQAPRARCCLSSSGSGRSADKRNGASWGTGYDGRRGPFYLHCCSFVNLTYFCWVFPKY

SEQ ID NO: 916331 - protein, 125 aa, Homo sapiens; identical to SEQ ID NO: 916330

SEQ ID NO: 916332 - protein, 114 aa, Homo sapiens
MPNKSPHLPRRGRTDSPPDTVPGSQGKPDGQVPSCQLPGGGRERPGPPGVLGANAAGPARELGNPGMSQAPRARCCLSSSGSGRSAESASRSPGGVRGTGTRAARGLSPGSQAG

SEQ ID NO: 916333 - protein, 152 aa, Homo sapiens
MIKYNAYYAKIKAHKNSLGEVESKWSFMTELHEKRDFVKKLKTMKEELMQDLQNPGGNRITQVQEDITNLKDKIITVKESIIEKTCFLEEEKKTHEKLRKEIEVQHKRYDAILKRLHCQVNKLQSNRRQWQWNIQQLEKTAAELRKCIGMQE

SEQ ID NO: 916334 - protein, 106 aa, Homo sapiens
MPNKSPASAHGAQAVALHLPGHLHRRLTAHSGLPVGQRTPEAIRSSPSRSSPSVAHRSTATSVTICRPVPRPEPQRNWAAASGGQGRLACLVRTRRAQRESWGIPG

SEQ ID NO: 916335 - protein, 190 aa, Homo sapiens [sequence omitted]

SEQ ID NO: 916336 - protein, 340 aa, Homo sapiens
MLPEIFLALPPRGSILEDEKPSNGVLVHMVKLLIKTFLDGIFDDLMENNVLNTDEIHLIGKCLKFVVSNAENLVDDITETAQTAGKIFREHLWNSKKQLSSAFLEIQGAQPSGKLKLCPHAHFHELKTKRADEVICFEIRRHKITHSDKTLGTYWNDISSDGEREANMPGLNIRNKEFNYLHNRNGSELDLLGMRDLLENLGYSVVIKENLTAQEMETALRQFAAHPEHQSSDSTFLVFMSHSILNGICGTKHWDQEPDVLHDDTIFEIFNNRNCQSLKDKPKVIIMQACRGSLGLVQDIGCTIKAANLTHKVESENKKVHKEYALSDFNVNERSGEEHL

SEQ ID NO: 916337 - protein, 124 aa, Homo sapiens
QSEPFFSAVRKDGGCYLWQIYPIKERKDRIRLVLIICNKEFDHLPPRNGADFAIMEMKKLLEDLGYSVDVEENLTARQTMGNSGSETVQHLWESCLHSHLRTWRMQFARHTREGLHCFLLFNLI

SEQ ID NO: 916338 - protein, 107 aa, Homo sapiens
QSEPFFSAVRKDGGCYLWQIYPIKERKDRIRLVLIICNKEFDHLPPRNGADFAIMEMKKLLEDLGYSVDVEENLTARITCPGETAQGAPSSSHNSSHASRDIPGAAT

SEQ ID NO: 916339 - protein, 88 aa, Homo sapiens
QSEPFFSAVRKDGGCYLWQIYPIKERKDRIRLVLIICNKEFDHLPPRNGADFAIMEMKKLLEDLGYSVDVEENLTARNMKSLLWAFAA

SEQ ID NO: 916340 - protein, 130 aa, Homo sapiens
MGPNPMWLCPNKKEQLDTYTLPGRARCEDEAEIRVMHPLIKECQRLPENHQKLRHSMEQTFPHSTLILDFQPQKPVRQDCDKCCKEIQDSRNMDNRIPSIESYSLLISSLKPELGFRSTFQNIMYFANSI

SEQ ID NO: 916341 - protein, 151 aa, Homo sapiens
MRRLLLVTSLVVVLLWEAGAVPAPKVPIKMQVKHWPSEQDPEKAWGARVVEPPEKDDQLVVLFPVQKPKLLTTEEKPRGQGRGPILPGTKAWMETEDTLGRVLSPEPDHDSLYHPPPEEDQGEERPRLWVMPNHQVLLGPEEDQDHIYHPQ

SEQ ID NO: 916342 - protein, 142 aa, Homo sapiens [sequence omitted]

SEQ ID NO: 916343 - protein, 151 aa, Homo sapiens; identical to SEQ ID NO: 916341

SEQ ID NO: 916344 - protein, 387 aa, Homo sapiens
MATSMAAASGRFESAKSIEERKEQTRNARAEVLRQAKANFEKEERRKELKRLRGEDTWMLPDVNERIEQFSQEHSVKKKKKKDKHSKKAKKEKKKKSKKQKYEKNNESSDSSSSSEDEWVEAVPSQTPDKEKAWKVKDEKSGKDDTQIIKRDEWMTVDFMSVKTVSSSSLKAEKETMRKIEQEKNQALEQSKLMERELNPYWKDGGTGLPPEDCSVSSITKEAELLQIQEEKRKFLESTDSLNNELKRLCGLTVEVDMEKVAAEIAQAEEQTGKKQEEREKEAAEQAECSQGSIIPEEEQAPNKGEEKKDEENIPMETEETHLEETTESQQNGEEGTSTTEDKENGQEGVDSMAEEGTSDSNTGSESNSTTVEEPPTDPLPEDEKKE

SEQ ID NO: 916345 - protein, 239 aa, Homo sapiens
YHIAFLGEDPETRRMRTVKNIADLRQNLEETMSSLRGTQISHSTLETTFDSTVTTEVNGRTIPNLTSRPTPMTWRLGQACPRLQAGDAPSLGAGYPRSGTSRFIHTDPSRFMYTTPLRRAAVSRLGNMSQIDMSEKASSDLDMSSEVDVGGYMSDGDILGKSLRTDDINSGYMTDGGLNLYTRSLNRIPDTATSRDIIQRGVHDVTVDADSIERVNKGRTTIGETEKSALTQRSKDNQG

SEQ ID NO: 916346 - protein, 542 aa, Homo sapiens
MAHVYICNKPARCAQIENVDVCLSFLAARGVNVQGLSAEEIRNGNLKAILGLFFSLSRYKQQQHHQQQYYQSLVELQQRVTHASPPSEASQAKTQQDMQSRLPGPSRVPAAGSSSKVQGASNLNRRSQSFNSIDKNKPPNYANGNEKEFVSLLNPCYSKYDLCVSSNGIIQKIVGNAEPQGPLQTCYSSKGPQSSSGVNGNVQPPSTAGQPPASAIPSPSASKPWRSKSMNVKHSATSTMLTVKQSSTATSPTPSSDRLKPPVSEGVKTAPSGQKSMLEKFKLVNARTALRPPQPPSSGPSDGGKDDDAFSESGEMEGFNSGLNSGGSTNSSPKVSPKLAPPKAGSKNLSNKKSLLQPKEKEEKNRDKNKVCTEKPVKEEKDQVTEMAPKKTSKIASLIPKGSKTTAAKKESLIPSSSGIPKPGSKVPTVKQTISPGSTASKESEKFRTTKGSPSQSLSKPITMEKASASSCPAPLEGREAGQASPSGSCTMTVAQSSGQSTGNGAVQLPQQQQHSHPNTATVAPFIYRSVLIPSETSINAS

SEQ ID NO: 916347 - protein, 376 aa, Homo sapiens
MVILIFQAKKGNYAFLWDVAVVEYAALTDDDCSVTVIGNSISSKGYGIALQHGSPYRDLFSQRILELQDTGDLDVLKQKWWPHMGRCDLTSHASAQADGKSLKLHSFAGVFCILAIGLLLACLVAALELWWNSNRCHQETPKEDKEVNLEQVHRRMNSLMDEDIAHKQISPASIELSALEMGGLAPTQTLEPTREYQNTQLSVSTFLPEQSSHGTSRTLSSGPSSNLPLPLSSSATMPSMQCKHRSPNGGLFRQSPVKTPIPMSFQPVPGGTRPGVLFKQQSNPEQGPSPLRHLITSEISRPIPVQSSYRPQAINLIFHPQMCVLFSRPLKKSPGFSDFVGDSPAVGLKLSKADLRRLSDMIKISSSRNQKEDAQP

SEQ ID NO: 916348 - protein, 163 aa, Homo sapiens
PSPVAAVALRAMALCWEMYYTAQYSPHKNTINGPASGQQSDDSNPVVFLEGPLWKQSWEDGTEIFGIRGPCKEAKEREIHPPLITRDCNYSDIDWDNEFAKTLEKERYSCRYFAFAEFAELSCEVKGKAGDHTCVCDITDTLRSTNVSLAHQVGTERLHLKVI

SEQ ID NO: 916349 - protein, 214 aa, Homo sapiens
VRASLPPVPLLLHSSHIHVSCTLQSGGHCQKLEISSRAAKGLRMDSWLLVHCHSLPPSSLSSIFSWWRQALLRVPTGASGAGTALTAYNLGLVVLLGCLWEVMVTPLLANCSYFCQPVDYRWRKHGMRVAKASHQLIWMLSHWMLVMGSCPVTQSMILGPAASFGSLLEMQNLCSTPGTLIKNLLFNEQDAHMLIRFQGSGLGHIWRVLLWSLQ

SEQ ID NO: 916350 - protein, 143 aa, Homo sapiens
MSGWMEERRPLGCGKLLCITAAIDAAPHGACEPGCLSDGPDFEQSWATAVPCLGPSEAPLLSLRTPPPWRETQEILARGCYEESLGFCVLGLMGPRLWRGQEKVLTPVSSAAASVLLSERGLVAPLVGQRLMHQVNRQQQHCF

SEQ ID NO: 916351 - protein, 911 aa, Homo sapiens [sequence omitted]

SEQ ID NO: 916352 - protein, 728 aa, Homo sapiens [sequence omitted]

SEQ ID NO: 916353 - protein, 283 aa, Homo sapiens
MEVNCLTLKDLISPRQPRLDFAVEDGENAQKENIFVDRSRMAPKTPIKNEPIDLSKQKKFTPERNPITPVKLVDRQQAEPWTPTANLKMLISAASPDIRDREKKKGLFRPIENKDDAFTDSLQLDVVGDSAVDEFEKQRPSRKQKSLGLLCQKFLARYPSYPLSTEKTTISLDEVAVSLGVERRRIYDIVNVLESLHLVSRVAKNQYGWHGRHSLPKTLRNLQRLGEEQKYEEQMAYLQQKELDLIDYKFGERKKDGDPDSQEQQLLDFSEPDCPSCESIVTS

SEQ ID NO: 916354 - protein, 911 aa, Homo sapiens [sequence omitted]

SEQ ID NO: 916355 - protein, 251 aa, Homo sapiens
PAHRWAPGTPGRVLGAQARGRRQSAPASMEGLVFLNALATRLLFLLHSLVGVWRVTEVKKEPRYWLLALLNLLLFLETALTLKFKRGRGYKWFSPAIFLYLISIVPSLWLLELHHETQYCSIQAEGTSQNTSRKEDFNQTLTSNEQTSRADDLIETAKVFVNNLSTVCEKVWTLGLHQTFLLMLIIGRWLLPIGGGITRDQLSQLLLMFVGTAADILEFTSETLEEQNVRLCWKNSTNRRHTNPKWQLVLF

SEQ ID NO: 916356 - protein, 154 aa, Homo sapiens
SGSVLTSVCNNYTPRVMRKLRHRVIKSSLLGPVSCQLREKSEDSRLPILLTPAVQRRKDMLQNIGSGTGNLTAFELSQEEWVRAASGERKVETVNQPEPYRITKCLWRAHHMPDTLEGAEKLEEEHCYMNTVGRMASKREQEVGRALSGQHLVV

SEQ ID NO: 916357 - protein, 287 aa, Homo sapiens
PAHRWAPGTPGRVLGAQARGRRQSAPASMEGLVFLNALATRLLFLLHSLVGVWRVTEVKKEPRYWLLALLNLLLFLETALTLKFKRGRGYKWFSPAIFLYLISIVPSLWLLELHHETQYCSIQAEGTSQNTSRKEDFNQTLTSNEQTSRADDLIETAKVFVNNLSTVCEKVWTLGLHQTFLLMLIIGRWLLPIGGGITRDQLSQLLLMFVGTAADILEFTSETLEEQNVRNSPALVYAILVIWTWSMLQFPLDLADPCIRTSEDIGAVKIVLIGGPWNPTGLTLIKT

SEQ ID NO: 916358 - protein, 152 aa, Homo sapiens
QPLQSLTDSSPAPGMATSSREHSLHSNWILRAPRRHSEDIAAHTVHTVDGQFRRSTEHRTVGTQRRLERHPIYLPKAVEGAFNTWKFKPKACKKDLGSSRQILFNFSGEDMEWDAELFALEPQLSPGEDYYETENPKGQWLLRERLWERTVP

SEQ ID NO: 916359 - protein, 1194 aa, Homo sapiens
IFFMEAMSPQQETLGGQPGRSSSLTGVSRLAGGSCTKKKMKTLAERRRSAPSLILDKALQKRPTTRDSPSASVDTCTFLSSLVCSNRTLLIDGRAELKRGLQRQERHLFLFNDLFVVAKIKYNNNFKIKNKIKLTDMWTASCVDEVGEGNTNAMKSFVLGWPTVNFVATFSSPEQKDKWLSLLQRYINLEKEKDYPKSIPLKIFAKDIGNCAYSKTITVMNSDTANEVINMSLPMLGITGSERDYQLWVNSGKEEAPYPLIGHEYPYGIKMSHLRDSALLTPGSKDSTTPFNLQEPFLMEQLPREMQCQFILKPSRLAAAQQLSDSGHKTFKRRRSIINWAFWRGSSTHLDNLPSSPTSPMPGQLFGISLPNICENDNLPKPVLDMLFFLNQKGPLTKGIFRQSANVKSCRELKEKLNSGVEVHLDCESIFVIASVLKDFLRNIPGSIFSSDLYDHWVSVMDQGNDEEKINTVQRLLDQLPRANVVLLRYLFGVLHNIEQHSSSNQMTAFNLAVCVAPSILWPPASSSPELENEFTKKVSLLIQFLIENCLRIFGEEITSLFREVSVRCDTRENASDISCFQLNDSSYDSLENELNEDVDAPCSDLVKKLGQGSRSMDSVLTLSDYDLDQPEVEGLLTLSDFDLAHSKDEDVQMKRPLESKPVNILVYTKIPLRDHARAPSAMCTPSYLSTAAANAAKSLRRHRRCSEPSIDYLDSKLSYLREFYQKKLRKSSCDAILSQKDEDYLKQNQPLQEEGKTCFKQSLVTGTDVSKKNATTQNTKKKSLSGSEGNHVKLFPKSKPVAISVASYSPMSSQDHSKNQPFDVNTSGYSPPHTADALKGPRTHRRCSEPNIEDQNRKLTYLRGIYSKKQHKTSCEAGLLHGEEDYLKRHKSLQMEGQKLINQSLVMGIEVGKSSATNQNTEKVLPPRLNLCPRTSYSSLSSPGTSPSGSSVSSQDSAFSQISEHSVFTPTETSSPIDCTFQAQRKREDLSPDFSNASHVSGMPGPSSGQACSRPAYTKKDTMEWHSQMHSVTLHPSTWLRNGVASLKNWSLKKKAKAARPEEEKIASPKGPLEPPPHASGVPEANSLQEEQKDLPLRAAEGLSPVQSAQRCSSSPFQDSERHCSSPFSLVESRLKLCMKSHEEIEPGSQSSSGSLPWERASASSWTLEDATSPDSGPTVVCDIEDRYLTKDI

SEQ ID NO: 916360 - protein, 734 aa, Homo sapiens
MDQGNDEEKINTVQRLLDQLPRANVVLLRYLFGVLHNIEQHSSSNQMTAFNLAVCVAPSILWPPASSSPELENEFTKKVSLLIQFLIENCLRIFGEEITSLFREVSVRCDTRENASDISCFQLNDSSYDSLENELNEDVDAPCSDLVKKLGQGSRSMDSVLTLSDYDLDQPEVEGLLTLSDFDLAHSKDEDVQMKRPLESKPVNILVYTKIPLRDHARAPSAMCTPSYLSTAAANAAKSLRRHRRCSEPSIDYLDSKLSYLREFYQKKLRKSSCDAILSQKDEDYLKQNQPLQEEGKTCFKQSLVTGTDVSKKNATTQNTKKKSLSGSEGNHVKLFPKSKPVAISVASYSPMSSQDHSKNQPFDVNTSGYSPPHTADALKGPRTHRRCSEPNIEDQNRKLTYLRGIYSKKQHKTSCEAGLLHGEEDYLKRHKSLQMEGQKLINQSLVMGIEVGKSSATNQNTEKVLPPRLNLCPRTSYSSLSSPGTSPSGSSVSSQDSAFSQISEHSVFTPTETSSPIDCTFQAQRKREDLSPDFSNASHVSGMPGPSSGQACSRPAYTKKDTMEWHSQMHSVTLHPSTWLRNGVASLKNWSLKKKAKAARPEEEKIASPKGPLEPPPHASGVPEANSLQEEQKDLPLRAAEGLSPVQSAQRCSSSPFQDSERHCSSPFSLVESRLKLCMKSHEEIEPGSQSSSGSLPWERASASSWTLEDATSPDSGPTVVCDIEDRYLTKDI

SEQ ID NO: 916361 - protein, 1225 aa, Homo sapiens
LHPPPVLQPGSSLSLGARAVVGDRLSPTPRRAPGPPEVAWASTDCPLAVSAPKSGPAMSARERQPALKKKMKTLAERRRSAPSLILDKALQKRPTTRDSPSASVDTCTFLSSLVCSNRTLLIDGRAELKRGLQRQERHLFLFNDLFVVAKIKYNNNFKIKNKIKLTDMWTASCVDEVGEGNTNAMKSFVLGWPTVNFVATFSSPEQKDKWLSLLQRYINLEKEKDYPKSIPLKIFAKDIGNCAYSKTITVMNSDTANEVINMSLPMLGITGSERDYQLWVNSGKEEAPYPLIGHEYPYGIKMSHLRDSALLTPGSKDSTTPFNLQEPFLMEQLPREMQCQFILKPSRLAAAQQLSDSGHKTFKRRRSIINWAFWRGSSTHLDNLPSSPTSPMPGQLFGISLPNICENDNLPKPVLDMLFFLNQKGPLTKGIFRQSANVKSCRELKEKLNSGVEVHLDCESIFVIASVLKDFLRNIPGSIFSSDLYDHWVSVMDQGNDEEKINTVQRLLDQLPRANVVLLRYLFGVLHNIEQHSSSNQMTAFNLAVCVAPSILWPPASSSPELENEFTKKVSLLIQFLIENCLRIFGEEITSLFREVSVRCDTRENASDISCFQLNDSSYDSLENELNEDVDAPCSDLVKKLGQGSRSMDSVLTLSDYDLDQPEVEGLLTLSDFDLAHSKDEDVQMKRPLESKPVNILVYTKIPLRDHARAPSAMCTPSYLSTAAANAAKSLRRHRRCSEPSIDYLDSKLSYLREFYQKKLRKSSCDAILSQKDEDYLKQNQPLQEEGKTCFKQSLVTGTDVSKKNATTQNTKKKSLSGSEGNHVKLFPKSKPVAISVASYSPMSSQDHSKNQPFDVNTSGYSPPHTADALKGPRTHRRCSEPNIEDQNRKLTYLRGIYSKKQHKTSCEAGLLHGEEDYLKRHKSLQMEGQKLINQSLVMGIEVGKSSATNQNTEKVLPPRLNLCPRTSYSSLSSPGTSPSGSSVSSQDSAFSQISEHSVFTPTETSSPIDCTFQAQRKREDLSPDFSNASHVSGMPGPSSGQACSRPAYTKKDTMEWHSQMHSVTLHPSTWLRNGVASLKNWSLKKKAKAARPEEEKIASPKGPLEPPPHASGVPEANSLQEEQKDLPLRAAEGLSPVQSAQRCSSSPFQDSERHCSSPFSLVESRLKLCMKSHEEIEPGSQSSSGSLPWERASASSWTLEDATSPDSGPTVVCDIEDRYLTKDI

SEQ ID NO: 916362 - protein, 228 aa, Homo sapiens
GETMERRVEQLGPSRGGGIQTPGGGGGGGAAGRWEREPSLAARGTAPPAPPRQCLPTPCPPLGHGLRPRPPPGTPPPRCPRTLAPGPRGLFPAPPPAPARTGPAGKAAADRGRPGPAAGRRVRRSPSFPPFLLAQTRLGRTGSLALCLLLLLHGAMRLGGGSREKLACGRAGRAARTGRGEGGRQAEEEAAGRRRRRPGRTRGIPRAAGGLSRAGTRVLRYPSSHRRQ

SEQ ID NO: 916363 - protein, 149 aa, Homo sapiens
MTPYIFPVCPELAAVHHMPPIRDSALGKMETKISASGDHWMHQPRALLHCSRNSLENGGAASLVPQGQSTLHITVPGAHFHLQNALNPTLELEWIVLMYQHGILFPGSFLKSAGSARDHVPLSPSPNLSLKQNLFKATIERLTEFPQPC

SEQ ID NO: 916364 - protein, 526 aa, Homo sapiens
MNCRSEVLEVSVEGRQVEEAMLAVLHTVLLHRSTGKFHYKKEGTYSIGTVGTQDVDCDFIDFTYVRVSSEELDRALRKVVGEFKDALRNSGGDGLGQMSLEFYQKKKSRWPFSDECIPWEVWTVKVHVVALATEQERQICREKVGEKLCEKIINIVEVMNRHEYLPKMPTQSEVDNVFDTGLRDVQPYLYKISFQITDALGTSVTTTMRRLIKDTLASERRWISGSSLMAPRPWLLGIDYWAFGLWNLLWVIGETWKGQPPLASWFCGCQPQVILLIFADGSVLPLLSLHSPGGVPLLSPLYRRATTGMGNKVENMSLAEPSLPCLVSARRVNTFWHSCEDTGVPLGPLCEGEGLLGTGLLVLADWTCMGVPVGLGDEKKYSRPGVRAYGERAPPARPPVWAPAHLAIPPHLGSRRWSMNGSQAGAAAQAAWLSSCCNQSASPPEPPEGPRAVQAVVLGVLSLLVLCGVLFLGGGLLLRAQGLTALLTREQRASREPEPGSASGEDGDDDSSAPGCARWSRPPGSP

SEQ ID NO: 916365 - protein, 526 aa, Homo sapiens
MNCRSEVLEVSVEGRQVEEAMLAVLHTVLLHRSTGKFHYKKEGTYSIGTVGTQDVDCDFIDFTYVRVSSEELDRALRKVVGEFKDALRNSGGDGLGQMSLEFYQKKKSRWPFSDECIPWEVWTVKVHVVALATEQERQICREKVGEKLCEKIINIVEVMNRHEYLPKMPTQSEVDNVFDTGLRDVQPYLYKISFQITDALGTSVTTTMRRLIKDTLPSERRWISGSSLMAPRPWLLGIDYWAFGLWNLLWVIGETWKGQPPLASWFCGCQPQVILLIFADGSVLPLLSLHSPGGVPLLSPLYRRATTGMGNKVENMSLAEPSLPCLVSARRVNTFWHSCEDTGVPLGPLCEGEGLLGTGLLVLADWTCMGVPVGLGDEKKYSRPGVRAYGERAPPARPPVWAPAHLAIPPHLGSRRWSMNGSQAGAAAQAAWLSSCCNQSASPPEPPEGPRAVQAVVLGVLSLLVLCGVLFLGGGLLLRAQGLTALLTREQRASREPEPGSASGEDGDDDSSAPGCARWSRPPGSP

SEQ ID NO: 916366 - protein, 758 aa, Homo sapiens
  misc_feature (208)..(208): Xaa can be any naturally occurring amino acid
SLPGEWWHLRGWSWTVVGGGGSCFNRVPPLLCRRGHPPGQWNAGAPTFPRLPGRFQAQAWGWRWSPALQRTAPEEVPGSLPRVVSPVGNLVVEGVVVLRFGLGAPSWAQVGREEFRKGWIPLAGKWGPATLSGSVAPAERKGARTAALLRGSEPFEPGNSPVGSKELLTTSKAVWAPMRRSGLGRFAACSFYSLWFTHHRLGCWRKTXAVPWIESLVGICDVIARDAMLRAGHGSRPWLRRTGPCLGLVRWHTVWLRGTRQPHGESIHGTKKGRGTYSIGTVGTQDVDCDFIDFTYVRVSSEELDRALRKVVGEFKDALRNSGGDGLGQMSLEFYQKKKSRWPFSDECIPWEVWTVKVHVVALATEQERQICREKVGEKLCEKIINIVEVMNRHEYLPKMPTQSEVDNVFDTGLRDVQPYLYKISFQITDALGTSVTTTMRRLIKDTLASERRWISGSSLMAPRPWLLGIDYWAFGLWNLLWVIGETWKGQPPLASWFCGCQPQVILLIFADGSVLPLLSLHSPGGVPLLSPLYRRATTGMGNKVENMSLAEPSLPCLVSARRVNTFWHSCEDTGVPLGPLCEGEGLLGTGLLVLADWTCMGVPVGLGDEKKYSRPGVRAYGERAPPARPPVWAPAHLAIPPHLGSRRWSMNGSQAGAAAQAAWLSSCCNQSASPPEPPEGPRAVQAVVLGVLSLLVLCGVLFLGGGLLLRAQGLTALLTREQRASREPEPGSASGEDGDDDSSAPGCARWSRPPGSP

SEQ ID NO: 916367 - protein, 155 aa, Homo sapiens
KDKIVWVFKSRSKWEGVRVMGTDGEETQVLHWHLARMPHADFLPLAPSLVPLASEPDLNKKVNLHNHSGPINNQTKNLLTYFFPSFPKHNLIHVPPAHKSHGIFPNYSAYVNLLCLLKGSLSSNGFCRQPISSHYSGHFLPTKYSVVVTKNISIG

SEQ ID NO: 916368 - protein, 486 aa, Homo sapiens
MVHGMPTQKTQGCDAGYLNLGAGDWICRIELFELRTQEGLAIAEGLSAELQVAQQENHHLNLDLKEAKSWQEEQSAQAQRLKDKVAQMKDTLGQAQQRVAELEPLKEQLRGAQELAASSQQKATLLGEELASAAAARDRTIAELHRSCLEVAEVNGRLAELGLHLKEEKCQWSKERAGLLQSVEAEKDKILKLSAEILRLEKAVQEERTQNQVFKTELAREKDSSLVQLSESKRELTELRSALRVLQKEKEQLQEEKQELLEYMRKLEARLEKVADEKWNEDATTEDEEAAVGLSCPAALTDSEDESPEDMRLPPYGLCERGDPGSSPAGPREASPLVVISQPAPISPHLSGPAEDSSSDSPWLLFPYLSQCAAPPSWDTTPKPNPVSLASRRLKMRQSVLMAAVQSGGEEANLLLPELASAFYDMASGFTVGTLSETSTGGPATPTWKECPICKERFPAESDKDALEDHMDGHFFFSTQDPFTFE

SEQ ID NO: 916369 - protein, 520 aa, Homo sapiens
MGISRSHGEITEERDILDRQQGDHVARILELQDDIQTISEKVLTKEVELDRLRDTVKALTREQEKLLGQLKEVQADKEQSEAELQVAQQENHHLNLDLKEAKSWQEEQSAQAQRLKDKVAQMKDTLGQAQQRVAELEPLKEQLRGAQELAASSQQKATLLGEELASAAAARDRTIAELHRSCLEVAEVNGRLAELGLHLKEEKCQWSKERAGLLQSVEAEKDKILKLSAEILRLEKAVQEERTQNQVFKTELAREKDSSLVQLSESKRELTELRSALRVLQKEKEQLQEEKQELLEYMRKLEARLEKVADEKWNEDATTEDEEAAVGLSCPAALTDSEDESPEDMRLPPYGLCERGDPGSSPAGPREASPLVVISQPAPISPHLSGPAEDSSSDSPWLLFPYLSQCAAPPSWDTTPKPNPVSLASRRLKMRQSVLMAAVQSGGEEANLLLPELASAFYDMASGFTVGTLSETSTGGPATPTWKECPICKERFPAESDKDALEDHMDGHFFFSTQDPFTFE

SEQ ID NO: 916370 - protein, 188 aa, Homo sapiens
AASMWCWACRFTKVQSLGAVQRGNVGPEPPHRVPTGALPNGAVRRGPMSSRPQNGRSSDSLHHAPEKARDTQCQPLKELSKAVGSHSLHHCALIVRCGVKGNYSGALKFNDCPTGFWTCMGPVAPLFWQISHIWNRVQLMTLYMRAILLGMLENSACAKTKPECVGSDFQGIQTLRVTLVGLGGVVNI

SEQ ID NO: 916371 - protein, 188 aa, Homo sapiens; identical to SEQ ID NO: 916370

SEQ ID NO: 916372 - protein, 240 aa, Homo sapiens
NALSPPQPLSPDWPWCVFLPIMSMCSHCSTRNYEYIPSNAIAGSNGISDSRSLRNLHVVFQFTLPPTVISNRTNQENHKRDCGYSEKDAGGQDFQDKDFGENQKLMEMKTEDLTGDDLMQMNASKSGPDDEEEENKSLLSVKITRIKIFIKMIHFHLTNTMAGAVATGMQGAVSQSCAGQWGRNHSVLLGLWACDKKAAEVSNFPSSCYLLLHPPHSSNLCTLSSSKVASTFSVNKSHEI

SEQ ID NO: 916373 - protein, 85 aa, Homo sapiens
GVAVLEDPRWTGENMSLPSNLQLNDLTPDSRAVKPADRQMAQNNSRPELLDPEPGGLLTSQGFIRLPVLGYIYRVSSVSSDEIWL

SEQ ID NO: 916374 - protein, 322 aa, Homo sapiens
MALPPGPAALRHTLLLLPALLSSGWGELEPQIDGQTWAERALRENERHAFTCRVAGGPGTPRLAWYLDGQLQEASTSRLLSVGGEAFSGGTSTFTVTAHRAQHELNCSLQDPRSGRSANASVILNVQFKPEIAQVGAKYQEAQGPGLLVVLFALVRANPPANVTWIDQDGPVTVNTSDFLVLDAQNYPWLTNHTVQLQLRSLAHNLSVVATNDVGVTSASLPAPGPSRHPSLISSDSNNLKLNNVRLPRENMSLPSNLQLNDLTPDSRAVKPADRQMAQNNSRPELLDPEPGGLLTSQGFIRLPVLGYIYRVSSVSSDEIWL

SEQ ID NO: 916375 - protein, 367 aa, Homo sapiens
MALPPGPAALRHTLLLLPALLSSGWGELEPQIDGQTWAERALRENERHAFTCRVAGGPGTPRLAWYLDGQLQEASTSRLLSVGGEAFSGGTSTFTVTAHRAQHELNCSLQDPRSGRSANASVILNVQFKPEIAQVGAKYQEAQGPGLLVVLFALVRANPPANVTWIDQDGPVTVNTSDFLVLDAQNYPWLTNHTVQLQLRSLAHNLSVVATNDVGVTSASLPAPGLLATRVEVPLLGIVVAAGLALGTLVGFSTLVACLVCRKEKKTKGGGHGYGDMHPSDSNNLKLNNVRLPRENMSLPSNLQLNDLTPDSRAVKPADRQMAQNNSRPELLDPEPGGLLTSQGFIRLPVLGYIYRVSSVSSDEIWL

SEQ ID NO: 916376 - protein, 156 aa, Homo sapiens
MGTALRVLGCPPASFLFQASLQQPFDLDLSPHEWTPLARDQLGQGDPNPATTEVEIKKKGPGSLLVSMDQLASYGRKDRINSIMSVVTNTLVEDKGEKEKGKKMMTQGGKEEEAVERKRKAKDESRKGQRGKKEGDRRRQNKEGKVKRGEECDLYF

SEQ ID NO: 916377 - protein, 140 aa, Homo sapiens
CGRMGRAVCKAPEFSQSICRAPRVLGKLKSCSVALRQEHKPVVGTVYCCLGVWGLHTQAPMPWHRRDNSLARNAQMKWDPAWPFLASHCQCSWTTWPDFMYASHARSPCQAQWTHSAYRAMLPGFGAEGTDKRDNSKEDD

SEQ ID NO: 916378 - protein, 145 aa, Homo sapiens [sequence omitted]

SEQ ID NO: 916379 - protein, 238 aa, Homo sapiens
MPCIQAQYGTPAPSPGPRDHLASDPLTPEFIKPTMDLASPEAAPAAPIQELVLPHFGKEDAGDVQQFYDLLSGSLEVIRKWAEKIPGFAELSPADQDLLLESAFLELFILRLAYRSKPGEGKLIFCSGLVLHRLQCARGFGDWIDSILAFSRSLHSLLVDVPAFACLSALVLITDPAWASRETAGGVGRSCKNRNSQSWPEGSTVDRLVGEAEPPSQDKLGMVHVWIGGTPARKLRGT

SEQ ID NO: 916380 - protein, 611 aa, Homo sapiens
MWLAKACWSIQSEMPCIQAQYGTPAPSPGPRDHLASDPLTPEFIKPTMDLASPEAAPAAPTALPSFSTFMDGYTGEFDTFLYQLPGTVQPCSSASSSASSTSSSSATSPASASFKFEDFQVYGCYPGPLSGPVDEALSSSGSDYYGSPCSAPSPSTPSFQPPQLSPWDGSFGHFSPSQTYEGLRAWTEQLPKASGPPQPPAFFSFSPPTGPSPSLAQSPLKLFPSQATHQLGEGESYSMPTAFPGLAPTSPHLEGSGILDTPVTSTKARSGAPGGSEGRCAVCGDNASCQHYGVRTCEGCKGFFKRTVQKNAKYICLANKDCPVDKRRRNRCQFCRFQKCLAVGMVKEVVRTDSLKGRRGRLPSKPKQPPDASPANLLTSLVRAHLDSGPSTAKLDYSKFQELVLPHFGKEDAGDVQQFYDLLSGSLEVIRKWAEKIPGFAELSPADQDLLLESAFLELFILRLAYRSKPGEGKLIFCSGLVLHRLQCARGFGDWIDSILAFSRSLHSLLVDVPAFACLSALVLITDRHGLQEPRRVEELQNRIASCLKEHVAAVAGEPQPASCLSRLLGKLPELRTLCTQGLQRIFYLKLEDLVPPPPIIDKIFMDTLPF

SEQ ID NO: 916381 - protein, 868 aa, Homo sapiens
RGSPRGARDPRPPGMGAPAVQSSSGPAGARPRKAGVERRAEPAGPGEGLPGWREARREPEGPGAVGSREQLESEEILIRGSPAAASLQRPFSGSGPPAGYSGPGGPQLGPESGAGSLVGLGAAIFSGRGGREEPIYRSNNPRSLRQWNPACVTRADIPGPPSSPRPLGLPGPHLPLAASRRNRTAPRALVWPKLDGRPASVAPPPLPVQEGRARPGSPSGGGYETWGSAQKNFGSARGTRDQAETRGASPGRGSGSRPEMPCIQAQYGTPAPSPGPRDHLASDPLTPEFIKPTMDLASPEAAPAAPTALPSFSTFMDGYTGEFDTFLYQLPGTVQPCSSASSSASSTSSSSATSPASASFKFEDFQVYGCYPGPLSGPVDEALSSSGSDYYGSPCSAPSPSTPSFQPPQLSPWDGSFGHFSPSQTYEGLRAWTEQLPKASGPPQPPAFFSFSPPTGPSPSLAQSPLKLFPSQATHQLGEGESYSMPTAFPGLAPTSPHLEGSGILDTPVTSTKARSGAPGGSEGRCAVCGDNASCQHYGVRTCEGCKGFFKRTVQKNAKYICLANKDCPVDKRRRNRCQFCRFQKCLAVGMVKEVVRTDSLKGRRGRLPSKPKQPPDASPANLLTSLVRAHLDSGPSTAKLDYSKFQELVLPHFGKEDAGDVQQFYDLLSGSLEVIRKWAEKIPGFAELSPADQDLLLESAFLELFILRLAYRSKPGEGKLIFCSGLVLHRLQCARGFGDWIDSILAFSRSLHSLLVDVPAFACLSALVLITDRHGLQEPRRVEELQNRIASCLKEHVAAVAGEPQPASCLSRLLGKLPELRTLCTQGLQRIFYLKLEDLQEDPGIWRPSPSRQEDCTEVPTCARVPT

SEQ ID NO: 916382 - protein, 857 aa, Homo sapiens
RGSPRGARDPRPPGMGAPAVQSSSGPAGARPRKAGVERRAEPAGPGEGLPGWREARREPEGPGAVGSREQLESEEILIRGSPAAASLQRPFSGSGPPAGYSGPGGPQLGPESGAGSLVGLGAAIFSGRGGREEPIYRSNNPRSLRQWNPACVTRADIPGPPSSPRPLGLPGPHLPLAASRRNRTAPRALVWPKLDGRPASVAPPPLPVQEGRARPGSPSGGGYETWGSAQKNFGSARGTRDQAETRGASPGRGSGSRPEMPCIQAQYGTPAPSPGPRDHLASDPLTPEFIKPTMDLASPEAAPAAPTALPSFSTFMDGYTGEFDTFLYQLPGTVQPCSSASSSASSTSSSSATSPASASFKFEDFQVYGCYPGPLSGPVDEALSSSGSDYYGSPCSAPSPSTPSFQPPQLSPWDGSFGHFSPSQTYEGLRAWTEQLPKASGPPQPPAFFSFSPPTGPSPSLAQSPLKLFPSQATHQLGEGESYSMPTAFPGLAPTSPHLEGSGILDTPVTSTKARSGAPGGSEGRCAVCGDNASCQHYGVRTCEGCKGFFKRTVQKNAKYICLANKDCPVDKRRRNRCQFCRFQKCLAVGMVKEVVRTDSLKGRRGRLPSKPKQPPDASPANLLTSLVRAHLDSGPSTAKLDYSKFQELVLPHFGKEDAGDVQQFYDLLSGSLEVIRKWAEKIPGFAELSPADQDLLLESAFLELFILRLAYRSKPGEGKLIFCSGLVLHRLQCARGFGDWIDSILAFSRSLHSLLVDVPAFACLSALVLITDRHGLQEPRRVEELQNRIASCLKEHVAAVAGEPQPASCLSRLLGKLPELRTLCTQGLQRIFYLKLEDLVPPPPIIDKIFMDTLPF

SEQ ID NO: 916383 - protein, 273 aa, Homo sapiens
IELVPGQAQKVVRTDSLKGRRGRLPSKPKQPPDASPANLLTSLVRAHLDSGPSTAKLDYSKFQELVLPHFGKEDAGDVQQFYDLLSGSLEVIRKWAEKIPGFAELSPADQDLLLESAFLELFILRLAYRSKPGEGKLIFCSGLVLHRLQCARGFGDWIDSILAFSRSLHSLLVDVPAFACLSALVLITDRHGLQEPRRVEELQNRIASCLKEHVAAVAGEPQPASCLSRLLGKLPELRTLCTQGLQRIFYLKLEDLVPPPPIIDKIFMDTLPF

SEQ ID NO: 916384 - protein, 405 aa, Homo sapiens
LCRMSGVLCSRNLFTFKFSLFQLDSGASGEPGHSLGLTLGFSHCGNCQTAVVSAQPEGMASNGAYPALGPGVTANPGTSLSVFTALPFTTPAPGPAHGPLLVTAGAPPGGPLVLSTLPSTPLVTEQDGCGPSGAGASNVFVQMRTEVGPVKAAQAQTLVLTQAPLVWQAPGALCGGVVCPPPLLLAAAPVVPVMAAQVVGGTQACEGGWSQGLPLPPPPPPAAQLPPIVSQGNAGPWPQGAHGEGSLASSQAKAPPDDSCNPRSVYENFRLWQHYKPLARRHLPQSPDTEALSCFLIPVLRSLARRKPTMTLEEGLWRAMREWQHTSNFDRMIFYEMAEKFLEFEAEEEMQIQKSQWMKGPQCLPPPATPRLEPRGPPAPEVVKQPVYLPSKAGPKAPTACLPPP

SEQ ID NO: 916385 - protein, 1004 aa, Homo sapiens
LCRMSGVLCSRNLFTFKFSLFQLDSGASGEPGHSLGLTLGFSHCGNCQTAVVSAQPEGMASNGAYPALGPGVTANPGTSLSVFTALPFTTPAPGPAHGPLLVTAGAPPGGPLVLSTLPSTPLVTEQDGCGPSGAGASNVFVQMRTEVGPVKAAQAQTLVLTQAPLVWQAPGALCGGVVCPPPLLLAAAPVVPVMAAQVVGGTQACEGGWSQGLPLPPPPPPAAQLPPIVSQGNAGPWPQGAHGEGSLASSQAKAPPDDSCNPRSVYENFRLWQHYKPLARRHLPQSPDTEALSCFLIPVLRSLARRKPTMTLEEGLWRAMREWQHTSNFDRMIFYEMAEKFLEFEAEEEMQIQKSQWMKGPQCLPPPATPRLEPRGPPAPEVVKQPGMASHIPTGAMAKAKGAKGGHCPHTPCFPSRGGFAPSNRTVSRSICSVLTWSSFLATLSPRLSKTPHMLCPGSRDERGEYTAYWWLQTSSQAMLSQMCPSCLLRGRCGSGGPDPAGTHFTSPSPALPCVVPAGGAALTTPRPVTKARRPPPRPHRRAETKARLPPPRPQRPAETKVPEEIPPEVVQEYVDIMEELLGPSLGATGEPEKQREEGEVKQPQEEDWTPPDPGLLSYTDKLCSQKDFVTKVEAVIHPQFLEELLSPDPQMDFLALSQELEQEEGLTLAQVPQGQEGPGTQGPPDCLIPPAGDARLLGEPLWSGKMQLVEKRLLPLKEKQHARAAPSRGTARLDSSSSKFAAGQGAERDVPVPQQGVGMETCPPQTTARDSQGRGRAHTGMARSKDSVVLLGCQDSPGLRAARPTSPPQDHRPTCPGVGTKDALDLPGGSPVRESHGLAQGSSEEEELPSLAFLLGSQHKLLPWWLPQSPVPASGLLSPEKWGPQGTHQFPSAERRGLNLAPSPANKAKKRPLFGSLSPAEKTPHPGPGLRVSGEQSLTWGLGGPSQSQKRKGDPLVSRKEKKQRSGSLGPIPKDGALASDAPKRSKASSPPVLILLGLSFGG

SEQ ID NO: 916386 - protein, 219 aa, Homo sapiens
MEIVICVTISIFHRKVSNHPAGTNTSVTVHWNINILFCPLIVPVLEVLTKALRQDKEIKGIQFGKEKVKLFHFTDNATLFLEKPEDSPKRLFILIYDFSTVTGYKINIQKSFPSRLSVMLKQIVCDAHHILVSLFTFFSNLVGRFSEFTGDFVFTYISICLVTRTGCLGLPKLNGAAKNLCSHNNQKNHAFPMWIISKAEDIGKQLRIASLQLFWMCTG

SEQ ID NO: 916387 - protein, 219 aa, Homo sapiens; identical to SEQ ID NO: 916386

SEQ ID NO: 916388 - protein, 545 aa, Homo sapiens
FSPDPIPRMKVLVLSKPAFMGFDFHPAYHLLMPAGYGSHREVQALCQQKNGRWVFTGIFTAEMFLKLIAMDPYYYFQEGWNIFDGFIVSLSLMELSLADVEGLSVLRSFRLLRVFKLAKSWPTLNMLIKIIGNSVGALGNLTLVLAIIVFIFAVVGMQLFGKSYKECVCKINQDCELPRWHMHDFFHSFLIVFRVLCGEWIETMWDCMEVAGQAMCLIVFMMVMVIGNLVVLNLFLALLLSSFSADNLAATDDDGEMNNLQISVIRIKKGVAWTKLKVHAFMQAHFKQREADEVKPLDELYEKKANCIANHTGADIHRNGDFQKNGNGTTSGIGSSVEKYIIDEDHMSFINNPNLTVRVPIAVGESDFENLNTEDVSSESDPEGSKDKLDDTSSSEGSTIDIKPEVEEVPVEQPEEYLDPDACFTEGCVQRFKCCQVNIEEGLGKSWWILRKTCFLIVEHNWFETFIIFMILLSSGALAFEDIYIEQRKTIRTILEYADKVFTYIFILEMLLKWTAYGFVKFFTNAWCWLDFLIVAVPLNLSGLI

SEQ ID NO: 916389 - protein, 484 aa, Homo sapiens
PPTMRRLPRALLLQLRLALLVAAGAPEVLVSAPRSLVWGPGLQAAVVLPVRYFYLQAVNSEGQNLTRSPAGETPFKVVVKSLSPKELVRIHVPKPLDRNDGTFLMRYRMYETVDEGLKIEVLYGDEHVAQSPYILKGPVYHEYCECPEDPQAWQKTLSCPTKEPQIAKDFASFPSINLQQMLKEVPKRFGDERGAIVHYTILNNHVYRRSLGKYTDFKMFSDEILLSLTRKVLLPDLEFYVNLGDWPLEHRKVNGTPSPIPIISWCGSLDSRDVVLPTYDITHSMLEAMRGVTNDLLSIQGNTGPSWINKTERAFFRGRDSREERLQLVQLSKENPQLLDAGITGYFFFQEKEKELGKAKLMGFFDFFKYKYQVNVDGTVAAYRYPYLMLGDSLVLKQDSPYYEHFYMALEPWKHYVPIKRNLSDLLEKVKWAKENDEEAKKIAKEGQLMARDLLQPHRLYCYYYQVLQVHCQLEGNCYKQLFG

SEQ ID NO: 916390 - protein, 159 aa, Homo sapiens
MSVRKRTNCATRTRVGRRAGQGTEGEANRSQAPLDLTASPKSAAVGSDGGGSRVMGSERGCKSSGGSSSPQLGNLLFVYKSSEFNNSSSMCPKQFSGRKDLGRTQQHSHQQAWVCRACSQSKAIQKWLALGSGVDQWARGEPWERVCAVFTVKTLLVHT

SEQ ID NO: 916391 - protein, 167 aa, Homo sapiens
MLDKLTSMFAPCPSTSPHNIDKTEENFSLIYDTKSLFAVHHITPEEAKYKLCKVRKIFLGTKGIPHLVTHDGRTIRYTDPLIKVNDTIQIDLETGKITDFIKFDTGHLCMVTGGANLGRIGVITNRERHPGSFDIVHMEDANGNSFATQLSNIFVIGKGNKLWISLP

SEQ ID NO: 916392 - protein, 149 aa, Homo sapiens
LLTTATNITMLKGTIISPLDYRSSLLTVGILISSQCKIMALLFSKLPDSFPLARAKAKVSGVAKSSCIIYVLLFCPSGGLPCFALPCSLRFSHIGLVAVPHTHRACPATHALPVAPVGSFAWSTLPQECPPCLQVFAKCCLLCFIYLFI

SEQ ID NO: 916393 - protein, 149 aa, Homo sapiens; identical to SEQ ID NO: 916392

SEQ ID NO: 916394 - protein, 149 aa, Homo sapiens; identical to SEQ ID NO: 916392

SEQ ID NO: 916395 - protein, 277 aa, Homo sapiens
MADGLIPKGCVQGPKVQAASTVTGNHAGTSVNSDPTASTVTGDHAGTGVNPDSTASTVTGDHAGTGVNSDPTASTVTGDHAGTGVNPDSTASTVTGDHAGTGVNPDSTASTVTGDHAGTGVNSDPTASTVTGDHAGTGVNPDSTASTVTGDHAGTGVNPDSTASTVTGDHAGTGVNPDPTASTVTGDHAGTGVNPDSTASTVTGDHAGTGVNPDSTASTVTGDHAGTGVNPDSTASTVTGDHTGTGVNSDATAPSWAAPATTRTRSAAELEADSGRN

SEQ ID NO: 916396 - protein, 277 aa, Homo sapiens; identical to SEQ ID NO: 916395

SEQ ID NO: 916397 - protein, 173 aa, Homo sapiens
MVQTIYQPTGHKLVNSPAKLVCAVRNTSIPRTTGWGIGAALLQGQNAGHLVQNPGHPSIALDSDSPYYCSKLDMRNHSYLNVTTCALARILAILGTLTTNMNSPGLAGIGPKILGYGQQVLFVTSMELGQNCHDKHSVLICQNTSPIVMVVKRTSGERVTRITGNMCLMWAML

SEQ ID NO: 916398 - protein, 238 aa, Homo sapiens
ASTLSPLNMMAPLHSSLGNRTGVANPWTMNLSIASSQQEVRGGQESEASSVFTATPHRLHYCRSSSSCQISVALDSQRSANPTVSCAYPSWHSCGATLLPGYRTVKAGHCASTNFQEKHKDKTMKVAEMTVEDDGGPALVEAVAAAKETEVEKMALETMTKEMTADMITIDPMAAEAEVREHRPGGGALAEDLPFSTQNFPDPPPVSNPMATAGEVAAAQGQQALLLLGRQQLLVRRR

SEQ ID NO: 916399 - protein, 163 aa, Homo sapiens
QLVKMCVIMLLNQWHNIVYPLENSLYHVSFIKFKCIAFKIAKAEIVLNCFSECCHFYSIYTHLIHLGCRFHFYASLQPFLFFNTCKKNNKNVHIYYLNIYLASSKNSFSCIPIFVICYTNKSRSSEKRAQNSPEELLQLPHEPIDYVSEEHYCKQIKEDLWEV

SEQ ID NO: 916400 - protein, 115 aa, Homo sapiens
MLYWPIKIVPSPKSALRGEWIRGGNLRQGVRKTDSSNVVIQEPRMVAKGKMCPHPPLPWKASPSHGRSGVEKEPSDFPWISLVTEYSPSNEAGSPIPGSICLLETFTLHSKCSPL

SEQ ID NO: 916401 - protein, 241 aa, Homo sapiens
MEDCCMLPYYTAQSSPAMGMFNTSMGKLQRQLYKGEYTIFRYAPMFESDFIQISKRGEVIDVHNRARMVTMGIVRTSPCLTLPDVMLLARPAAVCDNARCGPATQKRESPPAEILELTRLLPLMFVKITIHNSVKKQLHLKLATGRSFYLQLCPPSDASEDLFVHWENLVYILRPPVEAYSDTRAILAGNTLDSSVLEEVQRSPVGYAMKFCEEKEQFRISRLHMNAEMFGSTYCDYTIEI

SEQ ID NO: 916402 - protein, 163 aa, Homo sapiens
MYFLTYCFPSISSLCYRWEVGTGLQGAGNQLRSQERLQTPEDRVLRETHTDLGPGVTRRELRARDPPAQGRPWKRPRVSGKTLTRTRPPRVERCHRDRRALDATPTQPRTLGLFWAAPAAPGRNSIPFPHPAELPKPCGGSGQELRAAPASVPAPPAPRGQRS

SEQ ID NO: 916403 - protein, 784 aa, Homo sapiens
MSYFAHPEELALEHQPPQAGLPPLALSQLFNPDACGRRVQTVVLYGTVGTGKSTLVRKMVLDWCYGRLPAFELLIPFSCEDVSSVGRAPASMCQLVAQRYTPLKEVLPLMAAAGSHLLFVLHGLEHLNLDFRLAGTGLCSDPEEPQEPAAIIVNLLRKYMLPQASILVTTRPSAIGRIPSKYVGRYGEICGFSDTNLQKLYFQLRLNQPYCGYAVGGSRVSATPAQRDHLVQMLSRNLEGHHQIAAACFLPSYCWLVCATLHFLHAPTPAGQTLTSIYTSFLRLNFSGETLDSTDPSNLSLMAYAARTMGKLAYEGVSSRKTYFSEEDVCGCLEAGIRTEEEFQLLHIFRPDALRFSLAPCEYLAALYIVLGLRKTTLQKVGKEVAELVGLVGEDVSLVLGIMAKLLPLPALPLLFNLIKVVPRVFGRMVGKSREAVAQAMVLEMFREEDYYNDDVLDQMGASILGVEGPRRHPDEPPEDEVFELFPMFMGGLLSAHNRAVLAQLGCPIKNLDALENAQAIKKKLGKLGRQVLPPSELLDHLFFHYEFQNQRFSAEVLSSLRQLNLAGVRMTPVKCTVVAAVLGSGRHALDEVNLASCQLDPAGLRTLLPVFLRARKLGLQLNSLGPEACKDLRDLLLHDQCQITTLRLSNNPLTAAGVAVLMEGLAGNTSVTHLSLLHTGLGDEGLELLAAQLDRNRQLQELNVAYNGAGDTAALALARAAREHPSLELLQGVAIQMCWKLPLLPYAHLWTPRMPSHWCFLLILMPPLPQWYDGLVAPRGRCT

SEQ ID NO: 916404 - protein, 156 aa, Homo sapiens
MSLESLFQHIIFTEHQAEESRRLMREVRSEITRCREKIKKATEELNEEKIKLESKLLKAHENALEKQYSEITNHRNMLLQTFEAIKKQMIEEEDKFIKEITDFNNDYEITKKRELLMKENVKIEISDLENQANMLKSGMNKYHLICLALMKITYFE

SEQ ID NO: 916405 - protein, 412 aa, Homo sapiens
MSLESLFQHIIFTEHQAEESRRLMREVRSEITRCREKIKKATEELNEEKIKLESKVQQFFEKSFFLQLLKAHENALEKQYSEITNHRNMLLQTFEAIKKQMIEEEDKFIKEITDFNNDYEITKKRELLMKENVKIEISDLENQANMLKSEMKSMEHDSSQLNELQKQKSELIQELFTLQRKLKVFEDEENESICTTKYLEAEKIKISEKPQNDTECLSFIIAGLHKRKPVGSTATFNEEEKKEEEEKEEEEEVEEKEEEEGRRGEEEGGEKKEEKRRRRRRRRRRRRRKEKRRRKEVVQICVKLTLYYEILLSFAFKVNISICRYFTLFKMVIWWLSNEADVQFYSGPAFPVWPWAGYLTLMDFSFLIGNKINKMTPILLGCNSCSIILKISTCSVNPDHFNYCWAKTVWNR

SEQ ID NO: 916406 - protein, 168 aa, Homo sapiens
MSLESLFQHIIFTEHQAEESRRLMREVRSEITRCREKIKKATEELNEEKIKLESKVQQFFEKSFFLQLLKAHENALEKQYSEITNHRNMLLQTFEAIKKQMIEEEDKFIKEITDFNNDYEITKKRELLMKENVKIEISDLENQANMLKSGMNKYHLICLALMKITYFE

SEQ ID NO: 916407 - protein, 157 aa, Homo sapiens
MGVMSLERLTRRFIRNIFRDSSDAAPISEWSKPRRSGRREPRHSASPGLVNKPPRRRNGNRTVTWVAANGLFRRVKSGKAKQNAGSKVINWLTSSIFTFLKNFVSEEVVVRPSGPRRDLLRGIPRPQRNAASLAQKFQNFPPSERRSDLALGECPSR

SEQ ID NO: 916408 - protein, 354 aa, Homo sapiens
MPPEWINPRINEYSQKGNWWLYKQRKKDLSQHISKLNSLAMQISALTQGSAESLTNNKTLPRCDPWTMVFSNMRSLDLGLSPHNCVESSKENCKEHKSTERKYSHYFLDWAGTCEANLLLLQDLDPAFVEEDMAMATEYHKGVCSSLMAELAGNLLSRVPEKATHGSISHWWHFTPNHFTPKLPKKECQRNLLASEFCPGEIACSARTQESHICCQCGALDKACISLKAPENPPGAKGSTLEPGEKVQQAPTVRNLGQDRHTCFPAQTSHFPRPPWLSMPPFWAYKNPRPLQADTQVAGRPNEQHIRGRRHKRWSSIGAPQQKDTLTGTRKPPREGEEGAFAFSTGDIDRDPGR

SEQ ID NO: 916409 - protein, 1983 aa, Homo sapiens
AFDFSFLNDEEARKILQVLERNEELQRAEKDRISKLQKTKRDIRWLQGVTGEWFEEIQRKKFCNETDVSQMLKQPLTYRLSKEMAKNDPIELPTSRSKNVTNQKKPTPFSSRMSFRSSFASLFSFRKSGKETSKLPSLGQKGCDGHAGPPMPVRGAAVQAKIYNSPLENHLVDSTFVPKPAVMREESGMPPPWDASLLENEFFQVLDDLDSKLAQEQSASSVNTRTPLNYGSRTQFGHFYSSGNRHGNITERHKKHYNETSNMSIYDILRPGTPREGFKTFSPRTSTIYDMYRTREPRVFKEDYVQKNTFGSTSLCFDSRQRSALPATGHFTARSLHFPATTQSKSGFIPPRHQQSPKRTPLSSIIWNRSDSSRDRENQEEFLRAPSPMEIDPADKYVYPRGFQENKRYESYHSQNVYQRVSLNAPMENAMSPDTFENSENMPFYHQSNTFTRSFFSNTFGRSGEQRRFGQGPFWGQEKGHSFWSDFHRSRKSFSSSDRDFEMISMEANSVSAIHGHNVSSEHWESFSSGYGTDVSRGQEEPHPWQFDFQRSTLDSMVVSHGNETQLTPHFGTPNVCSMTGSSYHVKSSELVSQQDSSPVEVHINKEASSFGIAQTLASSFKTSFSQISDDRRNPQSPNLQNPTVTLQKIFPNKPASHPMRSHTEVTVTSSNSVDSLPLAKSQPNILVTEVNNEKDLNESISEEDKQLSKMDQTNKAGEIPQPVSQTGISNSLPDFQNPLSQDSAKSNGFGFNASTIISSKKSPRVFSRKDTSKMYIPHTDKSNDIKQDKRFTENRKLGSTASLPFIQEHRTPPSFPRTDQGCHQELTVNNEDISRIITNNHWSSALTDTQNAQYSKCKLTPGHKTSCDSLDLSSAALPDSSPSKNSSLDAPVVPSTTVFSRRSPSDKDPSLGEREEKDNAGKNQKNQFIVSHSENQERNDSPVPTHDEVVDVKCHSHSPFRNERGKGKIRHHISCIEKLSKTESISVPTSDHRSLIEANQSNSKVSELDTIYCTLPRKSSSFLIHGRQSGSKIMAASLRNGPPPFQIKNNVEDAMGNYMLNKFSPSSPESANECSKVLSDSALEAPEATERMTNVKSSGSTSVRKGPLPFLINRAMSCPSGEPHASTGREGRKKPLTSGMDASELTPRAWERIISPVESDSSVRDCSLTKRQHQKENFQEYTEKEGKMAASRRSVFALSNEDPLPFCSDLSGKERGKTLHKVKTTSTFSVSGDEDNVKCLEVVSIYYTLPRKPSKKFCNLLQQYTQNTNLLIESPQVETETFPNALEKDKQNYSTREQSGTPSCENLKMSVNSDQTLTTENMTAFRLSNRGPLAPTLQEMASVEAAVSLPEEESKAREIFSDNLAKTPLGDSENKKERGKKLQSETLHTSLMLQRKNVSEEKSENCQQSINSSNSGPSSLPALSEVNIGNSQTRRSSWECTGSGRAIPFTGSGKCPQKDHTSTAVGDGSSGSQPREGRGDIGTNCQKMTNKTLSHSESQVFALTPALHKLQLGEETQSDEPNLESLQSEPRELPQRSQEANMTESRKAEDEMQKSAWDQPSLPEGNKNKTNLDDLVKGENRSSVKHRLAAMSKASRKFPAKDVSPRRHVATIFPQSGSRSGFDHLSLGTVECNPLFPEPTPKSAESIGESRLSENRKHVKKSENLLPITVLPNREPSTHVSNQKSNSISQRHQNEFKNVSESPSKHENSKDVTAAQNLVRESGAPSPITFTSLREAEFSDNQRRLSPPFPLEPAQKSRVSSPLASFLQQQRSASSLEWEPEPHLYRSKSLKSINVHGDLLRKSHPPKVRERHFSESTSIDNALSRLTLGNEFSVNNGYSRRFRSFSELPSCDGNESWAYRSGTKTGPRSAISIYRPIDYGIFGKEQQLAFLENVKRSLTQGRLWKPSFLKNPGFLKDDLRNPPNPSESLSSNSPSSQVPEDGLSPSEPLNIYEDDPVDSDCDTDTTTDDEYYLDENDKESEL

SEQ ID NO: 916410 - protein, 1463 aa, Homo sapiens
KQFFHLSLSSSWDYSKLQKTKRDIRWLQGVTGEWFEEIQRKKFCNETDVSQMLKQPLTYRLSKEMAKNDPIELPTSRSKNVTNQKKPTPFSSRMSFRSSFASLFSFRKSGKETSKLPSLGQKGCDGHAGPPMPVRGAAVQAKIYNSPLENHLVDSTFVPKPAVMREESGMPPPWDASLLENEFFQVLDDLDSKLAQEQSASSVNTRTPLNYGSRTQFGHFYSSGNRHGNITERHKKHYNETSNMSIYDILRPGTPREGFKTFSPRTSTIYDMYRTREPRVFKEDYVQKNTFGSTSLCFDSRQRSALPATGHFTARSLHFPATTQSKSGFIPPRHQQSPKRTPLSSIIWNRSDSSRDRENQEEFLRAPSPMEIDPADKYVYPRGFQENKRYESYHSQNVYQRVSLNAPMENAMSPDTFENSENMPFYHQSNTFTRSFFSNTFGRSGEQRRFGQGPFWGQEKGHSFWSDFHRSRKSFSSSDRDFEMISMEANSVSAIHGHNVSSEHWESFSSGYGTDVSRGQEEPHPWQFDFQRSTLDSMVVSHGNETQLTPHFGTPNVCSMTGSSYHVKSSELVSQQDSSPVEVHINKEASSFGIAQTLASSFKTSFSQISDDRRNPQSPNLQNPTVTLQKIFPNKPASHPMRSHTEVTVTSSNSVDSLPLAKSQPNILVTEVNNEKDLNESISEEDKQLSKMDQTNKAGEIPQPVSQTGISNSLPDFQNPLSQDSAKSNGFGFNASTIISSKKSPRVFSRKDTSKMYIPHTDKSNDIKQDKRFTENRKLGSTASLPFIQEHRTPPSFPRTDQGCHQELTVNNEDISRIITNNHWSSALTDTQNAQYSKCKLTPGHKTSCDSLDLSSAALPDSSPSKNSSLDAPVVPSTTVFSRRSPSDKDPSLGEREEKDNAGKNQKNQFIVSHSENQERNDSPVPTHDEVVDVKCHSHSPFRNERGKGKIRHHISCIEKLSKTESISVPTSDHRSLIEANQSNSKVSELDTIYCTLPRKSSSFLIHGRQSGSKIMAASLRNGPPPFQIKNNVEDAMGNYMLNKFSPSSPESANECSKVLSDSALEAPEATERMTNVKSSGSTSVRKGPLPFLINRAMSCPSGEPHASTGREGRKKPLTSGMDASELTPRAWERIISPVESDSSVRDCSLTKRQHQKENFQEYTEKEGKMAASRRSVFALSNEDPLPFCSDLSGKERGKTLHKVKTTSTFSVSGDEDNVKCLEVVSIYYTLPRKPSKKFCNLLQQYTQNTNLLIESPQVETETFPNALEKDKQNYSTREQSGTPSCENLKMSVNSDQTLTTENMTAFRLSNRGPLAPTLQEMASVEAAVSLPEEESKAREIFSDNLAKTPLGDSENKKERGKKLQSETLHTSLMLQRKNVSEEKSENCQQSINSSNSGPSSLPALSEVNIGNSQTRRSSWECTGSGRAIPFTGSGKCPQKDHTSTAVGDGSSGSPPGLFRILD

SEQ ID NO: 916411 - protein, 1960 aa, Homo sapiens
KQFFHLSLSSSWDYSKLQKTKRDIRWLQGVTGEWFEEIQRKKFCNETDVSQMLKQPLTYRLSKEMAKNDPIELPTSRSKNVTNQKKPTPFSSRMSFRSSFASLFSFRKSGKETSKLPSLGQKGCDGHAGPPMPVRGAAVQAKIYNSPLENHLVDSTFVPKPAVMREESGMPPPWDASLLENEFFQVLDDLDSKLAQEQSASSVNTRTPLNYGSRTQFGHFYSSGNRHGNITERHKKHYNETSNMSIYDILRPGTPREGFKTFSPRTSTIYDMYRTREPRVFKEDYVQKNTFGSTSLCFDSRQRSALPATGHFTARSLHFPATTQSKSGFIPPRHQQSPKRTPLSSIIWNRSDSSRDRENQEEFLRAPSPMEIDPADKYVYPRGFQENKRYESYHSQNVYQRVSLNAPMENAMSPDTFENSENMPFYHQSNTFTRSFFSNTFGRSGEQRRFGQGPFWGQEKGHSFWSDFHRSRKSFSSSDRDFEMISMEANSVSAIHGHNVSSEHWESFSSGYGTDVSRGQEEPHPWQFDFQRSTLDSMVVSHGNETQLTPHFGTPNVCSMTGSSYHVKSSELVSQQDSSPVEVHINKEASSFGIAQTLASSFKTSFSQISDDRRNPQSPNLQNPTVTLQKIFPNKPASHPMRSHTEVTVTSSNSVDSLPLAKSQPNILVTEVNNEKDLNESISEEDKQLSKMDQTNKAGEIPQPVSQTGISNSLPDFQNPLSQDSAKSNGFGFNASTIISSKKSPRVFSRKDTSKMYIPHTDKSNDIKQDKRFTENRKLGSTASLPFIQEHRTPPSFPRTDQGCHQELTVNNEDISRIITNNHWSSALTDTQNAQYSKCKLTPGHKTSCDSLDLSSAALPDSSPSKNSSLDAPVVPSTTVFSRRSPSDKDPSLGEREEKDNAGKNQKNQFIVSHSENQERNDSPVPTHDEVVDVKCHSHSPFRNERGKGKIRHHISCIEKLSKTESISVPTSDHRSLIEANQSNSKVSELDTIYCTLPRKSSSFLIHGRQSGSKIMAASLRNGPPPFQIKNNVEDAMGNYMLNKFSPSSPESANECSKVLSDSALEAPEATERMTNVKSSGSTSVRKGPLPFLINRAMSCPSGEPHASTGREGRKKPLTSGMDASELTPRAWERIISPVESDSSVRDCSLTKRQHQKENFQEYTEKEGKMAASRRSVFALSNEDPLPFCSDLSGKERGKTLHKVKTTSTFSVSGDEDNVKCLEVVSIYYTLPRKPSKKFCNLLQQYTQNTNLLIESPQVETETFPNALEKDKQNYSTREQSGTPSCENLKMSVNSDQTLTTENMTAFRLSNRGPLAPTLQEMASVEAAVSLPEEESKAREIFSDNLAKTPLGDSENKKERGKKLQSETLHTSLMLQRKNVSEEKSENCQQSINSSNSGPSSLPALSEVNIGNSQTRRSSWECTGSGRAIPFTGSGKCPQKDHTSTAVGDGSSGSQPREGRGDIGTNCQKMTNKTLSHSESQVFALTPALHKLQLGEETQSDEPNLESLQSEPRELPQRSQEANMTESRKAEDEMQKSAWDQPSLPEGNKNKTNLDDLVKGENRSSVKHRLAAMSKASRKFPAKDVSPRRHVATIFPQSGSRSGFDHLSLGTVECNPLFPEPTPKSAESIGESRLSENRKHVKKSENLLPITVLPNREPSTHVSNQKSNSISQRHQNEFKNVSESPSKHENSKDVTAAQNLVRESGAPSPITFTSLREAEFSDNQRRLSPPFPLEPAQKSRVSSPLASFLQQQRSASSLEWEPEPHLYRSKSLKSINVHGDLLRKSHPPKVRERHFSESTSIDNALSRLTLGNEFSVNNGYSRRFRSFSELPSCDGNESWAYRSGTKTGPRCQKMAYLQVNRLISMRMTQWTQIVTQTQPQMMNTTWMKMTKSQNSEIPGPILKTMPQNWTCQGGCCLCYDQEDAESRHQVGRYPESLPSFGPEIAPIEIKTLKLSNFQCH

SEQ ID NO: 916412 - protein, 154 aa, Homo sapiens
MALHTHTECKSVTQPENVYPPMSTRIAPRKGQKTNSHGHPQGTQSPRPPRPLLKAYLQIRQQAVIYLYFGRHKKKCLAWDVNHTSYATKDMFCWCLRNLPNVQNSIFIRAQKWEKCKCLSNGEWIQNMVYHTMECRSIIKSSKVQEYITMQTSR

SEQ ID NO: 916413 - protein, 394 aa, Homo sapiens
KPDDKEQSKEMNNKLAEAKESLAQPVSDSSKTQGPVATEPDKDQGSVVPGLLKGQGPMVQEPLKKQGSVVPGPPKDLGPMIPLPVKDQDHTVPEPLKNESPVISAPVKDQGPSVPVPPKNQSPMVPAKVKDQGSVVPESLKDQGPRIPEPVKNQAPMVPAPVKDEGPMVSASVKDQGPMVSAPVKDQGPIVPAPVKGEGPIVPAPVKDEGPMVSAPIKDQDPMVPEHPKDESAMATAPIKNQGSMVSEPVKNQGLVVSGPVKDQDVVVPEHAKVHDSAVVAPVKNQGPVVPESVKNQDPILPVLVKDQGPTVLQPPKNQGRIVPEPLKNQVPIVPVPLKDQDPLVPVPAKDQGPAVPEPLKTQGPRDPQLPTVSPLPRVMIPTAPHTEYIESSP

SEQ ID NO: 916414 - protein, 394 aa, Homo sapiens; identical to SEQ ID NO: 916413

SEQ ID NO: 916415 - protein, 337 aa, Homo sapiens [sequence omitted]

SEQ ID NO: 916416 - protein, 389 aa, Homo sapiens
KPDDKEQSKEMNNKLAEAKESLAQPVSDSSKTQGPVATEPDKDQGSVVPGLLKGQGPMVQEPLKKQGSVVPGPPKDLGPMIPLPVKDQDHTVPEPLKNESPVISAPVKDQGPSVPVPPKNQSPMVPAKVKDQGSVVPESLKDQGPRIPEPVKNQAPMVPAPVKDEGPMVSASVKDQGPMVSAPVKDQGPIVPAPVKGEGPIVPAPVKDEGPMVSAPIKDQDPMVPEHPKDESAMATAPIKNQGSMVSEPVKNQGLVVSGPVKDQDVVVPEHAKVHDSAVVAPVKNQGPVVPESVKNQDPILPVLVKDQGPTVLQPPKNQGRIVPEPLKNQVPIVPVPLKDQDPLVPVPAKDQGPAVPEPLKTQGPRDPQLPTVSPLPRVVGRKGSLESP

SEQ ID NO: 916417 - protein, 191 aa, Homo sapiens
LQPAMPEPPTHSMGSCAARASPTSTTPCSTAPSPNDHPRAEECERTAQDWQAAPPAASVWDPLGEASWAPESGGDLKICKHTNQHPVFSSRFVNAPIDTLSSCSGEALENLCVETLYLTNLMGTWRTFASSSGIVNAPISALTKTGHWALPISRMWVGPDKRIKAGCPSQHWQPTRVSFNAMEALLFCSLQ

SEQ ID NO: 916418 - protein, 267 aa, Homo sapiens
MSNTLHVQKEESYKLLLMCTNESQSCSDYNCRSELGFHGDNVTLTVRHKHVTHIPMEAEEVEPTIKLSLNSKPKLKYGLLLIRVTLPGLYNEMPGRESPAIFFALRVPVWKRNLRTSWWCPIGWDGVGIRMSLSGGDGNLKCQPLNDEWVLKPESGFVKVDRRLGKKVIFSHSNSDKLIGLAQVFGKTTTQGCSVSDSRYWSKLCLSMEMRKPAAPEGHGCCWSHEEEPSAQGDPEGQGISMDELRVLLDSSNPSWTSLCSENPFCC

SEQ ID NO: 916419 - protein, 132 aa, Homo sapiens
SSNRMLVNAEISLESFSHKFKVRSVNKVMHFSSALCRCFSIDIKISKSQFSSELGFSSPGESSDAIQEPRTRAKNLKNYLVSYCAAAELALTLQDAVIATLLSPFHRQRRLTACLPPHRPMESIDGLSSVFT

SEQ ID NO: 916420 - protein, 174 aa, Homo sapiens
MGVKDGKRLALQSLNSLLGSARPINLLSMAWDPSNPGRRERLGSCENLLSQVRFFSKIISGFLLPQLVSGGLFCLTWLRNVLETGQKSVCKSPCVTALESRTENQKTSVEVIGPSGQSTKLKKKVKSPRTDKALAKALFLVGVHMNSEGGSHDVSCLFPLSSLLDSGCLRWAIC

SEQ ID NO: 916421 - protein, 314 aa, Homo sapiens
PTSFSRAMLSALEHRTPSSSVLGLGLALLSPLLADILLWELVIMVSKPLHNRRWDRATTTWDSKKVERLRMGILLEDATSGLPVSIYVNENFFRHRIFKTQGIGANTDSGIGQLWFAGFLEGMQGEGFYRVKKGIKGVDKTVVGDEVVKTAYGTREIERIVCNSLGENDEDLKQYFSSEDGQKVFQNLLLFFPTQPICQAAYQNDFGQVWRWVKEDSSYANVQDGFNGDTPLICACRRGHVRIVSFLLRRNANVNLKNQVSKTKQNEALVRMLLDAGVEVNATDCGMGSRAKPVLIAKVLEIVVYQWFADYFSA

SEQ ID NO: 916422 - protein, 158 aa, Homo sapiens
MGILYSEPICQAAYQNDFGQVWRWVKEDSSYANVQDGFNGDTPLICACRRGHVRIVSFLLRRNANVNLKNQKERTCLHYAVKKKFTFIDYLLIILLMPVLLIGYFLMVSKTKQNEALVRMLLDAGVEVNATDCHGESSLDIARRLKFSQIELMLRKAL

SEQ ID NO: 916423 - protein, 191 aa, Homo sapiens
MGILYSEPICQAAYQNDFGQVWRWVKEDSSYANVQDGFNGDTPLICACRRGHVRIVSFLLRRNANVNLKNQKERTCLHYAVKKKFTFIDYLLIILLMPVLLIGYFLMVSKTKQNEALVRMLLDAGVEVNATDCYGCTALHYACEMKNQSLIPLLLEARADPTIKNKHGESSLDIARRLKFSQIELMLRKAL

SEQ ID NO: 916424 - protein, 833 aa, Homo sapiens
MTSSWQWPELRRWGVERAAPARSSRPDTGITSPAAAQRRPDQTLCTPTSVRPEATAARSASPRDVTRGGTSGRRSLTVQAGAGSPARSRPRPPVVLLRRGEVPEALRSAGPRPPRPRTLPILRPAPSPSEGGAAVLGLCAPGAVAGRGRGGALGWEVSGEARAGVAHLPEPCGVCCLRKVCLVSTSLSPFLSTSSTFLLAGTWMHFTGAVMQENLRFASSGDDIKIWDASSMTLVDKFNPHTSPHGISSICWSSNNNFLVTASSSGDKIVVSSCKCKPVPLLELAEGQKQTCVNLNSTSMYLVSGGLNNTVNIWDLKSKRVHRSLKDHKDQVTCVTYNWNDCYIASGSLSGEIILHSVTTNLSSTPFGHGSNQSVRHLKYSLFKKSLLGSVSDNGIVTLWDVNSQSPYHNFDSVHKAPASGICFSPVNELLFVTIGLDKRIILYDTSSKKEAPATSIATVLPQPMTSAMGKGTVAVQEKAGLPRSINTDTLSKETDSGKNQDFSSFDDTGKSSLGDMFSPIRDAKLVTSGAESGNLNTSPSSNQTRNSEKFEKPENEIEAQLICEPPINGSSTPNPKIASSVTAGVASSLSEKIADSIGNNRQNAPLTSIQIRFIQNMIQETLDDFSRPRDLSAGATLKSLCISALLPAFGVAGACFSLSNLFLAFCASGEVCLSHFQPCRAAAARLVKTYSQCLLVLLPCAACLHLGVASSLQDLGSYSLGYLGRPKLLILPHPARLSQPPGHCFSSVSSPHCGISTYSRRKNREKDMKKHFKEEEWYMNTGKIFNFTINQRTKNAMRYRVTPSKWENIKNLVILSLDDIEQEELCYTGDIH

SEQ ID NO: 916425 - protein, 177 aa, Homo sapiens
MQENLRFASSGDDIKIWDASSMTLVDKFNPHTSPHGISSICWSSNNNFLVTASSSGDKIVVSSCKCKPVPLLELAEGQKQTCVNLNSTSMYLVSGGLNNTVNIWDLKSKRVHRSLKDHKDQVTCVTYNWNDCYIASGSLSGEIILHSVTTNLSSTPFGHGSNQASSSRLHLNTTIKL

SEQ ID NO: 916426 - protein, 534 aa, Homo sapiens
MYLVSGGLNNTVNIWDLKSKRVHRSLKDHKDQVTCVTYNWNDCYIASGSLSGEIILHSVTTNLSSTPFGHGSNQSVRHLKYSLFKKSLLGSVSDNGIVTLWDVNSQSPYHNFDSVHKAPASGICFSPVNELLFVTIGLDKRIILYDTSSKKEAPATSIATVLPQPMTSAMGKGTVAVQEKAGLPRSINTDTLSKETDSGKNQDFSSFDDTGKSSLGDMFSPIRDAKLVTSGAESGNLNTSPSSNQTRNSEKFEKPENEIEAQLICEPPINGSSTPNPKIASSVTAGVASSLSEKIADSIGNNRQNAPLTSIQIRFIQNMIQETLDDFSRPRDLSAGATLKSLCISALLPAFGVAGACFSLSNLFLAFCASGEVCLSHFQPCRAAAARLVKTYSQCLLVLLPCAACLHLGVASSLQDLGSYSLGYLGRPKLLILPHPARLSQPPGHCFSSVSSPHCGISTYSRRKNREKDMKKHFKEEEWYMNTGKIFNFTINQRTKNAMRYRVTPSKWENIKNLVILSLDDIEQEELCYTGDIH

SEQ ID NO: 916427 - protein, 725 aa, Homo sapiens
MTSSWQWPELRRWGVERAAPARSSRPDTGITSPAAAQRRPDQTLCTPTSVRPEATAARSASPRDVTRGGTSGRRSLTVQAGAGSPARSRPRPPVVLLRRGAVMQENLRFASSGDDIKIWDASSMTLVDKFNPHTSPHGISSICWSSNNNFLVTASSSGDKIVVSSCKCKPVPLLELAEGQKQTCVNLNSTSMYLVSGGLNNTVNIWDLKSKRVHRSLKDHKDQVTCVTYNWNDCYIASGSLSGEIILHSVTTNLSSTPFGHGSNQSVRHLKYSLFKKSLLGSVSDNGIVTLWDVNSQSPYHNFDSVHKAPASGICFSPVNELLFVTIGLDKRIILYDTSSKKEAPATSIATVLPQPMTSAMGKGTVAVQEKAGLPRSINTDTLSKETDSGKNQDFSSFDDTGKSSLGDMFSPIRDAKLVTSGAESGNLNTSPSSNQTRNSEKFEKPENEIEAQLICEPPINGSSTPNPKIASSVTAGVASSLSEKIADSIGNNRQNAPLTSIQIRFIQNMIQETLDDFSRPRDLSAGATLKSLCISALLPAFGVAGACFSLSNLFLAFCASGEVCLSHFQPCRAAAARLVKTYSQCLLVLLPCAACLHLGVASSLQDLGSYSLGYLGRPKLLILPHPARLSQPPGHCFSSVSSPHCGISTYSRRKNREKDMKKHFKEEEWYMNTGKIFNFTINQRTKNAMRYRVTPSKWENIKNLVILSLDDIEQEELCYTGDIH

SEQ ID NO: 916428 - protein, 623 aa, Homo sapiens
MQENLRFASSGDDIKIWDASSMTLVDKFNPHTSPHGISSICWSSNNNFLVTASSSGDKIVVSSCKCKPVPLLELAEGQKQTCVNLNSTSMYLVSGGLNNTVNIWDLKSKRVHRSLKDHKDQVTCVTYNWNDCYIASGSLSGEIILHSVTTNLSSTPFGHGSNQSVRHLKYSLFKKSLLGSVSDNGIVTLWDVNSQSPYHNFDSVHKAPASGICFSPVNELLFVTIGLDKRIILYDTSSKKEAPATSIATVLPQPMTSAMGKGTVAVQEKAGLPRSINTDTLSKETDSGKNQDFSSFDDTGKSSLGDMFSPIRDAKLVTSGAESGNLNTSPSSNQTRNSEKFEKPENEIEAQLICEPPINGSSTPNPKIASSVTAGVASSLSEKIADSIGNNRQNAPLTSIQIRFIQNMIQETLDDFSRPRDLSAGATLKSLCISALLPAFGVAGACFSLSNLFLAFCASGEVCLSHFQPCRAAAARLVKTYSQCLLVLLPCAACLHLGVASSLQDLGSYSLGYLGRPKLLILPHPARLSQPPGHCFSSVSSPHCGISTYSRRKNREKDMKKHFKEEEWYMNTGKIFNFTINQRTKNAMRYRVTPSKWENIKNLVILSLDDIEQEELCYTGDIH

SEQ ID NO: 916429 - protein, 623 aa, Homo sapiens; identical to SEQ ID NO: 916428

SEQ ID NO: 916430 - protein, 534 aa, Homo sapiens; identical to SEQ ID NO: 916426

SEQ ID NO: 916431 - protein, 154 aa, Homo sapiens
MEPSKTFMRNLPITPGYSGFVPFLSCQGMSKEDDMNHCVKTFQEKTQRYKEQLRELCCAVATAPKLKPVNSEETVLQALHQYNLQYHPLILECKYVKKPLQEPPIPGWAGYLPRAKVTEFGCGTRYTVMAKNCYKDFLEITERAKKAHLKPYEE

SEQ ID NO: 916432 - protein, 154 aa, Homo sapiens; identical to SEQ ID NO: 916431

SEQ ID NO: 916433 - protein, 234 aa, Homo sapiens
MEPSKTFMRNLPITPGYSGFVPFLSCQGMSKEDDMNHCVKTFQEKTQRYKEQLRELCCAVATAPKLKPVNSEETVLQALHQYNLQYHPLILECKYVKKPLQEPPIPGWAGYLPRAKVTEFGCGTRYTVMAKNCYKDFLEITERAKKAHLKPYEEIYGVSSTKTSAPSPKVLQHEELLPKYPDFSIPDGSCPALGRPLREDPKTPLTCGCAQRPSIPCSGKMYLEPLSSAKYAEG

SEQ ID NO: 916434 - protein, 192 aa, Homo sapiens
MDGILSGVGFCLVFSAAGTPMPLNWMELAVSGDTDVNMTNNVHALSNTFIFNCLNLTVKQSENMSKNQKAKNKECNFSLRDYLGMERVASPRGQANEEGTPRASFTGKGAAGEKSTNISLAYWKSAYAVSQTGAWLASERGNNMSSDLEGTLINLTKMNFTRKPKDLCLAYINVWEREFQENVSANIACRNK

SEQ ID NO: 916435 - protein, 144 aa, Homo sapiens
TAATWAHMNPWELWIARLPSKTVMICRPHFRDTSQDPLTWNSSKPLVAALHLSEGAPRVRGGCHLSCFSVLAIVAFGALGSPRRPGNEALPSTVQQFYREAARLIFRASPLCCFSLLGRISKPRTTTTPIDVFRQANRITYAYD

SEQ ID NO: 916436 - protein, 78 aa, Homo sapiens
AAVCFLIPDMLAGCGGARVPGAETEGRRDGGGGGGSSSSSSSSSGCLDSREGDARVKEKSYKTVSAPKVLQSIGEANT

SEQ ID NO: 916437 - protein, 143 aa, Homo sapiens
MHIALNTLLSTLHILTNLTFITTMKQMAGKVLLLGVSVRVLSAEIDSRVGGLEEEDPPSMPTRGNLPLTPVHKAYQRQFAFSQQGQQCLAHRDFDHFSLPQDITLVHCISDTMLIGPNARVKEKSYKTVSAPKVLQSIGEANT

SEQ ID NO: 916438 - protein, 142 aa, Homo sapiens
MQLSGLEVALAGTLWSPKAGSLTETASPGDLTTVRTWGHGGWLLDRTPPLRLCFLFFLAEEPSSGRYVKELPMRSERLLRTPRSSGLHQALGNSALSFTFCLSSAERREIWTWTHREDSHVETEAEVDLLPQNHRAPSTVGH

SEQ ID NO: 916439 - protein, 125 aa, Homo sapiens
MGYETIRMNILYTLNCVGYLYFLKFVYTYGYFLKFVYIYEYKYNFVIYCIVMKSRHLVYTSLNEEQAKARSWKILASGRITESRLERGEKKVKRGLTNQEKMNGITKWKNLSKEHNLKFPAAHFL

SEQ ID NO: 916440 - protein, 125 aa, Homo sapiens; identical to SEQ ID NO: 916439

SEQ ID NO: 916441 - protein, 137 aa, Homo sapiens
EIPMDGMNTREINWIQMTNIRKLHNGKPLQAPSKKPHYRSSFWILSHRGYQNPVNEDCILTQSSKKIIALFSVLGIEKKRLSIIPPLSLVVKVLLPEKLCSQSANNQLVKGDNDLKQSSNRGGGEKQSASECRIKSH

SEQ ID NO: 916442 - protein, 493 aa, Homo sapiens
WYNPPERSHFGMSGFQLLADGGVGGEWVGEIRSCWVESPTGETLLCKPHQYFHQIELLDAKIPWAPEVVMLLWAATLGKEYIPPSEEEEDGKKKFDKESEKYYSILEKHLNLSAKKKESHLQEADTQIDREHQNFYEASLEYVFKIQEVQEKKKFEFVEPKFQLGITILGLYRIGGVNSKVQKLMNTTFSPKSPPDIDIDIELWDNKTITSGLKNYLRCLAEPLMTYKLHKDFIIAVSDSYSSSPDSTPMGSIESLSSHSSEQNSTTKSASCQPREKSGGIPWIATPSSSNGQKSLGLWTTSPESSSREDATKTDAESDCQSVASVTSPGDVSPPIDLVKKEPYGLSGLKRASASSLRSISAAEGNKSYSGSIQSLTSVGSKETPKASPNPDLPPKMCRRLRLDTASSNGYQRPGSVVAAKAQLFENVGSPKPVSSGRQAKAMYSCKAEHSHELSFPQGAIFSNVYPSVEPGWLKATYEGKTGLVPENYVVFL

SEQ ID NO: 916443 - protein, 493 aa, Homo sapiens; identical to SEQ ID NO: 916442

SEQ ID NO: 916444 - protein, 493 aa, Homo sapiens; identical to SEQ ID NO: 916442

SEQ ID NO: 916445 - protein, 189 aa, Homo sapiens
MRPPHDVPLLTPPHHASTDNVLLTTPPSRRPRHHAPPSRRPPQDTPLTTSPSRRPPHTTAPLGSLTFNPPGFLFDLCFPSKLSRLWNKRVAEQRKASGMGCFADATHHVFPALRGLFVPILPPLDSGHAWLHCLLVCIETCGTEAAGRRWWGPSQRPQFRPLRPQERMWHKEANHAVLLGAVTGKTDVP

SEQ ID NO: 916446 - protein, 265 aa, Homo sapiens
QGWAWQLTPVIPVLREARSGASRKGGLQQASLSWAPRHCRGDASYLDHHLCPLHCTSPPPAPSSKGEASQGPGRKRPPGVLRSIFVPKAAPSRLAAASVSPACALVSVMRRHSTGTGVQHMESQMGFLPGLKGRSLLGTAIGSFSKPPRDVSVGVSATHPCLRDLPEHRAGPGVCSSDSTQGMRIGPHFEEDWTVTCLSQRKEGQAGVEARSRDKASLLPASHRVVQGLPQSSQCTPTLPPDQLGQTPREPSTPALQFSQVVLSH

SEQ ID NO: 916447 - protein, 246 aa, Homo sapiens
MKLFGFGSRRGQTVLGSIHHVYTGSGYRIRDSELQKIHKAAVRGDATEVERCLARRSGDLDALGKQQRTALHLACASGHVKVVTLLVSRKCQIDICDKENRTPLIQAVHCQEEACAVILLEHGANPNLKDIYRNTALHYATYSESTSLAEKLLSHDADIEALDKKYAGHLEIRTALMLAVHYDSPGIVNILLKQNINVFTQDVWTRCRRLHYFSLFDKAEDLKIGDFCGALQKWNLEVGAHRKTDT

SEQ ID NO: 916448 - protein, 212 aa, Homo sapiens
RPLQLCRTLAKAEEAERASAVSTAVQWVNSTITHELQGMAPSDQAEVDHLLRIFFASKVQEDKGRKELEKSLEYSTVPTPLPPVPPPPPPPPPTKKKGQKPGRKDTITEKPIAPAEPVEPVLSGSMAIGAVSLAVAKACAMLLNKPLYLNIALLKHNQEQPTTLSMPLLMVSLVSCGKSSSGKLNLMKEVICIPHPELTTKQVPYIILNYLF

SEQ ID NO: 916449 - protein, 209 aa, Homo sapiens
MHVPWRQPMMQACTFRARRKLLSLSWMTMTTESCNFSSKWTWLWEPSASWPVTKTKPLMPSSLPCSGDNSRSLAGCSPGRTGQGRPLRRWQGLNAEHKEGSKAPLLIWFSVSWNSVLSLGLELGKREVKKRKIFNYYWACFRLDPRLTAFAARSRNCLVTSCSHVPRKNMNNHSFSFLGLSSLFCLFVFVCFFRDRVSSLLPRLECRGA

SEQ ID NO: 916450 - protein, 135 aa, Homo sapiens
MIAISPSDLVAGGASGLDSIERRESVPPPSDSASIEQGLFRAQYATSRQGKSRYCSQVTIQHPDGLNGMPNTAISNIKKPGRPGDGVRSDSKGGTGLDVLVTSQPIPTLCPLHPTVRVRNELLFEPPLRLCVASV

SEQ ID NO: 916451 - protein, 144 aa, Homo sapiens
MCCNYYGNSCGYGSSYGCGYGSGYGYGYGSSYGCGYGTGYSCGYGCGYGSGYGCGYGSSYGCGYGTGYSCGYGSGYSCGYGSGSGCGYGTGFGCGYGCGYGTGYGCGCGSGSGYCLCKYTVKSAWQTSLPYDTFLKFSEHIPVV

SEQ ID NO: 916452 - protein, 165 aa, Homo sapiens
ALLGMHTMASWERAWRCCPYPGLTARWYIWKATGWGLLTHSYPGYRCVLVWRLQSLGHHGKLEKICKQMTKVCMELGTGEVTVKSQLNLSCDFSWHSDFDQCLQILWALVSLFLCPHHETMPRLVCWKEVRGTRKRATFSQGHSRPVVPCHFTNWPQHKVLLKIE

SEQ ID NO: 916453 - protein, 152 aa, Homo sapiens
MESCSCRTRWWSAMVLSFLVVEGRPLHCRMLSSIPGPDPLDTSSNVPVETIKKSLQTLPDVPWGNTEGRIMCNEDGGENDPLLAQVQDPMSLKHKKQRDSRGTQPHETRAAARRKGCLSGMREKTDEQGAHLPTYDAAVITYNAVSVSMQLV

SEQ ID NO: 916454 - protein, 273 aa, Homo sapiens
MGGGAPYTGLFLLPVTLSLEVSVGKATDIYAVNGTEILLPCTFSSCFGFEDLHFRWTYNSSDAFKILIEGTVKNEKSDPKVTLKDDDRITLVGSTKEKMNNISIVLRDLEFSDTGKYTCHVKNPKENNLQHHATIFLQVVDRLEEVDNTVTLIILAVVGGVIGLLILILLIKKLIIFILKKTREKKKECLVSSSGNDNTENGLPGSKAEEKPPSKVRRISFGRCPCQLCFLQPSAIETVRCTSALNGFTTRVPHAATFLSSGITDLCCLMPCV

SEQ ID NO: 916455 - protein, 64 aa, Homo sapiens
GENRTMPGAGDGGKAPARWLGTGLLGLFLLPVTLSLEVSVGKATDIYAVGLVGDCRASRGGTEL

SEQ ID NO: 916456 - protein, 138 aa, Homo sapiens
MLERGSPHSYYVTPNDVTAGNGKEDINYQRQIFSPNSAKASDEARLPLFSGYTKVTNSPKNMVSEKLNVDSLAPSVSVKDIDEAGNHHSQQTNTETENQTVHVLTHKWDLNNENTWTQGGEHHTPGPVWGVGLGEGQH

SEQ ID NO: 916457 - protein, 491 aa, Homo sapiens
RRGRSINAMRRLQERMGRLRSGRGLDGAVDMGARGAAACDLVQRFVREAQSQGAQVFQAGDVPSERPFYPPTLVSNLPPASPCAQVEVPWPVVVASPFRTAKEALLVANGTPRGGSASVWSERLGQALELGYGLQVGTVWINAHGLRDPSVPTGGCKESGCSWHGGPDGLYEYLRPSGTPARLSCLSKNLNYDTFGLAVPSTLPAGPEIGPSPAPPYGLFVGGRFQAPGARSSRPIRDSSGNLHGYVAEGGAKDIRGAVEAAHQAFPGWAGQSPGARAALLWALAAALERRKSTLASRLERQGAELKAAEAEVELSARRLRAWGARVQAQGHTLQVAGLRGPVLRLREPLGVLAVVCPDEWPLLAFVSLLAPALAYGNTVVMVPSAACPLLALEVCQDMATVFPAGLANVVTGDRDHLTRCLALHQDVQAMWYFGSAQGSQFVEWASAGNLKPVWASRGCPRAWDQEAEGAGPELGLRVARTKALWLPMGD

SEQ ID NO: 916458 - protein, 363 aa, Homo sapiens
MELEATNIVVRAVLLFPRTTGQPLSTRRRAPIEGILPSSSVLLQLDKDKKFEYSPSKVHLIGHSLGAHLAGEAGSRIPGLGRITGLDPAGPFFHNTPKEVRLDPSDANFVDVIHTNAARILFELGVGTIDACGHLDFYPNGGKHMPGCEDLITPLLKFNFNAYKKEMASFFDCNHARSYQFYAESILNPDAFIAYPCRSYTSFKAGNCFFCSKEGCPTMGHFADRFHFKNMKTNGSHYFLNTGSLSPFARWRHKLSVKLSGSEVTQGTVFLRVGGAIGKTGEFAIVSGKLEPGMTYTKLIDADVNVGNITSVQFIWKKHLFEDSQNKLGAEMVINTSGKYGYKSTFCSQDIMGPNILQNLKPC

SEQ ID NO: 916459 - protein, 363 aa, Homo sapiens; identical to SEQ ID NO: 916458

SEQ ID NO: 916460 - protein, 149 aa, Homo sapiens
RLNEIMCVNEICTPQTKQLCGENLPISLDIHSHAAGSVFCSHFHRPKSYTVIQLLVLQLHVTKRSELAQSVIGVFLQAIPYPGSTCMACEPYKYIPPIPSQSQIPPKCSPDPPRSQSRKGEKCDNELQLCRIRTTWNLSGLASQPISEL

SEQ ID NO: 916461 - protein, 437 aa, Homo sapiens
MRKEWSLMLYNSLICIIPFGLMTASIRRYHTCATDGEPDSSVLVGGDGDLTLLVAALGLDLGLTLSLLPCRDPTPGLTLSLLPHRPFMLLPPLMEWMRVAITYAEHRRSLTVDSGDIRQAARLLLPGLDCEPRQLKPEHCFSSFRRLDARAATEKFNQDLGFRMLNCGRTDLINQAIEALGPDGVNTMDDQGMTPLMYACAAGDEAMVQMLIDAGANLDIQVPSNSPRHPSIHPDSRHWTSLTFAVLHGHISVVQLLLDAGAHVEGSAVNGGEDSYAETPLQLASAAGNYELVSLLLSRGADPLLSMLEAHGMGSSLHEDMNCFSHSAAHGHRNVLRKLLTQPQQAKADVLSLEEILAEGVEESDASSQGSGSEGPVRLSRTRTKALQEAMYYSAEHGYVDITMELRALGEASRACTPMSMHAYGHTRSLPAALQQA

SEQ ID NO: 916462 - protein, 152 aa, Homo sapiens
MGREDPPLFHKEGRRLNPREVRPENRAWAWFSQLWPRAASTRRAKTFHTKWERTAIEACVTAANRRIPIPGRCFQLEGSAHTKEQVPRSWVRHVQRNKYQEALCPENRESLVWERKTEREFERSDVGARCREEKKIWALEAGRLTQNDRHSF

SEQ ID NO: 916463 - protein, 143 aa, Homo sapiens
STWKVWMGVFFVWTDSTDCMPSPSGGDAQHAGHAQSFQRRRTARRARPVLPEGTHSTPGTPSPSGGDAQHAGHAQSFRRGRTARRARPVLPEETHSMPGMSRPLFFGTNHLEKELEWSPSVVLHCFRKMHGSAGHTGLSRSQP

SEQ ID NO: 916464 - protein, 522 aa, Homo sapiens
MQAVVKPSPSVLTAVHGEQLLPSARLAPSTLLTLISGCHCVSPPATTPGGGYAPLPPQHASLRLTLGGTQQVERHDMNTLSLPLNIRRGGSDTNLNFDVPDGILDFHKVKLTADSLKQKILKVTEQIKIEQTSRDGNVAEYLKLVNNADKQQAGRIKQVFEKKNQKSAHSIAQLQKKLEQYHRKLREIEQNGASRSSKDISKDHLKDIHRSLKDAHVKSRTAPHCMESSKSGMPGVSLTPPVFVFNKSREFANLIRNKFGSADNIAHLKNSLEEFRPEASARAYGGSATIVNKPKYGSDDECSSGTSGSADSNGNQSFGAGGASTLDSQGKLAVILEELREIKDTQAQLAEDIEALKVQFKREYGFISQTLQEERYRYERLEDQLHDLTDLHQHETANLKQELASIEEKVAYQAYERSRDIQEALESCQTRISKLELHQQEQQALQTDTVNAKVLLGRCINVILAFMTVILVCVSTIAKFVSPMMKSRCHILGTFFAVTLLAIFCKNWDHILCAIERMIIPR

SEQ ID NO: 916465 - protein, 477 aa, Homo sapiens
MPGSDTALTVDRTYSDPGRHHRCKSRVERHDMNTLSLPLNIRRGGSDTNLNFDVPDGILDFHKVKLTADSLKQKILKVTEQIKIEQTSRDGNVAEYLKLVNNADKQQAGRIKQVFEKKNQKSAHSIAQLQKKLEQYHRKLREIEQNGASRSSKDISKDHLKDIHRSLKDAHVKSRTAPHCMESSKSGMPGVSLTPPVFVFNKSREFANLIRNKFGSADNIAHLKNSLEEFRPEASARAYGGSATIVNKPKYGSDDECSSGTSGSADSNGNQSFGAGGASTLDSQGKLAVILEELREIKDTQAQLAEDIEALKVQFKREYGFISQTLQEERYRYERLEDQLHDLTDLHQHETANLKQELASIEEKVAYQAYERSRDIQEALESCQTRISKLELHQQEQQALQTDTVNAKVLLGRCINVILAFMTVILVCVSTIAKFVSPMMKSRCHILGTFFAVTLLAIFCKNWDHILCAIERMIIPR

SEQ ID NO: 916466 - protein, 395 aa, Homo sapiens
TLARYPVLKNVAEYLKLVNNADKQQAGRIKQVFEKKNQKSAHSIAQLQKKLEQYHRKLREIEQNGASRSSKDISKDHLKDIHRSLKDAHVKSRTAPHCMESSKSGMPGVSLTPPVFVFNKSREFANLIRNKFGSADNIAHLKNSLEEFRPEASARAYGGSATIVNKPKYGSDDECSSGTSGSADSNGNQSFGAGGASTLDSQGKLAVILEELREIKDTQAQLAEDIEALKVQFKREYGFISQTLQEERYRYERLEDQLHDLTDLHQHETANLKQELASIEEKVAYQAYERSRDIQEALESCQTRISKLELHQQEQQALQTDTVNAKVLLGRCINVILAFMTVILVCVSTIAKFVSPMMKSRCHILGTFFAVTLLAIFCKNWDHILCAIERMIIPR

SEQ ID NO: 916467 - protein, 477 aa, Homo sapiens; identical to SEQ ID NO: 916465

SEQ ID NO: 916468 - protein, 477 aa, Homo sapiens; identical to SEQ ID NO: 916465

SEQ ID NO: 916469 - protein, 446 aa, Homo sapiens
MNTLSLPLNIRRGGSDTNLNFDVPDGILDFHKVKLTADSLKQKILKVTEQIKIEQTSRDGNVAEYLKLVNNADKQQAGRIKQVFEKKNQKSAHSIAQLQKKLEQYHRKLREIEQNGASRSSKDISKDHLKDIHRSLKDAHVKSRTAPHCMESSKSGMPGVSLTPPVFVFNKSREFANLIRNKFGSADNIAHLKNSLEEFRPEASARAYGGSATIVNKPKYGSDDECSSGTSGSADSNGNQSFGAGGASTLDSQGKLAVILEELREIKDTQAQLAEDIEALKVQFKREYGFISQTLQEERYRYERLEDQLHDLTDLHQHETANLKQELASIEEKVAYQAYERSRDIQEALESCQTRISKLELHQQEQQALQTDTVNAKVLLGRCINVILAFMTVILVCVSTIAKFVSPMMKSRCHILGTFFAVTLLAIFCKNWDHILCAIERMIIPR

SEQ ID NO: 916470 - protein, 440 aa, Homo sapiens
GDLEDPKSLMGILNFDVPDGILDFHKVKLTADSLKQKILKVTEQIKIEQTSRDGNVAEYLKLVNNADKQQAGRIKQVFEKKNQKSAHSIAQLQKKLEQYHRKLREIEQNGASRSSKDISKDHLKDIHRSLKDAHVKSRTAPHCMESSKSGMPGVSLTPPVFVFNKSREFANLIRNKFGSADNIAHLKNSLEEFRPEASARAYGGSATIVNKPKYGSDDECSSGTSGSADSNGNQSFGAGGASTLDSQGKLAVILEELREIKDTQAQLAEDIEALKVQFKREYGFISQTLQEERYRYERLEDQLHDLTDLHQHETANLKQELASIEEKVAYQAYERSRDIQEALESCQTRISKLELHQQEQQALQTDTVNAKVLLGRCINVILAFMTVILVCVSTIAKFVSPMMKSRCHILGTFFAVTLLAIFCKNWDHILCAIERMIIPR

SEQ ID NO: 916471 - protein, 477 aa, Homo sapiens; identical to SEQ ID NO: 916465

SEQ ID NO: 916472 - protein, 358 aa, Homo sapiens
MPGSDTALTVDRTYSDPGRHHRCKSRVERHDMNTLSLPLNIRRGGSDTNLNFDVPDGILDFHKVKLTADSLKQKILKVTEQIKIEQTSRDGNVAEYLKLVNNADKQQAGRIKQVFEKKNQKSAHSIAQLQKKLEQYHRKLREIEQNGASRSSKDISKDHLKDIHRSLKDAHVKSRTAPHCMESSKSGMPGVSLTPPVFVFNKSREFANLIRNKFGSADNIAHLKNSLEEFRPEASARAYGGSATIVNKPKYGSDDECSSGTSGSADSNGNQSFGAGGASTLDSQGKLAVILEELREIKDTQAQLAEDIEALKVQFKREYGFISQTLQEERYRYERLEDQLHDLTDLHQHSSARGTELE

SEQ ID NO: 916473 - protein, 271 aa, Homo sapiens
GIPHSITSDQGTYFMAKEEWQWAHAHGIHGSYHAPYHPEAAGLTEWWIGLVMSQLQHQLGDNTLQGWGKVPQKAVYALNLCPIHGAVSPIARIHGSRNQEVEVEREECATRRHSNNAIELRLPPGHFGLLLPLRQQTKKGVTVLAKVTDSDYQDEISRLLHDAGMKVWVTPPGKQQQQQQQQQQPRPAEVLAEGKGNTEWVVEGQCPSSGESGIETVNRHQEKSTAVFGITNVTSALNTILCIGYFSNNLKASEDVSPEFLFQTSWALTYC

SEQ ID NO: 916474 - protein, 176 aa, Homo sapiens
MYLQRPVRPTDDSNTTPQGCPYALPLLKIKSSGVTYGNQWNLALSPRLECNGMISGHYNLCLPGSSNSPASTSCVAGITGSGVSAPAAWPLSALGLLQSLSKVGAKSWDHEWQWEADRFLGGRGWVPRKAPPSGQGGPEGWGIHPYCSMDPYFILFNDQIIFCYMDEFIYVYTVID

SEQ ID NO: 916475 - protein, 107 aa, Homo sapiens
MYLQRPVRPTDDSNTTPQGCPYALPLLKIKSSGVTYGNQWNLALSPRLECNGMISGHYNLCLPGSSNSPASTSCVAGITGGSVVAQSRLTATSASQVPAILLPQLPK

SEQ ID NO: 916476 - protein, 251 aa, Homo sapiens
MQAGARFQRRRRQLQQQQPRRRQPLLWPMDAEPPPPPPWVWMVPGSAGLLRLSAGVVVPPVLLASAPPPAAPLLPGLPGWPAPSEPVLPLLPLPSAPDSAAAAAAHPFPALHGQWLFGGHSPSLGLPPSSTVELVPVFPHLCPSALATPIGKSWIDKRIPNCKCYACIIFRQIFFNNSFALDSTWIHPEESRFFHGHEKPRLLANQVAVSLSRPAPASRPLPTVVLAPQPIPGWCPNNIDNVCFIFASIIN

SEQ ID NO: 916477 - protein, 463 aa, Homo sapiens
ATLSSLTGDPVFEDVARVALMRLWESRSDIGLVGNHIDVLTGKWVAQDAGIGAGVDSYFEYLVKGAILLQDKKLMAMFLEYNKAIRNYTRFDDWYLWVQMYKGTVSMPVFQSLEAYWPGLQSLIGDIDNAMRTFLNYYTVWKQFGGLPEFYNIPQGYTVEKREGYPLRPELIESAMYLYRATGDPTLLELGRDAVESIEKISKVECGFATIKDLRDHKLDNRMESFFLAETVKYLYLLFDPTNFIHNNGSTFDAVITPYGECILGAGGYIFNTEAHPIDPAALHCCQRLKEEQWEVEDLMREFYSLKRSRSKFQKNTVSSGPWEPPARPGTLFSPENHDQARERKPAKQKVPLLSCPSQPLTSKLALLGQECVTTHLPNQLALKMDGAGASGPYPAVAGSREWTGAAGAGRRARVWCASEGGGGGGGGGVWGPPPPPPPRLLPSSRPRPAPRPRSPADVRRDE

SEQ ID NO: 916478 - protein, 364 aa, Homo sapiens
MYKGTVSMPVFQSLEAYWPGLQSLIGDIDNAMRTFLNYYTVWKQFGGLPEFYNIPQGYTVEKREGYPLRPELIESAMYLYRATGDPTLLELGRDAVESIEKISKVECGFATIKDLRDHKLDNRMESFFLAETVKYLYLLFDPTNFIHNNGSTFDAVITPYGECILGAGGYIFNTEAHPIDPAALHCCQRLKEEQWEVEDLMREFYSLKRSRSKFQKNTVSSGPWEPPARPGTLFSPENHDQARERKPAKQKVPLLSCPSQPLTSKLALLGQECVTTHLPNQLALKMDGAGASGPYPAVAGSREWTGAAGAGRRARVWCASEGGGGGGGGGVWGPPPPPPPRLLPSSRPRPAPRPRSPADVRRDE

SEQ ID NO: 916479 - protein, 147 aa, Homo sapiens
MCSSSFRAGGLSFSGWNPKPWQSLSACPRCPLQPSSVSLSARPWAALASAPPAPWSNQVLRSPWYSHPLLRVFPLTQIPVYPTPCFLLTQPVARPCDLALLFLTLPLSSNTTIIFLGNQWFVSRFVNNGALSSLEIWSRKWEESRKG

SEQ ID NO: 916480 - protein, 149 aa, Homo sapiens
MEGHFFSTSHICCVNFVKSPNFNTGCLICKKGMIIILPHKSYFIRFKLHDEIKLLTQCLARSNSLQIPDVVHTNRIPDAEEKTGKLIRGADEGYPLQDNDSYLNCYAGSIMNIILTGTHSTDQDIIALKVDEKNAAETFIKLLEAKCEH

SEQ ID NO: 916481 - protein, 151 aa, Homo sapiens
AGIMKRVFCILITTMKKYYYYPHFTDEKTKKFSDSPKATWELVELGFKFGQPHFWMFLLTNAAFFFNWYMIKNQISSKSIESFITPGTQREGDDGLDSPAVSMLLTGAASHHSCLALSVSSAPWSRWSDPPAVRNVVCCLDINTRDSDSTR

SEQ ID NO: 916482 - protein, 112 aa, Homo sapiens
MPLSPLSLQHKSTEQAASKPQTLTSVLEAGSPRWRVPQIPCLVFFYRNIGKIIFIVHRLLQQIQLKDTPTILIGHKRTGCPHLTTTHNNRTLIRHKRTGCHLTTTHNNRRAG

SEQ ID NO: 916483 - protein, 112 aa, Homo sapiens; identical to SEQ ID NO: 916482

SEQ ID NO: 916484 - protein, 281 aa, Homo sapiens
MVRIEFSDLFLWPGLETRGTQSQWAVAHNLLFCTGPDYEPNLWMWVNPNIVYPPGKLEVSGRRKREDLTSTLPSSQPPQKEEDASCSEAAGVESLSQSSSKRSPPRKRFAFSPSTWELTEEEEAEDQEDSSSMALPSPHKRAPLQSRRLRQASSQAGRLWSRPPLNYFHLIALALRNSSPCGLNVQQIYSFTRKHFPFFRTAPEGWKNTVRHNLCFRDSFEKVPVSMQGGASTRPRSCLWKLTEEGHRRFAEEARALASTRLESIQQCMSQPDVMPFLFDL

SEQ ID NO: 916485 - protein, 244 aa, Homo sapiens [sequence omitted]

SEQ ID NO: 916486 - protein, 271 aa, Homo sapiens
APAARAQEHDKRDPVVAYYCRLYAMQTGMKIDSKTPECRKFLSKLMDQLEALKKQLGDNEAITQEIVGCAHLENYALKMFLYADNEDRAGRFHKNMIKSFYTASLLIDVITVFGELTDENVKHRKYARWKATYIHNCLKNGETPQAGPVGIEEDNDIEASSTYDPSNMPSGNYTGIQIPPGAHAPANTPAEVPHSTGVASNTIQPTPQTIPAIDPALFNTISQGDVRLTPEDFARAQKYCKYAGSALQYEDVSTAVQNLQKALKLLTTGRE

SEQ ID NO: 916487 - protein, 171 aa, Homo sapiens
HGIKAGSMSRVQPAGPGRQNKPSRCKQNPSRATGGHRSCWLVNLLYMNLIYQIDRIQEMISGKISKDLYFSSEHKNSLSCILLSCHKMCSTLTFPTSEVINCLGKTAGAIEVRVKDLKGLDFSEMKIWITPSGKQRRPDEMLLEGLAYLELVVEISLLESLLKKHHAYLTS

SEQ ID NO: 916488 - protein, 1306 aa, Homo sapiens
MTDSAQVVTLLRGGIDAFGLGDLPNLLGLVGDQLGDTERKRRHAKPGSYSIEVLLVVDDSVVRFHGKEHVQNYVLTLMNIAWCQLVLSVAGDPAVMVEKLFSTLLCSVLEGFYVSSTPTDEQGRAPREREQTCSVKLPAGDLRPAEDVEGKAEQVSCPRELSNDEKLPTIQCIYGCQEGPWLKPDTGCSEVCPFMNWGSCQFWALRKVAWDWGLVMHAASAAHSFVLTAWLPPWLAQKGVDKQRLSVRLMNTVQELPGRGVQRAAFFDELCRALAHSPGPEAWGGAQDSAFLTSSQVLLLLQGPGVCLLEECPLLPPQGRGTVGQTLCQWQLERYTGMLGRVACGSLSQVDEIYHDESLGVHINIALVRLIMVGYRQSLSLIERGNPSRSLEQVCRWAHSQQRQDPSHAEHHDHVVFLTRQDFGPSGYAPVTGMCHPLRSCALNHEDGFSSAFVIAHETGHVLGMEHDGQGNGCADETSLGSVMAPLVQAAFHRFHWSRCSKLELSRYLPSYDCLLDDPFDPAWPQPPELPGINYSMDEQCRFDFGSGYQTCLAVVGGQGSVLLWPMLTIHEVPSAQLASGPGDGPTDTVPATMQGCRVNTCGGSAMEKGGVPGGCRYLELSKLEAAAAAQGDLMPSALPQWCFKGHCIWKSPEQTYGQDGGWSSWTKFGSCSRSCGGGVRSRSRSCNNPSPAYGGRLCLGPMFEYQVCNSEECPGTYEDFRAQQCAKRNSYYVHQNAKHSWVPYEPDDDPGPYRNLVPVDEIQGGLGGCGFRCCLESCLPGSGSCLSWVGAPPDPGPYRNLVPVDEIQGGLGGCGSRLESFMLETRSYQLCWSPGTRAEPKNAQKCELICQSADTGDVVFMNQVVHDGTRCSYRDPYSVCARGECVPVGCDKEVGSMKADDKCGVCGGDNSHCRTVKGTLGKASKQAVVKNQVTGSFILNPKGKEATSRTFTAMGLEWEDAVEDAKESLKTSGPLPEAIAILALPPTEGGPRSSLAYKYVIHEDLLPLIGSNNVLLEEMDTYEWALKSWAPCSKACGGGPRQPAHPIGIQFTKYGCRRRRDHHMVQRHLCDHKKRPKPIRRRCNQHPCSQPVWVTEEWGACSRSCGKLGVQTRGIQCLLPLSNGTHKVMPAKACAGDRPEARRPCLRVPCPAQWRLGAWSQCSATCGEGIQQRQVVCRTNANSLGHCEGDRPDTVQVCSLPACGGNHQNSTVRADVWELGTPEGQWVPQSEPLHPINKISSTEPCTGDRSVFCQMEVLDRYCSIPGYHRLCCVSCIKKASGPNPGPDPGPTSLPPFSQSLITSEF

SEQ ID NO: 916489 - protein, 1672 aa, Homo sapiens
MTDSAQVVTLLRGGIDAFGLGDLPNLLGLVGDQLGDTERKRRHAKPGSYSIEVLLVVDDSVVRFHGKEHVQNYVLTLMNIAWCQLVLSVAGDPAVMVEKLFSTLLCSVLEGFYVSSTPTDEQGRAPREREQTCSVKLPAGDLRPAEDVEGKAEQVSCPRELSNDEKLPTIQCIYGCQEGPWLKPDTGCSEVCPFMNWGSCQFWALRKVAWDWGLVMHAASAAHSFVLTAWLPPWLAQKGVDKQRLSVRLMNTVQELPGRGVQRAAFFDELCRALAHSPGPEAWGGAQDSAFLTSSQVLLLLQGPGVCLLEECPLLPPQGRGTVGQTLCQWQLERYTGMLGRVACGSLSQVDEIYHDESLGVHINIALVRLIMVGYRQSLSLIERGNPSRSLEQVCRWAHSQQRQDPSHAEHHDHVVFLTRQDFGPSGYAPVTGMCHPLRSCALNHEDGFSSAFVIAHETGHVLGMEHDGQGNGCADETSLGSVMAPLVQAAFHRFHWSRCSKLELSRYLPSYDCLLDDPFDPAWPQPPELPGINYSMDEQCRFDFGSGYQTCLAVVGGQGSVLLWPMLTIHEVPSAQLASGPGDGPTDTVPATMQGCRVNTCGGSAMEKGGVPGGCRYLELSKLEAAAAAQGDLMPSALPQWCFKGHCIWKSPEQTYGQDGGWSSWTKFGSCSRSCGGGVRSRSRSCNNPSPAYGGRLCLGPMFEYQVCNSEECPGTYEDFRAQQCAKRNSYYVHQNAKHSWVPYEPDDDPGPYRNLVPVDEIQGGLGGCGFRCCLESCLPGSGSCLSWVGAPPDPGPYRNLVPVDEIQGGLGGCGSRLESFMLETRSYQLCWSPGTRAEPKNAQKCELICQSADTGDVVFMNQVVHDGTRCSYRDPYSVCARGECVPVGCDKEVGSMKADDKCGVCGGDNSHCRTVKGTLGKASKQAVVKNQVTGSFILNPKGKEATSRTFTAMGLEWEDAVEDAKESLKTSGPLPEAIAILALPPTEGGPRSSLAYKYVIHEDLLPLIGSNNVLLEEMDTYEWALKSWAPCSKACGGGPRQPAHPIGIQFTKYGCRRRRDHHMVQRHLCDHKKRPKPIRRRCNQHPCSQPVWVTEEWGACSRSCGKLGVQTRGIQCLLPLSNGTHKVMPAKACAGDRPEARRPCLRVPCPAQWRLGAWSQCSATCGEGIQQRQVVCRTNANSLGHCEGDRPDTVQVCSLPACGGNHQNSTVRADVWELGTPEGQWVPQSEPLHPINKISSTEPCTGDRSVFCQMEVLDRYCSIPGYHRLCCVSCIKKASGPNPGPDPGPTSLPPFSTPGSPLPGPQDPADAAEPPGKPTGSEDHQHGRATQLPGALDTSSPGTQHPFAPETPIPGASWSISPTTPGGLPWGWTQTPTPVPEDKGQPGEDLRHPGTSLPAASPRGGRKTKIRESPNRRYLSKLPPAGLTLSGPLLVSPAKTRPTREGGSGHPGPQVLSIQGFPNWRSPPDSTRMATSIITLSLEGDSVGHRGNTISQAVPSIIALLRRSLLLESDIFIFYLAQAGPECVVLPGPGPGDDKGHPGQVPQGRVPAPGLVLEWGRHTHPRCCKGLSCAQLPAMLPPRDRFKRMYGNAWMSRQKSAAGAEPSWITSTRAVQKGNVGLESPHRVLTGALPSGAVRRVRHPPDPRMVDPLTACTTLLEKLQALNAGL

SEQ ID NO: 916490 - protein, 699 aa, Homo sapiens
MEAPRATPQPYWGLVLEEPRRVMAALTEGRRPDSNPYGLPWELVICAAVVGFFAVPFFLWRSFRSVRSRLYVGREKKLAVALSGLIEEKCRLLEKFSLVQKEYESYEIESSLDDSSFEKEATEAQSLEATCEKLSRSNSELEHEIPCLEKELKEEKSKHSEQDEVMADISKRIQSLEDESKSLKSHVAEAKMTFKRFQMNEERMKIGIQYALNENSQLQESQKQLLQEAEAWKEQVSELNKQQKITFEDSKAAVLEEDITDDGNLELEMNSESEDGAYVDNPPKGALKKLLHAAKLNASLTTLEGERNQIYIQLSEVDKTKEELRGHIKNLQTEQVSLQLENTHFESENQKLQQKLKVMTELYQENEMKLYRKLIVEENNRLEKEKLSKVDEMISHAAEELETCRKQANDLEEEFQRKKDPYALDVPNTAFGREHSSYGPSPLGRPSSEMRAFLYLPSLLEGPLRLSPLLPGGGGRGPRGPGNPLDHQITKERGESSCDRFTDPHRAPSDTGFLSPPWEQDCRMMSPPPGQSYPDSALPPQRQDRFYSNYARRSGPAELRSFNKPPLDKMDGSMPSEMESSRNDTKDNLGNLNVADSSLPAGNEVTGPGFVPPPLAPIRGPLFPVDMRGPFMRRGPPFPPPPPGTMFGASPDYFPPRDVPGPPRASICNEKCLSTEGFSSLPSPKTWISPHHPHILKIE

SEQ ID NO: 916491 - protein, 1652 aa, Homo sapiens
MHWHNLSMVRSYCRAQGEVTIREALRELDLWGVGAVFTLIDYEDSQSRTMKLIKDWKDIVNQVGDNRCLLQSLKDSPYYKGFEDKVSIWERKLAELDEYLQNLNHIQRKWVYLEPIFGRGALPKEQTRFNRVDEDFRIYNTVVPYPSIPPMGSSKHWSWQELSSLQLTSRPLSSQILCLAEQIKFTEDVENAIKDHSLHQIETQLVNKLEQYTNIDTSSEDPGNTESGILELKLKALILDIIHNIDVVKQLNQIQVHTTEDWAWKKQLRFYMKSDHTCCVQMVDSEFQYTYEYQGIDVKSMGRIFVGLVKCGAWGCFDEFNRLEESVLSAVSMQIQTIQDALKNHRTVCELLGKEVEVNSNSGIFITMNPAGKGYGGRQKLPDNLKQLFRPVAMSHPDNELIAEVILYSEGFKDAKVLSRKLVAIFNLSRELLTPQQHYDWGLRALKTVLRGSGNLLRQLNKSGTTQNANESHIVVQALRLNTMSKFTFTDCTRFDALIKDVFPGIELKEVEYDELSAALKQVFEEANYEIIPNQIKKALELYEQLCQRMGVVIVGPSGAGKSTLWRMLRAALCKTGKVVKQYTMNPKAMPRYQLLGHIDMDTREWSDGVLTNSARQVVREPQDVSSWIICDGDIDPEWIESLNSVLDDNRLLTMPSGERIQFGPNVNFVFETHDLSCASPATISRMGMIFLRGLGGNLNMKSRLEFTKEVFHWARESPPDFHKPMDTYYDSTRGRLATYVLKKPEDLTADDFSNGLTLPVIQTPDMQRGLDYFKPWLSSDTKQPFILVGPEGCGKGMLLRYAFSQLRSTQIATVHCSAQTTSRHLLQKLSQTCMVISTNTGRVYRPKDCERLVLYLKDINLPKLDKWGTSTLVAFLQQVRAKFTVDDYSHYFFTPCILTQWVLGLFRYDLEGGSSNHPLDYVLEIVAYEARRLFRDKIVGAKELHLFDIILTSVFQGDWGSDILDNMSVDPDFLKSFLLIHESCKAYGATPSRYMTFLHVYSAISSSKKKELLKRQSHLQAGVSKLNEAKALVDELNRKAGEQSVLLKTKQDEADAALQMITVSMQDASEQKTELERLKHRIAEEVVKIEERKNKIDDELKEVQPLVNEAKLAVGNIKPESLSEIRSLRMPPDVIRDILEGVLRLMGIFDTSWNAKRASTAAAPLAAWVKANIQYSHVLERIHPLETEQAGLESNLKKTEDRKRKLEELLNSVGQKVSELKEKFQSRTSEAAKLEAEVSKAQETIKAAEVLINQLDREHKRWNAQCPGLGDKLYDLILVNSVDNGKYNKAVRNYGEGSRVCPFLIDPSSQATEWLKTHLKDSRLEVINQQDSNFITALELAVRFGKTLIIQEMDGVEPVLYPLLRRDLVAQGPRYVVQIGDKIIDYNEEFRLFLSTRNPNPFIPPDAASIVTEVNFTTTRSGLRGQLLALTIQHEKPDLEEQKTKLLQQEEDKKIQLAKLEESLLETLATSQGNILENKDLIESLNQTKASSALIQESLKESYKLQISLDQERDAYLPLAESASKMYFIISDLSKINNMYRFSLAAFLRLFQRALQNKQEHCSWHLVRAPLGRSFQRKEQAAIFAVLQTLLVIPRQTGSGVDLLQSPADLQQRGLTVRRKTNKQKGIASTSTKRTSIQKPHPKVTKIKDQR

SEQ ID NO: 916492 - protein, 310 aa, Homo sapiens
MSSAEMPHTETVSPLPSSMDLPIQDSHDSSTSPKGKQPTTAEKSATKKEDKVPVKKQKTRTVFSSTQLCVLNDRFQRQKYLSLQQMQELSNILNLSYKQVKTWFQNQRMKSKRWQKNNWLKNSNGVTQGCLVNPTGNLPMWSNQTWNNSTWSNQTQNIQSWSNHSWNTQTWCTQSWNNQAWNSPFYNCGEESLQSCMQFQPNSPASDLEAALEAAGEGLNDFSCMETTCSGFHDAYPVNLMEGGSQPHAAAGLLGGGWSRPQRQVGLAGSVLAGGRAANWRKRVDVGENRSFSHASAAKAPDQKDRFVTR

SEQ ID NO: 916493 - protein, 148 aa, Homo sapiens
MRSKSFAPGGTLPVALPHVALDKVPSPAMQQVLEPAVKTGCSPTAGARCQATIPNVFRICFRIYDNLPEVKKKKEEQRKRVILQSNRLRAEVFKKRGLIQASLFTSLGNLLHQTFGIQIHLLLNFNLSTCQLCKCQNVGHHIVYLKPF

SEQ ID NO: 916494 - protein, 134 aa, Homo sapiens
MKTCCLPQIATLAPVLKIKGIQWKLLLLPLRTISSLSRALLHGNTTGGVQQENGLDLSIHSIKCPRFHTIFSIKEEFQTLCCSNLWISTLLYFISKFVDLFEEFRESMEDGSACCEAKKPGTFSRTSEVDVRSS

SEQ ID NO: 916495 - protein, 312 aa, Homo sapiens
MEVKNCCMVTEFILLGIPHTEGLEMTLFVLFLPFYACTLLGNVSILVAVMSSARLHTPMYFFLGNLSVFDMGFSSVTCPKMLLYLMGLSRLISYKDCVCQLFFFHFLGSIECFLFTVMAYDRFTAICYPLRYTVIMNPRICVALAVGTWLLGCIHSSILTSLTFTLPYCGPNEVDHFFCDIPALLPLACADTSLAQRVSFTNVGLISLVCFLLILLSYTRITISILSIRTTEGRRRAFSTCSAHLIAILCAYGPIITVYLQPTPNPMLGTVVQILMNLVGPMLNPLIYTLRNKEVKTALKTILHRTGHVPES

SEQ ID NO: 916496 - protein, 248 aa, Homo sapiens
MLVEKMGHEAVELGHGEANITGLEENTLIASLCDLLERIWSHGLQVKQGKSALWSHLIQFQDREEKQEHLAESPVALGPERRKSDSGVMLPTLRVSLIQDMRHIQNMSEIKTDVGRARAWIRLSLEKKLLSQHLKQLLSNQPLTKKLYKRYAFLRCEEEREQFLYHLLSLNAVDYFCFTSVFTTIMIPYRSVIIPIKKLSNAIITSNPWICVSGELGDTGVMQIPKNLLEMTFEVGSANTFPRRMYHV

SEQ ID NO: 916497 - protein, 148 aa, Homo sapiens [sequence omitted]

SEQ ID NO: 916498 - protein, 465 aa, Homo sapiens
MATDVQLADYPLMSPKAELKLEKKSGRKPRSPRDSGPQKELVIPGIVDFERIRRALRTPKPQTPGTYCFGRLSHHSFFSRHHPHPQHVTHIQASNPLQISPGSLSVSSGIFQPPCLSQLSFPAVKWGYPPSLSPLETHSLIGTPSFLLVEAWKKELKELASRVAFLTKEDELKKKEGTEEFRAEAPSTAAQKLANAGHHQKPGYKWAAMGKAPGLSGTDLGAAELGIKVGGGPLVQDAVFKSLMGVGRSSREDLPGRENENHPRASSDRPCITEFQEEELLLQKEQKEEPLREQGAKYSAETGRLIPASTRAVGRRRSHQGQQSQSSSRHEGVQAFLLQDQELLVLELLCQILETDLLSAIQFWLLYAPPKEKDLALGLLQTAVAQLLPQPLVSIPTEKLLSQLPEVHEPPQEKQEPPCSQSPKKTKISPFTKSEKPEYIGEAQVLQMHSSQNTEKKTSKPRAES

SEQ ID NO: 916499 - protein, 131 aa, Homo sapiens
  misc_feature (14)..(14): Xaa can be any naturally occurring amino acid
  misc_feature (29)..(30): Xaa can be any naturally occurring amino acid
SPFTKSEKPAPTMXESFGGGGGNFPTFEXXKEKNFFSKDKFLLSRNLHPSKEEYRQQIKTPGEEWRQILVHWRSSSPPDAFKPEHREEDIEAEGRELRGPNTCTCLAQEQPQGFRGVSVSTTFTAVPDSLP

SEQ ID NO: 916500 - protein, 166 aa, Homo sapiens
ILVPSANVYLVSIMFSPCFYDQQKAKQRTLSLAEEAKTLLSSLCSGTDGSLRYAKTELQQICYGTQHQARTSAGQSSVQGSYHREQHSTSSFKLCPERQDLQASGYTWEEIKLLDSSCGWGNHREISPLQLSLGTLTELLDCQVLLAPHLNTGTKFKLVCLLLRSL

SEQ ID NO: 916501 - protein, 292 aa, Homo sapiens
ARAPAAPLPPVLRNLCGHSEQPELQLRLFLLFLGIYVVTVVGNLSMITLIGLSSHLHTPMYYFLSGLSFIDICHSTIITPKMLVNFVTEKNIISYPECMTQLYFFLIFAIAECHMLAVTAYDRYVAICSPLLYNVIMSYHHCFWLTVGVYILGILGSTIHTGFMLRLFLCKTNVINHYFCDLFPLLGLSCSSTYINELLVLVLSAFNILTPALTILASYIFIIASILRIRSTEGRSKAFSTCSSHILAVAVFFGSAAFMYLQPSSVSSMDQGKVSSVFYTIVVPMLNPQSIA

SEQ ID NO: 916502 - protein, 92 aa, Homo sapiens
MARTKQTARKSTGGKAPRKQLATKAARKSTPSTCGVKPHRYRPGTVALREIRRYQKSTELLIRKLPFQRLVREIAQDFKTAQYTPDPPVWSA

SEQ ID NO: 916503 - protein, 135 aa, Homo sapiens
MARTKQTARKSTGGKAPRKQLATKAARKSTPSTCGVKPHRYRPGTVALREIRRYQKSTELLIRKLPFQRLVREIAQDFNTDLRFQSAAVGALQEASEAYLVGLLEDTNLCAIHAKRVTIMPKDIQLARRIRGERA

SEQ ID NO: 916504 - protein, 173 aa, Homo sapiens
MDLAPSRPPRGGPAPIPPPCSGPPPLGVRSSRAAPGNKVSTLSSPAAETRKINPSAQSIAGDHLMLPPCSVANELKTLTPVGIAIIMVADVKEGRLFSRSWHLTIEDASRSRKDGRRSWKLVLFIQGNAMSGTPIIRGTCQFAETPDYNGHNYEENYNKCEGSDNNIISLIIS

SEQ ID NO: 916505 - protein, 161 aa, Homo sapiens
MSNVEETTNRPSGMLSIYQHSYWNPNKETFQNDNRALPLNCRTSHAARKPCRLITHTTLTWTQRPPGTEDCVSRKYFPEKLQRTSVLQLTQRLFFVAGTGPHALWGTSLSASTLLSPSSHPGTVPTGHCLAMPHISHKGEPPEGSWGCGILEAQKFSPPVL

SEQ ID NO: 916506 - protein, 368 aa, Homo sapiens
IARMYAFSSWMSRRRGRVDAGWGELYGRSGYNYFFSGGADDAWADVEDVTEEDCALRSGDTHLFDKVRGYDIKLLRYLSVKYICDLMVENKKVKFGMNVTSSEKVDKAQRYADFTLLSIPYPGCEFFKEYKDRDYMAEGLIFNWKQDYVDAPLSIPDFLTHSLNIDWSQYQCWDLVQQTQNYLKLLLSLVNSDDDSGLLVHCISGWDRTPLFISLLRLSLWADGLIHTSLKPTEILYLTVAYDWFLFGHMLVDRLSKGEEIFFFCFNFLKHITSEEFSALKTQRRKSLPARDGGFTLEDICMLRRKDRGSTTSLGSDFSLEVRSAFLAAYSSTVGLRAVAPSPSGAIGGLLEQFARGVGLRSISSNAL

SEQ ID NO: 916507 - protein, 587 aa, Homo sapiens
MGNILTCRVHPSVSLEFDQQQGSVCPSESEIYEAGAEDRMAGAPMAAAVQPAEVTVEVGEDLHMHHVRDREMPEGEEVIGAIYPRVTLEIPHHITQRDADRSLSIPDEQLHSFAVSTVHITKNRNGGGSLNNYSSSIPSTPSTSQEDPQFSVPPTANTPTPVCKRSMRWSNLFTSEKGSDPDKERKAPENHADTIGSGRAIPIKQGMLLKRSGKWLKTWKKKYVTLCSNGVLTYYSSLGDYMKYIHKKEIDLQTSTIKVPGKWPSLATLACTPISSSKSDGLSKDMDTGLGDSICFSPSISSTTIPKLNPPPSPHANKKKHLKKKSTNNFMIVSATGQTWHFEATTYEERDAWVQAIQSQILASLQSCESSKSKSQLTSQSEAMALQSIQNMRGNAHCVDCETQNPKWASLNLGVLMCIECSGIHRSLGTRLSRVRSLELDDWPVELRKVMSSIGNDLANSIWEGSSQGRTKPTELFLAPLPCTELSLGQQLLRATADEDLQTAILLLAHGSREEVNETCGEGDGCTALHLACRKGNVVLAQLLIWYGVDVMARDAHGNTALTYARQASSQECINVLLQYGCPDKCV

SEQ ID NO: 916508 - protein, 605 aa, Homo sapiens
MGNILTCRVHPSVSLEFDQQQGSVCPSESEIYEAGAEDRMAGAPMAAAVQPAEVTVEVGEDLHMHHVRDREMPEGEEVIGAIYPRVTLEIPHHITQRDADRSLSIPDEQLHSFAVSTVHITKNRNGGGSLNNYSSSIPSTPSTSQEDPQFSVPPTANTPTPVCKRSMRWSNLFTSEKGSDPDKERKAPENHADTIGSGRAIPIKQGMLLKRSGKWLKTWKKKYVTLCSNGVLTYYSSLGDYMKYIHKKEIDLQTSTIKVPGKWPSLATLACTPISSSKSDGLSKDMDTGLGDSICFSPSISSTTIPKLNPPPSPHANKKKHLKKKSTNNFMIVSATGQTWHFEATTYEERDAWVQAIQSQILASLQSCESSKSKSQLTSQSEAMALQSIQNMRGNAHCVDCETQNPKWASLNLGVLMCIECSGIHRSLGTRLSRVRSLELDDWPVELRKVMSSIGNDLANSIWEGSSQGRTKPTEKSTREEKERWIRSKYEEKLFLAPLPCTELSLGQQLLRATADEDLQTAILLLAHGSREEVNETCGEGDGCTALHLACRKGNVVLAQLLIWYGVDVMARDAHGNTALTYARQASSQECINVLLQYGCPDKCV

SEQ ID NO: 916509 - protein, 196 aa, Homo sapiens
MNLVYDWYQTESQVVITLMIKNVQKNDVNVEFSEKELSALVKLPSGEDYNLKLELLHPIIPEQSTFKVLSTKIEIKLKKPEAVRWEKLEGQGDVPTPKQFVADVKNLYPSSSPYTRNWDKLVGEIKEEEKNEKLEGDAALNRLFQQIYSDGSDEVKRAMNKSFMESGGTVLSTNWSDVGKRKVEINPPDDMEWKKY

SEQ ID NO: 916510 - protein, 209 aa, Homo sapiens
  misc_feature (9)..(9): Xaa can be any naturally occurring amino acid
  misc_feature (16)..(16): Xaa can be any naturally occurring amino acid
RLAAAGERXESRKSTXLYDWYQTESQVVITLMIKNVQKNDVNVEFSEKELSALVKLPSGEDYNLKLELLHPIIPEQSTFKVLSTKIEIKLKKPEAVRWEKLEGQGDVPTPKQFVADVKNLYPSSSPYTRNWDKLVGEIKEEEKNEKLEGDAALNRLFQQIYSDGSDEVKRAMNKSFMESGGTVLSTNWSDVGKRKVEINPPDDMEWKKY

SEQ ID NO: 916511 - protein, 195 aa, Homo sapiens
LTLLESSLTESQVVITLMIKNVQKNDVNVEFSEKELSALVKLPSGEDYNLKLELLHPIIPEQSTFKVLSTKIEIKLKKPEAVRWEKLEGQGDVPTPKQFVADVKNLYPSSSPYTRNWDKLVGEIKEEEKNEKLEGDAALNRLFQQIYSDGSDEVKRAMNKSFMESGGTVLSTNWSDVGKRKVEINPPDDMEWKKY

SEQ ID NO: 916512 - protein, 175 aa, Homo sapiens
  misc_feature (14)..(15): Xaa can be any naturally occurring amino acid
VSKSFTNVRTTQKXXLSALVKLPSGEDYNLKLELLHPIIPEQSTFKVLSTKIEIKLKKPEAVRWEKLEGQGDVPTPKQFVADVKNLYPSSSPYTRNWDKLVGEIKEEEKNEKLEGDAALNRLFQQIYSDGSDEVKRAMNKSFMESGGTVLSTNWSDVGKRKVEINPPDDMEWKKY

SEQ ID NO: 916513 - protein, 163 aa, Homo sapiens
LSTKIEITLNVLCSGIKDEEVPVSNVIPEQSTFKVLSTKIEIKLKKPEAVRWEKLEGQGDVPTPKQFVADVKNLYPSSSPYTRNWDKLVGEIKEEEKNEKLEGDAALNRLFQQIYSDGSDEVKRAMNKSFMESGGTVLSTNWSDVGKRKVEINPPDDMEWKKY

SEQ ID NO: 916514 - protein, 333 aa, Homo sapiens
MAAAAAGTATSQRFFQSFSDALIDEDPQAALEELTKALEQKPDDAQYYCQRAYCHILLGNYCVAVADAKKSLELNPNNSTAMLRKGICEYHEKNYAAALETFTEGQKLDSADANFSVWIKRCQEAQNGSESEVWTHQSKIKYDWYQTESQVVITLMIKNVQKNDVNVEFSEKELSALVKLPSGEDYNLKLELLHPIIPEQSTFKVLSTKIEIKLKKPEAVRWEKLEGQGDVPTPKQFVADVKNLYPSSSPYTRNWDKLVGEIKEEEKNEKLEGDAALNRLFQQIYSDGSDEVKRAMNKSFMESGGTVLSTNWSDVGKRKVEINPPDDMEWKKY

SEQ ID NO: 916515 - protein, 367 aa, Homo sapiens
MAAAAAGTATSQRFFQSFSDALIDEDPQAALEELTKALEQKPDDAQYYCQRAYCHILLGNYCVAVADAKKSLELNPNNSTAMLRKGICEYHEKNYAAALETFTEGQKLDIETGFHRVGQAGLQLLTSSDPPALDSQSAGITGADANFSVWIKRCQEAQNGVKKSESVGFISPKLGYDWYQTESQVVITLMIKNVQKNDVNVEFSEKELSALVKLPSGEDYNLKLELLHPIIPEQSTFKVLSTKIEIKLKKPEAVRWEKLEGQGDVPTPKQFVADVKNLYPSSSPYTRNWDKLVGEIKEEEKNEKLEGDAALNRLFQQIYSDGSDEVKRAMNKSFMESGGTVLSTNWSDVGKRKVEINPPDDMEWKKY

SEQ ID NO: 916516 - protein, 367 aa, Homo sapiens
MAAAAAGTATSQRFFQSFSDALIDEDPQAALEELTKALEQKPDDAQYYCQRAYCHILLGNYCVAVADAKKSLELNPNNSTAMLRKGICEYHEKNYAAALETFTEGQKLDIETGFHRVGQAGLQLLTSSDPPALDSQSAGITGQMLISVSGITQVSKKAQEVGSESEVWTHQSKIKYDWYQTESQVVITLMIKNVQKNDVNVEFSEKELSALVKLPSGEDYNLKLELLHPIIPEQSTFKVLSTKIEIKLKKPEAVRWEKLEGQGDVPTPKQFVADVKNLYPSSSPYTRNWDKLVGEIKEEEKNEKLEGDAALNRLFQQIYSDGSDEVKRAMNKSFMESGGTVLSTNWSDVGKRKVEINPPDDMEWKKY

SEQ ID NO: 916517 - protein, 367 aa, Homo sapiens; identical to SEQ ID NO: 916515

SEQ ID NO: 916518 - protein, 105 aa, Homo sapiens
GWEESVLHCPSRPRAGVSPPVPLAARCVAARWLFRTEARLVFLQKFPPWAVVEVVTVIVAAPAAATATTRDGGGCSRNCNIPEVFPELLGCPNRRGPPGGVRGAD

SEQ ID NO: 916519 - protein, 105 aa, Homo sapiens; identical to SEQ ID NO: 916518

SEQ ID NO: 916520 - protein, 66 aa, Homo sapiens
PPPAGGEPALNRLFQQIYSDGSDEVKRAMNKSFMESGGTVLSTNWSDVGKRKVEINPPDDMEWKKY

SEQ ID NO: 916521 - protein, 212 aa, Homo sapiens
GRVGLRFSESEVWTHQSKIKYDWYQTESQVVITLMIKNVQKNDVNVEFSEKELSALVKLPSGEDYNLKLELLHPIIPEQSTFKVLSTKIEIKLKKPEAVRWEKLEGQGDVPTPKQFVADVKNLYPSSSPYTRNWDKLVGEIKEEEKNEKLEGDAALNRLFQQIYSDGSDEVKRAMNKSFMESGGTVLSTNWSDVGKRKVEINPPDDMEWKKY

SEQ ID NO: 916522 - protein, 177 aa, Homo sapiens
ASSYELHNVTKKKKKLLLSALVKLPSGEDYNLKLELLHPIIPEQSTFKVLSTKIEIKLKKPEAVRWEKLEGQGDVPTPKQFVADVKNLYPSSSPYTRNWDKLVGEIKEEEKNEKLEGDAALNRLFQQIYSDGSDEVKRAMNKSFMESGGTVLSTNWSDVGKRKVEINPPDDMEWKKY

SEQ ID NO: 916523 - protein, 175 aa, Homo sapiens
VSEPYFTQTTPKKTLLSALVKLPSGEDYNLKLELLHPIIPEQSTFKVLSTKIEIKLKKPEAVRWEKLEGQGDVPTPKQFVADVKNLYPSSSPYTRNWDKLVGEIKEEEKNEKLEGDAALNRLFQQIYSDGSDEVKRAMNKSFMESGGTVLSTNWSDVGKRKVEINPPDDMEWKKY

SEQ ID NO: 916524 - protein, 365 aa, Homo sapiens
MAAAAAGTATSQRFFQSFSDALIDEDPQAALEELTKALEQKPDDAQYYCQRAYCHILLGNYCVAVADAKKSLELNPNNSTAMLRKGICEYHEKNYAAALETFTEGQKLDIETGFHRVGQAGLQLLTSSDPPALDSQSAGITGADANFSVWIKRCQEAQNGSESEVWTHQSKIKYDWYQTESQVVITLMIKNVQKNDVNVEFSEKELSALVKLPSGEDYNLKLELLHPIIPEQSTFKVLSTKIEIKLKKPEAVRWEKLEGQGDVPTPKQFVADVKNLYPSSSPYTRNWDKLVGEIKEEEKNEKLEGDAALNRLFQQIYSDGSDEVKRAMNKSFMESGGTVLSTNWSDVGKRKVEINPPDDMEWKKY

SEQ ID NO: 916525 - protein, 311 aa, Homo sapiens
MLSQKEVAVADAKKSLELNPNNSTAMLRKGICEYHEKNYAAALETFTEGQKLDIETGFHRVGQAGLQLLTSSDPPALDSQSAGITGADANFSVWIKRCQEAQNGVKKSESVGFISPKLGYDWYQTESQVVITLMIKNVQKNDVNVEFSEKELSALVKLPSGEDYNLKLELLHPIIPEQSTFKVLSTKIEIKLKKPEAVRWEKLEGQGDVPTPKQFVADVKNLYPSSSPYTRNWDKLVGEIKEEEKNEKLEGDAALNRLFQQIYSDGSDEVKRAMNKSFMESGGTVLSTNWSDVGKRKVEINPPDDMEWKKY

SEQ ID NO: 916526 - protein, 277 aa, Homo sapiens
MLSQKEVAVADAKKSLELNPNNSTAMLRKGICEYHEKNYAAALETFTEGQKLDSADANFSVWIKRCQEAQNGSESEVWTHQSKIKYDWYQTESQVVITLMIKNVQKNDVNVEFSEKELSALVKLPSGEDYNLKLELLHPIIPEQSTFKVLSTKIEIKLKKPEAVRWEKLEGQGDVPTPKQFVADVKNLYPSSSPYTRNWDKLVGEIKEEEKNEKLEGDAALNRLFQQIYSDGSDEVKRAMNKSFMESGGTVLSTNWSDVGKRKVEINPPDDMEWKKY

SEQ ID NO: 916527 - protein, 365 aa, Homo sapiens; identical to SEQ ID NO: 916524

SEQ ID NO: 916528 - protein, 176 aa, Homo sapiens
MAAAAAGTATSQRFFQSFSDALIDEDPQAALEELTKALEQKPDDAQYYCQRAYCHILLGNYCVAVADAKKSLELNPNNSTAMLRKGICEYHEKNYAAALETFTEGQKLDIETGFHRVGQAGLQLLTSSDPPALDSQSAGITGADANFSVWIKRCQEAQNGVKKSESVGFISAKTRV

SEQ ID NO: 916529 - protein, 473 aa, Homo sapiens
EESHVGRAGAQLAWGSLSRWPPRSRWNRRCWRRSSLTWVSSLTTRLRTMWRRNERPTRAREEVTPRVVYACVAEPFDAPRCACCAREYGRIRHAAQRYRMRGQQTKWGQSFFSRKDSIRTIYTSLHNELKKVVTGRGALGGTAPHVEELLSHLSEQLCFFVQARMEIADFYEKMYTLSTQKFINAEELVGLLDAIMKKYSSRFHHPILSPLESSFQLEVDVLCHLLKAQAQVSEWKFLPSLVNLHSAHTKLQTWGQIFEKQRETKKHLFGGQSQKAVQPPHLFLWLMKLKNMLLAKFSFYFHEALSRQTTASEMKTLTAKANPDFFGKISSFIRKYDAANVSLIFDNRGSESFQGHGYHHPHSYREAPKGVDQYPAVVSLPSDRPVMHWPNVIMIMTDRTSDLNSLEKVVHFYDDKVQSTYFLTRPEPHFTIVIIFESKKSERDSHFISFLNEVSLALKNPKVFASLKPGSKG

SEQ ID NO: 916530 - protein, 457 aa, Homo sapiens
GEPRGSSWGAARMGESIPLAAPVPVEQAVLETFFSHLGIFSYDKAKDNVEKEREANKSAGGSWLSLLAALAHLAAAEKVYHSLTYLGQKLGGQSFFSRKDSIRTIYTSLHNELKKVVTGRGALGGTAPHVEELLSHLSEQLCFFVQARMEIADFYEKMYTLSTQKFINAEELVGLLDAIMKKYSSRFHHPILSPLESSFQLEVDVLCHLLKAQAQVSEWKFLPSLVNLHSAHTKLQTWGQIFEKQRETKKHLFGGQSQKAVQPPHLFLWLMKLKNMLLAKFSFYFHEALSRQTTASEMKTLTAKANPDFFGKISSFIRKYDAANVSLIFDNRGSESFQGHGYHHPHSYREAPKGVDQYPAVVSLPSDRPVMHWPNVIMIMTDRTSDLNSLEKVVHFYDDKVQSTYFLTRPEPHFTIVIIFESKKSERDSHFISFLNEVSLALKNPKVFASLKPGSKG

SEQ ID NO: 916531 - protein, 457 aa, Homo sapiens; identical to SEQ ID NO: 916530

SEQ ID NO: 916532 - protein, 457 aa, Homo sapiens; identical to SEQ ID NO: 916530

SEQ ID NO: 916533 - protein, 182 aa, Homo sapiens
MLLAKFSFYFHEALSRQTTASEMKTLTAKANPDFFGKISSFIRKYDAANVSLIFDNRGSESFQGHGYHHPHSYREAPKGVDQYPAVVSLPSDRPVMHWPNVIMIMTDRTSDLNSLEKVVHFYDDKVQSTYFLTRPEPHFTIVIIFESKKSERDSHFISFLNEVSLALKNPKVFASLKPGSKG

SEQ ID NO: 916534 - protein, 311 aa, Homo sapiens
MGKENCTTVAEFILLGLSDVPELRVCLFLLFLLIYGVTLLANLGMTALIQVSSRLHTPVYFFLSHLSFVDFCYSSIIVPKMLANIFNKDKAISFLGCMVQFYLFCTCGVTEVFLLAVMAYDRFVAICNPLLYMVTMSQKLRVELTSCCYFCGTVCSLIHSSLALRILFYRSNVINHFFCDLPPLLSLACSDVTVNETLLFLVATLNESVTIMIILTSYLLILTTILKIHSAESRHKAFSTCASHLTAITVSHGTILYIYCRPSSGNSGDVDKVATVFYTVVIPMLNPLIYSLRNKDVNKALRKVMGSKIHS

SEQ ID NO: 916535 - protein, 166 aa, Homo sapiens
MNFTPGPAPKLDTGDNGSLYCTEDSEGLSRWSHANSDTSSAPGHSTRPRCLPHPSGCAGHSPRFFSDSYRAPSLFNKGEGSSADRGTLSSWDLGQQPQGCPGFERQVQNCTHPLKARQDCTGHGPGLLTHCPQQPSQGTALVEEGQTQSALGWDAGIQSPFFHLKH

SEQ ID NO: 916536 - protein, 86 aa, Homo sapiens
PSSCIVNNTLKLKGASHSGSRSASSQHARRDRGASSMVPDTWRHPLLTVWVNEENAYLAPEWPIAGWHGVPLLRGERVSMGSTGRQ

SEQ ID NO: 916537 - protein, 232 aa, Homo sapiens
PASVHMLLSLPVRAQLFPDWQRQKAVQNNPYPSAFLQGEQDTVGVLDQVSPPPPRPFWEPAPPPSSLHLPPPRLWGAHGLREEPEFVTARAGESVVLRCDVIHPVTGQPPPYVVEWFKFGVPIPIFIKFGYYPPHVDPEYAGRASLHDKASLRLEQVRSEDQGWYECKVLMLDQQYDTFHNGSWVHLTINETWLGRGVRHVQVGSGVGSSSQSGQACSEAQSEESGAFREHG

SEQ ID NO: 916538 - protein, 431 aa, Homo sapiens
EAQLIMLLPLIVIQGPDSHFRPRGVDAAASTREVVVYAPLSKKQEIFYTAIVNRTIANMFGSSEKETIELSPTGRPKRRTRKSINYSKIDDFPNELEKLISQIQPEVDRERAVVEVNIPVESEVNLKLQNIMMLLRKCCNHPYLIEYPIDPVTQEFKIDEELVTNSGKFLILDRMLPELKKRGHKVLLFSQMTSMLDILMDYCHLRDFNFSRLDGSMSYSEREKNMHSFNTDPEVFIFLVSTRAGGLGINLTAADTVIIYDSDWNPQSDLQAQDRCHRIGQTKPVVVYRLVTANTIDQKIVERAAAKRKLEKLIIHKNHFKGGQSGLNLSKNFLDPKELMELLKSRDYEREIKGSREKVISDKDLELLLDRSDLIDQMNASGPIKEKMGIFKILENSEDSSPELMQFMGFRYFSYEVGFSWGEIGIMLSVV

SEQ ID NO: 916539 - protein, 184 aa, Homo sapiens
FSQRVDKENVVYSYYSPIKRNEIMALAATWMEVETIILSENKSRQRNLEGLDWLSLPAYIFFLCGMLSAFQHHTPSSSDFGLLDLRYRLESEVCTIGFPTFEVLGLRLASWLLTLQIAYCGTSPGDCQRPIGKDSLKILSSLSHLLPGSSLWAEHTCGWRRATAEELITHIGITIFQTVTHVSL

SEQ ID NO: 916540 - protein, 249 aa, Homo sapiens
CEMRGRREQRRGPFRLCSASNSRLLVRLFLRGNGEKVQPQVLAFPGKSSQPPSAGPTPPPSSRPPPSPPRRRRPAWLQDEAEVAAALAGYGFINPSSTGEGPARPSTQTLRRSGAFPCESVGVPGARPGRGAEGRPARRRPAPAPPLLPLPSRALWLGGEESRRVEKSREEWRRVEKSREEWTRRTVCSEAGLGGAGRTGFRPVSLSRGSPGVTPTPSHAEAFRPSCGIHANGAASAPPGQNLNVISGN

SEQ ID NO: 916541 - protein, 715 aa, Homo sapiens
MSCQISCKSRGRGGGGGGFRGFSSGSAVVSGGSRRSTSSFSCLSRHGGGGGGFGGGGFGSRSLVGLGGTKSISISVAGGGGGFGAAGGFGGRGGGFGGGSSFGGGSGFSGGGFGGGGFGGGRFGGFGGPGGVGGLGGPGGFGPGGYPGGIHEVSVNQSLLQPLNVKVDPEIQNVKAQEREQIKTLNNKFASFIDKVRFLEQQNQVLQTKWELLQQMNVGTRPINLEPIFQGYIDSLKRYLDGLTAERTSQNSELNNMQDLVEDYKKKYEDEINKRTAAENDFVTLKKDVDNAYMIKVELQSKVDLLNQEIEFLKVLYDAEISQIHQSVTDTNVILSMDNSRNLDLDSIIAEVKAQYEEIAQRSKEEAEALYHSKASRGNVGRATAPCHELGCTPSWKVYSKYEELQVTVGRHGDSLKEIKIEISELNRVIQRLQGEIAHVKKQCKNVQDAIADAEQRGEHALKDARNKLNDLEEALQQAKEDLARLLRDYQELMNVKLALDVEIATYRKLLEGEECSILGDLIWLKQLEGEKLPQAISKPDDKQGVAFFRRLLCPCLEAMPPMPSLMSGDLSSNVTVSVTSSTISSNVASKAAFGGSGGRGSSSGGGYSSGSSSYGSGGRQSGSRGGSGGGGSISGGGYGSGGGSGGRYGSGGGSKGGSISGGGYGSGGGKHSSGGGSRGGSSSGGGYGSGGGGSSSVKGSSGEAFGSSVTFSFR

SEQ ID NO: 916542 - protein, 252 aa, Homo sapiens
MGSGPFEHPVSPMHLSLSAIRGELVDSRCIKAYPLPLAPQDFEEEEADETETAWPPLPAVPCDYDHCRHLQVPCKELQRVGPAACLCPGLSSPAQPPDPPRMGEVRIAAEEGRAVVHWCAPFSPVLHYWLLLWDGSEAAQKGPPLNATVRRAELKGLKPGGIYVVCVVAANEAGASRVPQAGGEGLEGADIPAFGPCSRLAVPPNPRTLVHAAVGVGTALALLSCAALVWHFCLRDRWGCPRRAAARAAGAL

SEQ ID NO: 916543 - protein, 558 aa, Homo sapiens
WGSGMHLSPASASHPRQVMLHYRSDLLQMLDTLVFSSLLLFGFAEQKQLLEVELYADYRENSYVPTTGAIIEIHSKRIQLYGAYLRIHAHFTGLRYLLYNFPMTCAFIGVASNFTFLSVIVLFSYMQWVWGGIWPRHRFSLQVNIRKRDNSRKEVQRRISAHQPGPEGQEESTPQSDVTEDGESPEDPSGTEGQLSEEEKPDQQPLSGEEELEPEASDGSGSWEDAALLTEANLPAPAPASASAPVLETLGSSEPAGGALRQRPTCSSSRRKGADSSHSSTFPPDSSPLVFPSINYFVSSFFLDSEMGSGPFEHPVSPMHLSLSAIRGELVDSRCIKAYPLPLAPQDFEEEEADETETAWPPLPAVPCDYDHCRHLQVPCKELQRVGPAACLCPGLSSPAQPPDPPRMGEVRIAAEEGRAVVHWCAPFSPVLHYWLLLWDGSEAAQKGPPLNATVRRAELKGLKPGGIYVVCVVAANEAGASRVPQAGGEGLEGADIPAFGPCSRLAVPPNPRTLVHAAVGVGTALALLSCAALVWHFCLRDRWGCPRRAAARAAGAL

SEQ ID NO: 916544 - protein, 160 aa, Homo sapiens
MKAPLCPVICDRYLFSSSFQCIILDFGIFALYLSVEHHKFKNPKSEMLQIRISFQPHGKDAIEIKKETDTCHKSLDTAELLSTQLKCVHLVPVKLEKLVVVQHDLIIKILYQSACCSFDSVWRSFGSMDNLYWCYIWGSACLGPGLDTTKADNENRVGFY

SEQ ID NO: 916545 - protein, 148 aa, Homo sapiens
GDGQHSCAEMGTLPESSPSVVLLTLISLAISTYSILRVFQEDAQESALRGKKMRNTRWTTLARLLGTSLRAQLPEERRKSCQQDPVSCWRWLRTGFLLSSSAASSHKTAVPVLDLKACETMMEPSSAPPWSARFVLILFQSRHLNNRQ

SEQ ID NO: 916546 - protein, 801 aa, Homo sapiens
DYILVPPTTSENNEMVELQRIRMKDEIREYKFREARLLQDYTELEEENITLQKLVSTLKQNQVEYEGLKHEIKRFEEETVLLNSQLEDAIRLKEIAEHQLEEALETLKNEREQKNNLRKELSQYISLNDNHISISVDGLKFAEDGSEPNNDDKMNGHIHGPLVKLNGDYRTPTLRKGESLNPVSDLFSELNISEIQKLKQQLMQVEREKAILLANLQESQTQLEHTKGALTEQHERVHRLTEHVNAMRGLQSSKELKAELDGEKGRDSGEEAHDYEVDINGLEILECKYRVAVTEVIDLKAEIKALKEKYNKSVENYTDEKAKYESKIQMYDEQVTSLEKTTKESGEKMAHMEKELQKMTSIANENHSTLNTAQDELVTFSEELAQLYHHVCLCNNETPNRVMLDYYRQSRVTRSGSLKGPDDPRGLLSPRLARRGVSSPVETRTSSEPVAKESTEASKEPSPTKTPTISPVITAPPSSPVLDTSDIRKEPMNIYNLNAIIRDQIKHLQKAVDRSLQLSRQRAAARELAPMIDKDKEALMEEILKLKSLLSTKREQIATLRAVLKANKQTAEVALANLKNKYENEKAMVTETMTKLRNELKALKEDAATFSSLRAMFATRCDEYVTQLDEMQRQLAAAEDEKKTLNTLLRMAIQQKLALTQRLEDLEFDHEQSRRSKGKLGKSKIGSPKSRPRTSGASYLQNLLRVPPDPTSTESFLLKGPPSMSEFIQGHRLSKEKRLTVAPPEKIILANKNHPFKESLHERRSTCPSAMSSALQPGAGLRSNRKRGCKGGQGPEDRGPG

SEQ ID NO: 916547 - protein, 225 aa, Homo sapiens
MQPSVKSRNAQMLPMTSASVMRHAWERAPTASLSTQHTCCALTHSSTCLHAHTLRSLREREHEPSLLQTPKQALSCIIPQVCSLGMAQRPQPRRPKPSHVLLLKPCLLLRVCVSPEEGPSVSLACREALWFLVSSGLSVTSWKEPLPAYCPTAFHSTHIWGSSALCKALHVIMMKEDQPDPSAPTQGGTTLQETLTQPISAQERQASNCTISLSFPMQLPLNDDQ

SEQ ID NO: 916548 - protein, 225 aa, Homo sapiens; identical to SEQ ID NO: 916547

SEQ ID NO: 916549 - protein, 164 aa, Homo sapiens
EKNLKETKMFQEKEDKERLAGLKTQGEDRTFAEGRTTYSDTRKARVREEEIVVDRPGACKADILVAAFGVTEGKLLEVKRPMGPGGTHGEPGKKLYLMNTNLCIWHAPFSKACHSVLFQRCLKTQTTDGCIHMTDFKHSTLQEKSRIRAWKVGGSTTLLFRFSF

SEQ ID NO: 916550 - protein, 392 aa, Homo sapiens
MAGILGEPHLFFEDHLRNISSVMLVLFIHPLQCCACHRILPCQCTFIPMEPLVLLLVETSEAPFLFSFLSRKFNNMLLYCVPKFSLVGSKFTVRTRVGIDGMKIVETQNEEYPHTFQVSGKERTLELQASSAQDKEEWIKALQETIDAFHQRHETFRNAIAKDNDIHSEVSTAELGKRAPRWIRDNEVTMCMKCKEPFNALTRRRHHCRACGYVVCWKCSDYKAQLEYDGGKLSKVCKDCYQIISGFTDSEEKKRKGILEIESAEVSGNSVVCSFLQYMEKSKPWQKAWCVIPKQDPLVLYMYGAPQDVRAQATIPLLGYVVDEMPRSADLPHSFKLTQSKSVHSFAADSEELKQKWLKVILLAVTGETPGGPNEHPATLDDHPEPKKKSEC

SEQ ID NO: 916551 - protein, 220 aa, Homo sapiens
MLFVFISLVLFAAPINFLVAVSVSLLGALLGGAEPPSVSSEGSDVLVLSPFSPPECSIGNPLSPIPYPSSPTLYPPLPEELSPASTTCSGASYQPPKGNLCPLREVTNGEEVTVRVHVPFSMSDLAVYKEEFGHFSEDPGKFIDKFEKLTLTYSLTWQDLHVLLSLCCTVEEKQHILGAARTHAHEVLACNPNHDIYQAGGEIHLSFWDWLLLNMQALIL

SEQ ID NO: 916552 - protein, 1767 aa, Homo sapiens
VDTSSGAVLPKGHCGDCLQPPQLIPLCLPALKEGLPHVMKVSTLRESSAMASPLPREMEEELVPTGSEPGDTRAKPPVKPKPRALPAKPALPAKPSLLVPVGPRPPRGPLAELPSARKMNMLAGPQPYGGSKRPLPFAPRPAVEASTGGEATQETGKEEAGKEEPPPLTPPARCAAPGGVRKAPAPFRPASERFAATTVEEILAKMEQPRKEVLASPDRLWGSRLTFNHDGSSRYGPRTYGTTTAPRDEDGSTLFRGWSQEGPVKSPAECREEHSKTPEERSLPSDLAFNGDLAKAASSELPADISKPWIPSSPAPSSENGGPASPGLPAEASGSGPGSPHLHPPDKSSPCHSQLLEAQTPEASQASPCPAVTPSAPSAALPDEGSRHTPSPGLPAEGAPEAPRPSSPPPEVLEPHSLDQPPATSPRPLIEVGELLDLTRTFPSGGEEEAKGDAHLRPTSLVQRRFSEGVLQSPSQDQEKLGGSLAALPQGQGSQLALDRPFGAESNWSLSQSFEWTFPTRPSGLGVWRLDSPPPSPITEASEAAEAAEAGNLAVSSREEGVSQQGQGAGSAPSGSGSSWVQGDDPSMSLTQKGDGESQPQFPAVPLEPLPTTEGTPGLPLQQAEERYESQEPLAGQESPLPLATREAALPILEPVLGQEQPAAPDQPCVLFADAPEPGQALPVEEEAVTLARAETTQARTEAQDLCRASPEPPGPESSSRWLDDLLASPPPSGGGARRGAGAELKDTQSPSTCSEGLLGWSQKDLQSEFGITGDPQPSSFSPSSWCQGASQDYGLGGASPRGDPGLGERDWTSKYGQGAGEGSTREWASRCGIGQEEMEASSSQDQSKVSAPGVLTAQDRVVGKPAQLGTQRSQEADVQDWEFRKRDSQGTYSSRDAELQDQEFGKRDSLGTYSSRDVSLGDWEFGKRDSLGAYASQDANEQGQDLGKRDHHGRYSSQDADEQDWEFQKRDVSLGTYGSRAAEPQEQEFGKSAWIRDYSSGGSSRTLDAQDRSFGTRPLSSGFSPEEAQQQDEEFEKKIPSVEDSLGEGSRDAGRPGERGSGGLFSPSTAHVPDGALGQRDQSSWQNSDASQEVGGHQERQQAGAQGPGSADLEDGEMGKRGWVGEFSLSVGPQREAAFSPGQQDWSRDFCIEASERSYQFGIIGNDRVSGAGFSPSSKMEGGHFVPPGKTTAGSVDWTDQLGLRNLEVSSCVGSGGSSEARESAVGQMGWSGGLSLRDMNLTGCLESGGSEEPGGIGVGEKDWTSDVNVKSKDLAEVGEGGGHSQARESGVGQTDWSGVEAGEFLKSRERGVGQADWTPDLGLRNMAPGAVCSPGESKELGVGQMDWGNNLGLRDLEVTCDPDSGGSQGLRGCGVGQMDWTQDLAPQNVELFGAPSEAREHGVGGVSQCPEPGLRHNGSLSPGLEARDPLEARELGVGETSGPETQGEDYSSSSLEPHPADPGMETGEALSFGASPGRCPARPPPSGSQGLLEEMLAASSSKAVARRESAASGLGGLLEEEGAGAGAAQEEVLEPGRDSPPSWRPQPDGEASQTEDVDGTWGSSAARWSDQGPAQTSRRPSQGPPARSPSQDFSFIEDTEILDSAMYRSRANLGRKRGHRAPVIRPGGTLGLSEAADSDAHLFQDSTEPRASRVPSSDEEVVEEPQSRRTRMSLGTKGLKVNLFPGLSPSALKAKLRPRNRSAEEGELAESKSSQKESAVQRSKSCKVPGLGKPLTLPPKPEKSSGSEGSSPNWLQALKLKKKKV

SEQ ID NO: 916553 - protein, 731 aa, Homo sapiens
MWCSAAVDIMFLLDGSNSVGKGSFERSKHFAITVCDGLDISPERILIIVTDGKSQGDVALPSKQLKERGVTVFAVGVRFPRWEELHALASEPRGQHVLLAEQVEDATNGLFSTLSSSAICSSATPDCRVEAHPCEHRTLEMVREFAGNAPCWRGSRRTLAVLAAHCPFYREDPALEEHLIGLPLCGQPRVRPSQELLPTQSGAFCPQMRNRSCDSRAHGPGDAGEARRLMGISLIGPCDSQPCQNGGTCVPEGLDGYQCLCPLAFGGEANCGSFSAPSPSWEMFGISGGTARMPHDHGLTVGVAVIPAALKLSLECRVDLLFLLDSSAGTTLDGFLRAKVFVKRFVRAVLSEDSRARVGVATYSRELLVAVPVGEYQDVPDLVWSLDGIPFRGGPTLTGSALRQAAERGFGSATRTGQDRPRRVVVLLTESHSEDEVAGPARHARARELLLLGVGSEAVRAELEEITGSPKHVMVYSDPQDLFNQIPELQGKLCSRQRPGCRTQALDLVFMLDTSASVGPENFAQMQSFVRSCALQFEVNPDVTQVGLVVYGSQVQTAFGLDTKPTRAAMLRAISQAPYLGGVGSAGTALLHIYDKVMTVQRGARPGVPKAVVVLTGGRGAEDAAVPAQKLRNNGISVLVVGVGPVLSEGLRRLAGPRDSLIHVAAYADLRYHQDVLIEWLCGEAKQPVNLCKPSPCMNEGSCVLQNGSYRCKCRDGWEGPHCENRFLRRP

SEQ ID NO: 916554 - protein, 731 aa, Homo sapiens; identical to SEQ ID NO: 916553

SEQ ID NO: 916555 - protein, 145 aa, Homo sapiens; identical to SEQ ID NO: 747275

SEQ ID NO: 916556 - protein, 303 aa, Homo sapiens
TCLGLCPSLTVTMARGRYSRCFCPQGEGSGPHREPGHRGCDGLADGARRRPRCGRAFRDSPCDISWDGEPTSSEQGGLEGSGSAAGEGKPALSEEERQEQTKRMLELVAQKQREREEREEREALERERQRRRQGQELSAARQRLQEDEMRRAAEERRREKAEELAARQRVREKIERDKAERAKKYGGSVGSQPPPVAPEPGPVPSSPSQEPPPKREYDQCRIQVRLPDGTSLTQTFRAREQLAAVRLYVELHRGEELGGGQDPVQLLSGFPRRAFSEADMERPLQELGLVPSAVLIVAKKCPS

SEQ ID NO: 916557 - protein, 108 aa, Homo sapiens
MDWLMEHEDDPDVDEPPPKREYDQCRIQVRLPDGTSLTQTFRAREQLAAVRLYVELHRGEELGGGQDPVQLLSGFPRRAFSEADMERPLQELGLVPSAVLIVAKKCPS

SEQ ID NO: 916558 - protein, 128 aa, Homo sapiens [sequence omitted]

SEQ ID NO: 916559 - protein, 124 aa, Homo sapiens [sequence omitted]

SEQ ID NO: 916560 - protein, 124 aa, Homo sapiens [sequence omitted]

SEQ ID NO: 916561 - protein, 124 aa, Homo sapiens [sequence omitted]

SEQ ID NO: 916562 - protein, 148 aa, Homo sapiens
MVLQDVMIKGNWVNGTLDLSVIFLQLPMSLLFGFTDMFDPRLGEKEFRKARKENMEIQVKPVAELLAFLLKVHPKLCAVVQVQLPFQLVLEQYLLLEPFSHATLRLSSNVYSHNFRAEETFGDALSQHPPFVTEEHRTRQNLPKNMVE

SEQ ID NO: 916563 - protein, 177 aa, Homo sapiens
MPVGPHTHSRCLRTTENKDSWVLSCYIRGLMSGPSSAGLLEFAGGPLQILFAWVSPAEVAEQQRFLPAPSSGSFILEEHLPDASQSSPPLTGAAAFLSEMPCPVRRNLERQSGHSCFAALQSHWGKKKKLLQLAQCLPKQPPSFALETQGPGSIGTQGNLLVCVLQKLWEKHNFWAG

SEQ ID NO: 916564 - protein, 187 aa, Homo sapiens
FFALYALVRTFSTMLKRSGPYWTHVLFTWKSKEGLKVYVNGTLSTSDPSGKVSRDYGESNVNLVIGSEQDQAKCYENGAFDEFIIWERALTPDEIAMYFTAAIGKHALLSSTLPSLFMTSTASPVMPTDAYHPIITNLTEERKTFQSPGVILSYLQNVSLSLPSKSLSEQTALNLTKIEFKKSRNFY

SEQ ID NO: 916565 - protein, 134 aa, Homo sapiens
MSQLRQRLHYPTDYRQQPHQDSVEGSSLGRTAVPGKASLKPEQEEAGPSEGSGKSLSARGNCLDKGPEKGIACMFERQKESPGGKKMATIYQIFVRPLSNLSLRGSCLGQDCISQQPLQSSVAVYLVLTYRQCI

SEQ ID NO: 916566 - protein, 158 aa, Homo sapiens
LKYMNRRASQMLLMFLLAICLLAIIFVPQEMQTLREVLATLGLGASALANTLAFAHGNEVIPTIISKMINHKLPVWIFNRYSCIAVSTQRARAMGINATFANIAGALAPLMMILSVYSPPLPWIIYGVFPFISGFAFLLLPETRNKPLFDTIQDEKNE

SEQ ID NO: 916567 - protein, 177 aa, Homo sapiens
LKYMNRRASQMLLMFLLAICLLAIIFVPQEMQTLREVLATLGLGASALANTLAFAHGNEVIPTIISKMINHKLPVWIFNRYSCIAVSTQRARAMGINATFANIAGALAPLMMILSVYSPPLPWIIYGVFPFISGFAFLLLPETRNKPLFDTIQDEKNERKDPREPKQEDPRVEVTQF

SEQ ID NO: 916568 - protein, 148 aa, Homo sapiens
MEKLAPKLQEVSQRSKGALGLSKLKNPGPLVRVTFHALVRGAFGISYIVLKVLGPKDSKITRLSQSSNREHLVPCEDVLLTKPEGIMQIPRNSHRTTMGCQWRLVAPLNHIIQLNIINFPMKPTTFVCHGHLRVYEGFGPGKKLIGEC

SEQ ID NO: 916569 - protein, 124 aa, Homo sapiens
LYPSIFNLFFLNLSRAQVKKLLNKVVLRESCFYRKLTDTSKDEENHEESESLQEDMLGNRLLLPTPTVKQESKDVEENVGLIVYNGAMVDVGSLLQKLEKSEKVRAEVEQKLQLLEEKTGKGQL

SEQ ID NO: 916570 - protein, 1150 aa, Homo sapiens
MAQFGGQKNPPWATQFTATAVSQPAALGVQQPSLLGASPTIYTQQTALAAAGLTTQTPANYQLTQTAALQQQAAAAAAALQQQYSQPQQALYSVQQQLQQPQQTLLTQPAVALPTSLSLSTPQPTAQITVSYPTPRSSQQQTQPQKQRVFTGVVTKLHDTFGFVDEDVFFQLSAVKGKTPQVGDRVLVEATYNPNMPFKWNAQRIQTLPNQNQSQTQPLLKTPPAVLQPIAPQTTFGVQTQPQPQSLLQAQISAASITPLLQTQPQPLLQQPQQKAGLLQPPVRIVSQPQPARRLDPPSRFSGRNDRGDQVPNRKDDRSRERERERRRSRERSPQRKRSRERSPRRERERSPRRVRRVVPRYTVQFSKFSLDCPSCDMMELRRRYQNLYIPSDFFDAQFTWVDAFPLSRPFQLGNYCNFYVMHREVESLEKNMAILDPPDADHLYSAKVMLMASPSMEDLYHKSCALAEDPQELRDGFQHPARLVKFLVGMKGKDEAMAIGGHWSPSLDGPDPEKDPSVLIKTAIRCCKALTGIDLSVCTQWYRFAEIRYHRPEETHKGRTVPAHVETVVLFFPDVWHCLPTRSEWETLSRGYKQQLVEKLQGERKEADGEQDEEEKDDGEAKEISTPTHWSKLDPKTMKVNDLRKELESRALSSKGLKSQLIARLTKQLKVEEQKEEQKELEKSEKEEDEDDDRKSEDDKEEEERKRQEEIERQRRERRYILPDEPAIIVHPNWAAKSGKFDCSIMSLSVLLDYRLEDNKEHSFEVSLFAELFNEMLQRDFGVRIYKSLLSLPEKEDKKEKDKKSKKDERKDKKEERDDETDEPKPKRRKSGDDKDKKEDRDERKKEDKRKDDSKDDDETEEDNNQDEYDPMEAEEAEDEEDDRDEEEMTKRDDKRDINRYCKERPSKDKEKEKTQMITINRDLLMAFVYFDQSHCGYLLEKDLEEILYTLGLHLSRAQVKKLLNKVVLRESCFYRKLTDTSKDEENHEESESLQEDMLGNRLLLPTPTVKQESKDVEENVGLIVYNGAMVDVGSLLQKLEKSEKVRAEVEQKLQLLEEKTDEDEKTILNLENSNKSLSGELREVKKDLSQLQENLKISENMNLQFENQMNKTIRNLSTVMDEIHTVLKKDNVKNEDKDQKSKENGASV

SEQ ID NO: 916571 - protein, 106 aa, Homo sapiens [sequence omitted]

SEQ ID NO: 916572 - protein, 979 aa, Homo sapiens
MAQFGGQKNPPWATQFTATAVSQPAALGVQQPSLLGASPTIYTQQTALAAAGLTTQTPANYQLTQTAALQQQAAAAAAALQQQYSQPQQALYSVQQQLQQPQQTLLTQPAVALPTSLSLSTPQPTAQITVSYPTPRSSQQQTQPQKQRVFTGVVTKLHDTFGFVDEDVFFQLSAVKGKTPQVGDRVLVEATYNPNMPFKWNAQRIQTLPNQNQSQTQPLLKTPPAVLQPIAPQTTFGVQTQPQPQSLLQAQISAASITPLLQTQPQPLLQQPQQKAGLLQPPVRIVSQPQPARRLDPPSRFSGRNDRGDQVPNRKDDRSRERERERRRSRERSPQRKRSRERSPRRERERSPRRVRRVVPRYTVQFSKFSLDCPSCDMMELRRRYQNLYIPSDFFDAQFTWVDAFPLSRPFQLGNYCNFYVMHREVESLEKNMAILDPPDADHLYSAKVMLMASPSMEDLYHKSCALAEDPQELRDGFQHPARLVKFLVGMKGKDEAMAIGGHWSPSLDGPDPEKDPSVLIKTAIRCCKALTGIDLSVCTQWYRFAEIRYHRPEETHKGRTVPAHVETVVLFFPDVWHCLPTRSEWETLSRGYKQQLVEKLQGERKEADGEQDEEEKDDGEAKEISTPTHWSKLDPKTMKVNDLRKELESRALSSKGLKSQLIARLTKQLKVEEQKEEQKELEKSEKEEDEDDDRKSEDDKEEEERKRQEEIERQRRERRYILPDEPAIIVHPNWAAKSGKFDCSIMSLSVLLDYRLEDNKEHSFEVSLFAELFNEMLQRDFGVRIYKSLLSLPEKEDKKEKDKKSKKDERKDKKEERDDETDEPKPKRRKSGDDKDKKEDRDERKKEDKRKDDSKDDDETEEDNNQDEYDPMEAEEAEDEEDDRDEEEMTKRDDKRDINRYCKERPSKDKEKEKTQMITINRDLLMAFVYFDQSHCGYLLEKEVVRERQENLRLVRLMPDKEAMIGNSKKNCLLIETR

SEQ ID NO: 916573 - protein, 965 aa, Homo sapiens
MAQFGGQKNPPWATQFTATAVSQPAALGVQQPSLLGASPTIYTQQTALAAAGLTTQTPANYQLTQTAALQQQAAAAAAALQQQYSQPQQALYSVQQQLQQPQQTLLTQPAVALPTSLSLSTPQPTAQITVSYPTPRSSQQQTQPQKQRVFTGVVTKLHDTFGFVDEDVFFQLSAVKGKTPQVGDRVLVEATYNPNMPFKWNAQRIQTLPNQNQSQTQPLLKTPPAVLQPIAPQTTFGVQTQPQPQSLLQAQISAASITPLLQTQPQPLLQQPQQKAGLLQPPVRIVSQPQPARRLDPPSRFSGRNDRGDQVPNRKDDRSRERERERRRSRERSPQRKRSRERSPRRERERSPRRVRRVVPRYTVQFSKFSLDCPSCDMMELRRRYQNLYIPSDFFDAQFTWVDAFPLSRPFQLGNYCNFYVMHREVESLEKNMAILDPPDADHLYSAKVMLMASPSMEDLYHKSCALAEDPQELRDGFQHPARLVKFLVGMKGKDEAMAIGGHWSPSLDGPDPEKDPSVLIKTAIRCCKALTGIDLSVCTQWYRFAEIRYHRPEETHKGRTVPAHVETVVLFFPDVWHCLPTRSEWETLSRGYKQQLVEKLQGERKEADGEQDEEEKDDGEAKEISTPTHWSKLDPKTMKVNDLRKELESRALSSKGLKSQLIARLTKQLKVEEQKEEQKELEKSEKEEDEDDDRKSEDDKEEEERKRQEEIERQRRERRYILPDEPAIIVHPNWAAKSGKFDCSIMSLSVLLDYRLEDNKEHSFEVSLFAELFNEMLQRDFGVRIYKSLLSLPEKEDKKEKDKKSKKDERKDKKEERDDETDEPKPKRRKSGDDKDKKEDRDERKKEDKRKDDSKDDDETEEERKRQEEIEARSRKKIYLPDEPASCVHPNGAAKSGKFDGSIMSLSVLWDYRLEDNKEHSLRFHCLGTFKKCSKRFGVSVYTNHYCLFPEKRGQQRKDKKAKG

SEQ ID NO: 916574 - protein, 639 aa, Homo sapiens [sequence omitted]

SEQ ID NO: 916575 - protein, 1162 aa, Homo sapiens
MAQFGGQKNPPWATQFTATAVSQPAALGVQQPSLLGASPTIYTQQTALAAAGLTTQTPANYQLTQTAALQQQAAAAAAALQQQYSQPQQALYSVQQQLQQPQQTLLTQPAVALPTSLSLSTPQPTAQITVSYPTPRSSQQQTQPQKQRVFTGVVTKLHDTFGFVDEDVFFQLSAVKGKTPQVGDRVLVEATYNPNMPFKWNAQRIQTLPNQNQSQTQPLLKTPPAVLQPIAPQTTFGVQTQPQPQSLLQAQISAASITPLLQTQPQPLLQQPQQKAGLLQPPVRIVSQPQPARRLDPPSRFSGRNDRGDQVPNRKDDRSRERERERRRSRERSPQRKRSRERSPRRERERSPRRVRRVVPRYTVQFSKFSLDCPSCDMMELRRRYQNLYIPSDFFDAQFTWVDAFPLSRPFQLGNYCNFYVMHREVESLEKNMAILDPPDADHLYSAKTFDRIELFDYNEVMLMASPSMEDLYHKSCALAEDPQELRDGFQHPARLVKFLVGMKGKDEAMAIGGHWSPSLDGPDPEKDPSVLIKTAIRCCKALTGIDLSVCTQWYRFAEIRYHRPEETHKGRTVPAHVETVVLFFPDVWHCLPTRSEWETLSRGYKQQLVEKLQGERKEADGEQDEEEKDDGEAKEISTPTHWSKLDPKTMKVNDLRKELESRALSSKGLKSQLIARLTKQLKVEEQKEEQKELEKSEKEEDEDDDRKSEDDKEEEERKRQEEIERQRRERRYILPDEPAIIVHPNWAAKSGKFDCSIMSLSVLLDYRLEDNKEHSFEVSLFAELFNEMLQRDFGVRIYKSLLSLPEKEDKKEKDKKSKKDERKDKKEERDDETDEPKPKRRKSGDDKDKKEDRDERKKEDKRKDDSKDDDETEEDNNQDEYDPMEAEEAEDEEDDRDEEEMTKRDDKRDINRYCKERPSKDKEKEKTQMITINRDLLMAFVYFDQSHCGYLLEKDLEEILYTLGLHLSRAQVKKLLNKVVLRESCFYRKLTDTSKDEENHEESESLQEDMLGNRLLLPTPTVKQESKDVEENVGLIVYNGAMVDVGSLLQKLEKSEKVRAEVEQKLQLLEEKTDEDEKTILNLENSNKSLSGELREVKKDLSQLQENLKISENMNLQFENQMNKTIRNLSTVMDEIHTVLKKDNVKNEDKDQKSKENGASV

SEQ ID NO: 916576 - protein, 711 aa, Homo sapiens
MAQFGGQKNPPWATQFTATAVSQPAALGVQQPSLLGASPTIYTQQTALAAAGLTTQTPANYQLTQTAALQQQAAAAAAALQQQYSQPQQALYSVQQQLQQPQQTLLTQPAVALPTSLSLSTPQPTAQITVSYPTPRSSQQQTQPQKQRVFTGVVTKLHDTFGFVDEDVFFQLSAVKGKTPQVGDRVLVEATYNPNMPFKWNAQRIQTLPNQNQSQTQPLLKTPPAVLQPIAPQTTFGVQTQPQPQSLLQAQISAASITPLLQTQPQPLLQQPQQKAGLLQPPVRIVSQPQPARRLDPPSRFSGRNDRGDQVPNRKDDRSRERERERRRSRERSPQRKRSRERSPRRERERSPRRVRRVVPRYTVQFSKFSLDCPSCDMMELRRRYQNLYIPSDFFDAQFTWVDAFPLSRPFQLGNYCNFYVMHREVESLEKNMAILDPPDADHLYSAKVMLMASPSMEDLYHKSCALAEDPQELRDGFQHPARLVKFLVGMKGKDEAMAIGGHWSPSLDGPDPEKDPSVLIKTAIRCCKALTGIDLSVCTQWYRFAEIRYHRPEETHKGRTVPAHVETVVLFFPDVWHCLPTRSEWETLSRGYKQQLVEKLQGERKEADGEQDEEEKDDGEAKEISTPTHWSKLDPKTMKVNDLRKELESRALSSKGLKSQLIARLTKQLKVEEQKEEQKELEKSEKEEDEDDDRKSEDDKEVCTQSIIIL

SEQ ID NO: 916577 - protein, 404 aa, Homo sapiens
MSLSVLLDYRLEDNKEHSFEVSLFAELFNEMLQRDFGVRIYKSLLSLPEKEDKKEKDKKSKKDERKDKKEERDDETDEPKPKRRKSGDDKDKKEDRDERKKEDKRKDDSKDDDETEEDNNQDEYDPMEAEEAEDEEDDRDEEEMTKRDDKRDINRYCKERPSKDKEKEKTQMITINRDLLMAFVYFDQSHCGYLLEKDLEEILYTLGLHLSRAQVKKLLNKVVLRESCFYRKLTDTSKDEENHEESESLQEDMLGNRLLLPTPTVKQESKDVEENVGLIVYNGAMVDVGSLLQKLEKSEKVRAEVEQKLQLLEEKTDEDEKTILNLENSNKSLSGELREVKKDLSQLQENLKISENMNLQFENQMNKTIRNLSTVMDEIHTVLKKDNVKNEDKDQKSKENGASV

SEQ ID NO: 916578 - protein, 639 aa, Homo sapiens [sequence omitted]

SEQ ID NO: 916579 - protein, 484 aa, Homo sapiens
AAVYYYYTVLEEQKELEKSEKEEDEDDDRKSEDDKEEEERKRQEEIERQRRERRYILPDEPAIIVHPNWAAKSGKFDCSIMSLSVLLDYRLEDNKEHSFEVSLFAELFNEMLQRDFGVRIYKSLLSLPEKEDKKEKDKKSKKDERKDKKEERDDETDEPKPKRRKSGDDKDKKEDRDERKKEDKRKDDSKDDDETEEDNNQDEYDPMEAEEAEDEEDDRDEEEMTKRDDKRDINRYCKERPSKDKEKEKTQMITINRDLLMAFVYFDQSHCGYLLEKDLEEILYTLGLHLSRAQVKKLLNKVVLRESCFYRKLTDTSKDEENHEESESLQEDMLGNRLLLPTPTVKQESKDVEENVGLIVYNGAMVDVGSLLQKLEKSEKVRAEVEQKLQLLEEKTDEDEKTILNLENSNKSLSGELREVKKDLSQLQENLKISENMNLQFENQMNKTIRNLSTVMDEIHTVLKKDNVKNEDKDQKSKENGASV

SEQ ID NO: 916580 - protein, 152 aa, Homo sapiens [sequence omitted]

SEQ ID NO: 916581 - protein, 639 aa, Homo sapiens [sequence omitted]

SEQ ID NO: 916582 - protein, 1150 aa, Homo sapiens; identical to SEQ ID NO: 916570

SEQ ID NO: 916583 - protein, 1102 aa, Homo sapiens
MAQFGGQKNPPWATQFTATAVSQPAALGVQQPSLLGASPTIYTQQTALAAAGLTTQTPANYQLTQTAALQQQAAAAAAALQQQYSQPQQALYSVQQQLQQPQQTLLTQPAVALPTSLSLSTPQPTAQITVSYPTPRSSQQQTQPQKQRVFTGVVTKLHDTFGFVDEDVFFQLSAVKGKTPQVGDRVLVEATYNPNMPFKWNAQRIQTLPNQNQSQTQPLLKTPPAVLQPIAPQTTFGVQTQPQPQSLLQAQISAASITPLLQTQPQPLLQQPQQKAGLLQPPVRIVSQPQPARRLDPPSRFSGRNDRGDQVPNRKDDRSRERERERRRSRERSPQRKRSRERSPRRERERSPRRVRRVVPRYTVQFSKFSLDCPSCDMMELRRRYQNLYIPSDFFDAQFTWVDAFPLSRPFQLGNYCNFYVMHREVESLEKNMAILDPPDADHLYSAKVMLMASPSMEDLYHKSCALAEDPQELRDGFQHPARLVKFLVGMKGKDEAMAIGGHWSPSLDGPDPEKDPSVLIKTAIRCCKALTGIDLSVCTQWYRFAEIRYHRPEETHKGRTVPAHVETVVLFFPDVWHCLPTRSEWETLSRGYKQQLVEKLQGERKEADGEQDEEEKDDGEAKEISTPTHWSKLDPKTMKVNDLRKELESRALSSKGLKSQLIARLTKQLKVEEQKEEQKELEKSEKEEDEDDDRKSEDDKEEEERKRQEEIERQRRERRYILPDEPAIIVHPNWAAKSGKFDCSIMSLSVLLDYRLEDNKEHSFEVSLFAELFNEMLQRDFGVRIYKSLLSLPEKEDKKEKDKKSKKDERKDKKEERDDETDEPKPKRRKSGDDKDKKEDRDERKKEDKRKDDSKDDDETEEDNNQDEYDPMEAEEAEDEEDDRDEEEMTKRDDKRDINRYCKERPSKDKEKEKTQMITINRDLLMAFVYFDQSHCGYLLEKDLEEILYTLGLHLSRAQVKKLLNKVVLRESCFYRKLTDTSKDEENHEESESLQEDMLGNRLLLPTPTVKQESKDVEENVGLIVYNGAMVDVGSLLQKLEKSEKVRAEVEQKLQLLEEKTDEDEKTILNLENSNKSLSGELREVKKDLSQLQENLKISET

SEQ ID NO: 916584 - protein, 1150 aa, Homo sapiens; identical to SEQ ID NO: 916570

SEQ ID NO: 916585 - protein, 1086 aa, Homo sapiens
GIRGDTSGKQQLRQLLQQQYSQPQQALYSVQQQLQQPQQTLLTQPAVALPTSLSLSTPQPTAQITVSYPTPRSSQQQTQPQKQRVFTGVVTKLHDTFGFVDEDVFFQLSAVKGKTPQVGDRVLVEATYNPNMPFKWNAQRIQTLPNQNQSQTQPLLKTPPAVLQPIAPQTTFGVQTQPQPQSLLQAQISAASITPLLQTQPQPLLQQPQQKAGLLQPPVRIVSQPQPARRLDPPSRFSGRNDRGDQVPNRKDDRSRERERERRRSRERSPQRKRSRERSPRRERERSPRRVRRVVPRYTVQFSKFSLDCPSCDMMELRRRYQNLYIPSDFFDAQFTWVDAFPLSRPFQLGNYCNFYVMHREVESLEKNMAILDPPDADHLYSAKVMLMASPSMEDLYHKSCALAEDPQELRDGFQHPARLVKFLVGMKGKDEAMAIGGHWSPSLDGPDPEKDPSVLIKTAIRCCKALTGIDLSVCTQWYRFAEIRYHRPEETHKGRTVPAHVETVVLFFPDVWHCLPTRSEWETLSRGYKQQLVEKLQGERKEADGEQDEEEKDDGEAKEISTPTHWSKLDPKTMKVNDLRKELESRALSSKGLKSQLIARLTKQLKVEEQKEEQKELEKSEKEEDEDDDRKSEDDKEEEERKRQEEIERQRRERRYILPDEPAIIVHPNWAAKSGKFDCSIMSLSVLLDYRLEDNKEHSFEVSLFAELFNEMLQRDFGVRIYKSLLSLPEKEDKKEKDKKSKKDERKDKKEERDDETDEPKPKRRKSGDDKDKKEDRDERKKEDKRKDDSKDDDETEEDNNQDEYDPMEAEEAEDEEDDRDEEEMTKRDDKRDINRYCKERPSKDKEKEKTQMITINRDLLMAFVYFDQSHCGYLLEKDLEEILYTLGLHLSRAQVKKLLNKVVLRESCFYRKLTDTSKDEENHEESESLQEDMLGNRLLLPTPTVKQESKDVEENVGLIVYNGAMVDVGSLLQKLEKSEKVRAEVEQKLQLLEEKTDEDEKTILNLENSNKSLSGELREVKKDLSQLQENLKISENMNLQFENQMNKTIRNLSTVMDEIHTVLKKDNVKNEDKDQKSKENGASV

SEQ ID NO: 916586 - protein, 639 aa, Homo sapiens [sequence omitted]

SEQ ID NO: 916587 - protein, 539 aa, Homo sapiens
MDEEEKDDGEAKEISTPTHWSKLDPKTMKVNDLRKELESRALSSKGLKSQLIARLTKQLKVEEQKEEQKELEKSEKEEDEDDDRKSEDDKEEEERKRQEEIERQRRERRYILPDEPAIIVHPNWAAKSGKFDCSIMSLSVLLDYRLEDNKEHSFEVSLFAELFNEMLQRDFGVRIYKSLLSLPEKEDKKEKDKKSKKDERKDKKEERDDETDEPKPKRRKSGDDKDKKEDRDERKKEDKRKDDSKDDDETEEDNNQDEYDPMEAEEAEDEEDDRDEEEMTKRDDKRDINRYCKERPSKDKEKEKTQMITINRDLLMAFVYFDQSHCGYLLEKDLEEILYTLGLHLSRAQVKKLLNKVVLRESCFYRKLTDTSKDEENHEESESLQEDMLGNRLLLPTPTVKQESKDVEENVGLIVYNGAMVDVGSLLQKLEKSEKVRAEVEQKLQLLEEKTDEDEKTILNLENSNKSLSGELREVKKDLSQLQENLKISENMNLQFENQMNKTIRNLSTVMDEIHTVLKKDNVKNEDKDQKSKENGASV

SEQ ID NO: 916588 - protein, 551 aa, Homo sapiens
MAQQEWIMMEAEKDEEEKDDGEAKEISTPTHWSKLDPKTMKVNDLRKELESRALSSKGLKSQLIARLTKQLKVEEQKEEQKELEKSEKEEDEDDDRKSEDDKEEEERKRQEEIERQRRERRYILPDEPAIIVHPNWAAKSGKFDCSIMSLSVLLDYRLEDNKEHSFEVSLFAELFNEMLQRDFGVRIYKSLLSLPEKEDKKEKDKKSKKDERKDKKEERDDETDEPKPKRRKSGDDKDKKEDRDERKKEDKRKDDSKDDDETEEDNNQDEYDPMEAEEAEDEEDDRDEEEMTKRDDKRDINRYCKERPSKDKEKEKTQMITINRDLLMAFVYFDQSHCGYLLEKDLEEILYTLGLHLSRAQVKKLLNKVVLRESCFYRKLTDTSKDEENHEESESLQEDMLGNRLLLPTPTVKQESKDVEENVGLIVYNGAMVDVGSLLQKLEKSEKVRAEVEQKLQLLEEKTDEDEKTILNLENSNKSLSGELREVKKDLSQLQENLKISENMNLQFENQMNKTIRNLSTVMDEIHTVLKKDNVKNEDKDQKSKENGASV

SEQ ID NO: 916589 - protein, 526 aa, Homo sapiens
LAGSPDLDALIPKTMKVNDLRKELESRALSSKGLKSQLIARLTKQLKVEEQKEEQKELEKSEKEEDEDDDRKSEDDKEEEERKRQEEIERQRRERRYILPDEPAIIVHPNWAAKSGKFDCSIMSLSVLLDYRLEDNKEHSFEVSLFAELFNEMLQRDFGVRIYKSLLSLPEKEDKKEKDKKSKKDERKDKKEERDDETDEPKPKRRKSGDDKDKKEDRDERKKEDKRKDDSKDDDETEEDNNQDEYDPMEAEEAEDEEDDRDEEEMTKRDDKRDINRYCKERPSKDKEKEKTQMITINRDLLMAFVYFDQSHCGYLLEKDLEEILYTLGLHLSRAQVKKLLNKVVLRESCFYRKLTDTSKDEENHEESESLQEDMLGNRLLLPTPTVKQESKDVEENVGLIVYNGAMVDVGSLLQKLEKSEKVRAEVEQKLQLLEEKTDEDEKTILNLENSNKSLSGELREVKKDLSQLQENLKISENMNLQFENQMNKTIRNLSTVMDEIHTVLKKDNVKNEDKDQKSKENGASV

SEQ ID NO: 916590 - protein, 639 aa, Homo sapiens [sequence omitted]

SEQ ID NO: 916591 - protein, 225 aa, Homo sapiens
AVTLQDLITCHCGYLLEKDLEEILYTLGLHLSRAQVKKLLNKVVLRESCFYRKLTDTSKDEENHEESESLQEDMLGNRLLLPTPTVKQESKDVEENVGLIVYNGAMVDVGSLLQKLEKSEKVRAEVEQKLQLLEEKTDEDEKTILNLENSNKSLSGELREVKKDLSQLQENLKISENMNLQFENQMNKTIRNLSTVMDEIHTVLKKDNVKNEDKDQKSKENGASV

SEQ ID NO: 916592 - protein, 202 aa, Homo sapiens
DSLLRAHLSRAQVKKLLNKVVLRESCFYRKLTDTSKDEENHEESESLQEDMLGNRLLLPTPTVKQESKDVEENVGLIVYNGAMVDVGSLLQKLEKSEKVRAEVEQKLQLLEEKTDEDEKTILNLENSNKSLSGELREVKKDLSQLQENLKISENMNLQFENQMNKTIRNLSTVMDEIHTVLKKDNVKNEDKDQKSKENGASV

SEQ ID NO: 916593 - protein, 373 aa, Homo sapiens
MGEGGAAAALVAAAAAAAAAAAAVVAGQRRRRLGRRARCHGPGRAAGGKMSKPCAVEAAAAAVAATAPGPEMVERRGPGRPRTDGENVFTGQSKIYSYMSPNKCSGMRFPLQEDNSVTHHEVKCQGKPLAGIYRKREEKRNAGNAVRSAMKSEEQKIKDARRGPLVPFPNQKSEAAEPPKTPPSSCDSTNAAIAKPALKKPIKGKQAPPKKSSRKNATESQTYGFLPYELIESGKEEGMKIDLIDGKGRGVIATKQFSRGDFVVEYHGDLIEITDAKKREALYAQDPSTGCYMYYFQYLSKTYCVDATRETNRLGRLINHSKRGNCQTKLHDIDGVPHLILIASRDIAAGEEPLYDYGDRSKASIEAHPWLKH

SEQ ID NO: 916594 - protein, 152 aa, Homo sapiens
SVAEVLYELIESGKEEGMKIDLIDGKGRGVIATKQFSRGDFVVEYHGDLIEITDAKKREALYAQDPSTGCYMYYFQYLSKTYCVDATRETNRLGRLINHSKRGNCQTKLHDIDGVPHLILIASRDIAAGEEPLYDYGDRSKASIEAHPWLKH

SEQ ID NO: 916595 - protein, 393 aa, Homo sapiens
MGEGGAAAALVAAAAAAAAAAAAVVAGQRRRRLGRRARCHGPGRAAGGKMSKPCAVEAAAAAVAATAPGPEMVERRGPGRPRTDGENVFTGQSKIYSYMSPNKCSGMRFPLQEDNSVTHHEVKCQGKPLAGIYRKREEKRNAGNAVRSAMKSEEQKIKDARRGPLVPFPNQKSEAAEPPKTPPSSCDSTNAAIAKPALKKPIKGKQAPRKKAQGKTQQNRKLTDFYPVRRSSRKSKAELQSEERKRIDELIESGKEEGMKIDLIDGKGRGVIATKQFSRGDFVVEYHGDLIEITDAKKREALYAQDPSTGCYMYYFQYLSKTYCVDATRETNRLGRLINHSKRGNCQTKLHDIDGVPHLILIASRDIAAGEEPLYDYGDRSKASIEAHPWLKH

SEQ ID NO: 916596 - protein, 157 aa, Homo sapiens
FYSAISRMSYGLPSTGITGAKRNGGHCFGLRSCTRPQQTKPNQNGVACAKTLRKHIDSRTDQVLFFLLQISIMKISKSGGICPLKFPLNLLTKFISSCLETFKLQIIMQQRFQPIPGEDTAPMPSRNYSTSTRQNRMPRTWTPSTINNACNTSTLGG

SEQ ID NO: 916597 - protein, 465 aa, Homo sapiens
AGMEILGSSHTFSSRAEAALSLEGALTLVLALAQQLALEIAVFLHLKQELKKERGDLSMCLCLNELQRLQLDKDNVRMWPWWDHWSTPYLYTVMSTQGLLGHLHLMFTRGLGIHLGPGNLQGPNVTLQIGCGLMTYCILLLTYGLVSTWGLVITWELDINLGPGFLVDIWCQVDIWLQEDIRPQVETQYTGGQQVPGGHQDPVGHQATAEHQFPMNTSPQVDTELEVYIRPQIDIQSPGGHDTSIGHQVLRLITKSQVDTTSKMNTRPKVVIQAPNGHQALEDICPQVDITLKVYIRPQMYTQVQGRHESPVKLKAPGGYSSPRWMPRPQVNIKLQVDIMPQVNFRVPAQLNIRLQVDIRSKVNISTQVDIRLQVDIKPKVDTELEVYIRPQVDTQAQVDIGPQVDIRPNVDTQDQDGHQDSGGHLVTGGQQAWCVPCPRVVIRPQFNTSPWVDSSAPGGHPVFS

SEQ ID NO: 916598 - protein, 507 aa, Homo sapiens
MFTECPGGICIAQDCLHSKLTTSLFSTVSNEVPEHPCVSPVSNHVYERRLIEKYIAENGTDPINNQPLSEEQLIDIKVAHPIRPKPPSATSIPAILKALQDEWDAVMLHSFTLRQQLQTTRQELSHALYQHDAACRVIARLTKEVTAAREGAASPLPSPTLGWFCIGAGEPMDLGELVGMTPEIIQKLQDKATVLTTERKKRGKTVPEELVKPEELSKYRQVASHVGLHSASIPGILALDLCPSDTNKILTGGADKNVVVFDKSSEQILATLKGHTKKVTSVVFHPSQDLVFSASPDATIRIWSVPNASCVQVVRAHESAVTGLSLHATGDYLLSSSDDQYWAFSDIQTGRVLTKVTDETSGCSLTCAQFHPDGLIFGTGTMDSQIKIWDLKERTNVANFPGHSGPITSIAFSENGYYLATAADDSSVKLWDLRKLKNFKTLQLDNNFEVKSLIFDQSGTYLALGGTDVQIYICKQWTEILHFTGRGWSWAPGISLGAQARREASLG

SEQ ID NO: 916599 - protein, 516 aa, Homo sapiens
MFTECPGGICIAQDCLHSKLTTSLFSTVSNEVPEHPCVSPVSNHVYERRLIEKYIAENGTDPINNQPLSEEQLIDIKVAHPIRPKPPSATSIPAILKALQDEWDAVMLHSFTLRQQLQTTRQELSHALYQHDAACRVIARLTKEVTAAREGAASPLPSPTLGWFCIGAGEPMDLGELVGMTPEIIQKLQDKATVLTTERKKRGKTVPEELVKPEELSKYRQVASHVGLHSASIPGILALDLCPSDTNKILTGGADKNVVVFDKSSEQILATLKGHTKKVTSVVFHPSQDLVFSASPDATIRIWSVPNASCVQVVRAHESAVTGLSLHATGDYLLSSSDDQYWAFSDIQTGRVLTKVTDETSGCSLTCAQFHPDGLIFGTGTMDSQIKIWDLKERTNVANFPGHSGPITSIAFSENGYYLATAADDSSVKLWDLRKLKNFKTLQLDNNFEVKSLIFDQSGTYLALGGTDVQIYICKQWTEILHFTEHSGLTTGVAFGHHAKFIASTGMDRSLKFYSL

SEQ ID NO: 916600 - protein, 155 aa, Homo sapiens
YNKPHSFVNCPVLDMSLSAVQKETYTLPYFQSAQLDPCLISRREGFLYPRFLSWCTGRIGSHVGLGNEYKVLLSGISSQQMGEPERRWFSPRVELLSGPRSPLTTPAKLCVIPWVDGLPVCWCALPQVCSPQHLAACVFFVDVFLSMSSSCVFAC

SEQ ID NO: 916601 - protein, 170 aa, Homo sapiens
MQVSKNILAVNIQCAMDINQCRQGWFLLEVLRENLFHASLLASNGCWHSLAGRHITSHHLLPPYSNGVLSSPRTIFKIKIMAFLIRWSRGQPPHVRGPGANRAANMLPSIGLWMAELKKLISTLPPPLGLWGSGYEDRGDTPEDFTFSISVLEFLHQAYSLKKLNEYAVF

SEQ ID NO: 916602 - protein, 109 aa, Homo sapiens
KHVGLRTQSRVKCAGRFPQTERSNEKKTKKILKNRVNQFVENCRVVLSRTTTISYKLHQRQMKMKKLSSYITNLCCAPTKPALNFRANYNPHSVSGKATHIIHIQVREC

SEQ ID NO: 916603 - protein, 240 aa, Homo sapiens
MSAAPASNGVFVVIPPNNASGLCPPPAILPTSMCQPPGIMQFEEPPLGAQTPRATQPPDLRPVETFLTGEPKVLGTVQILIGLIHLGFGSVLLMVRRGHVGIFFIEGGVPFWGGACFIISGSLSVAAEKNHTSCLVRSSLGTNILSVMAAFAGTAILLMDFGVTNRDVDRGYLAVLTIFTVLEFFTAVIAMHFGCQAIHAQASAPVIFLPNAFSADFNIPSPAASAPPAYDNVAYAQGVV

SEQ ID NO: 916604 - protein, 147 aa, Homo sapiens
MVRRGHVGIFFIEGGVPFWGGACFIISGSLSVAAEKNHTSCLVRSSLGTNILSVMAAFAGTAILLMDFGVTNRDVDRGYLAVLTIFTVLEFFTAVIAMHFGCQAIHAQASAPVIFLPNAFSADFNIPSPAASAPPAYDNVAYAQGVV

SEQ ID NO: 916605 - protein, 136 aa, Homo sapiens
MVIYSEIWATAVGHGEQPLPGGDFDVRLRPGEEFYRQASAEIGTLSVENFHILEYAFTPDIVVEVLRILVLIGQILFSLAAVFLLCLVIKKYLIGPYYRKLHMESKGNKEILILGISAFIFLMLTVILKLCVIYVI

SEQ ID NO: 916606 - protein, 181 aa, Homo sapiens
LHDYDTPMSTSRVTTNTVYRVKDKHPSLGCKYVSSHSPLIKPTRCRGVDTSALAFPCSLAGKLCRDPYKGYSLDVWVSSREKLSPGTTLSCSVTGVPPAPVVGGAQTALETPPCSPAPDGFVLTVVGLVAVFTFHNHGRTANLYSLHSWLGITTVFLFACQWFLGFAVFLLPWASMWCAAS

SEQ ID NO: 916607 - protein, 179 aa, Homo sapiens
KGGHLKKRLVLKSCCSRPSSTTLHFIVMGRCAFCKHFGATIKCCEEKCTQMYHYPCAAGADTFQDFSHIFLLCPEHIDQAPERSKEDANCAVCDSPGDLLDQFFCTTCGQHYHGMCLDIAVTPLKRAGWQCPECKVCQNCKQSGEDSKMLVCDTCDKGYHTFCLQRIMKSVPTNGWKCK

SEQ ID NO: 916608 - protein, 111 aa, Homo sapiens
RGSRFTFYTDQAPERSKEDANCAVCDSPGDLLDQFFCTTCGQHYHGMCLDIAVTPLKRAGWQCPECKVCQNCKQSGEDSKMLVCDTCDKGYHTFCLQRIMKSVPTNGWKCK

SEQ ID NO: 916609 - protein, 624 aa, Homo sapiens
MLRCPRKLGEFSSRASEVGRAYQDREPSSEQKEPPEEAEPVAAAEPEVPENNGNNSWPHNDTEIANSTPNPKPAASSPETPSAGQQEAKTDQADGPREPPQSARRKRSYKQAVSELDEEQHLEDEELQPPRSKTPSSPCPASKVVRPLRTFLHTVQRNQMLMTPTSAPRSVMKSFIKRNTPLRMDPKEKERQRLENLRRKEEAEQLRRQKVEEDKRRRLEEVKLKREERLRKVLQARERVEQMKEEKKKQIEQKFAQIDEKTEKAKEERLAEEKAKKKAAAKKMEEVEARRKQEEEARRLRWLQQEEEERRHQELLQKKKEEEQERLRKAAEAKRLAEQREQERREQERREQERREQERREQERREQERQLAEQERRREQERLQAERRGTCWPACLPSMCVEERRCEPCLDTAPPACDGLQVLSLAPNPEAHLNTLPIGYGRSKELFWVLRELQEREKALRLQKEQLQRELEEKKKKEEQQRLAERQLQEEQEKKAKEAAGASKALNVTVDMTPQGHRAPPKINPDNYGMDLNSDDSTDDEAHPRKPIPTWARGTPLSQAIIHQYYHPPNLLELFGTILPLDLEDIFKKSKPRYHKRTSSAVWNSPPLQGARVPSSLAYSLKKH

SEQ ID NO: 916610 - protein, 151 aa, Homo sapiens
MVFSFWKIFFKCSFFSFICLKRSITLLLCDENSAIPSNLGFTYFFMKTEDDARLFEHLQGSDAWGALGDSIWEKLQQGLRRLQCIWKVAAPYTQQQLSQCLLENKCENSGDSQKCSGNWDLQISGEPESRPGAGLLAIPVMVAQRDLGTWR

SEQ ID NO: 916611 - protein, 153 aa, Homo sapiens
PLSHPQASAKLVVIMTIVHNLLFLRYWCDAGSPSSCPHLQVEAPTAVALTYWTSPSKAPWNTDMKSRNIAIATLQMPQGIKVWKSLSSENVCLDTRGTITDMLCHEVTKVVARQLTLRLGEKTPEEEGNNRKRRSSNSERHTFFFACPESDSA

SEQ ID NO: 916612 - protein, 132 aa, Homo sapiens
MGCVETPEIGLYRCKLLVKDLGSFHRRKGLLEGNMNSKMHFLKRCPTYSEGPLGAGAFMLDGQSRLSYGCAKKAKQDQKGTCRKEELRIPKFKLGLSAIVKLGTRTQNTELAQSGEVAQVAEGLSFQRMVTG

SEQ ID NO: 916613 - protein, 157 aa, Homo sapiens
MATAVHLHRFSTRPQSVTSRIQPGSDVIVCAEMDEQWGYVGAKSRQRWLFYAYDSLRKTVVAHVFGERTMATLGRLMSLLSPFDVVIWMTDGWPLYESRLKGKLHVISKRYTQRIERHNLNLRQHLARLGRKSLSFSKSVELHDKVIGHYLNIKHYQ

SEQ ID NO: 916614 - protein, 133 aa, Homo sapiens
MTQNPFSLSQWVTEEALSAHLSAHWAAELAGSKLKPQYQASVLGLGLEYSKPHSKRRQTPAQNFLMDFQCMEEGTRTDLSIEGPLRTVSPVSANRALLTPIMISTNTSFQALSAFASCHTPRAVGYIVIYKYL

SEQ ID NO: 916615 - protein, 173 aa, Homo sapiens
TLILHSSELFAELSGEFSGKNGSRITKISVHRYLKMLHCKKTQYSKTNCSSWETAKQRLKTKPPAVGKPKDPVIVEETITVDPRHCRGTPEAVQSSFHPSILLPSSREKQTGYASLWDSDTFTHLKRNSWCQFCDKLCKMPNSDAKESRETREGLKETAQLFQVQLVCSTQGL

SEQ ID NO: 916616 - protein, 134 aa, Homo sapiens
MLNCPSLTAPCCPCRTSPWANIIYVDSWRPPSIYPMAFNIPEQCQTNTTYWYRASHLLKHPDWFHPIISTGMTYRLDRTTASLKASLIMQKRGVMGANGHKQTVRTIHFWHPLRMLLLITESVELGITSEKMCS

SEQ ID NO: 916617 - protein, 404 aa, Homo sapiens
MKVLGRSFFWVLFPVLPWAVQAVEHEEVAQRVIKLHRGRGVAAMQSRQWVRDSCRKLSGLLRQKNAVLNKLKTAIGAVEKDVGLSDEEKLFQVHTFEIFQKELNESENSVFQAVYGLQRALQGDYKDVVNMKESSRQRLEALREAAIKEETEYMELLAAEKHQVEALKNMQHQNQSLSMLDEILEDVRKAADRLEEEIEEHAFDDNKSVKGVNFEAVLRVEEEEANSKQNITKREVEDDLGLSMLIDSQNNQYILTKPRDSTIPRADHHFIKVDIVTIGMLSLPCGWLCTAIGLPTMFGYIICGVLLGPSGLNSIKEVAVPVSEGAVLLETTPLLVSISFKDSISSNVLDQVIQTTFHVLNVTKSIVQVETLGEFGVFFTLFLVGLEFSPEKLRKQKFLSDCQM

SEQ ID NO: 916618 - protein, 251 aa, Homo sapiens
MELLAAEKHQVEALKNMQHQNQSLSMLDEILEDVRKAADRLEEEIEEHAFDDNKSVKGVNFEAVLRVEEEEANSKQNITKREVEDDLGLSMLIDSQNNQYILTKPRDSTIPRADHHFIKVDIVTIGMLSLPCGWLCTAIGLPTMFGYIICGVLLGPSGLNSIKEVAVPVSEGAVLLETTPLLVSISFKDSISSNVLDQVIQTTFHVLNVTKSIVQVETLGEFGVFFTLFLVGLEFSPEKLRKQKFLSDCQM

SEQ ID NO: 916619 - protein, 225 aa, Homo sapiens
AAERKARPLRVRFGPAPPAPPAPATGTWYGRAVGVLCGSCQGRAFQIFPLKEWRRPGQFALEMEGPSLRGPALRLAGLPTQQDCNIQEKIDLEIRMREGIWKLLSLSTQKDQVLHAVKNLMVCNARLMAYTSELQKLEEQIANQTGRCDVKFESKERTACKGKIAISDIRIPLMWKDSDHFSNKERSRRYAIFCLFKMGANVFDTDVVNVDKTITDICFENVTIL

SEQ ID NO: 916620 - protein, 153 aa, Homo sapiens
TVPYSSPMFDLTRSLSGDDVNARPRFLSWCQQQYLDIRGRCSQGKDHKLSLERDHLTTKPVGGLDLALTATEGFEAFSEKAAPGPREDAPPHRMFFTLQEAQILIGLMTRCLRLTMALFVSTVYAVGVLHIINMNYHLWGSFSEELLNAGYES

SEQ ID NO: 916621 - protein, 144 aa, Homo sapiens
MSFIKLFSYDPIGVCPPPPWFLPGLWHTVSCSSSLPQDPAQCLPHHRAVPRTEERVDPALALLGWAAWQVESAGIELAFLFTIFSQVQGGLNTEAFIATAPQVAQENLRAQECKGWHSSGSEAVPSGGGELLLIDVDKTVDKVC

SEQ ID NO: 916622 - protein, 265 aa, Homo sapiens
MCFRTKLSVSWVPLFLLLSRVFSTETDKPSAQDSRSRGSSGQPADLLQVLSAGDHPPHNHSRSLIKTLLEKTGCPRRRNGMQGDCNLCFEPDALLLIAGGNFEDQLREEVVQRVSLLLLYYIIHQEEICSSKLNMSNKEYKFYLHSLLSLRQDEDSSFLSQNETEDILAFTRQYFDTSQSQCMETKTLQKKSGIVSSEGANESTLPQLAAMIITLSLQGVCLGQGNLPSPDYFTEYIFSSLNRTNTLRLSELDQLLNTLWTEVLV

SEQ ID NO: 916623 - protein, 331 aa, Homo sapiens
MCFRTKLSVSWVPLFLLLSRVFSTETDKPSAQDSRSRGSSGQPADLLQVLSAGDHPPHNHSRSLIKTLLEKTGCPRRRNGMQGDCNLCFEPDALLLIAGGNFEDQLREEVVQRVSLLLLYYIIHQEEICSSKLNMSNKEYKFYLHSLLSLRQDEDSSFLSQNETEDILAFTRQYFDTSQSQCMETKTLQKKSGIVSSEGANESTLPQLAAMIITLSLQGVCLGQGNLPSPDYFTEYIFSSLNRTNTLRLSEEPYSVASTTTGPWGELPHYCQCSLKAQGLLNQLLVNAAYPRTHPSGLCLGLSKGCGQQQYHLGTCWKCTSSDPNPESTES

SEQ ID NO: 916624 - protein, 73 aa, Homo sapiens
NGLCLQYYVGKCCKREPILPKQEPRLCKVLSVTSLKTWFISAAATLSLNSSLKLPRDRLSRASELYNRIFQVP

SEQ ID NO: 916625 - protein, 141 aa, Homo sapiens
TSTCHLMSGYFFFSRDRVFLCVQSSLELVAFSSPPAPASQNAVIDRYKPHARTPGVSFHMLICHLYIFFGEVSVNIFGLFFNYIFYCTVLRVICVFGIKVLSENSMKMGVKVTAHIQPTETITAAMVEFYKPEMQCHGRKL

SEQ ID NO: 916626 - protein, 187 aa, Homo sapiens
MDLNGWEKNEARESPVVGSLASNKCLASTRPGAEAGRCGRAAHLAQRAACPADRALVTGFQAQRGKAPRKHTRKWVHQHESRKRFHSQTLWINPKERASKRGSFFKFKEKKIIKGPTKGASTAGDQGEAGAPTPCGKRRRPPRAGRVSQVAGEPTGVYGQGALGALADPWSARPGVETFPEGEDRIV

SEQ ID NO: 916627 - protein, 153 aa, Homo sapiens
MSKSSLKPSPEADAGAMLLVQPEELRRDREVMGGEWCGPWQGLHLQPVSVDLGRGLIDLTNTSRLWTTKQKEHPVTHAHWGFSCKHSPLNTGLGRRDDVDMNKSQLMRKLLRIFYADENTPTFSSHHPDQSAAINIKARPSISKKSMTGYRVI

SEQ ID NO: 916628 - protein, 142 aa, Homo sapiens
MFPFFFFFFLRGQTQSTISGCCCSLTVLLPGFNLFNIFIGELLENTENHGIMLVNMAERISAYQRYTRFPFMPRGDIKTSATGESSEAVCIARSQGLELCDRAAQTSVCLELTVESAARPQKALSAVERCLDSTVGLFPKLA

SEQ ID NO: 916629 - protein, 147 aa, Homo sapiens
MGLEPERRRPLWRATGFSPWERLRICAHSTLDLWGKQQTNFAGCEKPSGLVDCVSSGLHIYPESKMPHLASSAAAPMTFFQVLYISAKLNLMLCPQHNGPLDWDGRWLKACCNNPNKTQPGLPQPSKSGKIENNVGDWDASDTGSHN

SEQ ID NO: 916630 - protein, 284 aa, Homo sapiens
TCAMATSGSYHPFLWQCYLQHTVCGVALLCKGSHKAVTPPELRPVALFRSPTSSLVQGSTLRSSGTPPTYPTSPGPYPLLPEEVNLTSTTRNGAPYQPPELKMFSLQWVADGDGGVAGVYVPFSMPDLALCKQKYGTAPVLALHNLEKPFTLYVAEKQGMALGALTQRLGIIPRPMTYFSKHLDQEVPNFPTFFCLLLSPPNCSNLCLLHRSKIVSTFSVMIKVFFFSQRDENVFLQGPKPGVKLYVGSPSPRKGTYSPCTSLWSNLKTGSWPQDSHGHRRAHP

SEQ ID NO: 916631 - protein, 289 aa, Homo sapiens
TCAMATSGSYHPFLWQCYLQHTVCGVALLCKGSHKAVTPPELRPVALFRSPTSSLVQGSTLRSSGTPPTYPTSPGPYPLLPEEVNLTSTTRNGAPYQPPELKMFSLQWVADGDGGVAGVYVPFSMPDLALCKQKYGTAPVLALHNLEKPFTLYVAEKQGMALGALTQRLGIIPRPMTYFSKHLDQEVPNFPTFFCLLLSPPNCSNLCLLHRSKIVSTFSVMIKVFFFSQRDENVFLQGPKPGVKLYVGSPSPRKGTYSPCTSLWSNLKTGSWPQDSFAGWEVQDKATSI

SEQ ID NO: 916632 - protein, 150 aa, Homo sapiens [sequence omitted]

SEQ ID NO: 916633 - protein, 148 aa, Homo sapiens
MMLPAALDTQASQKKQLQLHQSGGLDPFFAEWVCLEKLHRTANPEILGRLSDVVCGVGPNLGSRRTGLEPESGGMLTDPRSVGVGLALGPTGEVNRQNEINTWDSMPWWVSWNLAKGRAIWHERKSRMEDLHKIKASLITFQGECRSD

SEQ ID NO: 916634 - protein, 164 aa, Homo sapiens
MIPKADERVWAARTKSLSFLQDNTFLQHNRGRGAGLLGRSFYTSGPLLCDIGKLHVQRQQILSGVLDVILECLGFKWELHQPQLFQSETLAKLYLKALAQGTTHPLRELEELLRAQSPKKTKEKSPAKRIIISLKINDPLVTKVGMYIPVYILRMPLNKWSSQI

SEQ ID NO: 916635 - protein, 1187 aa, Homo sapiens
MERRLRALEQLARGEAGGCPGLDGLLDLLLALHHELSSGPLRRERSVAQFLSWGTRTPTGFPRRLPAVALTRTTGPPRPAHSPAHLTLTPILTHALSLSQTPTHAHTHQLVLSPFVSKVKELRLQRDDFEILKVIGRGAFGEVTVVRQRDTGQIFAMKMLHKWEMLKRAETACFREERDVLVKGDSRWVTTLHYAFQDEEYLYLVMDYYAGGDLLTLLSRFEDRLPPELAQFYLAEMVLAIHSLHQLGYVHRDVKPDNVLLDVNGHIRLADFGSCLRLNTNGMVDSSVAVGTPDYISPEILQAMEEGKGHYGPQCDWWSLGVCAYELLFGETPFYAESLVETYGKIMNHEDHLQFPPDVPDVPASAQDLIRQLLCRQEERLGRGGLDDFRNHPFFEGVDWERLASSTAPYIPELRGPMDTSNFDVDDDTLNHPGTLPPPSHGAFSGHHLPFVGFTYTSGSHSPESSSEAWAALERKLQCLEQEKVELSRKHQEALHAPTDHRELEQLRKEVQTLRDRLPEMLRDKASLSQTDGPPAGSPGQDSDLRQELDRLHRELAEGRAGLQAQEQELCRAQGQQEELLQRLQEAQEREAATASQTRALSSQLEEARAAQRELEAQVSSLSRQVTQLQGQWEQRLEESSQAKTIHTASETNGMGPPEGGPQEAQLRKEVAALREQLEQAHSHRPSGKEEALCQLQEENRRLSREQERLEAELAQEQESKQRLEGERRETESNWEAQLADILSWVNDEKVSRGYLQALATKMAEELESLRNVGTQTLPARPLDHQWKARRLQKMEASARLELQSALEAEIRAKQGLQERLTQVQEAQLQAERRLQEAEKQSQALQQELAMLREELRARGPVDTKPSNSLIPFLSFRSSEKDSAKDPGISGEATRHGGEPDLRPEGRRSLRMGAVFPRAPTANTASTEGLPAKVSAQRGKQGGGTKQFCQAEWALWGHSTCIVASRHNWGGGGGDELACRHRLAGTRRSLLPGSAPVSFLTPQGWGMGPWEALGNGCPPPQPGSHTLRPRSFPSPTKCLRCTSLMLGLGRQGLGCDGESPHPLCSSHGPSLRLLLSHNLCPTGPTLPVPPDLLRTALGVHPETGTGTAYEGFLSVPRPSGVRRGWQRVFAALSDSRLLLFDAPDLRLSPPSGALLQVLDLRPVLAPLWRWSHGSGVVCLPVWPTPCC

SEQ ID NO: 916636 - protein, 1099 aa, Homo sapiens
MERRLRALEQLARGEAGGCPGLDGLLDLLLALHHELSSGPLRRERSVAQFLSWGTRTPTGFPRRLPAVALTRTTGPPRPAHSPAHLTLTPILTHALSLSQTPTHAHTHQLVLSPFVSKVKELRLQRDDFEILKVIGRGAFGEVTVVRQRDTGQIFAMKMLHKWEMLKRAETACFREERDVLVKGDSRWVTTLHYAFQDEEYLYLVMDYYAGGDLLTLLSRFEDRLPPELAQFYLAEMVLAIHSLHQLGYVHRDVKPDNVLLDVNGHIRLADFGSCLRLNTNGMVDSSVAVGTPDYISPEILQAMEEGKGHYGPQCDWWSLGVCAYELLFGETPFYAESLVETYGKIMNHEDHLQFPPDVPDVPASAQDLIRQLLCRQEERLGRGGLDDFRNHPFFEGVDWERLASSTAPYIPELRGPMDTSNFDVDDDTLNHPGTLPPPSHGAFSGHHLPFVGFTYTSGSHSPESSSEAWAALERKLQCLEQEKVELSRKHQEALHAPTDHRELEQLRKEVQTLRDRLPEMLRDKASLSQTDGPPAGSPGQDSDLRQELDRLHRELAEGRAGLQAQEQELCRAQGQQEELLQRLQEAQEREAATASQTRALSSQLEEARAAQRELEAQVSSLSRQVTQLQGQWEQRLEESSQAKTIHTASETNGMGPPEGGPQEAQLRKEVAALREQLEQAHSHRPSGKEEALCQLQEENRRLSREQERLEAELAQEQESKQRLEGERRETESNWEAQLADILSWVNDEKVSRGYLQALATKMAEELESLRNVGTQTLPARPLDHQWKARRLQKMEASARLELQSALEAEIRAKQGLQERLTQVQEAQLQAERRLQEAEKQSQALQQELAMLREELRARGPVDTKPSNSLIPFLSFRSSEKDSAKDPGISGEATRHGGEPDLRPEGRRSLRMGAVFPRAPTANTASTEGLPAKPGSHTLRPRSFPSPTKCLRCTSLMLGLGRQGLGCDGESPHPLCSSHGPSLRLLLSHNLCPTGPTLPLPPDLLRTALGVHPETGTGTAYEGFLSVPRPSGVRRGWQRVFAALSDSRLLLFDAPDLRLSPPSGALLQVLDLRPVLAPLWRWSHGSGVVCLPVWPTPCC

SEQ ID NO: 916637 - protein, 209 aa, Homo sapiens
MKATRHGGEPDLRPEGRRSLRMGAVFPRAPTANTASTEGLPAKPGSHTLRPRSFPSPTKCLRCTSLMLGLGRQGLGCDGESPHPLCSSHGPSLRLLLSHNLCPTGPTLPLPPDLLRTALGVHPETGTGTAYEGFLSVPRPSGVRRGWQRVFAALSDSRLLLFDAPDLRLSPPSGALLQVLDLRPVLAPLWRWSHGSGVVCLPVWPTPCC

SEQ ID NO: 916638 - protein, 233 aa, Homo sapiens
MQAGDRLVAVAGESVEGLGHEETVSRIQGQGSCVSLTVVDPEADRFFSMNSLSPLLFLENTEAPASPRGSSSASVVETEDPSLEDTSVHSVLLGSRQCFLYPGPGGSYGFRLSCVASGPRLFISQVTPGGSAARAGLQVGDVILEVNGYPVGGQNDLERLQQLPEAEPPLCLKLAARSLRGLEAWIPPGAAEPDQRDSDTTDHRLAQVLPPFLQAHLPAEGVVGGLRQVPEGV

SEQ ID NO: 916639 - protein, 596 aa, Homo sapiens
DPAMEKAADLQDTASLTLKFKFNPKLGIDNPVLSLAEDHDPYDPWSLERPRFCLLSKEEGKSFGFHLQQELGRAGHVVCRVDPGTSAQRQGLQEGDRILAVNNDVVEHEDYAVVVRRIRASSPRVLLTVLARHAHDVARAQLGEDAHLCPTLGPGVRPRLCHIVKDEGGFGFSVTHGNQGPFWLVLSTGGAAERAGVPPGARLLEVNGLWQSGQQVTLLVAGPEVEEQCRQLGLPLAAPLAEGWALPTKPRCLHLEKGPQGFGFLLREEKGLDGRPGEWEPWGRWGKVGLGVGTQAYIHLSVHRRGVPVCALALGRLFPFTLGSVPWCVHSGLGELERSSEDVYAPGQFLWEVDPGLPAKKAGMQAGDRLVAVAGESVEGLGHEETVSRIQGQGSCVSLTVVDPEADRFFSMNSLSPLLFLENTEAPASPRGSSSASVVETEDPSLEDTSVHSVLLGSRQCFLYPGPGGSYGFRLSCVASGPRLFISQVTPGGSAARAGLQVGDVILEVNGYPVGGQNDLERLQQLPEAEPPLCLKLAARSLRGLEAWIPPGAAEPDQRDSDTTDHRLAQVLPPFLQAHLPAEGVVGGLRQVPEGV

SEQ ID NO: 916640 - protein, 242 aa, Homo sapiens
PQLAFEFARTYVKTSITFRIKAMMLFSYKLLRPVLEFSVLFPHHIQEAPTSIRKGQEEKQQDCYTAGSHEAPGIQIDNQLDTAISNPFLVLRGFFDCHLLHTAGLQALLAPTDDGAAGHRRSSPPRRRGGGAETLLSSQTGSRLDRGALHISDGAAGQRRSPHPRRWAAGQRRSSLPRRDDGQEEALLTSQTGRPGRGAPHIPDNGQPGRDAPHFLDGVVAGQRLPSRRFGRPRQAAGRWRL

SEQ ID NO: 916641 - protein, 152 aa, Homo sapiens
MLQMKVLLLIPLKYKHKFIPHLHFFNKYEIANHDTSAILKNYSTQLHCHAVFQLNLKSYVYMEYHISLLEVKIGVSVGRCTDSHAPKYNTNPTSSQLTSHRHHLLRTYFYFTELQLRARQRRAVWRLQNIEDNLCPQRQHPTEERIKKDENK

SEQ ID NO: 916642 - protein, 135 aa, Homo sapiens
MPNYELSGTLSPKGANAGSVTQVVNTGGSYKVVVFLHAGGENRLGKFSDRYYGIFPRIPLLACRRWRSVLLAITSFIISNFDPLRTVGRKDPEGPAAVSPPRIERPWQGVGGVTGHGSPQLAKWLRKILHHYYCE

SEQ ID NO: 916643 - protein, 237 aa, Homo sapiens
MIKSDSLRELSAAWLVWQLLSVSRPHPTSPAPCLLRWRSILSQWSHNTCAPLEFLQRVNECPVVAGKKCHKPDSVKQQKLTHSPGGQKSAIRTRDEEGQTEARDEEGPTQARDEEGPAQTRDEEGPAQTREEEGPAQAREEEGPAQAREEEGPSTAPQPLVSCCVAWYQSVAQGLGTLALKAPGAHHIMPCVPDPKFLKRLKICMADSLTTESLLIHDLLDDTDLDRPTCNCTSDHS

SEQ ID NO: 916644 - protein, 154 aa, Homo sapiens
WVPTPKRHRERARAASMLSPLNTRQLLRREGNFYAHCGVQGAVCGIRVGSGGFRKLRKEDRVPKVESRESKICGVNSALDLVWFQGAIFYITTREGCSDESLGQAAIPQVPPTSAVEVALGDAHDLWGQKCWLLTNVMFWVEECSERMLTNFRW

SEQ ID NO: 916645 - protein, 132 aa, Homo sapiens
MTCFILFPRVVATVGGQLASWLHSMVCKQLGGSLKGGVGSVALNVQFEFPKLKAHRVIGNQEKNYCGLSREGRKVLDTRLLERSTCAMPQLHSVSSSFQLVVSLQKAHHLYLYSGASPVSWGMRLINCGDLA

SEQ ID NO: 916646 - protein, 143 aa, Homo sapiens
IEKLLMEKCSELSAVTERCLQVENEHVLKSMKACVSETLSMLGQHFGQLLELALTREVQALVRKIDASDNIYTTESTTGNLFSLTQEGAPLCRIIAKEGGVVALFKVCRQDSFRCLYPQALRTLASICCVEEGVHQLEKEFHS

SEQ ID NO: 916647 - protein, 235 aa, Homo sapiens
MYNVHRFCGSAVLEGTARCLSLTQQESATSALRLAWWNMGHRPNLGQPPHPNAVAAALHASLCPANRGTCPLGKPGYPGCLWFQPLLLFPGCLCSPDGPFPRAVFTSAGKGPLQTDLGRGRVPPRDQQTPKSGPCPRAPVASNRQSGGSAPPPAAERRSLDREAGARGRARGALPENLTLRSSSGSRSDALFQSHFNCTGPCGSLLHRPDPCGSLRSDLPGPPGWMKKTHLGLKP

SEQ ID NO: 916648 - protein, 192 aa, Homo sapiens
MYNVHRFCGSAVLEGTARCLSLTQQESATSALRLAWWNMGHRPNLGQPPHPNAVAAALHASLCPANRGTCPLGKPGYPGCLWFQPLLLFPGCLCSPDGPFPRAVFTSAGKGPLQTDLGRGRVPPRDQQTPKSGPCPRAPVASNRQSGGSAPPPAAERRSLDREAGARGRARGALPENLTLRSSSGSRSDALC

SEQ ID NO: 916649 - protein, 150 aa, Homo sapiens
TTLSLRGRAFRGVRMLCLPLSAGLCWRVAWPSPIAVALRVVGFGGLGRGCSFLSLSLAPSGSVEDGTASGPAPPPPCTLPAVAADESGDGTRVQSNGGSVPGSGFCRLRKDRGGTVSRLGDTGHRGPTTATAAPAAARAATTHASLLQPA

SEQ ID NO: 916650 - protein, 135 aa, Homo sapiens
MKTKEHSIVEDNVACDGFGEDVCFHKFIKYGVLSTSILIEDLPNWNNLHITGGLQKLVKITAMNENVTLTDQPSIEFWSAVTTVFLMLPESFSEGNLSTEIAGLSYLDYQTAYGNRFDAKADTNISLSLIKLDIK

SEQ ID NO: 916651 - protein, 138 aa, Homo sapiens
PPVPRPRGMSRVLTASLPCLTSGKSLCGLQDSRCIGDFSLKNIFSMDAPGSSHGSYQSGLCPGDAVILMEAIRVVFGQEMQSSSSKLSELSLARRCSHPHGSYLSGLLAGRCSHPQISSCFSHLSLLHGLSKENTCIG

SEQ ID NO: 916652 - protein, 189 aa, Homo sapiens
MCDIIWESPAVAMETHLPGLGKLPHLSATFFQTGHGRLALIWVPDRGELKPEGEEIKSQGGVNFKQPRAGAGTGTPAPPHQGQITSCYEGATCYRDKAYETIEPSTIGREEKNRKIRPHGPRRNALLSGPNRESGTTSLQRKRQAAGKELDAGAWWGQCPPSTHSGVGREESPVEIPKTLRLSLQGSIT

SEQ ID NO: 916653 - protein, 179 aa, Homo sapiens
MDQGHQNPWGGTEAGIGLLLPLPRGRGIPVFIKVEDNCIGGKKQLTTWILNSYLFFSQEPTGKNAPGGKDRKGGTREEGGLHTSAAGKARIAPPTPACCTRGWELPWTLWSWSSCRIESSIMAGGEIFHLEESRSYWLDRELLGEQKWNSVSGKGELDFGGDVAALGITGRSLPQPGSL

SEQ ID NO: 916654 - protein, 145 aa, Homo sapiens
LLFMLLMVAEIFLSKNYITQYCLLLPVPDTGVRPNHVLGVFIDLSHGSTVLSGCTACEHLLSKLTIFQLRLIQQTIHASRNQRITLGPCYYLGKRLIMTLLDWLHKKSQIFLPFLSRLGLWAGSTKPRKGPRDRKRKYRDDSSEA

SEQ ID NO: 916655 - protein, 788 aa, Homo sapiens
MGPTQGPRAPLEFGGPLGAAALLLLLPATMFHLLLAARSGPARLLGPPASLPGLEVLWSPRALLLWLAWLGLQAALYLLPARKVAEGQELKDKSRLRYPINGAYGDGPSRWSFQALVLTALLVGLGMSAGLPLGALPEMLLPLAFVATLTAFIFSLFLYMKAQVAPVSALAPGGNSGNPIYDFFLGRELNPRICFFDFKYFCELRPGLIGWVLINLALLMKEAELRGSPSLAMWLVNGFQLLYVGDALWHEEAVLTTMDITHDGFGFMLAFGDMAWVPFTYSLQAQFLLHHPQPLGLPMASVICLINATGYYIFRGANSQKNTFRKNPSDPRVAGLETISTATGRKLLVSGWWGMVRHPNYLGDLIMALAWSLPCGVSHLLPYFYLLYFTALLVHREARDERQCLQKYGLAWQEYCRRQEELALFPGPVKMISLFSSHGLFPGTAQGLCQVPQCCQRVAFLVGRALAQQDAGDLVHSPSCAQGPRRVLACFQHVGCRLQGFFRRGEDLLGTQGSGNAEQCGTEVREQRVVTAVIQGESMRVGEQHIGQLEAHERRDWAAAQADYRGDAGGYDGRAGPRDISKNPLGGRGLRGGGIFHRIRRGPRRGELQLRGVTTRGIIQLLQKLRSGSAVPPPRPPWRQQPPGLTAAQQPLEGSFFARRQPLPECHASGSSAASSRAHYSEGRCNALAGPPPPGRSHRARPAPWQLAPRSTCERTPVVVRNFRGFFDYFRFAARPTARCGESRPRSRASGTSPALCDDARSEKMGLASASPVPRLPLVVTPKRGPII

SEQ ID NO: 916656 - protein, 752 aa, Homo sapiens
MGPTQGPRAPLEFGGPLGAAALLLLLPATMFHLLLAARSGPARLLGPPASLPGLEVLWSPRALLLWLAWLGLQAALYLLPARKVAEGQELKDKSRLRYPLPEMLLPLAFVATLTAFIFSLFLYMKAQVAPVSALAPGGNSGNPIYDFFLGRELNPRICFFDFKYFCELRPGLIGWVLINLALLMKEAELRGSPSLAMWLVNGFQLLYVGDALWHEEAVLTTMDITHDGFGFMLAFGDMAWVPFTYSLQAQFLLHHPQPLGLPMASVICLINATGYYIFRGANSQKNTFRKNPSDPRVAGLETISTATGRKLLVSGWWGMVRHPNYLGDLIMALAWSLPCGVSHLLPYFYLLYFTALLVHREARDERQCLQKYGLAWQEYCRRQEELALFPGPVKMISLFSSHGLFPGTAQGLCQVPQCCQRVAFLVGRALAQQDAGDLVHSPSCAQGPRRVLACFQHVGCRLQGFFRRGEDLLGTQGSGNAEQCGTEVREQRVVTAVIQGESMRVGEQHIGQLEAHERRDWAAAQADYRGDAGGYDGRAGPRDISKNPLGGRGLRGGGIFHRIRRGPRRGELQLRGVTTRGIIQLLQKLRSGSAVPPPRPPWRQQPPGLTAAQQPLEGSFFARRQPLPECHASGSSAASSRAHYSEGRCNALAGPPPPGRSHRARPAPWQLAPRSTCERTPVVVRNFRGFFDYFRFAARPTARCGESRPRSRASGTSPALCDDARSEKMGLASASPVPRLPLVVTPKRGPII

SEQ ID NO: 916657 - protein, 775 aa, Homo sapiens
MGPTQGPRAPLEFGGPLGAAALLLLLPATMFHLLLAARSGPARLLGPPASLPGLEVLWSPRALLLWLAWLGLQAALYLLPARKVAEGQELKDKSRLRYRFQALVLTALLVGLGMSAGLPLGALPEMLLPLAFVATLTAFIFSLFLYMKAQVAPVSALAPGGNSGNPIYDFFLGRELNPRICFFDFKYFCELRPGLIGWVLINLALLMKEAELRGSPSLAMWLVNGFQLLYVGDALWHEEAVLTTMDITHDGFGFMLAFGDMAWVPFTYSLQAQFLLHHPQPLGLPMASVICLINATGYYIFRGANSQKNTFRKNPSDPRVAGLETISTATGRKLLVSGWWGMVRHPNYLGDLIMALAWSLPCGVSHLLPYFYLLYFTALLVHREARDERQCLQKYGLAWQEYCRRQEELALFPGPVKMISLFSSHGLFPGTAQGLCQVPQCCQRVAFLVGRALAQQDAGDLVHSPSCAQGPRRVLACFQHVGCRLQGFFRRGEDLLGTQGSGNAEQCGTEVREQRVVTAVIQGESMRVGEQHIGQLEAHERRDWAAAQADYRGDAGGYDGRAGPRDISKNPLGGRGLRGGGIFHRIRRGPRRGELQLRGVTTRGIIQLLQKLRSGSAVPPPRPPWRQQPPGLTAAQQPLEGSFFARRQPLPECHASGSSAASSRAHYSEGRCNALAGPPPPGRSHRARPAPWQLAPRSTCERTPVVVRNFRGFFDYFRFAARPTARCGESRPRSRASGTSPALCDDARSEKMGLASASPVPRLPLVVTPKRGPII

SEQ ID NO: 916658 - protein, 637 aa, Homo sapiens
ERQQVQQKSVRGHPHPMGTAPLMVSTERFSQQYSSCSTIFLDDSTAIQHYLTMTIISTSQEDPQFSVPPTANTPTPVCKLSMRWSNLFTSEKGSDPDKERKAPENHADTIGSGRAIPIKQGMLLKRSGKWLKTWKKKYVTLCSNGVLTYYSSLGDYMKNIHKKEIDLRTSTIKVPGKWPSLATSACAPISSSKSNGLSKDMDTGLGDSICFSPGISSTTSPKLNPPPSPHANKKKHLKKKSTNNFMIVSATGQTWHFEATTYEERDAWVQAIQSQILASLQSCKSSKSKSQLTSQSEAMALQSIQNMRGNAHCVDCETQNPKWASLNLGVLMCIECSGIHRSFGTRLSRVRSLELDDWPVELRKVMSSIGNELANSIWEGSSQGQTKPSIKSTREEKEWWIRSKYEEKLFLAPLPCTELSLGQQLLRATTDEDLQTAILLLAHGSREEVNETWECGPGAAPDGVDVMARDAHGNTALTYARQASSQECINVLLQPRHIQESSSRSLHWGESLRPLPQACTPEFATVCCHTMLGGLGKLAAEGLAHRTEKATEGASEDPGLLSTWAGGIWGRLVHAVEEVVKEVVGHAKETGEKAIAEAIKKAQESGDKKMKEITETVTNTVTNAITHAAESLDKLGQ

SEQ ID NO: 916659 - protein, 145 aa, Homo sapiens
AKGMGWGMKEALLNTPDGAWTTLQIFVHLCTSISWTLKRAVSLNRGSQQADKNSNSQIKVKMTPSLWAEGQDLQWKLGYVLGAAFKQEKARWKLPWPGDRFTEEMRLGQISSCHSALFLLTTTPGRCIYLRFLVSSKRSRSSSLA

SEQ ID NO: 916660 - protein, 145 aa, Homo sapiens; identical to SEQ ID NO: 916659

SEQ ID NO: 916661 - protein, 213 aa, Homo sapiens
MSKSESPKEPEQLRKLFIGGLSFETTDESLRSHFEQWGTLTDCVVMRDPNTKRSRGFGFVTYATVEEVDAAMNARPHKVDGRVVEPKRAVSREDSQRPGAHLTVKKIFVGGIKEDTEEHHLRDYFEQYGKIEVIEIMTDRGSGKKRGFAFVTFDDHDSVDKIVIQKYHTVNGHNCEVRKALSKQEMASASSSQRGRSGSGNFGGGRGGGFRWE

SEQ ID NO: 916662 - protein, 320 aa, Homo sapiens
MSKSESPKEPEQLRKLFIGGLSFETTDESLRSHFEQWGTLTDCVVMRDPNTKRSRGFGFVTYATVEEVDAAMNARPHKVDGRVVEPKRAVSREDSQRPGAHLTVKKIFVGGIKEDTEEHHLRDYFEQYGKIEVIEIMTDRGSGKKRGFAFVTFDDHDSVDKIVIQKYHTVNGHNCEVRKALSKQEMASASSSQRGRSGSGNFGGGRGGGFGGNDNFGRGGNFSGRGGFGGSCGGGGYGGSGDGYNGFGNDGSNFEGGGSYNDLGNYTNQSSNFGPMKGGNFGGRSSGPYGGGGQYFAKHKTQGGYGGSSSSSSYGSGRRF

SEQ ID NO: 916663 - protein, 320 aa, Homo sapiens; identical to SEQ ID NO: 916662

SEQ ID NO: 916664 - protein, 321 aa, Homo sapiens
MSKSESPKEPEQLRKLFIGGLSFETTDESLRSHFEQWGTLTDCVVMRDPNTKRSRGFGFVTYATVEEVDAAMNARPHKVDGRVVEPKRAVSREDSQRPGAHLTVKKIFVGGIKEDTEEHHLRDYFEQYGKIEVIEIMTDRGSGKKRGFAFVTFDDHDSVDKIVIQKYHTVNGHNCEVRKALSKQEMASASSSQRGRSGSGNFGGGRGGGFLVGMTTFGRGGNFSGRGGFGGSCGGGGYGGSGDGYNGFGNDGSNFEGGGSYNDLGNYTNQSSNFGPMKGGNFGGRSSGPYGGGGQYFAKHKTQGGYGGSSSSSSYGSGRRF

SEQ ID NO: 916665 - protein, 488 aa, Homo sapiens
PGRRPRAKPRRRGSALRLRVRAAARPLLPARPRPQGRILQRAVPTEARGGFSPTKMNWAPATCWALLLAAAFLCDSGAAKGGRGGARGSARGGVRGGARGASRVRVRPAQRYGAPGSSLRVAAAGAAAGAAAGAAAGLAAGSGWRRAAGPGERGLEDEEDGVPGGNGTGPGIYSYRAWTSGAGPTRGPRLCLVLGGALGALGLLRPYGLAGLGDHIWPPARAIPQDPPAWAPPSSLAHGLGAPLGAGAAGCPCGPAIHRPAHAASACHLPPRGDHGPCPTHSRMLGSPQPKRQLPVAPGTATANPAEEASLGTAQAARCTHFPEGSPFFGSSCSRPRNRAWADECVGYGAAEAASQQRGATEHQGPGGGCCGTVRPPPQRGSRSFCTGCPWPQVLQHLRSSGRTKHAELLRDVHWEAWCPLPPAWALQLGSLELARLWGAREHSTLVTSMELLDRPGGGPAGRRGPASRNPAAHGGKSAGSHGLPQDS

SEQ ID NO: 916666 - protein, 1099 aa, Homo sapiens
LPPPSFLLSSLCLSSPADQVRNSYYIGADGSLRLLLANGMEVALQTEPHLLAGTVNPTVGKRNVTLPIDNGLNLVEWRQRKEQARGQVTVFGRRLRVHNRNLLSLDFDRVTRTEKIYDDHRKFTLRILYDQAGRPSLWSPSSRLNGVNVTYSPGGYIAGIQRGIMSERMEYDQAGRITSRIFADGKTWSYTYLEKAGVCLPASLALPYRRPIIHGQAQPGGLSGLYLTHVTKRKCSGKSATEGMGSQEASGWIREIAWQVVSMVLLLHSQRQYIFEFDKNDRLSSVTMPNVARQTLETIRSVGYYRNIYQPPEGNASVIQDFTEDGHLLHTFYLGTGRRVIYKYGKLSKLAETLYDTTKVSFTYDETAGMLKTINLQNEGFTCTIRYRQIGPLIDRQIFRFTEEGMVNARFDYNYDNSFRVTSMQAVINETPLPIDLYRYDDVSGKTEQFGKFGVIYYDINQIITTAVMTHTKHFDAYGRMKEVQYEIFRSLMYWMTVQYDNMGRVVKKELKVGPYANTTRYSYEYDADGQLQTVSINDKPLWRYSYDLNGNLHLLSPGNSARLTPLRYDIRDRITRLGDVQYKMDEDGFLRQRGGDIFEYNSAGLLIKAYNRAGSWSVRYRYDGLGRRVSSKSSHSHHLQFFYADLTNPTKVTHLYNHSSSEITSLYYDLQGHLFAMELSSGDEFYIACDNIGTPLAVFSGTGLMIKQILYTAYGEIYMDTNPNFQIIIGYHGGLYDPLTKLVHMGRRDYDVLAGRWTSPDHELWKHLSSSNVMPFNLYMFKNNNPISNSQDIKCFMTDVNSWLLTFGFQLHNVIPGYPKPDMDAMEPSYELIHTQMKTQEWDNSKSILGVQCEVQKQLKAFVTLERFDQLYGSTITSCQQAPKTKKFASSGSVFGKGVKFALKDGRVTTDIISVANEDGRRVAAILNHAHYLENLHFTIDGVDTHYFVKPGPSEGDLAILGLSGGRRTLENGVNVTVSQINTVLNGRTRRYTDIQLQYGALCLNTRYGTTLDEEKARVLELARQRAVRQAWAREQQRLREGEEGLRAWTEGEKQQVLSTGRVQGYDGFFVISVEQYPELSDSANNIHFMRQSEMGRR

SEQ ID NO: 916667 - protein, 1099 aa, Homo sapiens; identical to SEQ ID NO: 916666

SEQ ID NO: 916668 - protein, 1099 aa, Homo sapiens; identical to SEQ ID NO: 916666

SEQ ID NO: 916669 - protein, 147 aa, Homo sapiens
MPTPWEGMLMKKRIGNPSAMKNYLSPTSGRETSHSYICSPRFRTVPFVSFPSEGCQEQLFQLRKAGDSTALETRFLAMNQTTKASYKYWLLEKQEEVACKVQRTKVPRRCFTREKAPGSRVKPIDDSMAVGSPDSRLALIDNGSEEG

SEQ ID NO: 916670 - protein, 765 aa, Homo sapiens
SLTQQQGSVCPFESEIYEAGAEDRMAGAPMAAAVQPAEVTVEVGEDLHMHQVRDREMPEALEFNLSANPEASTIFQRNSQTDALEFNPSANPEASTIFQRNSQTDVVEIRRSNCTNRVSTERFSQQYSSCSTIFLDDSTAIQHYLTMTIISDADRSLSIPDEQLHSFAVSTVHIMKKRNGGGSLNNYSSSIPPTPSTSQEDPQFSVPPTANTPTPICKRSMRWSNLFTSEKGSDPDKERKAPENHADTIGSGRAIPIKQGMLLKRSGKWLKTWKKKYVTLCSNGVLTYYSSLGDYMKNIHKKEIDLRTSTIKVPGKWPSLATSACAPISSSKSNGLSKDMDTGLGDSICFSPSISSTTSPKLNPPPSPHANKKKHLKKKSTNNFMIVSATGQTWHFEATTYEERDAWVQAIQSQILASLQSCESSKSKSQLTSQSEAMALQSIQNMRGNAHCVDCETQNPKWASLNLGVLMCIECSGIHRSLGTRLSRVRSLELDDWPVELRKVMSSIGNELANSIWEGSSQGQTKPSIKSTREEKERWIHSKYEEKLFLAPLPCTELSLGQQLLRATADEDLQTAILLLAHGSREEVNETCGEGDGCTALHLACRKGNVVLEQLLIWYGVDVMARDAHGNTALTYARQASSQECINVLLQYGCPDECLLLPKTKRLWQDGGFPNARLRCLMKAAADGSRCREIGDAGGKAGLEKGEDKPPEEWLLEWEEEKQKEKELKIGEAVVPVLNSAKHLKKEGNSNTCYNMDEHRGHYAK

SEQ ID NO: 916671 - protein, 743 aa, Homo sapiens
SLTQQQGSVCPFESEIYEAGAEDRMAGAPMAAAVQPAEVTVEVGEDLHMHQVRDREMPEALEFNLSANPEASTIFQRNSQTDALEFNPSANPEASTIFQRNSQTDVVEIRRSNCTNLVTLEIPHHITQRDADRSLSIPDEQLHSFAVSTVHIMKKRNGGGSLNNYSSSIPPTPSTSQEDPQFSVPPTANTPTPICKRSMRWSNLFTSEKGSDPDKERKAPENHADTIGSGRAIPIKQGMLLKRSGKWLKTWKKKYVTLCSNGVLTYYSSLGDYMKNIHKKEIDLRTSTIKVPGKWPSLATSACAPISSSKSNGLSKDMDTGLGDSICFSPSISSTTSPKLNPPPSPHANKKKHLKKKSTNNFMIVSATGQTWHFEATTYEERDAWVQAIQSQILASLQSCESSKSKSQLTSQSEAMALQSIQNMRGNAHCVDCETQNPKWASLNLGVLMCIECSGIHRSLGTRLSRVRSLELDDWPVELRKVMSSIGNELANSIWEGSSQGQTKPSIKSTREEKERWIHSKYEEKLFLAPLPCTELSLGQQLLRATADEDLQTAILLLAHGSREEVNETCGEGDGCTALHLACRKGNVVLEQLLIWYGVDVMARDAHGNTALTYARQASSQECINVLLQYGCPDECLLLPKTKRLWQDGGFPNARLRCLMKAAADGSRCREIGDAGGKAGLEKGEDKPPEEWLLEWEEEKQKEKELKIGEAVVPVLNSAKHLKKEGNSNTCYNMDEHRGHYAK

SEQ ID NO: 916672 - protein, 150 aa, Homo sapiens
VLPSVHGIPGDGRLREKTHLQVNMEYGCRHLFSQICYVIAQRLMVFKAIELLNGKAEIPDQPHSTWCYDDVSLPLCFGNAFMEGLLEVKRFTVLGLHHSVDKPEVPQSWKSPDRHYCIKYRAQDSDTCSVTLVSAGSSATQVHASGTPNI

SEQ ID NO: 916673 - protein, 116 aa, Homo sapiens
MTFLNIPSIMMTFRLEICAICPVKVSQPWEENHLFSLPPSAPVGRCLPEPEEYLCSFQLPHSKQSLTTQPHFLLSQPVGTNTKRPGATETLIHEPRRKKLCGSCPALLCNHALPVY

SEQ ID NO: 916674 - protein, 179 aa, Homo sapiens
MLPCFILSIPRSPCSERASAISVLLILEKWVVGEQWVTIPIKKNPWELLRLCGPPVLSMKRPLMALPCHQPMAGTDHSAGRTSLSCRNVGDESVEEAQLGSPSPSHTVAAMPATEPWGGRRTITVHDLKGIRDQYMLPMHKQSKLNREKMDTHGAATDWERIWLFYYFIMLSCDGPDDI

SEQ ID NO: 916675 - protein, 195 aa, Homo sapiens [sequence omitted]

SEQ ID NO: 916676 - protein, 174 aa, Homo sapiens
ILQQSLRREKSSFQMKADPMDQPQVGLRGSTGLLHSAKAALAVTTVTLATTNGGEHAALGSAGPSPTRFSSGSFHITYFEALFDVLQLVHIPSQIRKELNRIISTFALYVPILKNNTGKRLLGRDKIFLCCPDWSETPGLKTYEYPALEAKNKLCAQKKFIFLIFLQLNGTGFN

SEQ ID NO: 916677 - protein, 337 aa, Homo sapiens
MSDSQDPTTSPVVTTQVELGGCSRQGGGNGFLRFRQHQEVQAFLSLLEDSFVQEFLSKDPCFQISDKYLLAMVLVYFQRAHLKLSEYTHSSLFLALYLANDMEEDLEGPKCEIFPWALGKDWCLRVGKFLHQRDKLWARMGFRAVVSRQCCEEVMAKEPFHWAWTRDRRPHHGGVQRVCPQVPVRLPRGPGLSPPHCSPCGLPQHCSSHLLKPVSSKCPSLTSECHRPPSQNYLSRVKNAWGGDFLIVLPPQMQLEPGTYSLRNNGNTSRQVQLHDSLFRETLQMLGNAPEAVAMGCNQYTFPLLDLGNYFFIPEGQSSGNSVLQTLTGGPPKVLGL

SEQ ID NO: 916678 - protein, 367 aa, Homo sapiens
LYKRTRGGVGVMLWAIPELGSPCPISISYEMSDSQDPTTSPVVTTQVELGGCSRQGGGNGFLRFRQHQEVQAFLSLLEDSFVQEFLSKDPCFQISDKYLLAMVLVYFQRAHLKLSEYTHSSLFLALYLANDMEEDLEGPKCEIFPWALGKDWCLRVGKFLHQRDKLWARMGFRAVVSRQCCEEVMAKEPFHWAWTRDRRPHHGGVQRVCPQVPVRLPRGPGLSPPHCSPCGLPQHCSSHLLKPVSSKCPSLTSECHRPPSQNYLSRVKNAWGGDFLIVLPPQMQLEPGTYSLRNNGNTSRQVQLHDSLFRETLQMLGNAPEAVAMGCNQYTFPLLDLGNYFFIPEGQSSGNSVLQTLTGGPPKVLGL

SEQ ID NO: 916679 - protein, 1076 aa, Homo sapiens
MRAALWTLGLGPLLLNLWAVPIGGPGALRLAYRHSTCDGVVLVRHHGAWGYVCNQEWTLAEASVVCRQLGCGPAVGAPKYVPLPGEMAQPWLHNVSCRGNESSLWECSLGSWCQSPCPHAWVVVALCSNGTFRELRLVKGRSPCAGLPEIRNVNGVDRLCVLHVEEAMVFCRELGCGPVLQAPRRDVGVVRKYLACRGTEPTIRSCRLDNNFRSGCDLRLDAEVVCSGHTEARLVGGEHPCAGRLEVTWGTVCDAALDLATAHVVCRELQCGAVVSTPEGARFGRGSGPVWTEAFRCAGNESLLFHCPRGRGSQCGHGHDAGLRCSEFRMVNGSSSCEGRVEFQVQGSWAPLCATHWDIADATVLCHQLNCGNAVAAPGGGHFGDGDAAIWPDAFHCEGTESYLWNCPVSTLGAPACAPGNTASAVCSGLAHALRLREGQSRCDGRVEVSLDGVWGRVLDDAWDLRGAGVVCRQLGCRGAQQAYDAPAPSRGSVQVALSRVRCLGTETRLTQCNVSATLQEPAGTSRDAGVVCSGEVGTASPMARRHGIPGALTLSLHREPQGAAGRGAGALHGGAWGTVCDDAWDLRDAHVVCRQLGCGRALSALGAAHFGAGAGRIWLDELGCQGHESALWQCPSAGWGRHDWRHKEDAGVFCSESVALRLRGGTCCCAGWLDVFYNGTWGAMCSNALKDLSLSIICKQLGCGVWGVGLAGEQALPLCGHRDRLGGQHRVPQAAQLHSVAMPFPPMAPALLRPSRAGLDYLCRAWAWGSLGSTAFLVKLLWAPKLSELLFNPQDCQRTGHRLLGSPSTAPPGSAAQVPLCPCRCPPSHPGPAPAVTAAPFAEEGALRVRGGEDRCSGRVELWHAGSWGTVCDDGWDLADAEVVCRQLGCGRAVAALGAAAFGPGSGPVWLDEVGCRGSEASLWGCPAERWGRGDRAHEEDAGVRCWEPGPGPPLPAAPFRTFWVVSVVLGSLLGLLLLGLMAFLILPRVTQAMQRALKTELNPRRFPQAAHWGPLGSIMWFAGKGRWPGMGGHWESGYVAVVPPSQPTASCLFAAWLGFLPGVAVLPCLWPHPH

SEQ ID NO: 916680 - protein, 168 aa, Homo sapiens
AFLRMRQPRSQSTTAFPVSPTRETMHVSTIRDSQRISHLSKGGGPQIQFEIQFLLTLKPDLSLLPHKFCANMGITLGSKHPHSSSQGCGPDDYSILGLKFSLRGRNSGMQRGGCDTLMTRTDHPWTGKETMHYEPEENVTFARISVKMAGPVVKTSLVLKVEGLSGIQ

SEQ ID NO: 916681 - protein, 210 aa, Homo sapiens
MVSGRFYLSCLLLGSLGSMCILFTIYWMQYWRGGFAWNGSIYMFNWHPVLMVAGMVVFYGGGPLALPHSIMMGKLPLGVVSPYVKMSSGGYTDPLKFYATSYCTAYGREDFKPRVGSHVGTGYKSIFQPVVSCQASLEALDNPARGEQAQDHFQSVASKTYRPLEVVTASIPCPGDAPDQLRLWAGEAQCGPPTKELVKVEVTGHGAATL

SEQ ID NO: 916682 - protein, 176 aa, Homo sapiens
MVSGRFYLSCLLLGSLGSMCILFTIYWMQYWRGGFAWNGSIYMFNWHPVLMVAGMVVFYGGASLVYRLPQSWVGPKLPWKLLHAALHLMAFVLTVVGLVAVFTFHNHGRTANLYSLHSWLGITTVFLFACQWFLGFAVFLLPWASMWLRSLLKPIHVFFGARHPLSVHRIRHFGHY

SEQ ID NO: 916683 - protein, 166 aa, Homo sapiens
MAVFSYIAELFLGGILDYGPLDYSITLLLFLLPLTAMQLILHLATSVSDQNMNQIMSCLFFTTFLWLPISLASNLEERMMSYSAVTERRSLMSQLGLPQQNTTDWAVQATEIFSQLWRLEVLQVLSGLGFGHMNLGEHKYSVHDSDNSGEYLKIKSAQVGPKALKT

SEQ ID NO: 916684 - protein, 643 aa, Homo sapiens
MSRSRHARPSRLVRKEDVNKKKKNSQLRKTTKGANKNVASVKTLSPGKLKQLIQERDVKKKTEPKPPVPVRSLLTRAGAARMNLDRTEVLFQNPESLTCNGFTMALRSTSLSRRLSQPPLVVAKSKKVPLSKGLEKQHDCDYKILPALGVKHSENDSVPMQDTQVLPDIETLIGVQNPSLLKGKSQETTQFWSQRVEDSKINIPTHSGPAAEILPGPLEGTRCGEGLFSEETLNDTSGSPKMFAQDTVCAPFPQRATPKVTSQGNPSIQLEELGSRVESLKLSDSYLDPIKSEHDCYPTSSLNKVIPDLNLRNCLALGGSTSPTSVIKFLLAGSKQATLGAKPDHQEAFEATANQQEVSDTTSFLGQAFGAIPHQWELPGADPVHGEALGETPDLPEIPGAIPVQGEVFGTILDQQETLGMSGSVVPDLPVFLPVPPNPIATFNAPSKWPEPQSTVSYGLAVQGAIQILPLGSGHTPQSSSNSEKNSLPPVMAISNVENEKQVHISFLPANTQGFPLAPERGLFHASLGIAQLSQAGPSKSDRGSSQVSVTSTVHVVNTTVVTMPVPMVSTSSSSYTTLLPTLEKKKRKRCGVCEPCQQKTNCGECTYCKNRKNSHQICKKRKCEELKKKPSVVVPLEDLMET

SEQ ID NO: 916685 - protein, 344 aa, Homo sapiens
MSTLERSYLLKINGKVAERPQHMLMRVSVGIHKEDIDAAIETYNLLSERWFTHASPTLFNAGTNRPQLSSCFLLSMKDDSIEGIYDTLKQCALISKSAGGIGVAVSCIRATGSYIAGTNGNSNGLVPMLRVYNNTARYVDQGGNKRPGAFAIYLEPWHLDIFEFLDLKKNTGKEEQRARDLFFALWIPDLFMKRVETNQDWSLMCPNECPGLDEVWGEEFEKLYASYEKQGRVRKVVKAQQLWYAIIESQTETGTPYMLYKDSCNRKSNQQNLGTIKCSNLCTEIVEYTSKDEVAVCNLASLALNMYVTSEHTYDFKKLAEVTKVVVRNLNKIIDINYYPVPEV

SEQ ID NO: 916686 - protein, 491 aa, Homo sapiens
MHVIKRDGRQDRVMFDKITSRIQKLCYGLNMDFVDPAQITMKVIQGLYSGVTTVELDTLAAETAATLTTKHPDYAILAARIAVSNLHKETKKVFSDVMEDLYNYINPHNGKHSPMVAKSTLDIVLANKDRLNSAIIYDRDFSYNYFGFKTLERSYLLKINGKVAERPQHMLMRVSVGIHKEDIDAAIETYNLLSERWFTHASPTLFNAGTNRPQLSSCFLLSMKDDSIEGIYDTLKQCALISKSAGGIGVAVSCIRATGSYIAGTNGNSNGLVPMLRVYNNTARYVDQGGNKRPGAFAIYLEPWHLDIFEFLDLKKNTGKEEQRARDLFFALWIPDLFMKRVETNQDWSLMCPNECPGLDEVWGEEFEKLYASYEKQGRVRKVVKAQQLWYAIIESQTETGTPYMLYKDSCNRKSNQQNLGTIKCSNLCTEIVEYTSKDEVAVCNLASLALNMYVTSEHTYDFKKLAEVTKVVVRNLNKIIDINYYPVPEV

SEQ ID NO: 916687 - protein, 327 aa, Homo sapiens
SPSSWDPGRTMKWLLLLGLVALSECIMYKVPLIRKKSLRRTLSERGLLKDFLKKHNLNPARKYFPQWKAPTLVDEQPLENYLDMEYFGTIGIGTPAQDFTVLFDTGSSNLWVPSVYCSSLACTNHNRFNPEDSSTYQSTSETVSITYGTGSMTGILGYDTVQDSPGKCPINGRSEEATADGHTNGRTKKFMSSPLTFHSDDKSGSVVIFGGIDSSYYTGSLNWVPVTVEGYWQITVDSITMNGETIACAEGCQAIVDTGTSLLTGPTSPIANIQSDIGASENSDGDMVVSCSAISSLPDIVFTINGVQYPVPPSAYILQVRRLWTIH

SEQ ID NO: 916688 - protein, 217 aa, Homo sapiens
SIVRSLRSESESHPSICSAMLSTVPSTEGLHCHGDFENVWSMGGLVKTMWVVDERIPDKQPYPVPLQGRVLWGIYDSPQRIQTIFIFLQLATTPNFIKGHGKKACTVKREKNSRCQVSDYWGEIHLRFVYIFCFSDFGRRPRTVHTTGLAVLYESSHNRDALKVLLSSTVKAQPSHPLEKGENGHQQCRVHFISISLVCDLSFPFEDKRRVMSVPLV

SEQ ID NO: 916689 - protein, 254 aa, Homo sapiens
LAQSGSCYTLRSEIFRTMPCTYQHPFLWSLCPLPPASPSFRVPRSQVPVRSDMAHGIWFFISWVKALPGDATATRSPVLPAMVNPTMFFNIAINSEALGHVSFELFADKFPKTENFRALSTGEKGFGYKGSCFHRIILGLLCQGGDFTCHNGTGGKSVYREKFDDENFILKHTGPGILSMKHTGPGILSMANAGPNTNDSQIFICTAKTEWLDGKHVVSGRVKEGIKIVEAMKRYGSKNGKSRKKITTADCGQL

SEQ ID NO: 916690 - protein, 137 aa, Homo sapiens
TQMRDGRMTSFRTQMSDGRMTSFRTQMRKGFLPDADEGRADDSFRTHLSMCTCCSCQADDIRNAHQLEGEEMLGGLLLHRVHPPERPSAHGGQCVEVLQALIHNSSSTVKVDNLDCLSIPASSVLHITIPNGMLLCL

SEQ ID NO: 916691 - protein, 137 aa, Homo sapiens; identical to SEQ ID NO: 916690

SEQ ID NO: 916692 - protein, 155 aa, Homo sapiens
MNEDTDAALGNKNTPMSQEPSKDCTTTKKLNQTCRLLQQGGQLQVLAQALALCEAGPGAPQAAFTAGTGEHVALRSLEMPATTGLQGGSHSPGSGSSQQGEARQQEQTPLSLRGLGQPSWAPQEYTDAWVRSHSLGGRNCTRKSGAPACSVEQEA

SEQ ID NO: 916693 - protein, 135 aa, Homo sapiens
MSAASAQALIRLECVHSFLKLEFFNQNETYCSDSNGKQPNYTPGNYSFQPHVRSPLLNSVLLVILPPVTGTGFANILTRRRGETGSGRDGISLCCPRWFQTPSLKQSSCLSLLKPWDYKHKPPPPARSHDSLHLC

SEQ ID NO: 916694 - protein, 1114 aa, Homo sapiens
MEEKQQIILANQDGGTVAGAAPTFFVILKQPGNGKTDQGILVTNQDACALASSVSSPVKSKGKICLPADCTVGGITVTLDNNSMWNEFYHRSTEMILTKQGRRMFPYCRYWITGLDSNLKYILVMDISPVDNHRYKWNGRWWEPSGKAEPHVLGRVFIHPESPSTGHYWMHQPVSFYKLKLTNNTLDQEGHIILHSMHRYLPRLHLVPAEKAVEVIQLNGPGVHTFTFPQTEFFAVTAYQNIQITQLKIDYNPFAKGFRDDGLNNKPQRDGKQKNSSDQEGNNISSSSGHRVRLTEGQGSEIQPGDLDPLSRGHETSGKGLEKTSLNIKRDFLGFMDTDSALSEVPQLKQEISECLIASSFEDDSRVASPLDQNGSFNVVIKEEPLDDYDYELGECPEGVTVKQEETDEETDVYSNSDDDPILEKQLKRHNKVDNPEADHLSSKWLPSSPSGVAKAKMFKLDTGKMPVVYLEPCAVTRSTVKISELPDNMLSTSRKDKSSMLAELEYLPTYIENSNETAFCLGKESENGLRKHSPDLRVVQKYPLLKEPQWKYPDISDSISTERILDDSKDSVGDSLSGKEDLGRKRTTMLKIATAAKVVNANQNASPNVPGKRGRPRKLKLCKAGRPPKNTGKSLISTKNTPVSPGSTFPDVKPDLEDVDGVLFVSFESKEALDIHAVDGTTEESSSLQASTTNDSGYRARISQLEKELIEDLKTLRHKQVIHPGLQEGGNSESSLKNRSAFCSDKLDEYLENEGKLMETSMGFSSNAPTSPVVYQLPTKSTSYVRTLDSVLKKQSTISPSTSYSLKPHSVPPVSRKAKSQNRQATFSGRTKSSYKSILPYPVSPKQKYSHVILGDKVTKNSSGIISENQANNFVVPTLDENIFPKQISLRQAQQQQQQQQGSRPPGLSKSQVKLMDLEDCALWEGKPRTYITEERADVSLTTLLTAQASLKTKPIHTIIRKRAPPCNNDFCRLGCVCSSLALEKRQPAHCRRPDCMFGCTCLKRKVVLVKGGSKTKHFQRKAAHRDPVFYDTLGEEAREEEEGIREEEEQLKEKKKRKKLEYSLLSVMLFIYGATTMDTARSEELLGSLRQEDHFSQEATVSHDCATTWATE

SEQ ID NO: 916695 - protein, 484 aa, Homo sapiens
SSTRIVRPFWKPSATVCTELGSGKKGNPGGACWAQVLSSFGSRVPNTVMDQNSVPEKAQNEADTNNADRFFRSHSSPPHHRPGHSRALHHYELHHHGVPHQRGESHHPPEFQDFHDQALSSHVHQSHHHSEARNHGRAHGPTGFGLAPSQGAVPSHRSYGEDYHDELQRDGRRHHDGSQYSGFHQQSDSHYHRGSHHGRPQYLGENLSHYSSGVPHHGEASHHGGSYLPHGPNPYSESFHHSEASHLSGLQHDESQHHQVPHRGWPHHHQVHHHGRSRHHEAHQHGKSPHHGETISPHSSVGSYQRGISDYHSEYHQGDHHPSEYHHGDHPHHTQHHYHQTHRHRDYHQHQDHHGAYHSSYLHGDYVQSTSQLSIPHTSRSLIHDAPGPAASRTGVFPYHIAHPRGSAHSMTRSSSTIRSRVTQMSKKVHTQDISTKHSEDWGKEEGQFQKRKSESLLGPPCQLLLPGAGSRPDLGPALSFRRS

SEQ ID NO: 916696 - protein, 340 aa, Homo sapiens
MPEWPPCLSVAPALVITMAAGKGAPLSPSAENRWRLSEPELGRGCKPVLLEKTNRLGPEAAVGRAGRDVGSAELALLVAPGKPRPGKPLPPKTRGEQRQSAFTELPRMKDRQVDAQAQEREHDDPTGQPGAPQLTQNIPRGPAGSKVFSVWPSGARSEQRSAFSKPTKRPAERPELTSVFPAGESADALGELSGLLNTTDLACWGRLSTPKLLVGDLWNLQALPQNAPLCSTFLGAPTLWLEHTQAQVPPPSSSSTTSWALLPPTLTSLGLSTQNWCAKCNLSFRLTSDLVFHMRSHHKKEHAGPDPHSQKRREEALACPVCQEHFRERHHLSRHMTSHS

SEQ ID NO: 916697 - protein, 233 aa, Homo sapiens
MKDRQVDAQAQEREHDDPTGQPGAPQLTQNIPRGPAGSKVFSVWPSGARSEQRSAFSKPTKRPAERPELTSVFPAGESADALGELSGLLNTTDLACWGRLSTPKLLVGDLWNLQALPQNAPLCSTFLGAPTLWLEHTQAQVPPPSSSSTTSWALLPPTLTSLGLSTQNWCAKCNLSFRLTSDLVFHMRSHHKKEHAGPDPHSQKRREEALACPVCQEHFRERHHLSRHMTSHS

SEQ ID NO: 916698 - protein, 340 aa, Homo sapiens; identical to SEQ ID NO: 916696

SEQ ID NO: 916699 - protein, 1284 aa, Homo sapiens
MGSTQFELPGGFFYSVRGKPPTQASIMVDTPSHTKLKCPRLTSVCCAGSKNFKPVDVSLLGSMGETQCNCKHPSRHWENFPSGKELKLFLFVFVAEPIFYFGDVEYSVDESAGYVEVQVWRTGTDLSKSSSVTVRSRKTDPPSADAGTDYVGISRNLDFAPGVNMQPVRVVILDDLGQPALEGIEKFELVLRMPMNAALGEPSKATVSINDSVSDLPKMQFKERIYTGSESDGQIVTMIHRTGDVQYRSSVRCYTRQGSAQVMMDFEERPNTDTSIITFLPGETEKPCILELMDDVLYEEVEELRLVLGTPQSNSPFGAAVGEQNETLIRIRDDADKTVIKFGETKFSVTEPKEPGESVVIRIPVIRQGDTSKVSIVRVHTKDGSATSGEDYHPVSEEIEFKEGETQHVVEIEVTFDGVREMREAFTVHLKPDENMIAEMQLTKAIVYIEEMSSMADVTFPSVPQIVSLLMYDDTSKAKESAEPMSGYPVICITACNPKYSDYDKTGSICASENINDTLTRYRWLISAPAGPDGVTSPMREVDFDTFFTSSKMVTLDSIYFQPGSRVQCAARAVNTNGDEGLELMSPIVTISREEGLCQPRVPGVVGAEPFSAKLRYTGPEDADYTNLIKLTVTMPHIDGMLPVISTRELSNFELTLSPDGTRVGNHKCSNLLDYTEVKTHYGFLTDATKNPEIIGETYPYQYSLSIRGSTTLRFYRNLNLEACLWEFVSYYDMSELLADCGGTIGTDGQVLNLVQSYVTLRVPLYVSYVFHSPVGVGGWQHFDLKSELRLTFVYDTAILWNDGIGSPPEAELQGSLYPTSMRIGDEGRLAVHFKTEAQFHGLFVLSHPASFTSSVIMSADHPGLTFSLRLIRSEPTYNQPVQQWSFVSDFAVRDYSGTYTVKLVPCTAPSHQEYRLPVTCNPREPVTFDLDIRFQQVSDPVAAEFSLNTQMYLLSKKSLWLSDGSMGFGQESDVAFAEGDIIYGRVMVDPVQNLGDSFYCSIEKVFLCTGADGYVPKYSPMNAEYGCLADSPSLLYRFKIVDKAQPETQATSFGNVLFNAKLAVDDPEAILLVNQPGSDGFKVDSTPLFQKPRYKFLTQGSKVEGNTGSCHNTEQMPQISRGAYTANLCRSKSKDNANRGIGKRSVEYHSLVSQGKPQSTTKSRKKREIRSTPSLAWEIGAENSRGTNIQHIALDRTKRQIPHGRAPPDGILPWELNSPSSAVSLVTVVGGTTVGLLTICLTVIAVLMCRGKESFRGKDAPKGSSSSEPMVPPQSHHNDSSEV

SEQ ID NO: 916700 - protein, 661 aa, Homo sapiens
NGGPLTLGDDRCHRKTGMLPVISTRELSNFELTLSPDGTRVGNHKCSNLLDYTEVKTHYGFLTDATKNPEIIGETYPYQYSLSIRGSTTLRFYRNLNLEACLWEFVSYYDMSELLADCGGTIGTDGQVLNLVQSYVTLRVPLYVSYVFHSPVGVGGWQHFDLKSELRLTFVYDTAILWNDGIGSPPEAELQGSLYPTSMRIGDEGRLAVHFKTEAQFHGLFVLSHPASFTSSVIMSADHPGLTFSLRLIRSEPTYNQPVQQWSFVSDFAVRDYSGTYTVKLVPCTAPSHQEYRLPVTCNPREPVTFDLDIRFQQVSDPVAAEFSLNTQMYLLSKKSLWLSDGSMGFGQESDVAFAEGDIIYGRVMVDPVQNLGDSFYCSIEKVFLCTGADGYVPKYSPMNAEYGCLADSPSLLYRFKIVDKAQPETQATSFGNVLFNAKLAVDDPEAILLVNQPGSDGFKVDSTPLFQKPRYKFLTQGSKVEGNTGSCHNTEQMPQISRGAYTANLCRSKSKDNANRGIGKRSVEYHSLVSQGKPQSTTKSRKKREIRSTPSLAWEIGAENSRGTNIQHIALDRTKRQIPHGRAPPDGILPWELNSPSSAVSLVTVVGGTTVGLLTICLTVIAVLMCRGKESFRGKDAPKGSSSSEPMVPPQSHHNDSSEV

SEQ ID NO: 916701 - protein, 142 aa, Homo sapiens
MTTTNLVKGHLLPPSQGTGPRELHVGRNEPSGCLAEGIHGQVSETLLTLPLTFAKKQVWFYPEWPSVVSHDSIHIVISRGKALVKGLMTGHCRHELDLSCSTAWYFPSTVFCPDTAKAKGSAGTATVTLCWEVNSSISSGTA

SEQ ID NO: 916702 - protein, 142 aa, Homo sapiens; identical to SEQ ID NO: 916701

SEQ ID NO: 916703 - protein, 142 aa, Homo sapiens; identical to SEQ ID NO: 916701

SEQ ID NO: 916704 - protein, 142 aa, Homo sapiens; identical to SEQ ID NO: 916701

SEQ ID NO: 916705 - protein, 337 aa, Homo sapiens
MWSPPLGGVECNDVTAPLGTVRTSKEEKKHEIHLVQKLGRSLFKLKNQTAEPLAPQPPAGPSKVEQLQDETNHLRKELESVGRQLQAEVENNQMLSLLNRRQEERLREQEERLREQEERLCEQEERLCEQEERLREQEERLCEQEKLPGQERLLEEVEKLLKQERRQEEQERLLERERLLDEVEELLEQERLRQQDERLWQQETLRELERLRELERMLELGWEALYEQRAEPRSGFEELNNENKSTLQLEQQVKELEKSGGAEEPRGSESAAAARPVPGAPVPQGAWMCGQAGWTPQEHPGLSGEAVGTGEAAGGAGEAACHSFRAAENRELNITII

SEQ ID NO: 916706 - protein, 232 aa, Homo sapiens
PHSSAEAEPPRTFFMDILIIYKCKLYLLLALFFWQEHVNETPGAWSCLEFVPSDVQTCSEFLPSGGVRGLAGSGVKLRTFALDIKVLQVPTRLRSPAGFTQWIPHRAAGGAACQFPAVCPHSSALGCRWDWAHGVGGGARLGGSGHTGAHGAQQLLAEVLSPSLPEASGAGQLLRVRGPPSPRPSGTRAGLQAPRAALVPARASPSTPPCKLKEPAPALASTERGSHSAASS

SEQ ID NO: 916707 - protein, 170 aa, Homo sapiens
MVLAAAAELECSSLGRSSAPDKSGSNSTVGPQSQAAQQPCQPQTLPPTLWSLAPHPGLCSFSDTKCQCQDCFPSRISKRLLTPSQSVFSLSLGTHQGQGKNKPQCADNGTSLFLSGLRLALWQIKQNLGKTSDPEAPPSVGIPSRIGNSETCKCQNPHLGICYFSLCEST

SEQ ID NO: 916708 - protein, 203 aa, Homo sapiens
EIYSEPNMSDHGPSHSPQGVLRTCAQGERRDNSKRGLPGYRKKVRKKERKKVRKKERKKERKKERERERERERKKERKKERKKEKEREREKEERKKKEREKEKKERKEKRKRERKKKERRRKREKERGKKGRKEKKEKERRKERKKEKERRKEGKKKEKERKKEKESSGVIKVQILGQCLKLTDSQFSNFWQWPFKNSTLHIS

SEQ ID NO: 916709 - protein, 754 aa, Homo sapiens
MLEGLYMWILKSSRTVTKVMLKKQSHPKNPNDKHRSKKCKDPKPRVKKLKYHQYIPPDQKGEKNEPQMDSNYARLLQQQQLFLQLQILSQQKQHYNYQTILPAPFKYGGAHAILNAGAYHTVSEVHMVRVACIPFQFLSSKIGSEFLQVRNAFSQLFIQICLLLEHQNSTRCSEKSKAREGPFQAQGNAVSTSTEEGIDKKWKTKIEYSQCLRGLEAGQKTLLNTADRQRSASEQAADAVRPKYKKKQLDAGVEGTSGDNEELWQQNSNILRKIKPISNSDLIVKYLNLKHQGMEMKRERTLYPVTILRAGRPEPLNDKNSNSGNSALNNATPNTPRQNTSTPVSELKTELKLRGLPVSGTKPDLIERLKPYQEVNSSGLAAGGIVAVSSSAIVTSNPEVTVALPVTTLHNTVTSSVSTLKAELPPTGTSNATRVENVHSPLPISPSPSEQSSLSTDDTNMADTFTEIMTMMSPSQFLSSSPLRMTNNEDSLSPTSSTLSNLELDAAEKDRKLQEKEKQIEELKRKLEQEQKLVEVLKMQLEVEKRGQQQRPLEAQPSAPGHSVKSDQKHGSLGSSIKDEASLPDCSSSRQPIPVASHAGQPPPAVVAQPQALLTTQTAQLLLPVSIQGSSVTSVQLPVGSLKLQTSPQAGMQTQPQIATAAQIPTAALASGLAPTVPQTQDTFPQHVLSQPQQVRKVFTNSASSNTVLPYQRHPAPAVQQPFINKASNSVLQSRNAPLPSLQNGPNTPNKVTL

SEQ ID NO: 916710 - protein, 658 aa, Homo sapiens
MLEGLYMWILKSSRTVTKVMLKKQSHPKNPNDKHRSKKCKDPKPRVKKLKYHQYIPPDQKGEKNEPQMDSNYARLLQQQQLFLQLQILSQQKQHYNYQTILPAPFKYGGAHAILNAGAYHTVSEVHMVRVACIPFQFLSSKIGSEFLQVRNAFSQLFIQICLLLEHQNSTRCSEKSKAREGPFQAQGNAVSTSTEEGIDKKWKTKIEYSQCLRGLEAGQKTLLNTADRQRSASEQAADAVRPKYKKKQLDAGVEGTSGDNEELWQQNSNILRKIKPISNSDLIVKYLNLKHQGMEMKRERTLYPVTILRAGRPEPLNDKNSNSGNSALNNATPNTPRQNTSTPVSELKTELKLRGLPVSGTKPDLIERLKPYQEVNSSGLAAGGIVAVSSSAIVTSNPEVTVALPVTTLHNTVTSSVSTLKAELPPTGTSNATRVENVHSPLPISPSPSEQSSLSTDDTNMADTFTEIMTMMSPSQFLSSSPLRMTNNEDSLSPTSSTLSNLELDAAEKDRKLQEKEKQIEELKRKLEQEQKLVEVLKMQLEVEKRGQQQRPLEAQPSAPGHSVKSDQKHGSLGSSIKDEASLPDCSSSRQPIPVASHAGQPPPAVVAQPQALLTTQTAQLLLPVSIQGSSVTSVQLPVGSLKLQGMHTPLASSNWDS

SEQ ID NO: 916711 - protein, 193 aa, Homo sapiens
YRCLRAFPFRLLWLQVHCPRGVTSRLRPMAIEFEGTWGGIEWRGLLEDKCLGSRKENEGKEMDSTADLDLGTIQLRVSEKFDHLKPSSLNSSKSLSVQLCSIAGPSAAGLLDCAGGPLQTLFAWVSAAESAEQRILLNSKCCCLIVPLEVSNQRGTCLCEVSQNPCWENHYPLQSSVGNAKITCLLHRSHWEL

SEQ ID NO: 916712 - protein, 178 aa, Homo sapiens
MVQCTESCSFLLLLSLFFGFDSWKKMSWAILAVSPNLPSAPCTAVSNERLGIIHHPFPTWPVTGPTSQMGRSWLAGRPQKGPLSENEVEHQGELLSFEQAKRNVSCNCGWSLLPGKIGRRYCFNNQRKQETSHLMTPIFPCCHKCVFSFLNITWSHCSFRWVRGLADFKNGAVDLPEC

SEQ ID NO: 916713 - protein, 169 aa, Homo sapiens
LVLLTCMHDASGRKNGENKTQSPLQIPATHMEVRREDPFLCGPFLPKLRATRKSDPLQGQEASRAWRLTGANNLAKTICPINKASGKHPGPHNGANLLGTHFPSGVLARIPLPSRWRSEPHGKHEKECRLPLRSKTSPQQKRVTSVLQPRRTEFSQQLNSPPELVLPTD

SEQ ID NO: 916714 - protein, 181 aa, Homo sapiens
MLLRPGFFPRWLLAALSLVSLVLFFWTLFWLDDGLPGMEDSPPDSSTPPYAGSGNGQAGKSWTRVRHEPQGICHCKQVSHVSDPRHTMDNQALGHPSGGLGATWHSLHQLAERLSDWRGQKNHHERASQNTVDGQTQRSGLGLRMCISDKYSGIAVAAGLGPCHEEHGSAQLSLITCLLID

SEQ ID NO: 916715 - protein, 1044 aa, Homo sapiens
MCFLQQSCQQQTFPESLSRTANKGTGPRESQQDSEQADRSQSDSAGQRARGQVPESLSRTASKRTGPRESQQDSEQADRSQRVSAGQRASGQVPENLSRTASKRTGPRESQQDSEQADRSQRVSAGQRASGQVPESQQDSEQGDRSQRVSAGQRASGQVPESLSRTASKGTGPRESQQDSEQADRFQRVSAGQRASRQVPESLSRTASKQTGPRVSARQRARGQVPESLSRTASKRTGPRECQQDSEQADRSQRVSAGQRARGQVPESLSRTASKRTGPRECQQDSEQADRSQSLSKTASKGTGPRESQQDSEQADRSQRVSAGQRARGQVPESLSRTASKGTGPRESQQDSEQADRSQRVSAGQRASGQVPESLSRTASKPTGPRESQQDSEQADRSQSLSKTASKGTGPRESQQDSEQADRSQRVSAGQRASGQVPESLSRTASKGTGPRESQQDSEQADRSQRVSAGQRASGQVPESLSRTASKRTGPRESQQDSEQADRSQSVSAGQRARGQVPESVSRTASKGTGPRESQQDSEQGDRSQRVSAGQRARGQVPESLSRTASKRTGPRASQQDSEQGDRSQRVSAGQRARGQVPESLSRTASKGTGPRESQQDSEQGDRSQRVSAGQRASRQVPERLSRTASKGTGPRESQQDSEQADRSQRVSAGQRASGQQDSEQADRSQRVSAGQRASGQVPESLSRTASKRTGPRESQQDSEQGDRSQRVSAGQRARGQVPESLSRTASKGTGPRESQQDSEQADRSQRVSAGQRASRQVPESLSRTASKRTGPRVSARQRARGQVPESLSRTASKRTGPRESQQDSEQADRSQRVSAGQRASRQVPESLSRTASKRTGPRVSARQRARGQVPESVSRTASKRTGPRESQQDSEQGDRSQRVSAGQRASGQVPESVSRTASKRTGPRVSARQRARGQVPESLSRTASKRTGPRESQQDSEQGDRKHPHGHGHQSESRPPHASVLLSHQPGPFRHRLHIHGQQQSGGCAVHSGQPHPEPLTYSLRNKDLSEQCGSIHLGGAAGRVFV

SEQ ID NO: 916716 - protein, 147 aa, Homo sapiens
TSGAPVRAMFSKHDHMTSDDTWRRKAILLKSPHSPGPGSPIPPLPYTGECYLLIAQMRKLKLVSNSHTAEEGPRGPRAVHTLPPWTYRTSRWHRSTQATERPCPAPCHALCVHPGPRAVAARSPPLPTIRVLPPFAVILSRTLSRQL

SEQ ID NO: 916717 - protein, 480 aa, Homo sapiens
MWSPPLGGVECNDVTSATGIYGEGRASSTTLEDLESQYQELAVALDSSSAIISQLTENINSLVRTSKEEKKHEIHLVQKLGRSLFKLKNQTAEPLAPEPPAGPSKVEQLQDETNHLRKELESVGRQLQAEVENNQMLSLLNRRQEERLREQEERLREQEERLREQEDRLHEQEERLREQEERLCEQEERLREHEERLCEQEERLCEQEERLREQEERLCEQEERLREQEERLCEQEKLPGQERLLEEVEKLLEQERRQEEQERLLERERLLEEVEKLLEQERRQEEQERLLERERLLDEVEELLDEVEELLEQERLRLRELERMLELGWEALYEQRAEPRSGFEELNNENKSTLQLEQQVKELEKSGELKETVTSDPSKKMWEAGTSLWGGEVPGHRQLQPGDRVFRQVELKSQEAPSLQQQPDQYLEPQSHKELGCADKQGGLPRSTQAWVEKLLVQERRQEEQERLHAILFGLPRTGS

SEQ ID NO: 916718 - protein, 205 aa, Homo sapiens
MHSHAILLSFDQNQPFLSKIQKLPQQVYTYTTIKSGRYHDAFWERSSTKSKMAASRRLMKELEEIRKCGMENFRNIQVDEANLLTWQGLIVPDNPPYNKGAFRIEINFPAEYPFKPPRITFKTKIYHPNIDEKGQVCLPVISAENWKPATKTDQVIQSLIALVNDPQPEHPLRADLAEEYSNDRKKFCKNAEEFTKKYGEKRPVD

SEQ ID NO: 916719 - protein, 193 aa, Homo sapiens
MEFLKLLNREDVIQKPLVASACFLCISGFFFPPFLIISGKTQESSPAPKIVIKLMCCTQVVTPRKRVKDSHIKQRMRTMPRHSQSLTMAPYSSVSLVEQLEDRILCHEKTTAALVEHAFRIKDDIVNSLQKMQNKGGGDRLARLFLEEHIRNITAIVKQLNRDIESVPNPGATFLNSWDRQAGKPGEPAGSHG

SEQ ID NO: 916720 - protein, 130 aa, Homo sapiens
MFPFRKGELRRKKGVTDPKQVQNLARQILLDLKAQELSSLAQCPIFQAHWGGSITPIAPGRGPAPVVLADPGSCQKAVSPRLLWMVLLQSFRLRGEKKQLSKLRRHGNTGKSPAFPADTEEPMIPGENQK

SEQ ID NO: 916721 - protein, 136 aa, Homo sapiens
TTAHIILNMRHYVLARDQTETIQEEHGLNDRQLNCHETQKSGRMYWCLSTTEEGRRQTMIALTRKNKWKNDATGCLILTFLGLLVVSSSASNSETSLVSSLLSCCNMAALRQPYFREPRQRSSVRVRVGTQNLALS

SEQ ID NO: 916722 - protein, 142 aa, Homo sapiens
MLIEGAGLCAVSCLLSAGSARTLSCGYGSGSKQPGSGSAAGRRAPSWFRWGCGSLRPRGDPAHPGPAHQRAPERSHRGGACAVSLSLLVPRLRHRKKRVKGFCKLSSVVTYEPQAAHSQPQTTSHSSCVYQKLAHPTASLQR

SEQ ID NO: 916723 - protein, 140 aa, Homo sapiens
MRVRINFQKNKVSKNIFGGEEVEMKKWMKQSSAMAAEGLEHHIERAAGLTQVSGATTDRKDGQNTQYLRICKWPFLKKKEMLYRTTDDTRCPCWGEKLDDPIGKPAPEICIKASASHSYLVSPLLKSCWDFQRHSTNGKF

SEQ ID NO: 916724 - protein, 142 aa, Homo sapiens
KVRSRRRRTLSVFCSLPPENMFPSMEKSCDHLKFGPALLCLYFQVALPIGGFEAWRKHGSKGWWGSQRLGGKSPGSFALSCDPGQALELGWVSSEMGSGSSMEDTVQGARGGTVTQGRSPAVGAFALLIESWVLKGILGVFW

SEQ ID NO: 916725 - protein, 214 aa, Homo sapiens
MAQVSINNDYSEWDLSTDAGERARLLQSPCVDTAPKSEWEASPGGLDRGTTSTLGAIFIVVNACLGAGLLNFPAAFSTAGGVAAGIALQMCHVSSVPVFNSMQQPEVKTWGGVVTAAMVIALAVYMGTAWWVHGPANGNPSWSPWEAFIFKPEPQTNAIYVRSPGHKQLSPKGNKKDFGIGRKETHSLELMRSILKSRSFNEWMKSGIISRNGE

SEQ ID NO: 916726 - protein, 344 aa, Homo sapiens
MAQVSINNDYSEWDLSTDAGERARLLQSPCVDTAPKSEWEASPGGLDRGTTSTLGAIFIVVNACLGAGLLNFPAAFSTAGGVAAGIALQMGMLVFIISGLVILAYCSQASNERTYQEVVWAVCGKLTGVLCEVAIAVYTFGTCIAFLIIIGDQQDKIIAVMAKEPEGASGPWYTDRKFTISLTAFLFILPLSIPREIGFQKYASFLSVVGTWYVTAIVIIKYIWPDKEMTPGNILTRPASWMAVFNAMPTICFGFQCHVSSVPVFNSMQQPEVKTWGGVVTAAMVIALAVYMGTGICGFLTFGAAVDPDVLLSYPSEDMAVAVARAFIILSVLTSYPILHFCGR

SEQ ID NO: 916727 - protein, 236 aa, Homo sapiens
MRHIPSGPVECLHECFLFTAWYDQAAPNTTCTMIKQVSDPVQLSSMCPCTGREQLKSACVIQKPMTWDSLSGPPVQSMHAGSKNNRRKSFIAEPGREIVRVTLKRDPHRGFGQADPGIFISSIIPGGPAEKAKTIKPGGQILALNHISLEGFTFNMAVRMIQNSPDNIELIISQSKGVHDYCEVLDLEVHVGLLYCFPHGVGLQRSSVVAQINKLCNFRGRMGVTMLVLLKGSNLL

SEQ ID NO: 916728 - protein, 767 aa, Homo sapiens
WVPVTVLPGCVGCRTVAALASWTVRDVKERIFAETGFPVSEQRLWRGGREVGGGRGRWAGLRHAEERRASRARGGRRRFPRAARMTPAAWPPLSDWIKIGDLTSKNCHLFVNLQSKGLKGGGRFGQTTPPLVDFLKDILRRYPEGGQILKELIQNAEDAGATEVKFLYDETQYGTETLWSKDMAPYQGPALYVYNNAVFTPEDWHGIQEIARSRKKDDPLKVGRFGIGFNSVYHITDVPCIFSGDQIGMLDPHQTLFGPHESGQCWNLKDDSKEISELSDQFAPFVGIFGSTKETFINGNFPGTFFRFPLRLQPSQLSSNLYNKQKVLELFESFRADADTVLLFLKSVQDVSLYVREADGTEKLVFRVTSSESKALKHERPNSIKILGTAISNYCKKTPSNNITCVTYHVNIVLEEESTKDAQKTSWLVCNSVGGRGISSKLDSLADELKFVPIIGIAMPLSSRDDEAKGATSDFSGKAFCFLPLPPGEESSTGLPVHISGFFGLTDNRRSIKWRELDQWRDPAALWNEFLVMNVVPKAYATLILDSIKRLEMEKSSDFPLSVDVIYKLWPEASKVKVHWQPVLEPLFSELLQNAVIYSISCDWVRLEQVYFSELDENLEYTKTVLNYLQSSGKQIAKVPGNVDAAVQLTAASGTTPVRKVTPAWVRQVLRKCAHLGCAEEKLHLLEFVLSDQAYSELLGLELLPLQNGNFVPFSSSVSDQDVIYITSAEYPRSLFPSLEGRFILDNLKPHLVAALKEAAQTRGIIV

SEQ ID NO: 916729 - protein, 836 aa, Homo sapiens
MPGAVRLRGQVRSPVRGLRLQRVALSANKITVLRRGAFADVTQVTSLWLAHNEVRTVEPGALAVLSQLKNLDLSHNFISSFPWSDLRNLSALQLLKMNHNRLGSLPRDALGALPDLRSLRINNNRLRTLAPGTFDALSALSHLQLYHNPFHCGCGLVWLQAWAASTRVSLPEPDSIACASPPALQGVPVYRLPALPCAPPSVHLSAEPPLEAPGTPLRAGLAFVLHCIADGHPTPRLQWQLQIPGGTVVLEPPVLSGEDDGVGAEEGEGEGDGDLLTQTQAQTPTPAPAWPAPPATPRFLALANGSLLVPLLSAKEAGVYTCRAHNELGANSTSIRVAVAATGPPKHAPGAGGEPDGQAPTSERKSTAKGRGNSVLPSKPEGKIKGQGLAKVSILGETETEPEEDTSEGEEAEDQILADPAEEQRCGNGDPSRYVSNHAFNQSAELKPHVFELGVIALDVAEREARVQLTPLAARWGPGPGGAGGAPRPGRRPLRLLYLCPAGGGAAVQWSRVEEGVNAYWFRGLRPGTNYSVCLALAGEACHVQVVFSTKKELPSLLVIVAVSVFLLVLATVPLLGAACCHLLAKHPGKPYRLILRPQAPDPMEKRIAADFDPRASYLESEKSYPAGGEAGGEEPEDVQGEGLDEDAEQGDPSGDLQREESLAACSLVESQSKANQEEFEAGSEYSDRLPLGAEATVGDIYVPPFPSRLSAKSTPQPAPPWALEPEETSEDFGNLARRRTARPLAAEPVDLVAGQFRCPCVGLSGAGKRRRRRKLTVASRAAALWRARALVRTKPARDCATNWGPSSRPSRILSATRAGGEEVKALPLFVQGHVS

SEQ ID NO: 916730 - protein, 836 aa, Homo sapiens; identical to SEQ ID NO: 916729

SEQ ID NO: 916731 - protein, 207 aa, Homo sapiens
MRELTGDKDRLSTRQHHHQCFLKGFIMATTAPQAHPDILQCLVTEPEVQPGRSLSAPFAHCREVPFWPSIPICARPPDLPCTEPLTFPSCDPLDLSHPILATFILLSSVPPSPPGSKESRVYMSDQHPALVFFQKAACMLDVFQLEKTTALNTTTTRDLTTERGTALDMKNSDNHHPQLRKESGREKTRAPPGGSNVALPEIGRNKA

SEQ ID NO: 916732 - protein, 146 aa, Homo sapiens
MKEKLKRGIFFKLRKISGHSQTASAMHPWMPATGCGTKGPSIFLQLCVSGGLWMISVLKSVFASFSKKSSPSQAVSLGRSTHLSQIQPRPVNTYWTSAQPSMGLMHRWALGSLPMFYLNTVTWPPRQLQDGLEREDFLCAQEEEVV

SEQ ID NO: 916733 - protein, 221 aa, Homo sapiens
MENYTGSFRVRPGSDSHRFLCPPSNCPELSHMTAPNCKGGWKKVFYVGVSNIRTFQAPCPSIIPECKTHSEAWGRDSNSAFPLPPQSEPICGMPCPFSIPSLQVGLGSWDEFFRPYKCKLCRGASNKKNQSLAGPLRAGFWRGRPVLSLALGHSGRKEEGWLAAGGRACEGLALGLVLLLLEVAGCAMASWLLLLEPCDHSSRLHPHFSPPVPCMTSENMT

SEQ ID NO: 916734 - protein, 221 aa, Homo sapiens; identical to SEQ ID NO: 916733

SEQ ID NO: 916735 - protein, 432 aa, Homo sapiens
MIIIINKITLHSGELWGDDLTSAPLPRTGERGKAGVNPAEPGPPSPGGWRRCGQEALGGWSPFPCKQGARVSLLSRLPTDPRPRQGPAVRMIMPTGWVGCWQSGAAGQVLEATPRGWAGVCRRGRARNGERMECVIVSERGMGTESLPTQMPKLTYPLGNCMAGRLILFSWSLILGLRSIWVQPAALGSSSVCHLNHEDLVASAAIEICTGNINSQDTCRQGHPGIPGNPGHNGLPGRDGRDGAKGDKGDAGEPGCPGSPGKDGTSGEKGERGADGKVEAKGIKGDQGSRGSPGKHGPKGLAGPMGEKGLRGETGPQGQKGNKGDVGPTGPEGPRGNIGPLGPTGLPGPMGPIGKPGPKGEAGPTGPQGEPGVRGIRGWKGDRGEKGKIGETLVLPKSAFTVGLTVLSKFPSSDVPIKFDKILYNEFNHYDT

SEQ ID NO: 916736 - protein, 92 aa, Homo sapiens
NGETEMSPEESWEHKEEISEAEPGGGSLGDGRPPEESAHEMMEEEEEIPKPKSAYSYLFEEVEFTALICLVDKNQGKKLDPPVLSTGQVACS

SEQ ID NO: 916737 - protein, 336 aa, Homo sapiens
NGETEMSPEESWEHKEEISEAEPGGGSLGDGRPPEESAHEMMEEEEEIPKPKSVVAPPGAPKKEHVNVVFIGHVESTMKPKKVDMGQELAGALVCRKVSLFVFKTDFADGCPLKVLAVSTLLPHYPAGLVPFSGSGEGPEGSTGQTSWLWRWEENEVLKVQLKKYVGAVQMLKREGQTAEGGLVALEVTALKLYIVAPLSGGLVALEVTALKLYSVAPLSGGLVVLEVTFLKLRSVAPLSGGLVVLEVTALKLRSVALLSGGLVALEVTTLKLYSVALMSDGLVALEVTSLKLCSVALLSGGLVALEVTSLKLCSVASLSVGLVALEAPVDAMMQT

SEQ ID NO: 916738 - protein, 328 aa, Homo sapiens
LRLEKGRGTRGTRPGGRGGLGSRRQQDRLGIYSYWQDTSSQKIEDLMEMVQKLQKVGSLEPRVEVLINRINEVQQAKKKANKDLGEARTICEALQKELDSLHGEKVHLKEILSKKQETLRILRLHCQEKESEAHRKHTMLQECKERISALNLQIEEEKNKQRQLRLAFEEQLEDLMGQHKDLWDFHMPERLAKEICALDSSKEQLLKEEKLVKATLEDVKHQLCSLCGAEGPSTLDEGLFLRSQEAAATVQLFQEEHRKAEELLAAAAQRHQQLQQKCQQQQQKRQRLKEELEKHGMQVPAQAQSTQEEEAGPGDVAPRPGRPVTWWS

SEQ ID NO: 916739 - protein, 190 aa, Homo sapiens
MLQECKERISALNLQIEEEKNKQRQLRLAFEEQLEDLMGQHKDLWDFHMPERLAKEICALDSSKEQLLKEEKLVKATLEDVKHQLCSLCGAEGPSTLDEGLFLRSQEAAATVQLFQEEHRKAEELLAAAAQRHQQLQQKCQQQQQKRQRLKEELEKHGMQVPAQAQSTQEEEAGPGDVAPRPGRPVTWWS

SEQ ID NO: 916740 - protein, 190 aa, Homo sapiens; identical to SEQ ID NO: 916739

SEQ ID NO: 916741 - protein, 227 aa, Homo sapiens
MLQECKERISALNLQIEEEKNKQRQLRLAFEEQLEDLMGQHKDLWDFHMPERLAKEICALDSSKEQLLKEEKLVKATLEDVKHQLCSLCGAEGPSTLDEGLFLRSQEAAATVQLFQEEHRKAEELLAAAAQRHQQLQQKCQQQQQKRQRLKEELEKHGMQVPAQAQSTQEEEAGPGDVVSPRSGRQGTETATEGTAEGAGGQGRGSWDSSEDGLWGGPFPYWVHPRW

SEQ ID NO: 916742 - protein, 328 aa, Homo sapiens; identical to SEQ ID NO: 916738

SEQ ID NO: 916743 - protein, 351 aa, Homo sapiens
MAGRSLTSKAEPTAGAVDRAEKAGGQDTSSQKIEDLMEMVQKLQKVGSLEPRVEVLINRINEVQQAKKKANKDLGEARTICEALQKELDSLHGEKVHLKEILSKKQETLRILRLHCQEKESEAHRKHTMLQECKERISALNLQIEEEKNKQRQLRLAFEEQLEDLMGQHKDLWDFHMPERLAKEICALDSSKEQLLKEEKLVKATLEDVKHQLCSLCGAEGPSTLDEGLFLRSQEAAATVQLFQEEHRKAEELLAAAAQRHQQLQQKCQQQQQKRQRLKEELEKHGMQVPAQAQSTQEEEAGPGDVASPKPLKGERPGAAHQAGPDVLIGQEDTLHPDLSPRGFQEIKELF

SEQ ID NO: 916744 - protein, 318 aa, Homo sapiens
MAGRSLTSKAEPTAGAVDRAEKAGGQDTSSQKIEDLMEMVQKLQKVGSLEPRVEVLINRINEVQQAKKKANKDLGEARTICEALQKELDSLHGEKVHLKEILSKKQETLRILRLHCQEKESEAHRKHTMLQECKERISALNLQIEEEKNKQRQLRLAFEEQLEDLMGQHKDLWDFHMPERLAKEICALDSSKEQLLKEEKLVKATLEDVKHQLCSLCGAEGPSTLDEGLFLRSQEAAATVQLFQEEHRKAEELLAAAAQRHQQLQQKCQQQQQKRQRLKEELEKHGMQVPAQAQSTQEEEAGPGDVAPRPGRPVTWWS

SEQ ID NO: 916745 - protein, 553 aa, Homo sapiens
MALNNFLFAQCACYFLAFLFSFVVVVPLSENGHDFRGRCLLFTEGMWLSANLTVQERERFTVQEWGPPAACRFSLLASLLSLLLAAAHAWRTLFFLCKGHEGSFFSAFLNLLVSAFVVFLVFIASTIVSVGFTMWCDTITEKGTVPHSCEELQDIDLELGVDNSAFYDQFAIAQFGLWASWLAWLAITTLAFLKVYHNYRQEDLLDSLIHEKELLLARPSPRTSFQEEKSAVISGTVQAGGAGPDLPAALGGTGLPGEAAGALCLGPGHMQPCVCPLDATCSEVSAPVPTCEPGSGLGGCRLPDEDGAERLWVWGGGGGHLQASHRAPWLSQYDLTGQPMWRASSLSPPTLAGCCLHASWPRGGQMSLSPERILHEFCHPGRGCVWGGAHGTFQPLAPGWPPPQLSPPPGIWGRNLPILLPGVGWDGLGLGRDAGGSPGEPPPWSLLGHFWKQPLLLPPPATLGSLDSKAGSDPGDHFTCSLAPGVAGTHPDCRAKGAGRASLKTQGLGQPLPEWTHPLPGLQEMGRFQAPRTSALATEADSLANRFWFLSFL

SEQ ID NO: 916746 - protein, 156 aa, Homo sapiens
MKNNAIDILAPLGERRGLSSGSQTQQWYAENPTCTFPLKLGASYPWGIHGYILFDIRILICLTTPTRSKVWVGEVGVTMWCNTITDKGTEPHSCEELQDIDLELGVDNSAFYDQFAIAQVQFRTPGWPLKALAGRGWPEDASPGQEPSKGAGRGWA

SEQ ID NO: 916747 - protein, 253 aa, Homo sapiens
MRTRPGRGARDLPAPPLRSLPRPPRPAQPPAAFPPPLSPGPAMALNNFLFAQCACYFLAFLFSFVVVVPLSENGHDFRGRCLLFTEGMWLSANLTVQERERFTVQEWGPPAACRFSLLASLLSLLLAAAHAWRTLFFLCKGHEGSFFSAFLNLLVSAFVVFLVFIASTIVSVGFTMWCDTITEKGTVPHSCEELQDIDLELGVDNSAFYDQFAIAQVQFRTPGWPLKALAGRGWPEDASPGQEPSKGAGRGWA

SEQ ID NO: 916748 - protein, 172 aa, Homo sapiens
MHFWGLGWSYCLCKGYKSGLANALAHGGCQDGEQAVLGSEEDVPKRRCFVFPQDAKFVEERRKQLQNYLRSVMNKVIQMVPEFAASPKKETLIQLMPFFVRRCPIRKSVSPTPCGVHSPGISGPVFPKHSHGRDPRGDVRYRSWREARTPRIRSVRLDRKSVTASVICRAVI

SEQ ID NO: 916749 - protein, 310 aa, Homo sapiens
EVEEAGAARRRGRPAELCFYSGRVLGHPGSLVSLSACGAAGGLVGLIQLGQEQVLIQPLNNSQGPFSGREHLIRRKWSLTPSPSAEAQRPEQLCKVLTERLIRLIQAFPGNMLFLAEHGSHRFRALLVTLCYDSLGHGLRVALPALVEFCSVYIKHSVSVCFWWKMKGSQRVTWGEKGAREKGTRESEEALSPSGFWVTAEKHTSHLQDTVLCSALGCFSLGSRPPPAPSAILPSLGVPYALHYGKVFTESFHMHFCQMPQGSSTSAHVISPSVLILRPSEAQDDLLVCVAQAWGFVLGTLPMSRWYPEL

SEQ ID NO: 916750 - protein, 203 aa, Homo sapiens
EVEEAGAARRRGRPAELCFYSGRVLGHPGSLVSLSACGAAGGLVGLIQLGQEQVLIQPLNNSQGPFSGREHLIRRKWSLTPSPSAEAQRPEQLCKVLTEKKKPTWGRPSRDWRERRNAIRLTSEHTVETLVVADADMVQYHGAEAAQRFILTVMNMVYNMFQHQSLGIKMNIQVTKLVLLQQRAAKLSIGHHSELSLKSLCHW

SEQ ID NO: 916751 - protein, 130 aa, Homo sapiens
EVEEAGAARRRGRPAELCFYSGRVLGHPGSLVSLSACGAAGGLVGLIQLGQEQVLIQPLNNSQGPFSGREHLIRRKWSLTPSPSAEAQRPEQLCKVLTVPQCLGLTWEDLKSGGWSDLEVPHSCVWPGGG

SEQ ID NO: 916752 - protein, 169 aa, Homo sapiens
CFYSGRVLGHPGSLVSLSACGAAGGLVLPAPPPGRPVRSVATQSGRRGGWGWGASAGSPASRGTGGNPLPFHLSPSPTPAFGTLYRQRGWEGQHPSPAPLQPVEPARSWGCVGYTPPALGSADLAGMKLSGPWTEAPWPQCREHCICTAVSKCMSREYLCTCRCYVLGL

SEQ ID NO: 916753 - protein, 145 aa, Homo sapiens
MAERRQKEIISPVSLLCTEGHVPQGSRLSSCSLHPCSRRPRCPPARPTHHSRVRAASTHTFLRDVFNSLEVGEGGIPYIELVSKAMLELKPLESSDLTKVVVYGYYLYKLQTKWMLQSVAEWHRQRQEPLDEANQLPANAMKARM

SEQ ID NO: 916754 - protein, 148 aa, Homo sapiens
RRGTTVRMRSLESLGTTVRMRSLESPGTTVRMRSLESPGTTVRMWSLESLGTTVRMWSLESLESPGTTVRMWSLESPGTTVAEMHGELIEFNERLHRALVAKEALVSQMRQELIDLRGPVIYICFLLLYHFNQILEVFNPSALLMVSL

SEQ ID NO: 916755 - protein, 148 aa, Homo sapiens; identical to SEQ ID NO: 916754

SEQ ID NO: 916756 - protein, 148 aa, Homo sapiens; identical to SEQ ID NO: 916754

SEQ ID NO: 916757 - protein, 164 aa, Homo sapiens
MERLGAVNLFMRLPPYSSLPSRRALEERSRQVRLSLQTKPCAEVEGSSRIPIPNPSPPRCHTGSRVESARREKQERERCHLCSGIKRQSTVKTLDVSILLLQKFHQILSGSRMGMSLCGMQAMPPLTDCPGYEVETMKITILHSVSPAFSVKMFQQRHVVKLNL

SEQ ID NO: 916758 - protein, 157 aa, Homo sapiens
QQVPAEDLVRAGPRVMAVDMTDALGPAAQLGEAGFPCWGACSPFMNPLQALVEKPISNSQFQKRLLQHRPPAASPRVTQGQELLRRAEGLEGALACKPFAGGDLWREPLGAVWFPSGLERPGVELGCCLLGQSDFQQGSLPEVTHSFERLDFKAPGG

SEQ ID NO: 916759 - protein, 191 aa, Homo sapiens
RDLERKNMNSSIHSAAILNASCVPDAVLEAQNIYERDRQCPHMPRPSYASLDSRKTVGWVNDYEGNDSEAEDLNFREALPSSSQENTPRSKVFENKVNSEKVKLSLRNFPHNDYEDVFEEPSESGSDPSMWTARGPFGRDRWSSEDEEAAGPSQALSPLLSVFHSPVEGHCVVSRFWQLWIKVLQIFTNFV

SEQ ID NO: 916760 - protein, 141 aa, Homo sapiens
KPMHEFTMIINIVKLPWVRKQDRHSVYYYRNKRTMTVIFNLRNPPGRTTACLPGRHSCSQGLPEPRYSLLGNMPMSGSLAWEWGFVLEQEKMLVILVLIYVSKFPLPQRIQGPLPSLERVLKSQDFLIIVGIVNRTPEIKR

SEQ ID NO: 916761 - protein, 313 aa, Homo sapiens
MQKPPLLLRRPLPPKFTKLSLHEKKTHTAKTGKIESLHVAFTEDETTSIKMDRTRFPDVLRNQSLTPINIQNIFLDHCVQERVTAISSPQKSTKHVREQIPDTATGSIFFPHCNSASTRIFGKQTNKMESSRKFKTMKDVYTEKRLENILILSSKFSKPKSTPGSVIAQKLEKMHPKHQPLPESPGYTYQHISRDLSATVPSPPPMTVSMKPEGQWPEHFKSTATLTLRVTEFPGFVSLPTPVLPRKPHRQSVIEVLTLQICQGQTGYSIQMVIMGTNKGIQRIGKANIKKQNSCNRKWKYRKCPKANPTKTT

SEQ ID NO: 916762 - protein, 140 aa, Homo sapiens
LGLLEGGDPWCFFGNSLLQEDPRWTFTSLPRFRGKGDRRRKASWFGKRPIILKGSVGVQHFHAPLWVLRKGDFQHRVEHMTREYTLSACVQLSFGGKRPICAVSGCSLLGYQWNNAVPGTFDVALQTKSTFWGCIFSHYF

SEQ ID NO: 916763 - protein, 105 aa, Homo sapiens
TPVARVCLLGLLEGGDPWCFFGNSLLQEDPRWTFTSLPRFRGKGDRRRKASWFGKRPIILKGSVGVQHFHAPLWVLRKGDFQHRVEHMTREYTLSACVQLSFGGL

SEQ ID NO: 916764 - protein, 147 aa, Homo sapiens
MRSCIVPAEHLPSAAHLIIPATPPEFSEAQKSSQLPNVTQLVTVRAENAGQHVSSVKYLVPAQCPGHSDGWLQLPESPGQSTKHMHKSTIQSQAGQAFSTASAPHSLLPATPSYLQSLCPAFSAGPPFQRHPLFMHKWLGEGVGHRR

SEQ ID NO: 916765 - protein, 179 aa, Homo sapiens
MIHFNRSMHFSSTQYSCARLPQQHPLLVFLLLHQGSSRFSLLRLPQDLEEGGVGKKALALVWSLGVCWVLSSELAQVPFWDILMGLLLMSAVGKVDTETGQEIELKDPLSGLVPWQVEAICTLKLHGSREILSKGLWILSTFLPFSYSSSGATVHDVSLHTLLCLSAWQLESNPASCLP

SEQ ID NO: 916766 - protein, 176 aa, Homo sapiens
MGICLTDKAHNSTNVAFRRLCEILECCVHNTEKLYRSQTGEVRPGGHYAKPYNRCPPIEDSSYLLYPNIAGEKTAAAIDSPMETKSYYKPRNRCMAAKQDHKGKCQAVRRNKGGARQIKHPTYKDTISHMFHKTTTNPPVPKQLNLQFQACKAKRRPYPCLPWADSLFGLSPPAPR

SEQ ID NO: 916767 - protein, 176 aa, Homo sapiens; identical to SEQ ID NO: 916766

SEQ ID NO: 916768 - protein, 176 aa, Homo sapiens; identical to SEQ ID NO: 916766

SEQ ID NO: 916769 - protein, 176 aa, Homo sapiens; identical to SEQ ID NO: 916766

SEQ ID NO: 916770 - protein, 583 aa, Homo sapiens [sequence omitted]

SEQ ID NO: 916771 - protein, 196 aa, Homo sapiens [sequence omitted]

SEQ ID NO: 916772 - protein, 334 aa, Homo sapiens
MASASQGADDDGSRRKPRLAASLQISPQPRPWRPLPAQAQSAWEPAPAPATYRAEGGWPQVSVLRDSGPGAGAGVGELGAARAWENLGEQMGKAPRVPVPPAGLSLPLKDPPASQAVSLLTEYAASLGIFLLFREDQPPGPCFPFSVSAELDGVVCPAGTANSKTEAKQQAALSALCYIRSQLENPENILTHEQRCAALVSAGFDLLLDERSPYWACKGTVAGVILEREIPRARGHVKEIYKLVALGTGSSCCAGWLEFSGQQLHDCHGLVIARRALLRFLFRQLLLATQGGPKGKEQSVLAPQPGPGPPFTLKPRVFLHLYISNTPKGAARDI

SEQ ID NO: 916773 - protein, 165 aa, Homo sapiens
HRDSNHQLQLLDTKFKGTVEELSNQILSARSWLQQEQERIEKELLQKIDQLSLIVKENSGASERDMEKKLSQMSARLDKIEEGQKKTFDGQRTRQEEEKMHGRITKLELQMNQNIKEMKAEVNAGFTAVYESIGSLRQVLEAKMKLDRDQLQKQIQLMQKPETPM

SEQ ID NO: 916774 - protein, 193 aa, Homo sapiens
DHALCRDMDGSGSHYPQQSNTGTENQTPHVLTYKWELNNENIFKGTVEELSNQILSARSWLQQEQERIEKELLQKIDQLSLIVKENSGASERDMEKKLSQMSARLDKIEEGQKKTFDGQRTRQEEEKMHGRITKLELQMNQNIKEMKAEVNAGFTAVYESIGSLRQVLEAKMKLDRDQLQKQIQLMQKPETPM

SEQ ID NO: 916775 - protein, 109 aa, Homo sapiens
MDFSESEKFMVLLWKNFILKRRRCIALVVEMVLTFLFSAALLATRSVITINKNGPFDFAAQPVDEVPFYITASLISPSPLELAYVPSRSTVVQGIIERVKMDLNPQMKG

SEQ ID NO: 916776 - protein, 221 aa, Homo sapiens
QYEVHRSLCGIGSLRQELEQETDEIGRIQGGMAVDQGGMAIDSIIVQQQCRGLSSHKEDGPSCVNSCSVAILYVICGAVEKPLPVATTTTNPQQVLPGHHQCSLKAEKLFGHLKRSGLEMLSKSLGLDLGTLRTHLLLYPTVAKLVPKGNTEFDVKSHSHCVFPSPGAQTPRNARPLPGNAGGVMLAIEDCLSYPLQCLFQQYEVKTRLVLGLKFQILLPL

SEQ ID NO: 916777 - protein, 199 aa, Homo sapiens
SVRCSSCFYHSTSYMDCNISLLLQLLIKLGAPQSQGWCLISFLLPGAQSSLWHELFEHWLSLTGLCRAEYSKRQGEGGVRNFFYQGWKKHGLLYSSPELDGEDGEGDMYHPCGAPSPTSEDEEYLTINSTCQGQLPCEECLEADSGTIPLPQFCSWGTVPESLPPEESPESGSEWEDLEEPVALEYGALRSLSFGGLNV

SEQ ID NO: 916778 - protein, 323 aa, Homo sapiens
QLPSRRAPGTWPWLAMTGTGQGTQNRQRLRRPRGHRLLQTCPHSVEVQNLAAIQLHVPGQGNSEEAGVAKPAGTRAESMGGDCHEAAVSIYCSMRKRSLSHWALVSVLSLLACCLIYSLTGVYGFLTFGTEVSADVLMSYPGNDMVIIVARVLFAVSIVTVYPIVLFLGSQDWNANHVLHPLPHGLPDGGRTPEDAHVSVLAVASRSVMQDFWRRSCLGGWGPSALADPSGLWVRMPLTILWVTVTLAMALFMPDLSEIVSIIGGISSFFIFIFPGLCLICAMGVEPIGPRVKCCLEVWGVVSVLVGTFIFGQSTAAAVWEMF

SEQ ID NO: 916779 - protein, 239 aa, Homo sapiens
MHVFIVGMSLSSVTLASALQVRGEALSEEEIWSLLFLAAEQLLEDLRNDSSDYVVCPWSALLSAAGSLSFQGRVSHIEAAPFKAPELLQGQSEDEQPDASQPLQLCEPLHSILLTMCEDQPHRRCTLQSVLEACRVHEKEVSVYPAPAGLHIRRLVGLVLGTISEVEKRVVEESSSVQQNRSYLLRKRLRGTSSESPAAQAPECLHPCRVSERSTETQSSPEPHWSTLTHSHCSLLVNR

SEQ ID NO: 916780 - protein, 207 aa, Homo sapiens
MHVFIVGMSLSSVTLASALQVRGEALSEEEIWSLLFLAAEQLLEDLRNDSSDYVVCPWSALLSAAGSLSFQGRVSHIEAAPFKAPELLQGQSEDEQPDASQMHVYSLGMTLYWSAGFHVPPHQPLQLCEPLHSILLTMCEDQPHRRCTLQSVLEACRVHEKEVSVYPAPAGLHIRRLVGLVLGTISEVSREPCFSSSSCWSCVAIKI

SEQ ID NO: 916781 - protein, 328 aa, Homo sapiens
MHVFIVGMSLSSVTLASALQVRGEALSEEEIWSLLFLAAEQLLEDLRNDSSDYVVCPWSALLSAAGSLSFQGRVSHIEAAPFKAPELLQGQSEDEQPDASQPLQLCEPLHSILLTMCEDQPHRRCTLQSVLEACRVHEKEVSVYPAPAGLHIRRLVGLVLGTISEVEKRVVEESSSVQQNRSYLLRKRLRGTSSESPAAQAPECLHPCRVSERSTETQSSPEPHWSTLTHSHCSLLVNRALPGADPQDQQAGRRLSSGSVHSAADSSWPTTPSQRGFLQRRSKVSKIRLKDTPQGGLSRELWVAGTVAENGQGLLGDNFPGLRFIGLD

SEQ ID NO: 916782 - protein, 392 aa, Homo sapiens
MGRNWGQHEFRVGVGSAVEGAPGPPALLAHLCHAQILAGPQPPPCGAGLGTCSPPCPNPPCSTEPGPIDYTMAKECGHAAWDGRATPHVALERDPLGEASWAPESASLLKPARPRTHQKEETPNKSEHQKEQTLDPPPLRTVILTTRVRGFILEVSETKNPPIPDTIGSKIPLGGCILPGLHVLRGTGLISLYQYATIDVSILRLRGIGFVSGWVLSRCLEGVWDAVCLLGTNTCEKKGEEAGLGRRRRIHTEGNFQVGGPALQLFLPQLPGLPCCPGYEASGAPRSPLPWGTASKAYGKEEEKEGEGEEQGRGRGFAAAWRSASAGTEAPQGRRPGARRLCLFEFQKSQPGQGGGETRSLRGAGSGTLALQDPQHFPTWKTSSFPIAEKIR

SEQ ID NO: 916783 - protein, 126 aa, Homo sapiens
KRAFLLEGRVLGELTLFSPALSPNLNPFLSKHSSLSTPLWHSKSHGNGKEVAGSKQPAYSQQLKILFRRFWFQGQELKINAWSLPHSESSSLAPGGSSSSLHICFFLMKLLLVGNLSNFIRLLQCL

SEQ ID NO: 916784 - protein, 212 aa, Homo sapiens
KTFREREEQLSGADGNPLQSLCKTGVRCMTESQRSPSASFQKAATTELSCGKGATRCSHEPDLGSQWLLQEVVSGCKKSQAGSLPGDSSRDILQNIRLVLPKLTVQVTESKESLINCHGHEESKDTSNFHSHPKWNPRQKEDLSLHICFFLMKLLLVGNLSNFIRWLELSVSPFLSVMAGKSSWAMSCIFINMNRLAGIPKWDKCYLIADSF

SEQ ID NO: 916785 - protein, 188 aa, Homo sapiens
KTFREREEQLSGADGNPLQSLCKTGVRCMTESQRSPSASFQKAATTELSCGKGATRCSHEPDLGSQWLLQEVVSGCKKSQAGSLPGDSSRDILQNIRLVLPKLTVQVTESKESLINCHGHEESKDTSNFHSHPKWNPRQKEDLSLHICFFLMKLLLVGNLSNFIRNTEISHDFLMGFSCLRCSAFSCI

SEQ ID NO: 916786 - protein, 182 aa, Homo sapiens
KTFREREEQLSGADGNPLQSLCKTGVRCMTESQRSPSASFQKAATTELSCGKGATRCSHEPDLGSQWLLQEVVSGCKKSQAGSLPGDSSRDILQNIRLVLPKLTVQVTESKESLINCHGHEESKDTSNFHSHPKWNPRQKEDLSLHICFFLMKLLLVGNLSNFISFMKTQPQQTYRLAQGLL

SEQ ID NO: 916787 - protein, 174 aa, Homo sapiens
MNDWAANLVCLFVLSKHLNTWELNKMRIWKRYERENESEKITTGASEIQKIIRNPHEKFYANKQDNLKETDKFLEKYKPPRLGLCEVINWPNFNTVVFQGIERPEERVRDGKMGGDTPKVPSSYIIRLKFQDLLVMGSYLQVWLLGSDHLQSKRRFFFSANGDRFGTKKRREET

SEQ ID NO: 916788 - protein, 126 aa, Homo sapiens
MENGQQQFWTEQQVESQGAMRKQDACGNCWRRMVDSVVPVPGTFSVKDPPDKETSSSPPNRNVMTVLEGYFQDDTKPGFWSALKMENGLLTLVTLADVFHNINQLNKPLHSPGENVFTKNVKSFWI

SEQ ID NO: 916789 - protein, 126 aa, Homo sapiens; identical to SEQ ID NO: 916788

SEQ ID NO: 916790 - protein, 157 aa, Homo sapiens
DTQEIRPIFMLGLHVASRRVIQSGISPQYKATCFPTGWSRHWGHRVLFLLYSLHLAIAPNKSNSSKHHSALPSECLLLRVSSVYPSLSLAHLSVPKRQSTRIPPTPPVPSKLWVPFLLGQRVAPAAVIPLPKARVLNGHPLRVVVTALSCPSASPRG

SEQ ID NO: 916791 - protein, 131 aa, Homo sapiens
ALSFYRHNTSNFLNIGGRVAVREFNFPKSAFCKGRMWDRHHGEFAAGGRDPSYPKLPAAYLYGVGFPHAQCFPHPWELSTRSVFRKLCACPSEAFFIVSGGVYPEDHTLPLLSLNVHAQEVSSPWECTVDP

SEQ ID NO: 916792 - protein, 162 aa, Homo sapiens
MWEPQLSATSFMPQGSLQVDPPTRYWRLMNAWEKPDVDTWSVSQTEKLTLRELSVAQGHHAGKWHSQDLNSAVVDSVRQSAAAFMVSPLPLGQREQEAAPSPSLVSSPPAAVLQMPSHLLAWLTPSHLKPQLKCTLQNPSLGESLRQGAAPSHPISLTRLSL

SEQ ID NO: 916793 - protein, 148 aa, Homo sapiens
MPATYLYWRFQTDASLGPTGLLTYEFIWEKNVLGRGNIQCKYPGVEMCLSWSKNSKEASVALAGWGVMIDDGDDDDDDDDDDDDGDGKDEKEEKIIKMATITIVLSHSAEHSQCIRHSIQGASPFIIPANPCSNLYESPVLGIHAFNR

SEQ ID NO: 916794 - protein, 151 aa, Homo sapiens
MATVQKAPRPSMLARSVRPLWGYCRTSPSYYPFKYRRFGLAAAGPIRSASVPHFPASAWLRPPPGGASEIPASLRAERPGPSNVPILEKATPVASSAGRPEAASDEETALAAIASLCKQYRVYLPKPKQHSLLHTQAVGCASRLQTCTVWY

SEQ ID NO: 916795 - protein, 137 aa, Homo sapiens
MKSTSPPHTPTPTLGHKTLLAGQEKSQGGEISWWTRDPITQADGNFGNLRRRAHGGRGVAGRSKEEESEDPGVWTLRITCLAKLLKLHKETKKAKPTKINRKPLPTGQGADISVWPGQVKPLGFNSELTQAGLKFLC

SEQ ID NO: 916796 - protein, 160 aa, Homo sapiens [sequence omitted]

SEQ ID NO: 916797 - protein, 160 aa, Homo sapiens [sequence omitted]

SEQ ID NO: 916798 - protein, 160 aa, Homo sapiens [sequence omitted]

SEQ ID NO: 916799 - protein, 160 aa, Homo sapiens [sequence omitted]

SEQ ID NO: 916800 - protein, 160 aa, Homo sapiens [sequence omitted]

SEQ ID NO: 916801 - protein, 160 aa, Homo sapiens [sequence omitted]

SEQ ID NO: 916802 - protein, 160 aa, Homo sapiens [sequence omitted]

SEQ ID NO: 916803 - protein, 160 aa, Homo sapiens [sequence omitted]

SEQ ID NO: 916804 - protein, 237 aa, Homo sapiens [sequence omitted]

SEQ ID NO: 916805 - protein, 237 aa, Homo sapiens [sequence omitted]

SEQ ID NO: 916806 - protein, 112 aa, Homo sapiens
DDGVLLIALEGPFPGCLTRCKCQLVLAGCLSFARGENILTDFLCSQRRSSSLERSRLRLAFPSGSAVGSPQALVRRAPRPRLFPFGRNRHLPVIRQNDEHKGKEERHPIYVL

SEQ ID NO: 916807 - protein, 237 aa, Homo sapiens [sequence omitted]

SEQ ID NO: 916808 - protein, 237 aa, Homo sapiens [sequence omitted]

SEQ ID NO: 916809 - protein, 160 aa, Homo sapiens [sequence omitted]

SEQ ID NO: 916810 - protein, 112 aa, Homo sapiens; identical to SEQ ID NO: 916806

SEQ ID NO: 916811 - protein, 160 aa, Homo sapiens [sequence omitted]

SEQ ID NO: 916812 - protein, 160 aa, Homo sapiens [sequence omitted]

SEQ ID NO: 916813 - protein, 160 aa, Homo sapiens [sequence omitted]

SEQ ID NO: 916814 - protein, 141 aa, Homo sapiens
MTNTKGKRRGTRYMFSRPFRKHGVVPLATYMRIYKKGDIVDIKGMGTVQKGMPHKCYHGKTGRVYNVTQHAVGIVVNKQVKGKILAKRINVRIEHIKHSKSRDSFLKRVKENDQKKKEAKEKGTWVQLKRQVRIWCIFHWF

SEQ ID NO: 916815 - protein, 112 aa, Homo sapiens; identical to SEQ ID NO: 916806

SEQ ID NO: 916816 - protein, 160 aa, Homo sapiens [sequence omitted]

SEQ ID NO: 916817 - protein, 143 aa, Homo sapiens
MGEGAHHHPSVTSRVMIASCPGSWRFEQRIGQNSKQRKNEATKEQKQGFIENKSTLHSVGAALAALPPDPRCFTESSWVQIPPRTFPLAIPCSPHVNEEVACNWSDWLPDPPPHQTDPPKEAQFAPREFDQPGKIVSYHWRGE

SEQ ID NO: 916818 - protein, 425 aa, Homo sapiens
SGESPKSSLEDQAMQPEGLKCRMEESNAERGTAEPFPRLHNLYSTPRCAQQAALPRLSRRMASQHSYPLNRFSSVPLDPMERPMSQADLELDYNPPRVQLSDEMFVFQDGRWVNENCRLQSPYFSPSASFHHKLHHKRLAKECMLQEENKSLREENKALREENRMLSKENKILQVFWEEHKASLGREESRAPSPLLHKDSASLEVVKKDHVALQVPRGKEDSTLQLLREENRALQQLLEQKQAYWAQAEDTAAPAEESKPAPSPHEEPCSPGLLQDQGSGLSSRFEEPKGPPARQEDSKELRALRKMVSNMSGPSGEEEAKVGPGLPDGCQPLQLLREMRQALQALLKENRLLQEENRTLQVLRAEHRGFQEENKALWENNKLKLQQKLVIDTVTEVTARMEMLIEELYAFMPARSQDPKKPSRV

SEQ ID NO: 916819 - protein, 143 aa, Homo sapiens
MKDFTSVFVCLFVFEMESCSVAQVAVQWCDLSSLQSPLPRFKGFSCLSFPSHLAQLIFVFLVETGFHHVGQTGFKLLTSGDPPSSASQSAGITGAKLKICKRQLYAKLDKRKPQSGKVNLREKPFILWVMLSAHLSGDLKTRL

SEQ ID NO: 916820 - protein, 295 aa, Homo sapiens
MYHPRELYPSLGAGYRLGPAQPGADSSFPPALAEGYRYPELDTPKLDCFLSGMEAAPRTLAAHPPLPLLPPAMGTEPAPSAPEALHSLPGVSLSLENRELWKEFSSVGTEMIITKAGRRMFPACRVSVTGLDPEARYLFLLDVIPVDGARYRWQGRRWEPSGKAEPRLPDRVYIHPDSPATGAHWMRQPVSFHRVKLTNSTLDPHGHLILHSMHKYQPRIHLVRAAQLCSQHWGGMASFRFPETTFISVTAYQNPQITQLKIAANPFAKGFRENGRNCKRWELFIHLFMHSTNVY

SEQ ID NO: 916821 - protein, 45 aa, Homo sapiens
MYHPRELYPSLGAGYRLGPAQPGADSSFPPALAEGYRYPGERWDQ

SEQ ID NO: 916822 - protein, 338 aa, Homo sapiens
MMDKFRMIFQFLQSNQESFMNGICGIMALASAQMYSAFDFNCPCLPGYNAAYSAGILLAPPLVLFLLGLVMNNNVSMLAEEWKRPLGRRAKDPAVLRYMFCSMAQRALIAPVVWVAVTLLDGKCFLCAFCTAVPVSALGNGSLAPGLPAPELARLLARVPCPEIYDGDWLLAREVAVRYLRCISQALGWSFVLLTTLLAFVVRSVRPCFTQAAFLKSKYWSHYIDIERKLFDETCTEHAKAFAKVCIQQFFEAMNHDLELGHTHGTLATAPASAAAPTTPDGAEEEREKLRGITDQGTMNRLLTSWHKCKPPLRLGQEEPPLMGNGWAGGGPRPPRVS

SEQ ID NO: 916823 - protein, 818 aa, Homo sapiens
MLTVRGMVQPELGAEWEWAWCGVGEVGLWCPAGSPLEHLEPKKLSLTFAIPGTRPLIMMKVDPNPLRGLKEQRQAMLAPGPPFPVTQPPPPEVQRNLVPAAVNPYVMIFLPALFRVLVLAAVFGQLKEYQQRKSPGIPAGAKTKKKKTDSSPETTTSGGGHSPGDIQDILKVRVSNLNHSNGSQYQELAVALESSSVTISQLNENIESLAKKTNNEIHKAQMERLETINILTLEKADLKTTLYHTKRAARHFEEESKDLAGRLQYSLQRIQELERALCAVSTQQQEEDRGHCLSSPDQNFSLFTIQSSSCREAVLHRRLQQTIKERALLNAHVTQVTESLKQVQLERDEYAKHIKGERARWQERMWKMSVEARTLKEEKKRDIHRIQELERSLSELKNQMAKPPSLAPPAVTSVVEQLQDEAKHLRQEVEGLEGKLQSQVENNQALSLLSKEQKQRLQEQEEMLREQEVQRVREQERLCEQNERLREQQKTLQEQGERLRKQEQRLRKQEERLRKEEERLQKQEKRLWDQEERLWKKEERLQKQEERLALSQNHKLDKQLAEPQCSFEDLNNEKKSALQLEQQVKELQEKLDEVKEMQYVATYQQLTSEKEALHRQLLLQTQLVDQLQQQEAWGKAEHLEAASQQNQQLETQLSLVALPGEGDGGQHLDSEEEEAPRPTPNIPEDLESREATEPEAEAPAPGSGGEFVCGESYRALKEAMVKLKGRESFTVYESQGAVPNTRHQEMEDVIRLAQKEEEMKVKLLELQELVLPLVGNHEGHGKFLIAAQNPADEPTPGAPAPQELGAAGEQDATLVTLT

SEQ ID NO: 916824 - protein, 452 aa, Homo sapiens
MTCIQRTDHSHQLTDSIQKASLESPPTVYYSTGYSSRKMNPTLGLAIFLAVLLTVKGLLKPSFSPRNYKALSEVQGWKQRMAAKELARQNMDLGFKLLKKLAFYNPGRNIFLSPLSISTAFSMLCLGAQDSTLDEIKQGFNFRKMPEKDLHEGFHYIIHELTQKTQDLKLSIGNTLFIDQRLQPQRKFLEDAKNFYSAETILTNFQNLEMAQKQINDFISQKTHGKINNLIENIDPGTVMLLANYIFFRARWKHEFDPNVTKEEDFFLEKNSSVKVPMMFRSGIYQVGYDDKLSCTILEIPYQKNITAIFILPDEGKLKHLEKGLQVDTFSRWKTLLSRRVVDVSVPRLHMTGTFDLKKTLSYIGVSKIFEEHGDLTKIAPHRSLKVGEAVHKAELKMDERGTEGAAGTGAQTLPMETPLVVKIDKPYLLLIYSEKIPSVLFLGKIVNPIGK

SEQ ID NO: 916825 - protein, 155 aa, Homo sapiens
MADFTLPIRERFGDFQIASVYTILIFWPVSDHFSFIWQRREKGMSCQVVDADGSAGSHQKLTLKVYFNVAQIRANDVKRVLFLLEGCHLFLLQGKCLPSSLPNLQAEPTQLWLPCPPEDLRIHQQPKTPRKLFQGQASPAHVSTNGNMMSDAAWS

SEQ ID NO: 916826 - protein, 155 aa, Homo sapiens; identical to SEQ ID NO: 916825

SEQ ID NO: 916827 - protein, 174 aa, Homo sapiens
MKGFIMGVTTAYITEATAVFLGEDDTSELRSMSVFHASKNGKERHLSQAACIGDDSAVRLDVHSHLGDCGGGETDVRQGQVGEEEVHGGVEVGVRADGQDDEQVPQRHDQARGQEQPRKPGTGARERCIPNDPVPILSGIFDVISAALSILDTVIVAPTGLAVVYKEPPKGRAQ

SEQ ID NO: 916828 - protein, 483 aa, Homo sapiens
MFRDQVGVLAGWFKGWNECEQTVALLSLLKRVSQTQARFLQLCLEHSLADCAELHVLEREANSPGKCAAAAAAVPPAQPPLLPPLLCLGPGRGQSLPAAPGPGRRGPEALGIHPLRVSPHYRPPPTYLRRPLWDFAHCELRQPFPCGSYGSMNDGFFSHAVSWEITTHDEMPGTALQKPSLDKAVRAVWKSVTKGSGLSQALRKDIGRQSYGQQIWDQNLTLLTVIQSLNRADMFVRGQRRCLKDKEEDASSSPELPHGICTSPAQHLAHWIDTAMLATAITRMSIFPLSPTSGLHSLTERFILLNEQHSGHQWPSEWAEIPWAAPDPSKPLNQPLHKNRSLEKAFEETLPYASLFPSIVASGIKGGRTEAEDCSVSLPGAACEVTGALPGRSRWCCLETPPAFMSITAMSQRGLHQGRELNNGMDEEYLLQQYNSASDEIADALKVKHETIGEAAMEIGLQPSADWVRPTHIMDGTLLYSGH

SEQ ID NO: 916829 - protein, 153 aa, Homo sapiens
MGTVWVTPSPESITMPVVRPEVYKDSTAWMATYMAGDGVLLGSHTQLIVEGVVPDLLHVVPVGDDAVLHGVLQGQDASLALGLIAHIGLHLTHAPHHVLVPGAPHDGREDSPGGIVTCKAGLAHARAVVNDEHGSIIIHAGSDVSLRLVPVLA

SEQ ID NO: 916830 - protein, 153 aa, Homo sapiens; identical to SEQ ID NO: 916829

SEQ ID NO: 916831 - protein, 105 aa, Homo sapiens
MIHCSLDLLDSSDLPAAAPEVAGTTGSYSVTQAGVQWHNLGSLQPQHPRLKQSSRLSLLSSWDHRNPNCRTCSVKQPELNHLKCISQYSPQINLTPVTCVWVIFP

SEQ ID NO: 916832 - protein, 132 aa, Homo sapiens
PSSFMLQNSQNGCVYMNFGGNSEETELHADIDTDGLEDILGIVWKGGIGPLAVMRYRNKEWWAKCASSMQNRENSKCDENKKIRIERESKGSDFITVRHCLIPCSCATYRDPRPPPMIPGWRKQQASGIQDQ

SEQ ID NO: 916833 - protein, 259 aa, Homo sapiens
MATYQQLTSEKEALHRQLLLQTQFVDQLQQQEAWGKAEHLEAASHQNQQLETQLSLVALPGEGDGGQHLDSEEEEAPRPTPNIPEDLESREATEPEAEAPAPGTGGEFVCGESYRALKEAMVKLKGRESFTVYESQGAVPNTRHQEMEDVIRLAQKEEEMKHPSLQVKLLELQELVLPLVGNHEGHGKFLIAAQNPADEPTPGAPAPQELGAAGEQDVFYEVSLDNNVEPAPGAAREGSPHDNPTVQQIVQLSPVMQDT

SEQ ID NO: 916834 - protein, 127 aa, Homo sapiens
MICDYLCLFDEMTPYHYEMTFFIPDLPPSISRISPCLSFTVAAAPVQATLTLAGKTQQPLTWSHVAEHLLQLTAESHQAAIPPRSLLWGPLHVVNYSAREDGKMQRGGVTPEATQLTSEPKHEPQSL

SEQ ID NO: 916835 - protein, 141 aa, Homo sapiens
SHRPHPAPMQTEGPVSLPPCPTLTAPSLFPGRGQEGLENLPKAIRLPAAKEKGFSSPSACEVCRPGLHPPLSFDQETSHFVINCHEVQERIFSPCGVLSPAPLATLLKDPCSARQEWGAWGPSELPGCFCCFLSPVFLLAL

SEQ ID NO: 916836 - protein, 435 aa, Homo sapiens
GSGTLKVMRSKFTKECTRRLEPTERPLQIVYDYLSRLGFDDPVRIQEEATNPDLGCMIRFYGEKPCHMDRLDRILLSGIYNVRKGKTQLHKWAERLVVLCGTCLIVSSVKDCQTGKMHILPLVGGKIEEVKRRQYSLAFSSAGAQAQTYHVSFETLAEYQRWQRQASKVVSQRISTVDLSCYSLEEVPEHLFYSQDITYLNLRHNFMQLERPGGLDTLYKFSQLKGLNLSHNKLGLFPILLCEISTLTELNLSCNGFHDLPSQIGNLLNLQTLCLDGNFLTTLPEELGNLQQLSSLGISFNNFSQIPEVYEKLTMLDRVVMAGNCLEVLNLGVLNRMNHIKHVDLRMNHLKTMVIENLEGNKHITHVDLRDNRLTDLDLSSLCSLEQLHCGRNQLRELTLSGFSLRTLYASSNSESSERLSSTQPVTFLDLSRNC

SEQ ID NO: 916837 - protein, 346 aa, Homo sapiens
GSGTLKVMRSKFTKECTRRLEPTERPLQIVYDYLSRLGFDDPVRIQEEATNPDLGCMIRFYGEKPCHMDRLDRILLSGIYNVRKGKTQLHKWAERLVVLCGTCLIVSSVKDCQTGKMHILPLVGGKIEEVKRRQYSLAFSSAGAQAQTYHVSFETLAEYQRWQRQASKVVSQRISTVDLSCYSLEEVPEHLFYSQDITYLNLRHNFMQLERPGGLDTLYKFSQLKGLNLSHNKLGLFPILLCEISTLTELNLSCNGFHDLPSQIGNLLNLQTLCLDGNFLTTLPEELGNLQQLSSLGISFNNFSQIPEVYEKLTMLDRVVMAGNCLEVLNLGVLNRMNHIKHVDLR

SEQ ID NO: 916838 - protein, 138 aa, Homo sapiens
MDVDSGREFSIHCPYPDLWLSVPPCPNRIQSRPNLPSPLYKPVAAVPVAILMVLNSLWDTRICCKTLSCILSHPPLLAVPWSHVTTESAPHKGLNAPWVAVPTGKPVCALLRTGGLAEKRGWSPVGFTSIFTKRCAQE

SEQ ID NO: 916839 - protein, 158 aa, Homo sapiens
MGLITPRTTATSSQRNGTRNQASPSLQKSSQHVRTIIMDDARVVGAPEQTCMLSSGVALLHFWAGARGPGFVICPFPCLIPFPSKFPRLLFCQSVKRGKSGEESFVPGHWGLNMALLPGHCPNIYFYWHNFVESVMRYGVLDIFLTQDPSESPFYTAY

SEQ ID NO: 916840 - protein, 177 aa, Homo sapiens
MTIKSARCKLSVHLPFWGLEDDDPLLTASVTSAPVEVPKLQLLTSVHLQAQNHMQATKAWGLHPLKQWPDLYISPFLPWLACREPDLMRLMHYHENSTGKSTPIIQLPLTRSLLQHMEIMRVTIPDEILMRRQPNSIKRFVEDQIVADVRFYFWVLYSVPLVYVSVFNFQYYVEYEW

SEQ ID NO: 916841 - protein, 152 aa, Homo sapiens
ALLVLATVLCNLGAMRNLYAMHRRLQRHPRSCTRDCAEPRADGREASPQPLEELDHLLLLALMTVLFTMCSLPVIYRAYYGAFKDVKEKNRTSEEAEDLRALRFLSVISIVDPWIFIIFRSPVFRIFFHKIFIRPLRYRSRCSNSTNMESSL

SEQ ID NO: 916842 - protein, 207 aa, Homo sapiens
RSFFYILSTTICRKMLHRHMLIFRLPNLQMLDGSPVNSDDRAKAEFHLAELQAKKNSVIIILFTIFLLKHINGEAASADVEAAASYPEDLARIIDESRYTKKEIFNVDATALYQKKMPSRTFIAREEKSMTGFKASKDNKKNKNAGILTNNPRSIHAEIAFRQLRGISISPSLLSHQNIASPTAQIYQSNQDKRRIFGSNFPRSNRM

SEQ ID NO: 916843 - protein, 164 aa, Homo sapiens
MAHLQVLLCILTLPTILSTELLTINIGFLSYPFRVFFLLIEVHLFYGLNVCVLQNSYVETKVMVSEGPIHTLITESDGYFNRQQASLPTEPSLSGTSLHAGWLGQAGMKQVRAKLRFNGRIQGVKSIGAYVLSGKKPTNIKGFAMAGWQEKASMFSWQNIKRLL

SEQ ID NO: 916844 - protein, 268 aa, Homo sapiens
MGHTCPKGMFLAPAKVPIARYNRTSYFYPTFSESSEHSHLLVSPVLVASAVIGVVIILSCITIIVGSIRRDRQARLQRHRHRHHRHHHHHHHHRRRRHREYEHGYVSDEHTYSRSSRRMRYACSSSEDWPPPLDISSDGDVDATVLRELYPDSPPGYEECVGPGATQLYVPTDAPPPYSLTDSCPTLDGTSDSGSGHSPGRHQQEQRTPAQGGLHTVSMDTLPPYEAVCGAGPPSGLLPLPGPDPGPRGSQGSPTPTRAPASGPERIV

SEQ ID NO: 916845 - protein, 268 aa, Homo sapiens; identical to SEQ ID NO: 916844

SEQ ID NO: 916846 - protein, 135 aa, Homo sapiens
MFKQKPVPSRPLVLSALRPPACPHWPLLFHSTLHTHSPPGLCPEPLLGPPPRTGEPWSRAGPLTVLSSHRVHGTYTSASRGHVNAASSAVRQLLFLSDRSWPVSPPTYVELSELRSPLTTVLPLAHNVKVVSIPS

SEQ ID NO: 916847 - protein, 223 aa, Homo sapiens
ATLSMQQIIFNVQILKQCSRVMRDNKSCAFFMGKLNVCFEGTVIAGYSVFVIMCVIDMAVASALQFPKKSSHPHRTALHLASANGNSEVVKLLLDRRCQLNILDNKKRTALTKAVQCREDECALMLLEHGTDPNIPDEYGNTALHYAIYNEDKLMAKALLLYGADIESKNKIESHSVSQAGVQWCDHSSLQPRPPEAQMVLQPQPQLFFSFFLFIFIFIFIFF

SEQ ID NO: 916848 - protein, 179 aa, Homo sapiens
GLKRARALLWIRLWLKRTSCMFVLVPMLKGWQLWSRNSLHGKQKVKPNHPSIFQVFACAISADIPLAKATHKTNLQVKGGKAHLVSSGITSNYKAKGMDIRRGEELVVSSLKNRVNVGGQKNESYDQLSIPLEATGANSKLFLMKAGCSKQDVGKMTNCICHPEGMLRAVMPQVQCFCD

SEQ ID NO: 916849 - protein, 179 aa, Homo sapiens; identical to SEQ ID NO: 916848

SEQ ID NO: 916850 - protein, 179 aa, Homo sapiens; identical to SEQ ID NO: 916848

SEQ ID NO: 916851 - protein, 774 aa, Homo sapiens
MLAPGPPFPVTQPPPPEVQRNLVPAAVNPYVMIFLPALFRVLVLAAVFGQLKEYQQRKSPGIPAGAKTKKKKTDSSPETTTSGGGHSPGDIQDILKVRVSNLNHSNGSQYQELAVALESSSVTINQLNENIESLAKKTNNEIHKAQMEQLETINILTLEKADLKTTLYHTKRAARHFEEESKDLAGRLQYSLQRIQELERALSAVSTQQQEEDRGHCPGSPDQNFSLFTIQSSSCREAVLQRRLQQTIKERALLNAHVTQVTESLKQVQLERDEYAKHIKGERARWQERMWKMSVEARTLKEEKKRDIHRIQELERSLSELKNQMAEPPSLAPPAVTSVVEQLQDEAKHLRQEVEGLEGKLQSQVENNQALSLLSKEQKQRLQEQEEMLREQEAQRVREQERLCEQNERLREQQKTLQEQGERLRKQEQRLRKQEERLRKEEERLQKQEKRLWDQEERLWKKEERLQKQEERLALSQNHKLDKQLAEPQCSFEDLNNEKKSALQLEQQVKELQEKLDEVKEMQYMATYQQLTSEKEALHRQLLLQTQFVDQLQQQEAWGKAEHLEAASQRNQQLETQLSLVALPGEGDGGQHLDSEEEEAPRPTPNIPEDLESREATEEQARLCGQRKVRRLCRLHLAHLVALAWKEPEAEAPAPGRTGDEFVCGESYRALKEAMVKLKGRESFTVYESQGAVPNTRHQEMEDVIRLAQKEEEMKVKLLELQELVLPLVGNHEGHGKFLIAAQNPADEPTPGAPAPQELGAAGEQDGFVCALGS

SEQ ID NO: 916852 - protein, 205 aa, Homo sapiens
LHAFEPAMPDRVFQQREPLGIFFWCSLSCLHRGLPDTSQRTERATANDRKANTTWLRQEGQELAKPGIAGGGSNSEHNTAPPGPWAFPGSRALGVFRLPSLSQQILVAQGCLVLHGDQKKGSTSSSLKHLCSSQGSRETCPSLVGIQIGNDNITHSKQPNQYVMGEPNDDICKYTSTAAMAWEGHSEQELVLLRNKDLDHSISKD

SEQ ID NO: 916853 - protein, 232 aa, Homo sapiens
SVLCGRGLCLPCDAMGLLQSCDPQSAQPMTIAMENPKELMTSLIELLPLEASCASSAQPPPSVATAGLPSQKPGLPRQDLSLPSAAKSLSSRATCLMTGSPQVTGSWERDPERTRVLSLDVGHAAGKGRMRGDKDLASHLQTVQPRPCLEWDLLNGHSRTLEEAPLSQCCWGLRGLEPGALMRPVGGASLSTLRSQLHISFPLTLEPWVVQGGHSLLSVPWPIPKSPPLTTS

SEQ ID NO: 916854 - protein, 127 aa, Homo sapiens
MFQVPLEGAEILGMPGAWLHGLAALMPSCSPQQASKAEENGSNSFMHSMVPQLEWQMETTQSLVDSYVAIVNKTVWDLMVGLTPKTIMHLMINNNKEFIFSELLANLYLHGDKNMLMEESAEQAQRS

SEQ ID NO: 916855 - protein, 140 aa, Homo sapiens
MPTTPVSTLRMPIFQVLAGAAHADSGSQGEKTPEVRQSIKPQVKRSKLVLVLQVAHLALFQLRWQEWNLGFTTPELNFGHPLRNLWDHQLRSPKISQTSLDTPANSWKTCISYVGRKHPRLKRLLPLILKKNPFLLKKDK

SEQ ID NO: 916856 - protein, 177 aa, Homo sapiens
LSTDMLLETYLCSPTTLLDGHQDNCPLLTITVILHSHFKHKAIPERTLFSTNLHLFLNSWCALRALLLYSSLGPGQPLEAKDDWGDSKKLNRDLDLDLSPKCVAPSLTHCSTLLFSSLLALKTFGFMFTYMKCTKSLVMAVFYISNQMQLSRSMHEVNHKIEIELNRSTLESTISRY

SEQ ID NO: 916857 - protein, 174 aa, Homo sapiens
MAAGLLTETLGPWLWPVAYVSKQLERVSKGWPLMFEGCGINCPDRPPSRILRSLGLTWRTVGIRCPRRKLKSADGRTPIAGVGGTPNEAGTESQPLVPPGIGPPSRILRTLGPTWRTVGIRCPRRKLKSADGRYVLVHNLKEIDDAVTDVFAYGDKHQPHSLAYFLLTLTPTDP

SEQ ID NO: 916858 - protein, 271 aa, Homo sapiens
LLQGVGQGDSLPQVTGRAVSVLLSPLMLQQRGCHTATPTAAQEDAASGCPTQVAKRGTDHPSQAQCGVRPQGQGGVTAPLGDRHLPAPSHLHGPRGRGAAACVMPLAPALPQVLSVLCVLASPRQGLLSFPVSTAGPDGPADPSRPQSGAKVYNLRAQGTCIRPKKEIFNHEKNIRKAQTEGSSTKYSTRAVLKTISVITDRQSPRNCQPRGAHGNPMTVTWNPGWDPGTETATRGNLRKLELKQCVRLIHSCPLVDGCRILTNVKVSVVL

SEQ ID NO: 916859 - protein, 264 aa, Homo sapiens
MNAKLLSLTGGLSLLRVAHRAVFQAQDMGSQLLSQCGGWPIGGSLCSASSPAGFSGKRQRQFGEKDTGKEGAVKGESSLPVKDQPSVKGQLLAGWPQAESGSQGGAAAGWDWGILHLIQVKQSLVQHPLCTEVLLFGAFQFIFQVINCLFQLGYRSLSKLSTGLCLLGFISKNLDFFLIFVFFLRVLFFSSTQTLQVLVHQSNLLIHLSATGLCQLSSFLCAFQVSFNGHQLTSHLFILPICLFCNVLSFFELEFLEFHLFFIF

SEQ ID NO: 916860 - protein, 69 aa, Homo sapiens
SPVSTLAGSPCLSGCPGLCQLSSFLCAFQVSFNGHQLTSHLFILPICLFCNVLSFFELEFLEFHLFFIF

SEQ ID NO: 916861 - protein, 258 aa, Homo sapiens
MRQITRGWPKCIPSVAATALLTEESRKITFRGLTPEHKGNVGHTGKGPLESSSPDPFLCGQERGKQVQDCYIDGKCSPQGKNALKMYSGEFDPVRVCVPFSLSDLKQLKIDLGRFSDNPDGYIDVLQGLGQSFDLTWRDIMLLLDQTLTPNERNATITAAREFGDLWCLSQVNDRMTTEQRERFPTGQQAVPSVDPRWDTESEHGDGNKPPPHPCPLCQGNYWKAYCSRGRRSSESEADPAAGLRVPRASTSPCHHPH

SEQ ID NO: 916862 - protein, 237 aa, Homo sapiens
KSSFIEAECSGSCLQSQRFGRPSNYGSHSLTHLHKAPSMVSVTKEWFAGTAQGIVFDRHVVDDSRPSEPADMLPRECSRDLRKWWQQPGTLRCLSGRGRARSARSSRRGGFDARSPPRLSGKRHIPLPEWPPVLLSAQHCQGSLPQTWGSPGTETAPCNPKDLDGALAQRSSINICPMNKCHSLELVVLGEPEAKPSCPSHRQLVARRKGHLCPGRRGVVMESLTLALWSPLRFDFS

SEQ ID NO: 916863 - protein, 728 aa, Homo sapiens
MTWRWHQPLPQVDAPPRDLQAAAAPGQALGYHLAQHLCPEHPQGLPLGCLARTAGMARSLIGAKDACLLELAVFLEKALHVTSSMKPDTVPSHDPRAALTTACPGLIFKEKVTSLKFKEKPTGLETRSSQTKLEVALYMFLRNPDTEAVLVAMSCFRHLCEEADTRCGVDEVSLRNLLPNSNTFMEFACQQCDVNSYPKAQMEDGQRRMSHVSGGGPIDLSDTDSLQAWINMTGFLCALGGVCLQQRRNSGLATYSPPVDIMKNLLDNHTEGSSEHLEQASIETMMLNLVSHITILVEPSCEDSQGLNYLRVCPGNQPALVQGILERVVDGPVPHQTVRLEDLDESGEPQAGEPVLPGILRPPYLAEGLGLGLPVTAIPVLPAEGAGLLHYLSKMLLMVATGLLRPYMGKGFVNCEAFLCKAEHDVPGAPGPWSSALGGTTCMRQRHSGDWPAMPSRAEDYEVLYTIGTGSYGRCQKIRRKSDSKILVWKELDYGFMTEAEKQMLISEVNLLCKLKNPNIVHYYDRIIDRTNTTLYIVMEYCEEGDLASVITKGTKERQYLDEEFVLRVTTQLTLALKMLKDYHRPSVEEILENPLIADLVAEEQRRNLERRGRQLGEPEKLPDSSPVLSELKLKEIQLEEQERALKAGEERLEQKEQELCVCERLAEDRLTIPENLLKNYSLLKEQKFLSLASSPELLNLPSSVIKKKVHFSGESKENVMRKVSETG

SEQ ID NO: 916864 - protein, 750 aa, Homo sapiens
MRFPPPPGGVECSDVTVLLGTLKEYQQRKSPGIPAGAKTKKKKTDSSPETTTSGGGHSPGDIQDILKVRVSNLNHSNGSQYQELAVALESSSVTINQLNENIESLAKKTNNEIHKAQMEQLETINILTLEKADLKTTLYHTKRAARHFEEESKDLAGRLQYSLQHIQELERALCAVSTQQQEEDRGHCPSSPDQNFSLFTIQSSSCREAVLQRRLQQTIKERALLNAHVTQVTESLKQVQLERDEYAKHIKGERARWQERMWKMSVEARTLKEEKKRDIHRIQELERSLSELKNQMAEPPSLAPPAVTSVVEQLQDEAKHLRQEVEGLEGKLQSQVENNQALSLLSKEQKQRLQEQEEMLREQEAQRVREQERLCEQNERLREQQKTLQEQGERLRKQEQRLRKQEERLRKEEERLQKQEKRLWDQEERLWKKEERLQKQEERLALSQNHKLDKQLAEPQCSFEDLNNEKKSALQLEQQVKELQEKLDEVKEMQYMATYQQLTSEKEALHRQLLLQTQFVDQLQQQEAWGKAEHLEAASQRNQQLETQLSLVALPGEGDGGQHLDSEEEEAPRPTPNIPEDLESREATEPEAEAPAPGRTGDEFVCGESYRALKEAMVKLKGRESFTVYESQGAVPNTRHQEMEDVIRLAQKEEEMKVKLLELQELVLPLVGNHEGHGKFLIAAQNPADEPTPGAPAPQELGAAGEQDVFYEVSLDNNVEPAPGVAREGSPHNNPTVQQIVQLSPVMQDT

SEQ ID NO: 916865 - protein, 435 aa, Homo sapiens
MQGQGRRRGTCKDIFCSKMASYLYGVLFAVGLCAPIYCVSPANAPSAYPRPSSTKSTPASQVYSLNTDFAFRLYRRLVLETPSQNIFFSPVSVSTSLAMLSLGAHSVTKTQILQGLGFNLTHTPESAIHQGFQHLVHSLTVPSKDLTLKMGSALFVKKELQLQANFLGNVKRLYEAEVFSTDFSNPSIAQARINSHVKKKTQGKVVDIIQGLDLLTAMVLVNHIFFKAKWEKPFHPEYTRKNFPFLVGEQVTVHVPMMHQKEQFAFGVDTELNCFVLQMDYKGDAVAFFVLPSKGKMRQLEQALSARTLRKWSHSLQKRWIEVFIPRFSISASYNLETILPKMGIQNVFDKNADFSGIAKRDSLQVSKATHKAVLDVSEEGTEATAATTTKFIVRSKDGPSYFTVSFNRTFLMMITNKATDGILFLGKVENPTKS

SEQ ID NO: 916866 - protein, 403 aa, Homo sapiens
PQLDCHRAGGRGEIKVRRELQPSKQVSGLTNHARTGQEKRNLQRLVLETPSQNIFFSPVSVSTSLAMLSLGAHSVTKTQILQGLGFNLTHTPESAIHQGFQHLVHSLTVPSKDLTLKMGSALFVKKELQLQANFLGNVKRLYEAEVFSTDFSNPSIAQARINSHVKKKTQGKVVDIIQGLDLLTAMVLVNHIFFKAKWEKPFHPEYTRKNFPFLVGEQVTVHVPMMHQKEQFAFGVDTELNCFVLQMDYKGDAVAFFVLPSKGKMRQLEQALSARTLRKWSHSLQKRWIEVFIPRFSISASYNLETILPKMGIQNVFDKNADFSGIAKRDSLQVSKATHKAVLDVSEEGTEATAATTTKFIVRSKDGPSYFTVSFNRTFLMMITNKATDGILFLGKVENPTKS

SEQ ID NO: 916867 - protein, 234 aa, Homo sapiens
MASYLYGVLFAVGLCAPIYCVSPANAPSAYPRPSSTKSTPASQVYSLNTDFAFRLYRRLVLETPSQNIFFSPVSVSTSLAMLSLGAHSVTKTQILQGLGFNLTHTPESAIHQGFQHLVHSLTVPSKDLTLKMGSALFVKKELQLQANFLGNVKRLYEAEVFSTDFSNPSIAQARINSHVKKKTQGKVVDIIQGLDLLTAMVLVNHIFFKASGKSPLPWIFQKEFPSWWGTVMFF

SEQ ID NO: 916868 - protein, 138 aa, Homo sapiens
MLSPLKRRRPLSSSRQNGRFTASMHCVPRKTAGTQCQPVKAPMGAVPCRGTGEELRKVFKAHHHLYQCALNSRSMPYLQALYISHQFNLWRTMGNEELAPNVISYNKKILKFMWKFKEPNSKSNPEQEQNKIIFTIIY

SEQ ID NO: 916869 - protein, 189 aa, Homo sapiens
LITFSRFEMFSVTILLNKLSTLISLSLCLSSLRPGHTLVDAKHGVEITSDGMETIFIDSVEDSEPEEEEEGKGSEIGKKRKQKKPKLKNLCATGVMENPYEKLENNKQCPIMIVLFPVEHIATMNEIEVLSTKMDAMLLGENLVYPTASNLKYFTNSSLALFQEEIERLTEFVQVSECMQRVLCEVQIR

SEQ ID NO: 916870 - protein, 112 aa, Homo sapiens
MEFGLSWLFLVAILKGVQCEVQLLESGGGLVQPGGSLRLSCAASGFTFSSYAMSWVRQAPGKGLEWVSAISGSGCHEAPALAFTQKTIDRLAVNPPTVNVSVVMAEADGTCY

SEQ ID NO: 916871 - protein, 192 aa, Homo sapiens
MEFGLSWLFLVAILKGVQCEVQLLESGGGLVQPGGSLRLSCAASGFTFSSYAMSWVRQAPGKGLEWVSAISGSGGSTYYADSVKGRFTISRDNSKNTLYLQMNSLRAEDTAVYYCAKDTVRGSHCEPRHKPPCRNDGGEISGRGRSGPADQSHPQRQVQMEAVSCQDGPLGPHSRAQGIFLELSDWSLLERD

SEQ ID NO: 916872 - protein, 155 aa, Homo sapiens
QSQEDLVKRWQSRMSSGRKESQEERGKEMSKYQGHVCQARTLAQQDTRRGGDPEKCELCLSLKGFSLQSIHFLERLSSSSSSSSSSSSSSSSSSSSSSSSSSSSSSSSSSSSSSCSSSSSSSSGTAEVVSKEEIKDDLTLQNFNIYHACGNALSP

SEQ ID NO: 916873 - protein, 163 aa, Homo sapiens
MGISSLVLIKLQLEIKYVNHSSWKGFLLSGLVMQSTPRGIQEGGGGVYLENNMEGPEGRRNGSHSPVPGQEVSTPGSVLLAVPLTFCVLEYSRRTGWHGPAGHSTWEKTTDSTACSTARTRATAKNIITQKCGTETMQQRGLSRDSGGGTERLEEVGLVLRDG

SEQ ID NO: 916874 - protein, 102 aa, Homo sapiens
IMHSLGQERAMAAPTRMLCRDLWLLLLSQPGGSTSGSLATLPSSLFPTIACFPFFCLLNFAALPAYCRSTSVSLFDFLQEGKGLRDPVPSTVPCPESGISKW

SEQ ID NO: 916875 - protein, 101 aa, Homo sapiens
MARGDAGRGRGLLALTFCLLAARGKGGRPERQERLRSAGAPAPWSASGCGAGSSRSPEQVRGLRVQVPAMPARGSASCGRGAFVGRACPQWVCAFGSQSLE

SEQ ID NO: 916876 - protein, 290 aa, Homo sapiens
MARGDAGRGRGLLALTFCLLAARGELLLPQETTVELSCGVGPLQVILGPEQAAVLNCSLGAAAAGPPTRVTWSKDGDTLLEHDHLHLLPNGSLWLSQPLAPNGSDESVPEAVGVIEGNYSCLAHGPLGVLASQTAVVKLATLADFSLHPESQTVEENGTARFECHIEGLPAPIITWEKDQVTLPEEPRLIVLPNGVLQILDVQESDAGPYRCVATNSARQHFSQEALLSVAHRGSLASTRGQDVVIVAAPENTTVVSGQSVVMECVASADPTPFVSWVRQGDVLFKLYYL

SEQ ID NO: 916877 - protein, 163 aa, Homo sapiens
ARVPPSLPKETMTTHKRHFFLRSLGSHCNASFLRLRKDLYPEGGGGGVLNVPKPKAGPYVELRKPWPGTGECKGRLGDPGTWCKPRTSTSQLCSQGQLTPPWSLECAYRLPCWGAARPGQQTALYCLWPVDSRCSINLSFLSETQSPYVDDSIFLKDLKFHPP

SEQ ID NO: 916878 - protein, 801 aa, Homo sapiens
AECSSPLTVAPTGLGYCGHRHSSLGAMEEPGATPQPYWGLVLEEPRRVVAALPEGRRPDSNPYGFPWELVICAAVLGFVAVPFFLWRSFRSVRSRLYVGREKELAVALSGLIEEKCRLLEKFSLVQKEYEGYEAESPLEDASFEKEATEAQSLEANCEKLNRSNSELEHEILCLEKELKEDKSKHSEQDEVMADISKRIQSLEDESKSLKSLLAEAKMTFKRFQMNEEQMKIAIQDALNENSQLQESQKQLLQEAEVWKEQVSELNKQKITFEDSKVHAEQVLNDKENHIETLTERLLKIKDRAAMLEEDITDDENLELEMNSESEDGAYLDNPPKGALKKLIHTAKLNASLTTLEGVRNQIYIQLSEVDKTKEELREHIKNLQTEQASLQSENTYFESENQKLQQKLKVMTELYQENEMKLYRKLIVEENNRLEKEKFSKVDEMISHATEELETYRKRAKYLEEELERTIHFYQGKIIYHEKKAHDNCLAAQTAERNLNDLRKENAHNRQKLIETDFKIKFLEKDPYALDVPNTAFGREHSSYGPSPLGRPSSETRAFLYPPTLSEGPLRLSPFPPGGGGRGPRGPGNPLDHQITSERGESSCNRFTDPHKAPSDTGPLSPPWEQDRRMMFPPPGQSYPDSALPPQRQDRFYSNCARRSGPAELRSFNMPSLDKMDGSVHSEMEFSGNDTKDNLGNLNVPDSSLPAESEATGPGFVPPPLAPIRGPLFPVDTRGPFMRRGPPFPPPPPGTMFGASPDYFPPRDVPGPPRAPFAMRNVCPLRGFPPYLPPRPGFSPPTRTF

SEQ ID NO: 916879 - protein, 134 aa, Homo sapiens
MMLIRLIKFGETKFNVTEPKEPGESVVIRIPVIHQGDTSKVSIAYGGHFLFTQEPTISHKIMSTGIRLSTAAEKAWERRSCSGRRRAHVEAAPRPGGGAVTWGSVGRCLGNAERALQGLFGVPELSAPEGTYFI

SEQ ID NO: 916880 - protein, 139 aa, Homo sapiens
MEGSKKEETSPYSQATAHIEGPPLNKKMGVGQEVFCNYSFRIKIADKQFTQVMVRGSQGQFPHTSSLAFCHVRYDCAPPSPSAMIVRPPQPCGTGSCFSLFGVSERLVARTPGKRKAEGHSGKRYHLSLAAQARFYGLE

SEQ ID NO: 916881 - protein, 170 aa, Homo sapiens
MEGSKKEETSPYSQATAHIEGPPLNKKMGVGQEVFCNYSFRIKIADKQFTQVMVRGSQGQFPHTSSLAFCHVRYDCAPPSPSAMIVRPPQPCGTGSCFSLFGVSERLVARTPGKRKAEGHSGKRKPRAKRMATSDHSTSPAWCTFLGSLSRLPSIAFIFLLPIKPVLFSF

SEQ ID NO: 916882 - protein, 144 aa, Homo sapiens
MEGSKKEETSPYSQATAHIEGPPLNKKMGVGQEVFCNYSFRIKIADKQFTQVMVRGSQGQFPHTSSLAFCHVRYDCAPPSPSAMIVRPPQPCGTGSCFSLFGVSERLVARTPGKRKAEGHSGKRWRQKLDWAQEYVFLKFSRRF

SEQ ID NO: 916883 - protein, 126 aa, Homo sapiens
MEGSKKEETSPYSQATAHIEGPPLNKKMGVGQEVFCNYSFRIKIADKQFTQVMVRGSQGQFPHTSSLAFCHVRYDCAPPSPSAMIVRPPQPCGTGSCFSLFGVSERLVARTPGKRKAEGHSGKRPR

SEQ ID NO: 916884 - protein, 158 aa, Homo sapiens
MTAKLFIAQFTEYFKLPVKTYCSEQKLPFKILLLIDNAPSHSKALMEIVQEINVVFMPVNTTCILQPISQGIISNLKSYPLRPTFYVIKNMPDSWEEVKMSTLTAIWKKLVPILMDDFEGFRTSVKEVTTDWVEKARELELEVEPENVTELLQSHDKT

SEQ ID NO: 916885 - protein, 158 aa, Homo sapiens; identical to SEQ ID NO: 916884

SEQ ID NO: 916886 - protein, 305 aa, Homo sapiens
AAARRRPRACPTPGPGPSPPPPGSHVTAPPPSARPARPPRVRGPAAAPGRRGSGGAGAMAERGRLGLPGAPGALNTPVPMNLFATWEVDGSSPSCVPRYAPPAALCSRRAPAGGVLAAASARPIPGPGPPAEPRSPPAPPPAGSTRAAAAPPQLRQARPQPPRSRAPGAALSFRGPGAAQTRRDLGAPGRRSPGSPQPHLHTCLNAVPAGVTRVLPLSGTTRFLSRSATLSDLGLGATPGARGAQDSVVSSVQRAVEMPCPAGRGRPRGYLVGAVSHLEASPSQYCYLRLPVDLAIAEDWLFCTW

SEQ ID NO: 916887 - protein, 904 aa, Homo sapiens
MAERGRLGLPGAPGALNTPVPMNLFATWEVDGSSPSCVPRLCSLTLKKLVVFKELEKELISVVIAVKMQGSKRILRSHEIVLPPSGQVETDLALTFSLQYPHFLKREGNKLQIMLQRRKRYKNRTILGYKTLAAGSISMAEVMQHPSEGGQVLSLCSSIKEAPVKAAEIWIASLSSQPIDHEDSTMQAGPKAKSTDNYSEEEYESFSSEQEASDDAVQGQDLDEDDFDVGKPKKQRRSIVRTTSMTRQQNFKQKVVALLRRFKVSDEVLDSEQDPAEHIPEAEEDLDLLYDTLDMEHPSDSGPDMEDDDSVLSTPKPKLRPYFEGLSHSSSQTEIGSIHSARSHKEPPSPADVPEKTRSLGGRQPSDSVSDTVALGVPGPREHPGQPEDSPEAEASTLDVFTERLPPSGRITKTESLVIPSTRSEGKQAGRRGRSTSLKERQAARPQNERANSLDNERCPDARSQLQVQLQIPRKTVYDQLNHILISDDQLPENIILVNTSDWQGQFLSDVLQRHTLPVVCTCSPADVQAAFSTIVSRIQRYCNCNSQPPTPVKIAVAGAQHYLSAILRLFVEQLSHKTPDWLGYMRFLVIPLGSHPVARYLGSVDYRYNNFFQDLAWRDLFNKLEAQSAVQDTPDIVSRITQYIAGANCAHQLPIAEAMLTYKQKRKKHFHFDFTLSPDEESSQKFIPFVGVVKVGIVEPSSATSGDSDDAAPSGSGTLSSTPPSASPAAKEASPTPPSSPSVSGGLSSPSQGVGAELMGLQVDYWTAAQPADRKRDAEKKDLPVTKNTLKCTFRSLQVSRLPSSGEAAATPTMSMTVVTKEKNKKVMFLPKKAKDKDVESKSQCIEGISRLICTARQQQNMLRVLIDGVECSDVKFFQLAAQWSSHVKHFPICIFGHSKATF

SEQ ID NO: 916888 - protein, 144 aa, Homo sapiens
VRDMEHCDHITMPSPAWAAGISGLIRAERSGSCWPHATDFLSQEQPSSLSLREKFNYKKFANIFGKKVCWSRGATVELIIWSAMALGQSNRHARQSSAGKFQTPQARFPYKEPVCKCVCSRIFVHGNESVCEKTQFLTTDALLR

SEQ ID NO: 916889 - protein, 1673 aa, Homo sapiens
SLFWKNADKHKKRTPSFLPLCNLPSSLQPAPPLLSVAPSFPPLCAPSSLPLCSPLLPCSCRKSSKTCSDVMSVDAQTLKKKMGKLACDPAAHSILSSLLLYVTGRADRPPGTEAGGSRPSHQPQTQEATQRPTRFQLLQAKFLGTGRERYLKRTREVGRLISKDKQGPGGGLVGATINKLLEKTKEPAPKPCLSEKPRWGHPAGKSTVKNILKIFLAAEEKEAKEKEAREKPPVERPKAARGLLPKIMGKSSVLSKLREKFEQNSCLCSEASALRLHTQERKKRNLQRKRMHRPEVRVLHTATMASTCVKMPPARFLACTAEPLPALSIATVVCGPRSWLSHCTKISHSEARRPPRGEASVPPSARETGPSGNKAVGKGPLEEEPQRQPRPSKPVTPQVMAQRDGHAVPSLAFSCAPCTGGVLPGLVPASSPLGPASPWGTGSAGGDGTADPTAESTAGGVQEVRGARLTWPPGPPGECAGEGPEITMTVCSSEDEREGAGFPDPGRDPLFATQKYFPEQKVPEHIPPLNAPSVQAARRTQPATEPPRITVQIPVVHEMPAPPTRLQNMSSGENKPCICGGENVVENAHTEFPTVTENRRGHRAPVELSKLSGMQAGLSASSPQGPRAAPRLAAARGAVGADHSVPETLLTQRLQTDPAGGKENKGSFENSHGPRNPDDISGERTSELRDVKHPLPESNEISMQKKGSATNDPAASQNLLRGNTSHASSSQQVPSPTGRNPTGAPTSLAASSKGRTGPEGVTPMGMTVPGALEECRRPLLIESSQPLKAAEEITSHDVRENPLSSLNEPPKPGMKACGAMAAAGSVASRATPAPAPGSTQSPGDRTAGEPETLGQWGSRALSESHPRGEALPRDPHSHGLLAPGGSLEPKSGAAGRSLLRGVALVQHPEDIATLARHPEDAAALARHPEAARLYISNTSAASRHTAAVGGRKDVAVEGNLLGFSTESGIPASDHPRPQARSVAESPSYGPGLPPSPPENPQAKGREGVRFPRGAEPDHLLPAVPPAEVDMGWVGGTHQRGPPHLQAHLPPTAGDTQAKLRASVPEPRTQAGESQERPLTQADLGRQQSHQAQEETPQPGDAGKRVAPSGSKVVLNPAKEPQTWWAQDLAGDKGMAIGVGGACQRSDQGQQHLQGPWEERGRSTAWGEGTRAARNPAVPPGEPEGPGSPAAQGQAQKQVQEWDRGQVQGHAQEQAQWQTQIEAQGQAQEQAQGGTQGHSQGQAQKQFQNWAQGQAQGHAQEQAQWQTQIEAQGQAQEPAQGGAQGQVQGQAQKWAQGQIQGQAQKQVQGEVQKWAQEEAQGQAQWQTQIKAQKWAQEQTQKGAQERVQGQAQKGAQERAQEQAQEQTQIEAQGQAQKGAQERAREQAQKGAQERAREQAQKGAQERAREQAQKGAQERAREQAQKGAQERAREQAQKGAQERAREQAQKGAQERAQEQGREQTHIEAQGQAQKGAQEWARDRARDQGWEQTQIETQRQTQKGAQERAWEQGREQALTSGMAPRAWEQPISGIAEGVDAAGRSGGSRSPAPRDGGQSGGSGLGEPSAGYPPPGSRPLRGKSIATSPLGLGKSPTEPKPEAGGCGTPQAPAQEGSPDHPGAERALQDRMEASEPERRGRSRHLAKYKAQSFRDQRAFDLSFRPMSVRASDTSELPK

SEQ ID NO: 916890 - protein, 175 aa, Homo sapiens
MRLKTILTEQGDNWRLGDQGKANVRQPLAQVPAGALLHLVRQLVLVLQEPHGVIRQPAGPQPGGLGPTHLQLVGLVPVVGAIAREECGAQCGQDGGRPQGTGALVRAGLDKTFKEGITPTSSSVGSEKQVGPGPPDVHNPYLSGSSKMGRHIQEGTTHRRQPRNGRKSFEYFFKH

SEQ ID NO: 916891 - protein, 125 aa, Homo sapiens
MLVKVPQQIRRVCTQLEGLMDNTELPPFLISCHLLQGREKEKACVPSYIPNKNENVCPTKNLYTNVHSEIIMAIKWISPKKYPSLEWIMGYIPTIEHYWARKRNEVLMHATTWTNLENIMQKSAH

SEQ ID NO: 916892 - protein, 226 aa, Homo sapiens
MATKIDKEACRAAYNLVRDDGSAVIWRNFSFVSTPRSPGSRGASCTRAGLQAGRIRASRACLPRLIPGRRARPPRASPWPARLLDCPLQAPRRAAPALMCVCFFLLPTQRVTFKYDGSTIVPGEQGAEYQHFIQQCTDDVRLFAFVRFTTGDAMSKRSKFALITWIGENVSGLQRAKTGTDKTLVKEVVQNFAKEFVISDRKELEEDFIKSELKKAGGANYDAQTE

SEQ ID NO: 916893 - protein, 130 aa, Homo sapiens
ARKLLRDDGSGVIWVTFKYDGSTIVPGEQGAEYQHFIQQCTDDVRLFAFVRFTTGDAMSKRSKFALITWIGENVSGLQRAKTGTDKTLVKEVVQNFAKEFVISDRKELEEDFIKSELKKAGGANYDAQTE

SEQ ID NO: 916894 - protein, 142 aa, Homo sapiens; identical to SEQ ID NO: 756005

SEQ ID NO: 916895 - protein, 142 aa, Homo sapiens; identical to SEQ ID NO: 756005

SEQ ID NO: 916896 - protein, 142 aa, Homo sapiens; identical to SEQ ID NO: 756005

SEQ ID NO: 916897 - protein, 142 aa, Homo sapiens; identical to SEQ ID NO: 756005

SEQ ID NO: 916898 - protein, 142 aa, Homo sapiens; identical to SEQ ID NO: 756005

SEQ ID NO: 916899 - protein, 142 aa, Homo sapiens; identical to SEQ ID NO: 756005

SEQ ID NO: 916900 - protein, 142 aa, Homo sapiens; identical to SEQ ID NO: 756005

SEQ ID NO: 916901 - protein, 142 aa, Homo sapiens; identical to SEQ ID NO: 756005

SEQ ID NO: 916902 - protein, 142 aa, Homo sapiens; identical to SEQ ID NO: 756005

SEQ ID NO: 916903 - protein, 142 aa, Homo sapiens; identical to SEQ ID NO: 756005

SEQ ID NO: 916904 - protein, 154 aa, Homo sapiens
MIVCEINKKYKIVPGIMDNGLNTGTGWIAVTTLDVPYLGHTSEQPGVAALPLCRAGLPSRFPRPVDSLPSACTVFICFAFLEDSYTPVKARCECSLCSDALLVFVVLVSRVVVVCMSVSSTPWRSPPGERDFVPLVVYWQRWEQYLAACTDVVE

SEQ ID NO: 916905 - protein, 154 aa, Homo sapiens; identical to SEQ ID NO: 916904

SEQ ID NO: 916906 - protein, 142 aa, Homo sapiens; identical to SEQ ID NO: 756005

SEQ ID NO: 916907 - protein, 74 aa, Homo sapiens
RTWRPLAFSLALDDIFLQLLPITDHGDSLAEILYDRLHQGLVRPGFGALQPPPHHPLPKSSACSPGERTAGLSY

SEQ ID NO: 916908 - protein, 142 aa, Homo sapiens; identical to SEQ ID NO: 756005

SEQ ID NO: 916909 - protein, 142 aa, Homo sapiens; identical to SEQ ID NO: 756005

SEQ ID NO: 916910 - protein, 142 aa, Homo sapiens; identical to SEQ ID NO: 756005

SEQ ID NO: 916911 - protein, 142 aa, Homo sapiens; identical to SEQ ID NO: 756005

SEQ ID NO: 916912 - protein, 142 aa, Homo sapiens; identical to SEQ ID NO: 756005

SEQ ID NO: 916913 - protein, 142 aa, Homo sapiens; identical to SEQ ID NO: 756005

SEQ ID NO: 916914 - protein, 142 aa, Homo sapiens; identical to SEQ ID NO: 756005

SEQ ID NO: 916915 - protein, 142 aa, Homo sapiens; identical to SEQ ID NO: 756005

SEQ ID NO: 916916 - protein, 129 aa, Homo sapiens
MKISMSSLPLYIISSPRHTAACAQVLPVDRKLPCLVTTALGRRSKERAQRTTGKKAEKGVPDVKSKELSSEEGHTYWKNICQPQKIVGKMRQVLSNTGNCPPPFLAPLPLFIMAYEQPKGKMIRKLDSF

SEQ ID NO: 916917 - protein, 162 aa, Homo sapiens
MATGRSKLKWTNEQWPEQITLIEPSLVTGLEHISGSMSMPSRRREKSSTQMPAIPNNAFYVNRKVPTNCDVRDQGGFTREELRKLLGGGERAFIPLQTNTRGPQCHMPAKLRASQQCQGVLAWGWAMGLVLTQRSRNHLLSHLQELWFPGRFPNQLPTPPNR

SEQ ID NO: 916918 - protein, 162 aa, Homo sapiens; identical to SEQ ID NO: 916917

SEQ ID NO: 916919 - protein, 162 aa, Homo sapiens; identical to SEQ ID NO: 916917

SEQ ID NO: 916920 - protein, 162 aa, Homo sapiens; identical to SEQ ID NO: 916917

SEQ ID NO: 916921 - protein, 658 aa, Homo sapiens
LAVLQPVFWGQRHVIHMRRKHLLWPRHLLVTTQDDQGYLGYLEEVPLSMVTVDTCYGDLRGIMRLDDLAYEIKPLQDSRRFEHVVFQIVAEPNATGPTFRDDDNETDPLFSEANDSMNPRISNSLYSSHRGNIKGHVQCSNSYYRIYGNITTCSKEVVQMFSLIDSIAQNIDLRYYIYLLTIYNNRDPAPVNEYRIQSAMFTYFKTTFFDTFHVHSSTLLIKYVPHESNYEPERYNFCSRIALLHIGTPGRHYLLVAVIITQTQMRSIGLEYDDNYCTCQRRASCIMQRFPGMTDAFSNCSYGHAQNCFIHSGRCVFETLAPVYNETMTTVRCGNLIVEGREECDCGSFKQCYASYCCQSDCHLTPGSICHIGECCTNCSFSPPGTLCRPIQNICDLPEYCHGTTVTCPANVYMQDGTPCTEEGYCYRGNCTDRNVLCKAIFGVSAEDAPEVCYDINLESYRFGHCIRQQTYLSYQACAGIDKFCGRLQCTNVTHLPRLQERVSFHHSVRGGFQCFGLDEHHATDTTDVGRVIDGTPCVHGNFCNNTQCNVTITSLGYNCHPQKCGHRGVCNNRRNCHCHIGWDPPLCLRRGAGGSVNSGPPPKRTRSVKQSQQSVMYLRVVFGRIYAFIIALLFGTAKNVRTIRTTTVKEGTVTNPE

SEQ ID NO: 916922 - protein, 164 aa, Homo sapiens
MEKNEKEQEEEEKKEKNSKKKEEEEEEEGGGEEEEEEGEGGEEEEEEEEEEEEEEEEEEEEEEEKKKKKKKKKKKKKKKKKKKKKRKKKKKEEEEKVVEEEDEFIWFLGNSLYFPSFSHFASDLIFWLWSQQASMWTKGNAWCEGVSFDSEFQVEKMKGKGDFV

SEQ ID NO: 916923 - protein, 164 aa, Homo sapiens; identical to SEQ ID NO: 916922

SEQ ID NO: 916924 - protein, 164 aa, Homo sapiens; identical to SEQ ID NO: 916922

SEQ ID NO: 916925 - protein, 198 aa, Homo sapiens
SESTLHTSFMSGWDPGLSSQVPACGCPAVCTRKQGILSHIPTPHCSQRMHTGQRKKNENKSSAKPPQKRDKSSTQARISNTLGSENDRTVITQVKHMIGLNITIETLMYSAYTRMCRMKILLLKKPPLATLRQPRAEATQIQTTGCFFQPQTHMKNLFPDSSYSYGGSRPCPMQKALLKFQDQGFSHSTRKTPQIQCQ

SEQ ID NO: 916926 - protein, 304 aa, Homo sapiens
MCCATLPYDGCDVTKCLNEILESADAPLEVTEGFIQSISLSVPWGSLLQDNCALEVRGLEMVFRPRPRPATGSEPMYWSSFMTSSMQLAKECLSQKLTDEQGEGSQPFEGLEKFAETIETVLRRVKVTFIDTVLRIEHVPENSKTGTALEIRIERTVYCDETADESSGINVHQPTAFAHKLLQLSGVSLFWDEFSASAKSSPVCSTAPVETEPKLSPSWNPKIIYEPHPQLTRNLPEIAPSDPVQIGRLIGRLELSLTLKQNEVLPGAKVSVCFTFCSKTKIKVQVFFILCSDSLIDYCRLSCN

SEQ ID NO: 916927 - protein, 152 aa, Homo sapiens
LPHHHHQHYQFLCTMDLDGIVSLTSKYLQSYNQAMVPITLQTPEHSSNPRKSELWNLPGITVSKADGILEEVEDPMWCLKVPPSLSFSLLLPCEEDPSFPFIFAVTVNIKQHCTWKEAKVFDNSSAAANLSVSVQCKLLWLPHSSCRFKCGW

SEQ ID NO: 916928 - protein, 229 aa, Homo sapiens
MRANKANSAESIPHVVSHTDKHNRKLCPASEPVSSFQLLHCEHYKLAKHHAQLCSWPIPRQDANPWTWVGERWEEAQSMYDVSSYKPPNMDYLTLVSPTRPRQTHRWYSIRTPMMVSLNMMLFWLNHIGTGPALRFKRWCAIGAGIPLTGPVRDCEIGKSHNSVACSPARSVNTLQCGHTWIPWRLDGEHGRGILPFRELRHYQHTLPTSSEPSSDPEEKFSELTSLVE

SEQ ID NO: 916929 - protein, 178 aa, Homo sapiens
MRKNRLQKHSMHPAQHKHSLKIQGIRMKCRIPRFSFLLDCDLEHESKRTTQVVFDYYVQIDQHADYSTGHQHLLPSNILLINVVQQHSVRKNFIKGHPPNKRNVQPRTPPSFVRTICNTRGEGQKYRSCFEDTQGSCEENAKETVTLHTVMPVASHSVLDHPTLITPGFCTNLGPWMQ

SEQ ID NO: 916930 - protein, 161 aa, Homo sapiens
MKPSPAGTAKELEPPAPARGEQRTAEPEGRWREKGEADTERQRTRERQEATLAGLAELEYLRQRQELLVRGALRGAGGAGAAAPRAGELLGEAAQRSRLEEKFLEENILLLRKQLNCLRRRDAGLLNQLQELDKQISDLRLDVEKTSEEHLETDSRPSSGE

SEQ ID NO: 916931 - protein, 145 aa, Homo sapiens
MAREQVVGPFPSLGPLPAEGRAGGLVSTSCLCQPVGPAAPLMTQVSSPPFPFRKRPCHNRRKRKAVSPYAFPGSLFKSGSSGGGFTLLSNSFISGFLPGFGAEGFFYRFATSFSPFLIWPSRKYCGHSQGTKKKERRGRLDGTQM

SEQ ID NO: 916932 - protein, 161 aa, Homo sapiens
SHEVGINMPILEKRSLRSRTAKYLQKQRLRFVSLSYNSKLCLILKTHDNIQSPPVEPPKPPAAPATSILSSPNSESPQCLPPTSDPKLLRIYRTLRKAVNLYPFPYLQRGVLQQGRPACAKAQRRQDTMGYFRSCLYFSMTQPDRTSRTNMQGKVTTKPGV

SEQ ID NO: 916933 - protein, 154 aa, Homo sapiens
WEIVDEMLEAHKGKGKSSLAEKTRNSESSLVPGSYGGKAHRMNAKTQLLWAACVLTGGPGLVSWGLLFLLKHISQIYPQLLLHVPSDPHSSSSFLSPRDSRKDFFCKYHQECGEWERGKHFHFHFFYIFICMINKEKKIHIALLKHYSYLVFGT

SEQ ID NO: 916934 - protein, 153 aa, Homo sapiens
MVKVPAPCTAQRLSTGKRHCESGLIFRRININRKQLALGADVEKMHRNKGCLQFRRFNETVNVKPLAHCRCSLQVAISTSGSVCRRKPWPECGQQVLVISQVLNMAGGQGEQKQALGTGKGIYSYVRGIRFAGAALDRNQCSSSGHLWHPSRG

SEQ ID NO: 916935 - protein, 185 aa, Homo sapiens
MFPYEPVQPSSGHLPPEVWRERHEQEPGLRAALVGQLEFRVGVGLAGRTRSSQLALPAPGNEGLSTRASGCRGCTGSPSSASPQALCSISHRALAAFPRGRAGDLQPAMPEPPTCSMGSYAARASPMSAAPCSTAPSPIDHPRAEECERTARDWQAAPPAALVRDPLGEASWAPESGGAVENLYV

SEQ ID NO: 916936 - protein, 185 aa, Homo sapiens; identical to SEQ ID NO: 916935

SEQ ID NO: 916937 - protein, 261 aa, Homo sapiens
MRQHQLSEPAPAYHRITPTITNFALRLYKELAADAPGNIFFSPVSISTTLALLSLGAQANTSALILEGLGFNLTETPEADIHQGFRSLLHTLALPSPKLELKVGNSLFLDKRLKPRQHYLDSIKELYGAFAFSANFTDSVTTGRQINDYLRRQTYGQVVDCLPEFSQDTFMVLANYIFFKAKWKHPFSRYQTQKQESFFVDERTSLQVPMMHQKEMHRFLYDQDLACTVLQIEYRGNALALLVLPDPGKMKQVELLCSHRP

SEQ ID NO: 916938 - protein, 171 aa, Homo sapiens
MDDSFGRITVHEESKSISRLFILLSLLTGIEEKAPASSIAAYQRYLEGEHPDGRDRPDKGLRQETAGAFEDSKKALQLEHPKCLTHRKSSLDAGHDGSDDNDSDQRGKFTLKSSWCLMENFEKVVVMNQFNGWSISCKGSYLEKEDFRIVCMSGQSKEEFSNCCLKTHSLL

SEQ ID NO: 916939 - protein, 178 aa, Homo sapiens
AVVPRLPSGRGFGAGMGGIFQGGPGAGSRRPPSTVLGQESAHARGDLCARVLCRLLPQLNNLVVTRKQRDFYVTSSWQEAPLPTLTSRSPWQLLLGHHWHQIVSLKGHTAARADKQFHGNKPSIWDTCSRNQPPSCEKSKPQSEARNSCCSQEPQLSSQPTFSITASHGNFQEPFTLL

SEQ ID NO: 916940 - protein, 172 aa, Homo sapiens
MEKKLKEAGHLQTSHNPWQPLQKRLPLREDERGPLAPNPRLTDAANAPPKVPSTQHACGQHSHKREAQNRKSEHLMFAAHSERAKHHSRILANIRMVTPEDNPPSPHSQQRKQRNTEVNFPRSHNWDMALTVSSTSDVTESITSGDEQKLRARLFNPQITDEETEVQREMYE

SEQ ID NO: 916941 - protein, 172 aa, Homo sapiens; identical to SEQ ID NO: 916940

SEQ ID NO: 916942 - protein, 135 aa, Homo sapiens
MSSHVVRGSIPEEGTVIIGDDSSVHVIASKHLPVAQDVELEDSDTDDPDPVCWSLLEVHFRTYLPGYHQGRLQNSKYCCLVLPLDASSQRGTRLYEVSVGPYWEVSPSQATRVRRHPALLQLTLHGLHPLSNQSQ

SEQ ID NO: 916943 - protein, 171 aa, Homo sapiens
MFHLDSDKLGPKLGATGVSCLLIRLGVGQLLNERLQWFAGADVTKYHTLGGLNSRNLLSQFWSHNILLTQSLIQSKTLTLFNSMKTEREEEAVEKLETNKGWLTRFKERSHLHNMKVQGEAASADIEAAASYPDDLEISTAIPSFSNHHPDESAAINIEARLSTSKKIMVH

SEQ ID NO: 916944 - protein, 167 aa, Homo sapiens
FDDFEAVAHAWYLEAGCPQRQESSVSSVTCSSVMEKMKHLAASGGAQKGQVLYNPSNNGLAITLTFEKNEAKANRTDAEAYNCRIVWGKNLRLWAVDSARARRPRMGAGDVDFSKWSWYHNFSSRFLYQGLAKGQVPNEKCIHIYELSDEFPLFFSVMNRSTCPQQK

SEQ ID NO: 916945 - protein, 149 aa, Homo sapiens
MMCRWCFRGAPRFSCRWPLGAGPAQMSLIVRKPPLARLVQDASDGASGQFWCGLSECSDKAQRMSRAEKSPADHPRGGQISAWTRKTCPCPKHLRRVGSVSATAGSRETQVRKTVVRCMDPGQSLFCDLLHNPTSGSGLGSQQEFSDDE

SEQ ID NO: 916946 - protein, 244 aa, Homo sapiens
MVALSLKICVRHCNVVKTMQFEPSTAVYDACRVIRERVPEAQTGQVFDRQLRNWIPSKSDILEYKKKQRPQKIRMLDGSVKTVMVDDSKTVGELLVTICSRIGITNYEEYSLIQETIEEKKEEGTGTLKKDRTLLRDERKMEKLKAKLHTDDDLNWLDHSRTFREQGVDENETLLLRRKFFYSDQNVDSRDPVQLNLLYVQARDDILNGSHPVSFEKACEFGGFQAQIQFGPHVEHKHKPGFLE

SEQ ID NO: 916947 - protein, 191 aa, Homo sapiens
MALNSALTEVDCPPCPVPSCPSPFSPGYYSALAAPSTEPHHPVPTVEPAFLGQHPKFQTFHGFFSTSQFGTLWQVSVLAWPQGPVETGPAVLQPWAQAVAGREAVQRQQGWEEQLDTQSIVTTAEGKLQPCRSPLLHFAKTSQRRTAGLPRGPSPASLSSKSEWRPLPVYLALSSGPALHSSLYNFFYLDL

SEQ ID NO: 916948 - protein, 235 aa, Homo sapiens
MAMENVFPAEPELEIKFWRTLGKTGKDSTKVHIQGGSNSCRYPLGMGNHGYRKYMSCLLVLVVESQCPQPMCLRLGKEEVAADQAPGWWEGDSAWSGGVRDTDAQEEAWAKLLKALAVNTAAGLTSSTHSKTMSMAPMSFYGNLRVNGLSQTYADIFLEGCGCSHTDLTVQEARLQYLHLVRALVRFHSWWKVKGRWPAEITGQEVLDSAIHKRNMSYNYWNEETVMITDQLSQK

SEQ ID NO: 916949 - protein, 154 aa, Homo sapiens
MRTMKNSQAESEGNNNHTCPRGVMTIHKKPEQKGQANLPQTGVKPESMLSGNEGRLGENLSREPSSAVSRPMTNRSNKMTQCDITSILGGTARHSYFKIMKSVVAKLQDGRMIPPPEVTKFSVTVTGKRQPIQYFRASYIIFPSIQNGKNTSQT

SEQ ID NO: 916950 - protein, 1216 aa, Homo sapiens
WPGRLLHWLLRVLESQEESGMEEVERQGPGRQRPSLPCVAIVPYRPRKMGLMVSENESNGGENKYSEKTITGMKVVVAEGYKVQGRMGGGPLSDGLSRAGSGSPSVPCCRMAFCREMYYDGFHRSFCDTDDLETVHESDCIFAFETPEIFRPEGILSQRGLLFFCSTPVVINASVLPGNWLEMQILGPYSTPSKGETLVNKPFRAQMPCWENHCSLQSCQTRTFKSAEAVCCLLFSYALPTEVESIEAAGLAELYSLSQLPLARKGKSPDPLSFPGIHLNNNLNHLKFGLDYHRLSSPTQTAAKQGKMDSPTSRAGSDKIVLLVCNRACTGQQGKRFGLPFVLHLEKTIAWDLLQKEILEKMKYFLRPTVCIQVCPFSLRVVSVVGITYLLPQEEQPLCHPIVERALKSCGPGGTAHVKLVVEWDKETRDFLFVNTEDEYIPDAESVRLQRERHHQPQTCTLSQCFQLYTKEERLAPDDAWRCPHCKQLQQGSITLSLWTLPDVLIIHLKRFRQEGDRRMKLQNMVKFPLTGLDMTPHVVKRSQSSWSLPSHWSPWRRPYGLGRDPEDYIYDLYAVCNHHGTMQGGHYTAYCKNSVDGLWYCFDDSDVQQLSEDEVCTQTAYILFYQRRTAIPSWSANSSVAGSTSSSLCEHWVSRLPGSKPASVTSAASSRRTSLASLSESVEMTGERSEDDGGFSTRPFVRSVQRQSLSSRSSVTSPLAVNENCMRPSWSLSAKLQMRSNSPSRFSGDSPIHSSASTLEKIGEAADDKVSISCFGSLRNLSSSYQEPSDSHSRREHKAVGRAPLAVMEGVFKDESDTRRLNSSVVDTQSKHSAQGDRLPPLSGPFDNNNQIAYVDQSDSVDSSPVKEVKAPSHPGSLAKKPESTTKRSPSSKGTSEPEKSLRKGRPALASQESSLSSTSPSSPLPVKVSLKPSRSRSKADSSSRGSGRHSSPAPAQPKKESSPKSQDSVSSPSPQKQKSASALTYTASSTSAKKASGPATRSPFPPGKSRTSDHSLSREGSRQSLGSDRASATSTSKPNSPRVSQARAGEGRGAGKHVRSSSMASLRSPSTSIKSGLKRDSKSEDKGLSFFKSALRQKETRRSTDLGKTALLSKKAGGSSVKSVCKNTGDDEAERGHQPPASQQPNANTTGKEQLVTKDPASAKHSLLSARKSKSSQLDSGVPSSPGGRQSAEKSSKKLSSSMQTSARPSQKPQ

SEQ ID NO: 916951 - protein, 652 aa, Homo sapiens
WPGRLLHWLLRVLESQEESGMEEVERQGPGRQRPSLPCVAIVPYRPRKMGLMVSENESNGGENKYSEKTITGMKVVVAEGYKVQGRMGGGPLSDGLSRAGSGSPSVPCCRMAFCREMYYDGFHRSFCDTDDLETVHESDCIFAFETPEIFRPEGILSQRGLLFFCSTPVVINASVLPGNWLEMQILGPYSTPSKGETLVNKPFRAQMPCWENHCSLQSCQTRTFKSAEAVCCLLFSYALPTEVESIEAAGLAELYSLSQLPLARKGKSPDPLSFPGIHLNNNLNHLKFGLDYHRLSSPTQTAAKQGKMDSPTSRAGSDKIVLLVCNRACTGQQGKRFGLPFVLHLEKTIAWDLLQKEILEKMKYFLRPTVCIQVCPFSLRVVSVVGITYLLPQEEQPLCHPIVERALKSCGPGGTAHVKLVVEWDKETRDFLFVNTEDEYIPDAESVRLQRERHHQPQTCTLSQCFQLYTKEERLAPDDAWRCPHCKQLQQGSITLSLWTLPDVLIIHLKRFRQEGDRRMKLQNMVKFPLTGLDMTPHVVKRSQSSWSLPSHWSPWRRPYGLGRDPEDYIYDLYAVCNHHGTMQGGHYTGLQCERLRVCAGESFRRVCLWQGDLTLEPHFPSGRQCANCEGSFHPLDLCPRANKRTFFLLFL

SEQ ID NO: 916952 - protein, 419 aa, Homo sapiens
WPGRLLHWLLRVLESQEESGMEEVERQGPGRQRPSLPCVAIVPYRPRKMGLMVSENESNGGENKYSEKTITGMKVVVAEGYKVQGRMGGGPLSDGLSRAGSGSPSVPCCRMAFCREMYYDGFHRSFCDTDDLETVHESDCIFAFETPEIFRPEGILSQRGLLFFCSTPVVINASVLPGNWLEMQILGPYSTPSKGETLVNKPFRAQMPCWENHCSLQSCQTRTFKSAEAVCCLLFSYALPTEVESIEAAGLAELYSLSQLPLARKGKSPDPLSFPGIHLNNNLNHLKFGLDYHRLSSPTQTAAKQGKMDSPTSRAGSDKIVLLVCNRACTGQQGKRFGLPFVLHLEKTIAWDLLQKEILEKMKYFLRPTVCIQVCPFSLRVVSVVGITYLLPQEEQPLCHPIVERHKSTWQLPWQLRGN

SEQ ID NO: 916953 - protein, 1216 aa, Homo sapiens; identical to SEQ ID NO: 916950

SEQ ID NO: 916954 - protein, 1216 aa, Homo sapiens; identical to SEQ ID NO: 916950

SEQ ID NO: 916955 - protein, 153 aa, Homo sapiens
MCADYFLNIVKADENLPRTAVKDPFVLWAPISVSSPTRDCQKHFSGTSSRIAECRALLISVFHQCLAWKDPTTLPTISAVHLFPILPHGDIQPFTRVTVHWGKGNDQTFWGLLDTGSELMLIPGDSKHHCGPPVKVGTYGEVPTPPFSMMSSP

SEQ ID NO: 916956 - protein, 143 aa, Homo sapiens
MTDKHPVASHSLPKGPLKDRACPDCTACSSTVLSKSLPLDVSFSERMSLVSNAWKATAFGHQVPLHPHQAAFPVLFLAPTLGQWTSQSVQITLHQGREAPDSYTLHQVHGDKGTRVIEAAGRMQFSSTLGVAALFLLCFPESL

SEQ ID NO: 916957 - protein, 143 aa, Homo sapiens; identical to SEQ ID NO: 916956

SEQ ID NO: 916958 - protein, 147 aa, Homo sapiens
SSLVYLSLGAGPVVPLALASMAMAAEAPIYQLPLTHDQGYPAASSLFHSPETSNNHGVGTHGATQSFSQPARSTAISCIGAYRQYKLCNTNVCPESSRSIREVQCASYNNKPFMGRFYEWEPFAEGKNRPSPVHRSYFSLFSILVDF

SEQ ID NO: 916959 - protein, 158 aa, Homo sapiens
MAARNIREMSPRRGIGPHLSYGLKTEKGQAVTSGEKRREETMVSRGGSVFRSPGEEGEGSAHPENSKVASVPGVTNSGFESKCEVYQVKLSLRVKSEFVFVNALVTRVSFSPKKEIHVWLKFPGEHRRGGNIAINQMSFGNEGGSEGRSKQKPNSPFR

SEQ ID NO: 916960 - protein, 134 aa, Homo sapiens
MRVPRVLLDPKGQGWQAALQCFIRQTMHSTWSSPVAHQGHMGVQGPSDGCRQVARVGFLLLLSDPSQKEAISLQLVPNWSSQNIYSVAAAVELHRPVPGTFSRQIRPVENSGHSGLHTHFRTKGKEHGIREAGA

SEQ ID NO: 916961 - protein, 728 aa, Homo sapiens
MWDVEGTSEVKDCVSQFVAEMMVATLAPEARPCLCVSSRDEDLINKCGDDARIYIVFQYHLIIFVLIICIPSLGIILPINYTGSVLDWSSHFARTTIVNVSTESKLLWLHSLLSFFYFITNFMFMAHHCLGFAPRNSQKVTRTLMITYVPKDIEDPELIIKHFHEAYPGSVVTRVHFCYDVRNLIDLDDQRRHAMRGRLFYTAKAKKTGKVMIRIHPCARLCFCKCWTCFKEVDAEQYYSELEEQLTDEFNAELNRVPLKRLDLIFVTFQDSRMAKRVRKDYKYVQCGVQPQQSSVTTIVKSYYWRVTMAPHPKDIIWKHLSVRRFFWWARFIAINTFLFFLFFFLTTPAIIMNTIDMYNVTRPIEKLQNPIVTQFFPSVMLWGFTVILPLIVYFSAFLEAHWTRSSQNLVMVHKCYIFLVFMVVILPSMGLTSLDVFLRWLFDIYYLEQASIRFQCVFLPDNGAFFVNYVITAALLGTGMELLRLGSLFCYSTRLFFSRSEPERVNIRKNQAIDFQFGREYAWMMNVFSVVMAYSITCPIIVPFGLLYLCMKHLTDRYNMYYSFAPTKLNEQIHMAAVSQAIFAPLLGLFWMLFFSILRLGSLHAITIFSLSTLLIAMVIAFVGIFLGKLRMVADYEPEEEEIQTVFDMEPSSTSSTPTSLLYVATVLQEPELNLTPASSPARHTYGTMNNQPEEGEEESGLRGFARELDSAQFQEGLELEGQNQYH

SEQ ID NO: 916962 - protein, 109 aa, Homo sapiens
QGASFSLPPLHHPVVTRGGPDGANWHEALLVPLRVDYGTFSHGHYRMVEQGASFSLPPPPHPGPLRHLLPQPTPASPIAPLPPPTAIPLLCQPLPSRPTPLHPPNHLLT

SEQ ID NO: 916963 - protein, 728 aa, Homo sapiens; identical to SEQ ID NO: 916961

SEQ ID NO: 916964 - protein, 155 aa, Homo sapiens
MISVFSPEPCRLLCAPWKGRSTVSSGCVRSGALCTPHRERSLQRTERRQKEKTRKGKRAAYLAGLLCAKPLSDTPYDPQHCGNPSTESAFSITGLCFAPQTHAWSLGCGTYRSPVLRNTDHPTGARTQQSGRRGCLTEEGKSQEGGTWAQSSQLR

SEQ ID NO: 916965 - protein, 107 aa, Homo sapiens
MISVFSPEPCRLLCAPWKGRSTVSSGCVRSGALCTPHRERSLQRTERRQKEKTRKGKRAAYLAGLLCAKPLSDTPYDPQHCGNPRAAPALSPSPPQGHTNCGVPAIT

SEQ ID NO: 916966 - protein, 150 aa, Homo sapiens
FHFIQSCLQLEMQTPTLLISGHSCCEHTVPGTHILPCSWPDDKTGRNCGQVRPKGTSDQYFSGGQRDKQNPEVGIYLGDNVSESNGCNEMCCESELGRETAGTGDVESFLVKNDSIGNFISEQVEGKLEGPERTTGLAATAGRRKGNTRS

SEQ ID NO: 916967 - protein, 308 aa, Homo sapiens
MKKNTSKTTMRINKQDALCTPHSHDPRDLQNMLDGGEYAPFVSPPMLESNFIQVNRRGESIYLHNRANWVTVGICFSSSTHKIPNVMLLAHLTPGAQKDTETLFKSLLTSPPAEKLVLTRFLPLQFVTLSVHDAENMSLKVKLVSGRAYYLQLCTSAYKQDTLFSQWVALISLLNQEKAKVSKVSEVSSLSGITNSTDITGSMDVTDVTTFTAILTPYMYAGTGPEHVRDSIDFPEFTDITDITDVTDLPENEVPEVPDVRIVTEVIEVREATEVTDSSDITNCSGVTVVFENNDLIRAKQEEKELEN

SEQ ID NO: 916968 - protein, 222 aa, Homo sapiens
MLLAHLTPGAQKDTETLFKSLLTSPPAEKLVLTRFLPLQFVTLSVHDAENMSLKVKLVSGRAYYLQLCTSAYKQDTLFSQWVALISLLNQEKAKVSKVSEVSSLSGITNSTDITGSMDVTDVTTFTAILTPYMYAGTGPEHVRDSIDFPEFTDITDITDVTDLPENEVPEVPDVRIVTEVIEVREATEVTDSSDITNCSGVTVVFENNDLIRAKQEEKELEN

SEQ ID NO: 916969 - protein, 321 aa, Homo sapiens
VKAGETPLTGTSYLPEALAARRARGWGPGRSGPGRRARAPSRPPVAPASEAAPGRGRGLTLRYNSGRAARAGRHRRPQSLSPVLSLSPDSMSFTTRSTFSTNYRSLGSVQAPSYGARPVSSAASVYAGAGGSGSRISVSRSTSFSGAAWGPGGLATGIAGGLAGMGGIQNEKETMQSLNDRLASYLDRVRSLETENRRLESKIREHLEKKGPQVRDWSHYFKIIEDLRAQIFANTVDNARIVLQIDNARLAADDFRVKYETELAMRQSVENDIHGLRKVIDDTNITRLQLEDRDRGSQGGAALHERRTTKRQAGATGQARD

SEQ ID NO: 916970 - protein, 222 aa, Homo sapiens
MSFTTRSTFSTNYRSLGSVQAPSYGARPVSSAASVYAGAGGSGSRISVSRSTSFSGAAWGPGGLATGIAGGLAGMGGIQNEKETMQSLNDRLASYLDRVRSLETENRRLESKIREHLEKKGPQVRDWSHYFKIIEDLRAQIFANTVDNARIVLQIDNARLAADDFRVKYETELAMRQSVENDIHGLRKVIDDTNITRLQLEDRDRGSQGGAALHERRTTKRK

SEQ ID NO: 916971 - protein, 312 aa, Homo sapiens
VKAGETPLTGTSYLPEALAARRARGWGPGRSGPGRRARAPSRPPVAPASEAAPGRGRGLTLRYNSGRAARAGRHRRPQSLSPVLSLSPDSMSFTTRSTFSTNYRSLGSVQAPSYGARPVSSAASVYAGAGGSGSRISVSRSTSFSGAAWGPGGLATGIAGGLAGMGGIQNEKETMQSLNDRLASYLDRVRSLETENRRLESKIREHLEKKGPQVRDWSHYFKIIEDLRAQIFANTVDNARIVLQIDNARLAADDFRVKYETELAMRQSVENDIHGLRKVIDDTNITRLQLEDRDRGSQGGAALHERRTTKRK

SEQ ID NO: 916972 - protein, 312 aa, Homo sapiens; identical to SEQ ID NO: 916971

SEQ ID NO: 916973 - protein, 312 aa, Homo sapiens; identical to SEQ ID NO: 916971

SEQ ID NO: 916974 - protein, 312 aa, Homo sapiens; identical to SEQ ID NO: 916971

SEQ ID NO: 916975 - protein, 222 aa, Homo sapiens; identical to SEQ ID NO: 916970

SEQ ID NO: 916976 - protein, 312 aa, Homo sapiens; identical to SEQ ID NO: 916971

SEQ ID NO: 916977 - protein, 222 aa, Homo sapiens; identical to SEQ ID NO: 916970

SEQ ID NO: 916978 - protein, 312 aa, Homo sapiens; identical to SEQ ID NO: 916971

SEQ ID NO: 916979 - protein, 312 aa, Homo sapiens; identical to SEQ ID NO: 916971

SEQ ID NO: 916980 - protein, 312 aa, Homo sapiens; identical to SEQ ID NO: 916971

SEQ ID NO: 916981 - protein, 312 aa, Homo sapiens; identical to SEQ ID NO: 916971

SEQ ID NO: 916982 - protein, 312 aa, Homo sapiens; identical to SEQ ID NO: 916971

SEQ ID NO: 916983 - protein, 233 aa, Homo sapiens
IRLGTRLGGRNMSFTTRSTFSTNYRSLGSVQAPSYGARPVSSAASVYAGAGGSGSRISVSRSTSFSGAAWGPGGLATGIAGGLAGMGGIQNEKETMQSLNDRLASYLDRVRSLETENRRLESKIREHLEKKGPQVRDWSHYFKIIEDLRAQIFANTVDNARIVLQIDNARLAADDFRVKYETELAMRQSVENDIHGLRKVIDDTNITRLQLEDRDRGSQGGAALHERRTTKRK

SEQ ID NO: 916984 - protein, 330 aa, Homo sapiens
VKAGETPLTGTSYLPEALAARRARGWGPGRSGPGRRARAPSRPPVAPASEAAPGRGRGLTLRYNSGRAARAGRHRRPQSLSPVLSLSPDSMSFTTRSTFSTNYRSLGSVQAPSYGARPVSSAASVYAGAGGSGSRISVSRSTSFSGAAWGPGGLATGIAGGLAGMGGIQNEKETMQSLNDRLASYLDRVRSLETENRRLESKIREHLEKKGPQVRDWSHYFKIIEDLRAQIFANTVDNARIVLQIDNARLAADDFRVKYETELAMRQSVENDIHGLRKVIDDTNITRLQLEDRDRGSQGGAALHERRTTKRCPQISGPRQDHGRHSGAQY

SEQ ID NO: 916985 - protein, 148 aa, Homo sapiens
MGGIQNEKETMQSLNDRLASYLDRVRSLETENRRLESKIREHLEKKGPQVRDWSHYFKIIEDLRAQIFANTVDNARIVLQIDNARLAADDFRVKYETELAMRQSVENDIHGLRKVIDDTNITRLQLEDRDRGSQGGAALHERRTTKRK

SEQ ID NO: 916986 - protein, 178 aa, Homo sapiens
MSFTTRSTFSTNYRSLGSVQAPSYGARPVRMGGIQNEKETMQSLNDRLASYLDRVRSLETENRRLESKIREHLEKKGPQVRDWSHYFKIIEDLRAQIFANTVDNARIVLQIDNARLAADDFRVKYETELAMRQSVENDIHGLRKVIDDTNITRLQLEDRDRGSQGGAALHERRTTKRK

SEQ ID NO: 916987 - protein, 109 aa, Homo sapiens
MPPNLRTSPRSWQTFRGPILTELARKNREELDKYWSQQIEESTTVVTTQSAEVGAAETTLTELRRTVQSLEIDLDSMRNLKASLENSLREVEARYALQMEQLNGDPAAP

SEQ ID NO: 916988 - protein, 103 aa, Homo sapiens
QFSSVPVTFRGPILTELARKNREELDKYWSQQIEESTTVVTTQSAEVGAAETTLTELRRTVQSLEIDLDSMRNLKASLENSLREVEARYALQMEQLNGDPAAP

SEQ ID NO: 916989 - protein, 324 aa, Homo sapiens
  misc_feature (292)..(292): Xaa can be any naturally occurring amino acid
  misc_feature (301)..(301): Xaa can be any naturally occurring amino acid
VKAGETPLTGTSYLPEALAARRARGWGPGRSGPGRRARAPSRPPVAPASEAAPGRGRGLTLRYNSGRAARAGRHRRPQSLSPVLSLSPDSMSFTTRSTFSTNYRSLGSVQAPSYGARPVSSAASVYAGAGGSGSRISVSRSTSFSGAAWGPGGLATGIAGGLAGMGGIQNEKETMQSLNDRLASYLDRVRSLETENRRLESKIREHLEKKGPQVRDWSHYFKIIEDLRAQIFANTVDNARIVLQIDNARLAADDFRVKYETELAMRQSVENDIHGLRKVIEFWNHQYHTTVXKAVGETEIXGAPQKEELASFHETQQNQRKRRK

SEQ ID NO: 916990 - protein, 222 aa, Homo sapiens; identical to SEQ ID NO: 916970

SEQ ID NO: 916991 - protein, 79 aa, Homo sapiens
MVLLGEFVVLLGEFVVLLGEFVVLLGEFVVLLRRIRGAAETTLTELRRTVQSLEIDLDSMRNLVSAFTSAAQLLLHLAS

SEQ ID NO: 916992 - protein, 312 aa, Homo sapiens; identical to SEQ ID NO: 916971

SEQ ID NO: 916993 - protein, 312 aa, Homo sapiens; identical to SEQ ID NO: 916971

SEQ ID NO: 916994 - protein, 312 aa, Homo sapiens; identical to SEQ ID NO: 916971

SEQ ID NO: 916995 - protein, 246 aa, Homo sapiens
MGQYRPGYRRKQSLSPVLSLSPDSMSFTTRSTFSTNYRSLGSVQAPSYGARPVSSAASVYAGAGGSGSRISVSRSTSFSGAAWGPGGLATGIAGGLAGMGGIQNEKETMQSLNDRLASYLDRVRSLETENRRLESKIREHLEKKGPQVRDWSHYFKIIEDLRAQIFANTVDNARIVLQIDNARLAADDFRVKYETELAMRQSVENDIHGLRKVIDDTNITRLQLEDRDRGSQGGAALHERRTTKRK

SEQ ID NO: 916996 - protein, 312 aa, Homo sapiens; identical to SEQ ID NO: 916971

SEQ ID NO: 916997 - protein, 312 aa, Homo sapiens; identical to SEQ ID NO: 916971

SEQ ID NO: 916998 - protein, 312 aa, Homo sapiens; identical to SEQ ID NO: 916971

SEQ ID NO: 916999 - protein, 312 aa, Homo sapiens; identical to SEQ ID NO: 916971

SEQ ID NO: 917000 - protein, 312 aa, Homo sapiens; identical to SEQ ID NO: 916971

SEQ ID NO: 917001 - protein, 224 aa, Homo sapiens
MQSGCVSARPFSTNYRSLGSVQAPSYGARPVSSAASVYAGAGGSGSRISVSRSTSFSGAAWGPGGLATGIAGGLAGMGGIQNEKETMQSLNDRLASYLDRVRSLETENRRLESKIREHLEKKGPQVRDWSHYFKIIEDLRAQIFANTVDNARIVLQIDNARLAADDFRVKYETELAMRQSVENDIHGLRKVIDDTNITRLQLEDRDRGSQGGAALHEGRTTKRK

SEQ ID NO: 917002 - protein, 257 aa, Homo sapiens
AFYTHPYGRESCALFFAPGRICFLKYDSGFLALRCLRFLCDSDPRAPRLREPLSRDQDPAWQSLVMSMQLGSHLGAPSSPMLQYQITSTAGAAWGPGGLATGIAGGLAGMGGIQNEKETMQSLNDRLASYLDRVRSLETENRRLESKIREHLEKKGPQVRDWSHYFKIIEDLRAQIFANTVDNARIVLQIDNARLAADDFRVKYETELAMRQSVENDIHGLRKVIDDTNITRLQLEDRDRGSQGGAALHERRTTKRK

SEQ ID NO: 917003 - protein, 294 aa, Homo sapiens
VKAGETPLTGTSYLPEALAARRARGWGPGRSGPGRRARAPSRPPVAPASEAAPGRGRGLTLRYNSGRAARAGRHRRPQSLSPVLSLSPDSMSFTTRSTFSTNYRSLGSVQAPSYGARPVSSAASVYAGAGGSGSRISVSRSTSFSGAAWGPGGLATGIAGGLAGMGGIQNEKETMQSLNDRLASYLDRVRSLETENRRLESYFKIIEDLRAQIFANTVDNARIVLQIDNARLAADDFRVKYETELAMRQSVENDIHGLRKVIDDTNITRLQLEDRDRGSQGGAALHERRTTKRK

SEQ ID NO: 917004 - protein, 110 aa, Homo sapiens
LNEASRLVGGGAAALWNRRKLSRCSRCREVSQFDSPDCEWHCGVETRDNVVTMEDKGTTVVSELRRPRADVVRLERCPRESKASLENSLREVEARYALQMEQLNGDPAAP

SEQ ID NO: 917005 - protein, 89 aa, Homo sapiens
SSRGSRRFKGYRAEGQRQAQEYEALLNIKVKLEAEIATYRRLLEDGEDFNLGDALDSSNSMQTIQKTTTRRIVDGKVVSETNDTKVLRH

SEQ ID NO: 917006 - protein, 213 aa, Homo sapiens
MGIRGSINQWELPLYFPGAVFTGIFAAEMVLKLIAMDPYEYFQVGWNIFDSLIVTLSLVELFLADVEGLSVLRSFRLLRVFKLAKSWPTLNMLIKIIGNSVGALGNLTLVLAIIVFIFAVVGMQLFGKSYKECVCKINDDCTLPRWHMNDFFHSFLIVFRVLCGEWIETMWDCMEVAGQAMCLIVYMMVMVIGNLVVCNQMFMHFNFSVEIIL

SEQ ID NO: 917007 - protein, 183 aa, Homo sapiens
CRDCKLAMDEEVLGAETAAEWLLGLAWLRWHHEREAGDDVTWTFPAGNQSRINPAEPGSFTCCELRTAAGNLGKKVAWHGGARWLAVAVAAHAYSIKPWNRRCSGLAGEEEGRAVGLSCQGLSGLWLCSDLTILLPAGLEPRAFSGMLNLYISKDEAGSDPSLGQTASAQMPCQKTCYALVKS

SEQ ID NO: 917008 - protein, 143 aa, Homo sapiens
MRPPMKNAQVDMRRGQNPGEQHLERDSKEQEPLKETKKMVIQERGGPGVYDVEESFAMVHTSISQILGPPEKLMKPMVVKLSWLSLLRCPSQQHSAITHQDEFLHTSFCFTGTVCPRVNSSLSHQRPVRQGRRHSAVSLVRDL

SEQ ID NO: 917009 - protein, 144 aa, Homo sapiens
HLILPTMPNVRRITRLNSWQASRGDLQSFTKVTVHWGKGNYQTLWGQLYTGSELTLIPGDPKHYCGPPVKVGVHGGQIINGVLAQVQLTVGPVDSWTHPVVMSPVPECIIGIDILSSWQKLHIGFLSEHVKGKGNYAILQANEL

SEQ ID NO: 917010 - protein, 146 aa, Homo sapiens
MRPRRQELEGCGYKPRNIKTAGNTKSSGTGMEPVLPKDIRRCGPAATAILDFCLQNCADAESQGETNMGQATHLNKPVTVGTVVDDGQGLLESGSPNANNILQYLYDKEVEQLGGLRPDGAQLGVTALENLVTQSRTHVRSPFIEC

SEQ ID NO: 917011 - protein, 156 aa, Homo sapiens
MRVKGGRQPQGAGRVGLCQGNGGWAAERAGSSLTLPSPLGGWCLLSAALPSPHPPASKAATTWGGTRAQAQLLCAKNFDAFSYCVFTTAPGGRCCFHYPHFTEVDTAAQRASCSRAKNKEVSRMLREGQELRHLLAYWKLMQQGAGSQARVFVRSR

SEQ ID NO: 917012 - protein, 183 aa, Homo sapiens
MDPWEQLEGREMASSADRSWEEAGPFGSLLVGKVHQPLGRAGHHLELALGREAKAVNEEPCQQGMHDCLHFMDEETEAQRGVAKLVVSRVGAEPDLACLTVHVSPWLPSPPAQLLLPSWVLDGVIQLNLYSASLVGFKQPQEESFPWQDSPGERLPPHATLSSGSNKSQGLSCLPPLWGPLSC

SEQ ID NO: 917013 - protein, 179 aa, Homo sapiens
MKSKFLRRIAAAKSMRRNVDKSQPLINRSNTKRGTSDIECITTIDSYQNNEPEFDHASDITTSFQEIQRIEEMLNKTIIQQPAKTRMFEVCAMHSDVLPKSRMGKQGKKRNFTVKKANKHYFIQGIKGTASKKLHAPARTHKIKDVLPYAITYPEQVMKASFPLITGSADIAKPISLQN

SEQ ID NO: 917014 - protein, 179 aa, Homo sapiens; identical to SEQ ID NO: 917013

SEQ ID NO: 917015 - protein, 497 aa, Homo sapiens
MTYGFELSQLHRNDLMLGIFESPRGDPLGLAKERVNSFGDDEELSTSSDSDEEVIKQFEISVSRSQSFRSVTSEKGKQTGLEQKPKFSRSLLTHGEDGTEVSACEDLDGASQRRYSENLSYGEDDHIPAHSQSPCERGDAKHHGTSHQESSVVQSLRRQSTEGSLEMETAFNSRGFEDSYATDSSSMTNLQVPSGVSEPISKCGDLDVIFEYRAASQKLTVTIVRAQGLPDKDRSGVNSWQVHVVLLPGKKHRGRTNIQRGPNPVFREKVTFAKLEPRDVAACAVRFRLYAARKMTRERMMGEKLFYLSHLHPEGEMKVTLVLEPRSNISSGGSPLSPSAVSHSDSTSSTQSLSHGGAPELLVGLSYNATTGRLSVEMIKGSHFRNLAVNRAPDTYGKLFLLNSVGQEMSRCKTSIRRGQPNPVYKETFVFQVALFQLSDVTLMISVYNRRTMKRKEMIGWIALGQNSSGEEEQDHWEEMKETKGQQICRWHTLLES

SEQ ID NO: 917016 - protein, 167 aa, Homo sapiens
MYEGILIIKRRKYVNRKNIQLSQNSTLNQTAKFCLFKNIVMCHMTTFQSRRGCIHDNGGIPEESIVIIGDDSSMRVIAPEDLPVGEDVQVKDSDIDDPDPDPLHGKNSAEDTTTFIENILEQDSNCEQNGKCLKELPKLIIKIKRTLKEKLLCGEDGSSEVNPLESG

SEQ ID NO: 917017 - protein, 1716 aa, Homo sapiens
MFELELLSLASPSHPKATQTQIDAVCCRRCVSFILRTTIGGLLGEKAQLAAVKDICQAIWKLKKVMDAVMSDGNLETRLGSTDVAASQHMLVCALQELGNLIHNLGTTAAPLLQDSSTGLLDSILSVILHPSISVRLAAAWCLHCIAVALPSYLTPLLDRCLERLTGHKSSPEAVTGFSFAVAALLGAVKHCPLGIPHGKGKIIMTLAEDLLCSAAQNSRLSAQRTQAGWLLISALMTLGPAVVSHHLARVLLLWKCVFPASPKDLETEKSRGDSFTWQVTLEGRAGALCAIKSFVSHCGDLLTEEVTQRLLPPLPCAVDLLTQLSSILKMYGSPLKTPSVVYRQRLYELLILLPPETYEGNLCAILRELAADLTAPDIQVAASTFLLPPLCHQDDLLILSPFLQETDHRFIEEQLLLGNGVACGSLEYDPYSIYEKDVEGDSVPKPLPPALSVISSASKLFGVVCAHVGETQRLLILEQLLDSIKHTKGARQQVVQLHVVSSVSSFLKYVAGSKGCLGPEEMKRFALTLVMGALESPNPLLRCAAAESWARLAQVVDDGAFTAGLAQVSFDKLKSARDVVTRTGHSLALGSLHRYLGGISSSQHLNSCIGILYTLAQDSTSPDVQTWALHSLSLIIDSAGPLYYVHVEPTLSLIIMLLLNVPPTHAEVHQSLGRCLNALITTLGPELQGNSTSISTLRTSCLLGCAVMQDNPDCLVQAQAISCLQQLHMFAPRHVNLSSLVSCLCVNLCSPYLLLRRAVLACLRQLVQREAAEVSEHAVMLAKDSREELTPDANIREVGLEGALLILLDKETDERLCHDIKETLNYMLTSMAVEKLSLWLKLCKDVLAASADFTAVTCVDTMQEEEGDKGDDASVLTTRRDEKSHPFTNPRWATRVFAAECVCRIINQCENANSAHFDIALAQEMKKRDSRNDFLVLHLADLIRMAFMAATDHSDQLRLSGLEMLLVVIRRFATVPEPEFPGHVILEQYQANVGAALRPAFTSETPPDVTAKACQVCSAWIASGVVSDLNDLRRVHQLLVSSLTKIQAGKEALSHLYNESASTMEILAVLKAWAEVYIIAVQRHKNHRQPLKTTTCLEDGIRNGSCSSDGLLDLVYADLGTLSRLWLAALQDFALLTLPSEFASQLPAEGGAFYTAETSENAKLHYYNSWALILHATALWLTSTGFVVADPDEGASNLSRPVTPTSMCQGSSSGATIKSPEDVYTDRFHLILGISVEFLCSLRSDATMESITACLHALQALLDVPWPRSKIGSDQDLGIELLNVLHRVILTRESPSIQLASLEVVRQIICAAQEHVKEKRRSAEVDDGAAEKETLPEFGEGKDTGGLVPGKSLVFATLELCVCILVRQLPELNPKLTGSPGVKATKPQILLEDGSRLVSAALVILSELPAVCSPEGSISILPTILYLTIGVLRETAVKLPGGQLSSTVAASLQALKGILSSPMARAEKSRTAWTDLLRSALTTILDCWDPVDETHQELDEVSLLTAITVFILSTSPEVTTIPCLQKRCIDKFKATLEIKDPVVQIKTYQLLHSIFQYPNPAVSYPYIYSLASCIMEKLQEIDKRKPENTAELEIFQEGIKVLETLVTVAEEHHRAQLVACLLPILISFLLDENSLGSATSIMRNLHDFALQNLMQIGPQYSSVFKSLVASSPALKARLEAAIKGNQESVKVKIPTSKYTKSPGKNSSIQLKTSFL

SEQ ID NO: 917018 - protein, 876 aa, Homo sapiens
MFELELLSLASPSHPKATQTQIDAVCCRRCVSFILRTTIGGLLGEKAQLAAVKDICQAIWKLKKVMDAVMSDGNLETRLGSTDVAASQHMLVCALQELGNLIHNLGTTAAPLLQDSSTGLLDSILSVILHPSISVRLAAAWCLHCIAVALPSYLTPLLDRCLERLTGHKSSPEAVTGFSFAVAALLGAVKHCPLGIPHGKGKIIMTLAEDLLCSAAQNSRLSAQRTQAGWLLISALMTLGPAVVSHHLARVLLLWKCVFPASPKDLETEKSRGDSFTWQVTLEGRAGALCAIKSFVSHCGDLLTEEVTQRLLPPLPCAVDLLTQLSSILKMYGSPLKTPSVVYRQRLYELLILLPPETYEGNLCAILRELAADLTAPDIQVAASTFLLPPLCHQDDLLILSPFLQETDHRFIEEQLLLGNGVACGSLEYDPYSIYEKDVEGDSVPKPLPPALSVISSASKLFGVVCAHVGETQRLLILEQLLDSIKHTKGARQQVVQLHVVSSVSSFLKYVAGSKGCLGPEEMKRFALTLVMGALESPNPLLRCAAAESWARLAQVVDDGAFTAGLAQVSFDKLKSARDVVTRTGHSLALGSLHRYLGGISSSQHLNSCIGILYTLAQDSTSPDVQTWALHSLSLIIDSAGPLYYVHVEPTLSLIIMLLLNVPPTHAEVHQSLGRCLNALITTLGPELQGNSTSISTLRTSCLLGCAVMQDNPDCLVQAQAISCLQQLHMFAPRHVNLSSLVSCLCVNLCSPYLLLRRAVLACLRQLVQREAAEVSEHAVMLAKDSREELTPDANIREVGLEGALLILLDKETDERLCHDIKETLNYMLTSMAVEKLSLWLKLCKDVLAASAGKYWTLSVKIIKLKFETLHKIVYH

SEQ ID NO: 917019 - protein, 324 aa, Homo sapiens
MFELELLSLASPSHPKATQTQIDAVCCRRCVSFILRTTIGGLLGEKAQLAAVKDICQAIWKLKKVMDAVMSDGNLETRLGSTDVAASQHMLVCALQELGNLIHNLGTTAAPLLQDSSTGLLDSILSVILHPSISVRLAAAWCLHCIAVALPSYLTPLLDRCLERLTGHKSSPEAVTGFSFAVAALLGAVKHCPLGIPHGKGKIIMTLAEDLLCSAAQNSRLSAQRTQAGWLLISALMTLGPAVVSHHLARVLLLWKCVFPASPKDLETEKSRGDSFTWQVTLEGRAGALCAIKSFVSHCGDLLTEEVTQRLLPPLPCAVDLLTQ

SEQ ID NO: 917020 - protein, 1716 aa, Homo sapiens; identical to SEQ ID NO: 917017

SEQ ID NO: 917021 - protein, 260 aa, Homo sapiens [sequence omitted]

SEQ ID NO: 917022 - protein, 147 aa, Homo sapiens
MPESSESQDLPPAQASVLGTSHAPNSPTVFPGLPAPALGDHQWDGVWQDQPCSGRGRPLPTWAQPWDQNEPEHSSHLRRVPGTGAAVHGLARGRGYRGNGFRYRALDTSLVLCVFSDAAFVHLASINHRAELTATLFLSSLPSRTCL

SEQ ID NO: 917023 - protein, 308 aa, Homo sapiens
MVRDALVSLADRKFFAGGVCRTNVQLPGKVVVITGANTGIGKETARELASRGARVYIACRDVLKGESAASEIRVDTKNSQVLVRKLDLSDTKSIRAFAEGFLAEEKQLHILINNAGVMMCPYSKTADGFETHLGVNHLGNTREKNVILGWGSGSTRLARQGQTWGYAGIWAWLEGSHLHDGQPSHGLVHGGHFLLTYLLLERLKVSAPARVVNVSSVAHHIGKIPFHDLQSEKRYSRGFAYCHSKLANVLFTRELAKRLQEMIKIPLSMIDTTHYMLSCLLVVLKPQYKNDIEIEGPRTRHSFWNIEG

SEQ ID NO: 917024 - protein, 307 aa, Homo sapiens
MFNSIPGSYILDGQQPPPPPPPSVMTIQTRPNVPCKEIFSPVDNNWPNARRSVSGSPESDELQELRTRSAKKRRKNALIRHKSIAEVSQNLRQIEIPKVSKRATKKENSHPAPQQPSQPVKDTVQEVTKVRRNLFNQELLSPSKRSLKRGLPRSHSVSAVDGLEDKLDNFKKNKGYHKLLTKSVAETPVHKQISKRLLHRQIKGRSSDPGPDIGVVEESPEKGDEISLRRSPRIKQLSFSRTHSASFYSVSQPKSRSVQRVHSFQQDKSGNIRAPLPSQVRADLVRSVFGKRSKKFDIFFLDIGEVE

SEQ ID NO: 917025 - protein, 369 aa, Homo sapiens
MLALRLLNVVAPAYFLCISLVTFVLQLFLFLPSMREDPAAARLFSPALLHGALFLFLSANALGNYVLVIQNSPDDLGACQGASARKTPCPSPSTHFCRVCARVTLRHDHHCFFTGNCIGSRNMRNFVLFCLYTSLACLYSMVAGVAYISAVLSISFAHPLAFLTLLPTSISQFFSVPGKNPVGNGFHPPRLVPGAVLQGRPKLDSSDVLTSQLEGHLCLSAFLTPKSTMDLGSSIPHMAAQANLCRHGRKEVIGLPYREPKAKEYFRINSRVQCPGCWVGQGAVLGSEMFVILMLYLWFAIGLACAGFCCHQLLLILRGQTRHQVRKGVAVRARPWRKNLQEVFGKRWLLGLLVPMFNVGSESSKQQDK

SEQ ID NO: 917026 - protein, 369 aa, Homo sapiens; identical to SEQ ID NO: 917025

SEQ ID NO: 917027 - protein, 172 aa, Homo sapiens
GAGGCPAAIPAASWPLLAGAQVGSQQLPAPSSPHPRYLPSSRSEAQAASQPGRVHNFAASGRARAGVRGSSCRRPELGELISSPLCDGGSAAAAARGAASRASGRQWPRSPRLPALPVFPRLRLCRPLPRARRAPGLNGQLPTPRGPTGGLCCPFSRAGPGLRLPAERPSLP

SEQ ID NO: 917028 - protein, 206 aa, Homo sapiens
RAVTPTGWSDPVWPLPWGFSCVFLGLEAPAGPTQAVGRRLPCWGFFDRVLGVRGPGPEHQGPQWEEPGVGMPPTSPAATAGGPRSLNNPCIKITVTRHTCPGWGITHANLQTIPDTQGQEGPREDVTHPGGDLDGVANFYLEEEGFQDGRCQKMVLMSEEGPPSLTGCPRVQCPQSNKFKLSKSMQRILRRVHENSRPAVGGLQMP

SEQ ID NO: 917029 - protein, 180 aa, Homo sapiens
ATRIGNQLSGGMEFSEGDRINLAFPGGTFCPAERECGHERAPKGKEERRQEKSWGGTVLGQAFKPVFALNCGQSGLCGLPASVDCLECGFIGEESSPTLADFGSDPSGLALQVLFGGRQDSAACSKCSQASGHDEWLLRCAFLLAPGRRGCSWVSAWWGDDTGIYCVLNKCAFCWVRPSL

SEQ ID NO: 917030 - protein, 812 aa, Homo sapiens
GANMGLSNKRRLSRGSGGMEALTTQLGPGREGSSSPNSKQELQPYSGSSALKPNQVGETSLYGVPIVSLVIDGQERLCLAQISNTLLKNYSYNEIHNRRVALGITCVQCTPVQLEILRRAGAMPISSRRCGMITKREAERLCKSFLGEHKPPKLPENFAFDVVHECAWGSRGSFIPARYNSSRAKCIKCGYCSMYFSPNKFIFHSHRTPDAKYTQPDAANFNSWRRHLKLSDKSATDELSHAWEDVKAMFNGGTRKRTFSLQGGGGGGANGGSGGQGKGGAGGGGGGGPGCGAEMAPGPPPHKSLRCGEDEAAGPPGPPPPHPQRGLGLATGASGPAGPGGPGGGAGVRSYPVIPVPSKGFGLLQKLPPPLFPHPYGFPTAFGLCPKKDDPVLGAGEPKGGPGTGSGGGGAGTGGGAGGPGASHLPPGAGAGPGGGAMFWGHQPSGAAKDAAAVAAAAAAATVYPTFPMFWPAAGSLPVPSYPAAQSQAKAVAAAVAAAAAAAAAAAGSGAPEPLDGAEPAKESGLGAEERCPSALSRGPLDEDGTDEALPPPLAPLPPPPPPPARKGSYVSAFRPVVKDTESIAKLYGSAREAYGAGPARGPGPGAGSGGYVSPDFLSEGSSSYNSASPDVDTADEPEVDVESNRFPDDEDAQEETEPSAPSAGGGPDGEQPTGPPSATSSGADGPANSPDGGSPRPRRRLGPPPAGRPAFGDLAAEDLVRRPERSPPSGGGGYELREPCGPLGGPAPAKVSPAPAPPVAPSHLPCARQGCGAGRRTGILFRAGVGAAGLGHSPQAQPWARCETGPTRTLQ

SEQ ID NO: 917031 - protein, 824 aa, Homo sapiens
RRAGGSGLRRRSPRHLRHVAGSRRRALSGGMEALTTQLGPGREGSSSPNSKQELQPYSGSSALKPNQVGETSLYGVPIVSLVIDGQERLCLAQISNTLLKNYSYNEIHNRRVALGITCVQCTPVQLEILRRAGAMPISSRRCGMITKREAERLCKSFLGEHKPPKLPENFAFDVVHECAWGSRGSFIPARYNSSRAKCIKCGYCSMYFSPNKFIFHSHRTPDAKYTQPDAANFNSWRRHLKLSDKSATDELSHAWEDVKAMFNGGTRKRTFSLQGGGGGGANGGSGGQGKGGAGGGGGGGPGCGAEMAPGPPPHKSLRCGEDEAAGPPGPPPPHPQRGLGLATGASGPAGPGGPGGGAGVRSYPVIPVPSKGFGLLQKLPPPLFPHPYGFPTAFGLCPKKDDPVLGAGEPKGGPGTGSGGGGAGTGGGAGGPGASHLPPGAGAGPGGGAMFWGHQPSGAAKDAAAVAAAAAAATVYPTFPMFWPAAGSLPVPSYPAAQSQAKAVAAAVAAAAAAAAAAAGSGAPEPLDGAEPAKESGLGAEERCPSALSRGPLDEDGTDEALPPPLAPLPPPPPPPARKGSYVSAFRPVVKDTESIAKLYGSAREAYGAGPARGPGPGAGSGGYVSPDFLSEGSSSYNSASPDVDTADEPEVDVESNRFPDDEDAQEETEPSAPSAGGGPDGEQPTGPPSATSSGADGPANSPDGGSPRPRRRLGPPPAGRPAFGDLAAEDLVRRPERSPPSGGGGYELREPCGPLGGPAPAKVSPAPAPPVAPSHLPCARQGCGAGRRTGILFRAGVGAAGLGHSPQAQPWARCETGPTRTLQ

SEQ ID NO: 917032 - protein, 254 aa, Homo sapiens
LAADQALPAPSASPQELATTSTMPYQYPALTPEQKKELSDIAHRIVAPGKGILAADESTGSIAKRLQSIGTENTEENRRFYRQLLLTADDRVNPCIGGVILFHETLYQKADDGRPFPQVIKSKGGVVGIKVDKGVVPLAGTNGETTTQGLDGLSERCAQYKKDGADFAKWRCVLKIGEHTPSALAIMENANVLARYASICQQNGIVPIVEPEILPDGDHDLKRCQYVTEKVWVVSTGSGGPHFSSGGLVGPCAP

SEQ ID NO: 917033 - protein, 364 aa, Homo sapiens
MPYQYPALTPEQKKELSDIAHRIVAPGKGILAADESTGSIAKRLQSIGTENTEENRRFYRQLLLTADDRVNPCIGGVILFHETLYQKADDGRPFPQVIKSKGGVVGIKVDKGVVPLAGTNGETTTQGLDGLSERCAQYKKDGADFAKWRCVLKIGEHTPSALAIMENANVLARYASICQQNGIVPIVEPEILPDGDHDLKRCQYVTEKVLAAVYKALSDHHIYLEGTLLKPNMVTPGHACTQKFSHEEIAMATVTALRRTVPPAVTGITFLSGGQSEEEASINLNAINKCPLLKPWALTFSYGRALQASALKAWGGKKENLKAAQEEYVKRALANSLACQGKYTPSGQAGAAASESLFVSNHAY

SEQ ID NO: 917034 - protein, 414 aa, Homo sapiens
GASTTLRPRTLRYFRRSLAKDLFLLTTKGLRLDFQGRISSEAPELATTSTMPYQYPALTPEQKKELSDIAHRIVAPGKGILAADESTGSIAKRLQSIGTENTEENRRFYRQLLLTADDRVNPCIGGVILFHETLYQKADDGRPFPQVIKSKGGVVGIKVDKGVVPLAGTNGETTTQGLDGLSERCAQYKKDGADFAKWRCVLKIGEHTPSALAIMENANVLARYASICQQNGIVPIVEPEILPDGDHDLKRCQYVTEKVLAAVYKALSDHHIYLEGTLLKPNMVTPGHACTQKFSHEEIAMATVTALRRTVPPAVTGITFLSGGQSEEEASINLNAINKCPLLKPWALTFSYGRALQASALKAWGGKKENLKAAQEEYVKRALANSLACQGKYTPSGQAGAAASESLFVSNHAY

SEQ ID NO: 917035 - protein, 392 aa, Homo sapiens
MPYQYPALTPEQKKELSDIAHRIVAPGKGILAADESTGAGRRQNGWRVQGWEWQADPLNSHVTLPGSIAKRLQSIGTENTEENRRFYRQLLLTADDRVNPCIGGVILFHETLYQKADDGRPFPQVIKSKGGVVGIKVDKGVVPLAGTNGETTTQGLDGLSERCAQYKKDGADFAKWRCVLKIGEHTPSALAIMENANVLARYASICQQNGIVPIVEPEILPDGDHDLKRCQYVTEKVLAAVYKALSDHHIYLEGTLLKPNMVTPGHACTQKFSHEEIAMATVTALRRTVPPAVTGITFLSGGQSEEEASINLNAINKCPLLKPWALTFSYGRALQASALKAWGGKKENLKAAQEEYVKRALANSLACQGKYTPSGQAGAAASESLFVSNHAY

SEQ ID NO: 917036 - protein, 402 aa, Homo sapiens
RLGTRLGVESAEAETKGLRLDFQGRISSEAPELATTSTMPYQYPALTPEQKKELSDIAHRIVAPGKGILAADESTGSIAKRLQSIGTENTEENRRFYRQLLLTADDRVNPCIGGVILFHETLYQKADDGRPFPQVIKSKGGVVGIKVDKGVVPLAGTNGETTTQGLDGLSERCAQYKKDGADFAKWRCVLKIGEHTPSALAIMENANVLARYASICQQNGIVPIVEPEILPDGDHDLKRCQYVTEKVLAAVYKALSDHHIYLEGTLLKPNMVTPGHACTQKFSHEEIAMATVTALRRTVPPAVTGITFLSGGQSEEEASINLNAINKCPLLKPWALTFSYGRALQASALKAWGGKKENLKAAQEEYVKRALANSLACQGKYTPSGQAGAAASESLFVSNHAY

SEQ ID NO: 917037 - protein, 340 aa, Homo sapiens
TRGSTHASADAWAGSIAKRLQSIGTENTEENRRFYRQLLLTADDRVNPCIGGVILFHETLYQKADDGRPFPQVIKSKGGVVGIKVDKGVVPLAGTNGETTTQGLDGLSERCAQYKKDGADFAKWRCVLKIGEHTPSALAIMENANVLARYASICQQNGIVPIVEPEILPDGDHDLKRCQYVTEKVLAAVYKALSDHHIYLEGTLLKPNMVTPGHACTQKFSHEEIAMATVTALRRTVPPAVTGITFLSGGQSEEEASINLNAINKCPLLKPWALTFSYGRALQASALKAWGGKKENLKAAQEEYVKRALANSLACQGKYTPSGQAGAAASESLFVSNHAY

SEQ ID NO: 917038 - protein, 258 aa, Homo sapiens
VDSTDPPLANGRTNGETTTQGLDGLSERCAQYKKDGADFAKWRCVLKIGEHTPSALAIMENANVLARYASICQQNGIVPIVEPEILPDGDHDLKRCQYVTEKVLAAVYKALSDHHIYLEGTLLKPNMVTPGHACTQKFSHEEIAMATVTALRRTVPPAVTGITFLSGGQSEEEASINLNAINKCPLLKPWALTFSYGRALQASALKAWGGKKENLKAAQEEYVKRALANSLACQGKYTPSGQAGAAASESLFVSNHAY

SEQ ID NO: 917039 - protein, 110 aa, Homo sapiens
YLESRRTPLANGSICQQNGIVPIVEPEILPDGDHDLKRCQYVTEKVLAAVYKALSDHHIYLEGTLLKPNMVTPGHACTQKFSHEEIAMAWASGPVGPVWIGCKKGLVPLG

SEQ ID NO: 917040 - protein, 364 aa, Homo sapiens; identical to SEQ ID NO: 917033

SEQ ID NO: 917041 - protein, 364 aa, Homo sapiens; identical to SEQ ID NO: 917033

SEQ ID NO: 917042 - protein, 386 aa, Homo sapiens
LAADQALPAPSASPQELATTSTMPYQYPALTPEQKKELSDIAHRIVAPGKGILAADESTGSIAKRLQSIGTENTEENRRFYRQLLLTADDRVNPCIGGVILFHETLYQKADDGRPFPQVIKSKGGVVGIKVDKGVVPLAGTNGETTTQGLDGLSERCAQYKKDGADFAKWRCVLKIGEHTPSALAIMENANVLARYASICQQNGIVPIVEPEILPDGDHDLKRCQYVTEKVLAAVYKALSDHHIYLEGTLLKPNMVTPGHACTQKFSHEEIAMATVTALRRTVPPAVTGITFLSGGQSEEEASINLNAINKCPLLKPWALTFSYGRALQASALKAWGGKKENLKAAQEEYVKRALANSLACQGKYTPSGQAGAAASESLFVSNHAY

SEQ ID NO: 917043 - protein, 326 aa, Homo sapiens
TQAHFCTQAHFCTQAHFCTQAHFCTQAHFCTQAHFWYSVILFHETLYQKADDGRPFPQVIKSKGGVVGIKVDKGVVPLAGTNGETTTQGLDGLSERCAQYKKDGADFAKWRCVLKIGEHTPSALAIMENANVLARYASICQQNGIVPIVEPEILPDGDHDLKRCQYVTEKVLAAVYKALSDHHIYLEGTLLKPNMVTPGHACTQKFSHEEIAMATVTALRRTVPPAVTGITFLSGGQSEEEASINLNAINKCPLLKPWALTFSYGRALQASALKAWGGKKENLKAAQEEYVKRALANSLACQGKYTPSGQAGAAASESLFVSNHAY

SEQ ID NO: 917044 - protein, 201 aa, Homo sapiens
YLESRRTPLANGSICQQNGIVPIVEPEILPDGDHDLKRCQYVTEKVLAAVYKALSDHHIYLEGTLLKPNMVTPGHACTQKFSHEEIAMATVTALRRTVPPAVTGITFLSGGQSEEEASINLNAINKCPLLKPWALTFSYGRALQASALKAWGGKKENLKAAQEEYVKRALANSLACQGKYTPSGQAGAAASESLFVSNHAY

SEQ ID NO: 917045 - protein, 240 aa, Homo sapiens
MPARIWSKNSHSLMCCCRPGTALGLHLRFPGASVSHLYNVDNRRQHLFPRVALKGFLWGEPPGGRPPRSGGRRLPYATHFRARGGKIVAECGWPGRKAQRGQPRRQASWTCVHERARTDREAKRGPGRTIEKPRQKRTTQPEAAGARAPGQGRRRGVPGLAPLRGGRPSRSAPGGRRRGRRRGSGFAPPPPGSAALGSFPAWLSLDPPPLPLPVRDGLGLPAAPPPPSPAAPRGPLSCRA

SEQ ID NO: 917046 - protein, 522 aa, Homo sapiens
MADVDPDTLLEWLQMGQGDERDMQLIALEQLCMLLLMSDNVDRCFETCPPRTFLPALCKIFLDESAPDNVLEVTARAITYYLDVSAECTRRIVGVDGAIKALCNRLVVVELNNRTSRDLAEQCVKVLELICTRESGAVFEAGGLNCVLTFIRDSGHLVHKDTLHSAMAVVSRLCGKMEPQDSSLEICVESLSSLLKHEDHQVSDGALRCFASLADRFTRRGVDPAPLAKHGLTEELLSRMAAAGGTVSGPSSACKPGRSTTGAPSTTADSKLSNQVSTIVSLLSTLCRGSPVVTHDLLRSELPDSIESALQGDERCVLDTMRLVDLLLVLLFEGRKALPKSSAGSTGRIPGLRRLDSSGERSHRQLIDCIRSKDTDALIDAIDTGAFEVNFMDDVGQTLLNWASAFGTQEMVEFLCERGADVNRGQRSSSLHYAACFGRPQVAKTLLRHGANPDLRDEDGKTPLDKARERGHSEVVAILQSPGDWMCPVNKGDDISYIGRIPQQWFNIFELTSQNGLWDRLD

SEQ ID NO: 917047 - protein, 142 aa, Homo sapiens
MADVDPDTLLEWLQMGQGDERDMQLIALEQLCMLLLMSDNVDRCFETCPPRTFLPALCKIFLDESAPDNVLEVTARAITYYLDVSAECTRRIVGVDGAIKALCNRLVVVELNNRTSRDLAEQCVKVSITYWLITYFSQTSQG

SEQ ID NO: 917048 - protein, 391 aa, Homo sapiens
MADVDPDTLLEWLQMGQGDERDMQLIALEQLCMLLLMSDNVDRCFETCPPRTFLPALCKIFLDESAPDNVLEVTARAITYYLDVSAECTRRIVGVDGAIKALCNRLVVVELNNRTSRDLAEQCVKVLELICTRESGAVFEAGGLNCVLTFIRDSGHLVHKDTLHSAMAVVSRLCGKMEPQDSSLEICVESLSSLLKHEDHQVSDGALRCFASLADRFTRRGVDPAPLAKHGLTEELLSRMAAAGGTVSGPSSACKPGRSTTGAPSTTADSKLSNQVSTIVSLLSTLCRGSPVVTHDLLRSELPDSIESALQGDERCVLDTMRLVDLLLVLLFEGRKALPKSSAGSTGRIPGLRRLDSSGERSHRQLIDCIRSKDTDALIDAIDTGGQKIFF

SEQ ID NO: 917049 - protein, 1995 aa, Homo sapiens
MYPNWGRYGGSSHYPPPPVPPPPPVALPEASPGPGYSSSTTPAAPSSSGFMSFREQHLAQLQQLQQMHQKQMQCVLQPHHLPPPPLPPPPVMPGGGYGDWQPPPPPMPPPPGPALSYQKQQQYKHQMLHHQRDGPPGLVPMELESPPESPPVPPGSYMPPSQSYMPPPQPPPSYYPPTSSQPYLPPAQPSPSQSPPSQSYLAPTPSYSSSSSSSQSYLSHSQSYLPSSQASPSRPSQGHSKSQLLAPPPPSAPPGNKTTVQQEPLESGAKNKSTEQQQAAPEPDPSTMTPQEQQQYWYRQHLLSLQQRTKVHLPGHKKGPVVAKDTPEPVKEEVTVPATSQVPESPSSEEPPLPPPNEEVPPPLPPEEPQSEDPEEDARLKQLQAAAAHWQQHQQHRVGFQYQGIMQKHTQLQQILQQYQQIIQPPPHIQANMQLRHYEMQQQQFQHLYQEWEREFQLWEEQLHSYPHKDQLQEYEKQWKTWQGHMKATQSYLQEKVNSFQNMKNQYMGNMSMPPPFVPYSQMPPPLPTMPPPVLPPSLPPPVMPPALPATVPPPGMPPPVMPPSLPTSVPPPGMPPSLSSAGPPPVLPPPSLSSAGPPPVLPPPSLSSTAPPPVMPLPPLSSATPPPGIPPPGVPQGIPPQLTAAPVPPASSSQSSQVPEKPRPALLPTPVSFGSAPPTTYHPPLQSAGPSEQVNSKAPLSKSALPYSSFSSDQGLGESSAAPSQPITAVKDMPVRSGGLLPDPPRSSYLESPRGPRFDGPRRFEDLGSRCEGPRPKGPRFEGNRPDGPRPRYEGHPAEGTKSKWGMIPRGPASQFYITPSTSLSPRQSGPQWKGPKPAFGQQHQQQPKSQAEPLSGNKEPLADTSSNQQKNFKMQSAAFSIAADVKDVKAAQSNENLSDSQQEPPKSEVSEGPVEPSNWDQNVQSMETQIDKAQAVTQPVPLANKPVPAQSTFPSKTGGMEGGTAVATSSLTADNDFKPVGIGLPHSENNQDKGLPRPDNRDNRLEGNRGNSSSYRGPGQSRMEDTRDKGLVNRGRGQAISRGPGLVKQEDFRDKMMGRREDSREKMNRGEGSRDRGLVRPGSSREKVPGGLQGSQDRGAAGSRERGPPRRAGSQERGPLRRAGSRERIPPRRAGSRERGPPRGPGSRERGLGRSDFGRDRGPFRPEPGDGGEKMYPYHRDEPPRAPWNHGEERGHEEFPLDGRNAPMERERLDDWDRERYWRECERDYQDDTLELYNREDRFSAPPSRSHDGDRRGPWWDDWERDQDMDEDYNREMERDMDRDVDRISRPMDMYDRSLDNEWDRDYGRPLDEQESQFRERDIPSLPPLPPLPPLPPLDRYRDDRWREERNREHGYDRDFRDRGELRIREYPERGDTWREKRDYVPDRMDWERERLSDRWYPSDVDRHSPMAEHMPSSHHSSEMMGSDASLDSDQGLGGVMVLSQRQHEIILKAAQELKMLREQKEQLQKMKDFGSEPQMADHLPPQESRLQNTSSRPGMYPPPGSYRPPPPMGKPPGSIVRPSAPPARSSVPVTRPPVPIPPPPPPPPLPPPPPVIKPQTSAVEQERWDEDSFYGLWDTNDEQGLNSEFKSETAAIPSAPVLPPPPVHSSIPPPGPVPMGMPPMSKPPPVQQTVDYGHGRDISTNKVEQIPYGERITLRPDPLPERSTFETGQRDRYDRERDREPYFDRQSNVIADHRDFKRDRETHRDRDRDRGVIDYDRDRFDRERRPRDDRAQSYRDKKDHSSSRRGGFDRPSYDRKSDRPVYEGPSMFGGERRTYPEERMPLPAPSLSHQPPPAPRVEKKPESKNVDDILKPPGRESRPERIVVIMRGLPGSGKTHVAKLIRDKEVEFGGPAPRVLSLDDYFITEVEKEEKDPDSGKKVKKKVMEYEYEAEMEETYRTSMFKTFKKTLDDGFFPFIILDAINDRVRHFDQFWSAAKTKGFEMADHWETAPRHMMRLDIRSLLQDAAIEEEDHSGSMNLERVSTDRKTR

SEQ ID NO: 917050 - protein, 460 aa, Homo sapiens
MYPNWGRYGGSSHYPPPPVPPPPPVALPEASPGPGYSSSTTPAAPSSSGFMSFREQHLAQLQQLQQMHQKQMQCVLQPHHLPPPPLPPPPVMPGGGYGDWQPPPPPMPPPPGPALSYQKQQQYKHQMLHHQRDGPPGLVPMELESPPESPPVPPGSYMPPSQSYMPPPQPPPSYYPPTSSQPYLPPAQPSPSQSPPSQSYLAPTPSYSSSSSSSQSYLSHSQSYLPSSQASPSRPSQGHSKSQLLAPPPPSAPPGNKTTVQQEPLESGAKNKSTEQQQAAPEPDPSTMTPQEQQQYWYRQHLLSLQQRTKVHLPGHKKGPVVAKDTPEPVKEEVTVPATSQVPESPSSEEPPLPPPNEEVPPPLPPEEPQSEDPEEDARLKQLQAAAAHWQQHQQHRVGFQYQGIMQKHTQLQQILQQYQQIIQPPPHIQAMSVVMQERFRVQEVVILIYAGSSRVHAPH

SEQ ID NO: 917051 - protein, 156 aa, Homo sapiens
EPRKPTEQRLRPGPAPMSPATPPGAQPRLPAARAQVGKRRSAAAPPPRSHRPAARRRRTELRPGDLGPQGGERGATSGAGLTAAQPQAPEGSRGCARACPGAVVRGQEGCPVPGARPAERLGPTWARLEARAGSDGAGGAAGPGLLAPRARLGQDA

SEQ ID NO: 917052 - protein, 304 aa, Homo sapiens
MSRQEKDAELDRRIVALRKKNQALLRRYQEIQEDRRQAEQGGMAVTTPALLQPDGLTVTISQVPGVSLTLGDRARSKEVEAQTIPQPCAYATKHRPLLNLKPQGLKPCRKWGTEKLGLNARSSEKRVVSRNWARGTCGPRVTNEMLEDEDAEDHGGTFCLGELVELAVTMENKAEGKRIVSEKPTRARNQGIEGSPGGRVTRSPPTQVAISSDSARKGSWEPWSRPVGEPPEAGWDYAQWKQEREQIDLARLARHRDAQGDWRRPWDLDKAKSTWVAGLGRLPVVRDGAGFGHCWEGCRDPPRG

SEQ ID NO: 917053 - protein, 128 aa, Homo sapiens
MGSRGFIQARKMCRCCGSFDPGHLTYISPRPQPSWRNYEVYEIQSSVSLSPATGRIIPSSFWGPRKSFFWTQSPPTLELVLGSVILLRIWEEVFIPRGGQEGIASPTLWACLAFDVSSEDLTPWIEWS

SEQ ID NO: 917054 - protein, 143 aa, Homo sapiens
MAYSRHTKSRYLPSHQNYTKKTGKIYEAMLFKAAAIIPRKTMIPERQETNKASLMIATTYCLERVSKSWCKESEPRQSPVDSLIGETKLRVWKDAGRWSLQDKLRESDENHKHTNPRISKYPKHRKLEEKYIKAHYSEIALNK

SEQ ID NO: 917055 - protein, 143 aa, Homo sapiens
VGCMHSATCLEGHESHGKGRARAAGKRRATGGPMSPSHRPPLLGLPGLPHQVFLQLRQKEPLENEKHPPGCRTWAPTAENLQERKFRWQLRATVEQRSPQAAEHTDLGGVQRWHQRYEGVQGKADGRERAGVTAASGAERWTL

SEQ ID NO: 917056 - protein, 143 aa, Homo sapiens; identical to SEQ ID NO: 917055

SEQ ID NO: 917057 - protein, 161 aa, Homo sapiens [sequence omitted]

SEQ ID NO: 917058 - protein, 221 aa, Homo sapiens
MRIKGKNAPKVFSLCLTHSKRTINASYYYYCDYTVQWTLLFLFLIDTKSRREEGCCNVRKKRDAVPTVMKYSHIIKESHNSTTRSTVIERYIMPRAFTRGCGLSRRPYEDTARQPQARREALTRTCPCWLPDVRLPASGTVRKSMSVVSAIQSMAFVMAVQAKTVSLARSSLPLMSLLSNFLSPDPLTLLLGCKSPLILAVFGAELNLSLLLRYFYCNNLK

SEQ ID NO: 917059 - protein, 141 aa, Homo sapiens
MLGLRLLAIVLNYYTTATNHFTGFPLSVNLTETYPFPQFLLSSTLIRLIWCSAQRASTNLTYTVSSPLDASTQRWAWRLSKALVALRIPCARPSWMRAVFNSSCKAALMSITPPAAMPSSAMAVEDEHAGISRYAPKVVQV

SEQ ID NO: 917060 - protein, 1186 aa, Homo sapiens
PVSPEAAAVEKTGTAEMSSILKEHVLGADTSADLEETGHVLSIGDVKRTGTIVDVPVGEELLGRVVDALGNAIDGKGPMGSKTHKIIPRTSVWEPMPTGIKAVDSLVPIGRGQHELIIGDRRTGKTSIAIDTIINQKHFNDRSEEKKKLYCIYVAIGRKRSTVAQLVKRLTDADAVKYTTVVSAMASDAALLQYLAPYSDCSMGEYFRDDGKYTLIIYDDLSKQAACPGDVFYLYSRLLERAAKMNDAFGGGSLTALLVIETQADDVSAYIPTNVISITDRQILETELFYKDIRSAINIGSVCVLCWICCPNQDYEAGGRLSLAHVYLQLHKGENIEDIPKEVLTDCAHLVKANSTQGCKNNVNVVNTPRSNLKKTADVDVRQIGFHRQKDVKIVTMEKKVNEILNRLEKTKLNRFQCSFEEAQHYCHVQRGFLAHIWNKEVQDLIRDYLEEGKKWWIGQNVMPLKKHQDNKYPADVAANGPPKPLSCTYLSRNFIRISSKGDKCLLKYYFICQTGDFLDGDAHYERNGNNSHLYQRHKKTKRGVAIARDKMPPVDSDETGDKIRNNFKPKGRRSSEYLHLLSTSVIAEGIWSGKHGKFKSQVIDEIAGNFSRAVHGLQALNKLQEACEFLQKLTALTPRFSKPAQNNNSLGFKVPPTVCPFHSLNNVTKAGEGSWLESKRHTEPVEDILEMSLVEFGNIGEAFLEQNQSPESSVTLTSANATLLLSRQNISTLPLSSYTLGHPAPVRLGFPSALALKELLNKHPGVNVQITGLAFNPFKDLDNRNIVGSIGSVLLSANRKLLQVHDLMEDIEIMLWRNVSLETHPTSLNMSTHQLTITVNVTSLEKSLIVSIDPDSPLLMTLYLGFQYQPNCTHFHLNITLPKDKVWQKDEEYTWVLNPEHLQHGIGTYYITAVLSERQEGAQQTPSLVSVITAVTQCYYWEIHNQTWSSAGCQVGPQSTILRTQCLCNHLTFFASDFFVVPRTVNVEDTIKLFLRVTNNPVGVSLLASLLGFYVITVVWARKKDQADMQKVKVTVLADNDPSAQFHYLIQVYTGYRRSAATTAKVVITLYGSEGRSEPHHLCDPQKTVFERGGLDVFLLTTWTSLGNLHSLRLWHDNSGVSPSWYVSQVIVCDMAVKRKWHFLCNCWLAVDLGDCELDRVFIPVSKRELFSFRYCWKITINSEY

SEQ ID NO: 917061 - protein, 450 aa, Homo sapiens
MGPAWVQDPLTGALWLPVLWALLSQVYCFHDPPGWRFTSSEIVIPRKVPHRRGGVEMPDQLSYSMHFRGRRHVIHMKLKKNMMPRHLPVFTNNDQGAMQENYPFVPRDCYYDCYLEGVPGSVATLDTCRGGLRGMLQVDDLTYEIKPLEAFSKFEYVVSLLVSEERPGEVSRCKTEGEEIDQESEKCSKFSIPNFPYVAPRCGDNIKNQREECDCGSLKDCASDRCCETSCTLSLGSVCNTGLCCHKCKYAAPGVVCRDLGGICDLPKYCDGKKEECPNDIYIQDGTPCSAVSVCIRGNCSDRDMQCQALFGYQVKDGSPACYQKLNRIAEHTTFRNILVHDIKEEKCFGYEAHQGTDLPEMGLVVDGATCGPGSYCLKHNCTSYQDLHFECDLKTCNYKGVCNNKKHCHCLHGWQPPTCELRGKGGSIDSGPPPDKQYRITASTLANIN

SEQ ID NO: 917062 - protein, 455 aa, Homo sapiens
NGCYNCMEGKLRPRGPNTTEPRLLTSPQPPPLPAQCPPSCCGELGSCRADTLGDQVCRDSLQNQESQGTRASLPRLLASPWGKVEAHLAAEALVPEAIKGGQKGQRPRLGREEGAVRSAQALGRVPAAPRSHALWCQSWHPSPAPPLPCRDQGTGNVAVDSAPWGHGFLSQWAGVEDGFPPFDPCQEKALKVSAGCRAEDSGLCGAEPRSHLACGDPWDPALFYCPLDAAGTLLPGGQERSLEEGARKLPGCKSGFLSKSSAGGEREYGGGHGGPSPDTRLRTRSPAPRAGLGPETRAAASDSCAVGQARACARPDRARRPRVGWRAQEEGTPTAPHRLPGRAATLDGGSAGRGRGAAEGAFVRRVPERVAAGPAPAPLQRPPPARAPGPARIPGEATRGFCGPSPAVAARRRRERLRILLGSPSAGCGCRGDVGGLRVADREFGQLHAPSVVSP

SEQ ID NO: 917063 - protein, 436 aa, Homo sapiens
NGCYNCMEGKLRPRGPNTTEPRLLTSPQPPPLPAQCPPSCCGELGSCRADTLGDQVCRDSLQNQESQGTRASLPRLLASPWGKVEAHLAAEALVPEAIKGGQKGQRPRLGREEGAVRSAQALGRVPAAPRSHALWCQSWHPSPAPPLPCRDQGTGNVAVDSAPWGHGFLSQWAGVEDGFPPFDPCQEKALKVSAGCRAEDSGLCGAEPRSHLACGDPWDPALFYCPLDAAGTLLPGGQERSLEEGARKLPGCKSGFLSKSSAGGEREYGGGHGGPSPDTRLRTRSPAPRAGLGPETRAAASDSCAVGQARACARPDRARRPRVGWRAQEEGTPTAPHRLPGRAATLDGGSAGRGRGAAEGAFVRRVPERVAAGPAPAPLQRPPPARAPGPARIPGEATRGFCGPSPAVAARRRRERLRILLGSPSAGCNPRAVPPS

SEQ ID NO: 917064 - protein, 127 aa, Homo sapiens
MDPPARCGWDRQGPCGVAWLAWSWGRSPRAWSPEGLVGRPGAVVHTKGGLQREVRTLGLPPGQPSLSKSPPAAELPPVKPLFPAFCALNKLLLGLSHQHSVVGVAAARLPSCTQAPHRTSRMIWKSD

SEQ ID NO: 917065 - protein, 227 aa, Homo sapiens
AKRVPLPTPHCPSPVHSTEMLTWEAVRPDLDGQPWQMSSVPSRELGNREMGPCLPRPTDSALLASANLCGFELVLGMTVTASITRGLWNILALGRSGRIISNAVTSAAAYTTIRKHASHTNLTTVHPGSCRLARAPDATSSLESTLTLESIALGWSLPSAIDYLSDSSFQFKFTLTEIQDGVVIWPQPRDIAMLALTTPLVKACKTSEAPAQHGPELLQQPRAVSRY

SEQ ID NO: 917066 - protein, 227 aa, Homo sapiens; identical to SEQ ID NO: 917065

SEQ ID NO: 917067 - protein, 137 aa, Homo sapiens
MWESKAWESIGCAWEIRTQCSTSLLQTRVVSVYFISSVKSVIWKGCEIHPEEQPAEYPLGYWHLLGYKSLAIKDEPTDLALNTQLTNKQRKSKEAHMVYFRGRAWKGYIPPPSHGPLAGTQSHDPTYMQDSICALVV

SEQ ID NO: 917068 - protein, 137 aa, Homo sapiens; identical to SEQ ID NO: 917067

SEQ ID NO: 917069 - protein, 167 aa, Homo sapiens
PAMVSTYDPKSIMLKPNHWCDGIRRPSPDIGSTGTLILEFPAPRTMRSKCTCTHTHILLNENSNTLYMLFCNLLVSFTYIMRMFPCQEMEVKDSAVQGSPSEATSGAQQIFVENLLCAWLDQGGAVELHIIVCIRVSPESQALEGYPDGQDPLPSLREHQKGRCGGG

SEQ ID NO: 917070 - protein, 167 aa, Homo sapiens; identical to SEQ ID NO: 917069

SEQ ID NO: 917071 - protein, 167 aa, Homo sapiens; identical to SEQ ID NO: 917069

SEQ ID NO: 917072 - protein, 131 aa, Homo sapiens
MASSSILKASFCKFLLWVPGNPIGLGLAPAKNKCYSCPVSSEWMLVILVWSPDVRQQVVQKAPEEVSCQSQGQRRRHREPTARDFHLQRATHDEEGGFLGALSPPDTRTQDLLAWKVNSSEFRDDASLGGR

SEQ ID NO: 917073 - protein, 197 aa, Homo sapiens
EHRGFTMELGLRWVFLVAILEGVQCEVQLVESGGGLVKPGGSLRLSCAASGFTFSSYSMNWVRQAPGKGLEWVSSISSSSSYIYYADSVKGRFTISRDNAKNSLYLQMNSLRAEDTAVYYCARDTVRGSQCEPRHKPPCRVPRTTRGARDTVHGSVSRAGAVPAEGWLPVMACGALIVKFPQGTSPDLQFCTDISCL

SEQ ID NO: 917074 - protein, 135 aa, Homo sapiens
MKWTLVMKGIILVFSNGILDVELICASHTVTEFGLSPVTLRRAEDGHSIVLGALGNNSRALARQPKVNTAGLQERQAGIPGKTCICRPPWSPIVFYYALIESAPPRLSRTLFVTYEKIMGGSTNTCVMPWEQHLS

SEQ ID NO: 917075 - protein, 150 aa, Homo sapiens [sequence omitted]

SEQ ID NO: 917076 - protein, 113 aa, Homo sapiens
PPAPQPVELGSPRRSPAPAQAGSQVGGVGRQKSQGSWGRLRLYLQATVSSTDLGRGCKCFKETRAAEKRDSEARGTAFSASPPARGSPLLQLPVLSNQVRRLPGPLPTLKVAC

SEQ ID NO: 917077 - protein, 150 aa, Homo sapiens [sequence omitted]

SEQ ID NO: 917078 - protein, 206 aa, Homo sapiens
TGPPEKSNYWLRGFKAAQGRLMKGDKLGTVSRIPAGRPGQPGSRGAAESPRIKGIWRERGSGRPAPAGLPPRRPRRPGVGGCGPRAGTPGFPACLSRGLRRRPLRAARPGGELRRARGSQVSTGAPRAGPGTQDKARGPPRLAREWRSRGPGSRLRRLPAPAAGTPRGRAPGQAPGRRLRKRRLAGRGARGGEPGSVNPRSARRSD

SEQ ID NO: 917079 - protein, 148 aa, Homo sapiens
MKGARNSKPLFTRSKEPPDPFNQKYSFVFVFIPAFIPLCSVQQGLGPCWATVNTAPIASVLAVGRGPPLATVAVMFVIADLLHIAEECLSHSHIELSHKRHQRYDILVGPSSCTCIRPKNLISPLTVINILMKTGYVDAGRWGKLVSS

SEQ ID NO: 917080 - protein, 268 aa, Homo sapiens
DPFSQRQPAGPASPSAAKPRPGLAPLLPPERAMPPRELSEAEPPPLRAPTPPPRRRSAPPELGIKCVLVGDGAVGKSSLIVSYTCNGYPARYRPTALDTFSVQVLVDGAPVRIELWDTAGQEDFDRLRSLCYPDTDVFLACFSVVQPSSFQNITEKWLPEIRTHNPQAPVLLVGTQADLRDDVNVLIQLDQGGREGPVPQPQAQGLAEKIRACCYLECSALTQKNLKEVFDSAILSAIEHKARLEKKLNAKGVRTLSRCRWKKFFCFV

SEQ ID NO: 917081 - protein, 268 aa, Homo sapiens; identical to SEQ ID NO: 917080

SEQ ID NO: 917082 - protein, 153 aa, Homo sapiens
MRISLEVELPNREEGDLLVVYTGLTFANYGNGGQATGQASLAILKIVVLSEDGTECKRVIFYKKKRCTLLLTNFICTYFRKNKIKQRSSLEQQRLLKRVLSDTSRIITVKRIQLYSHLDTEQIKRDWQCSSKWKTSQRRKLENIHFWRDSGKS

SEQ ID NO: 917083 - protein, 505 aa, Homo sapiens
KAVGVLELLAGEEGGRSSLQKDILEDLAGLNMHWLRKVQGLCTLWGTQMSSRTLYINSRQLVSLQWGHQEVPAKFNFASDVLDHWADMEKAGKRLPSPALWWVNGKGKELMWNFRELSENSQQAANVLSGACGLQRGDRVAVVLPRVPEWWLVILGCIRAGLIFMPGTIQMKSTDILYRLQMSKAKAIVAGDEVIQEVDTVASECPSLRISYWCLRLITVWSWLNFKKLLNEASTTHHCVETGSQEASAIYFTSGTSGLPKMAEHSYSSLGLKAKMDAGYKFPHLQNCVTVGESLLPETLENWRAQTGLDIRESYGQTETGLTCMVSKTMKIKPGYMGTAASCYDVQIIDDKGNVLPPGTEGDIGIRVKPIRPIGIFSGYVVRNCAPPPLFPSEDGSTKRDEGGQMAGDLGFAGTMTLSFCGHQDNPDKTAANIRGDFWLLGDRGIKDEDGYFQFMGRADDIINSSGYRIGPSEVENALMEHPAVVETAVISSPDPVRGEVMGKQ

SEQ ID NO: 917084 - protein, 252 aa, Homo sapiens
MDEERVAINVGLTSLDLSWNNFHTRGAVALCNGLRGNVTLTKLDLSMNGFGNEVALALGEVLRLNRCLVYLDIGGNDIGNEGASKISKGLESNESLRVLKLFLNPINMDGAILLILAIKRNPKSRMEELDISNVLVSEQFMKTLDGVYAVHPQLDVVFKAVQGLSPKKTIFLLTNPMKLIQSYADQHKITIVDFFKSLNPTGTMKMSVDEFQKVMIEQNKVPLNQYQVREVIKKLDEKTGMVNFSFLNTMKP

SEQ ID NO: 917085 - protein, 173 aa, Homo sapiens
MAAGKRRSSLPRLGSRAEGLLTSQTMGGQAETLLTSQMGLEGSEEDKKMWESLELTRDLFNGFDDSDMDNEVQAEVVSDGDKFQYLLPQFHLRYCQNGIYHPYFYQYSDHNHLTNPYDLESLKSSASSEPSLELPLKLHSWKSKLFLTCFSKFLQPLPITQFESHLLILGYLL

SEQ ID NO: 917086 - protein, 182 aa, Homo sapiens
PGGGAYQPRAVRPHSSALGRLMGPGALEQEAAFVRETQAAQEPTASSGRGDSGMAGYRSQALPRGGAAKAQREIERSAAAGQDAKPLTTRGRQGRLAAPSARPAKPTPTRNSSWPASAARSPGSRPCLSLHTSLQAEGAGSGLGHPRKGLPQCSGGLKGSSSVARVGAKAEEAPRGSEGCED

SEQ ID NO: 917087 - protein, 345 aa, Homo sapiens
VFYHFIPKQIDEVWREMRWIMDALQYARYKQPVSGLPITKLIDPSDEQSLKKINSTSSSHIDCLPSPPPSPEMHRRKTVSDSQPCSDEEACSEVFLPTNSDYDSSDALSPRDLDLVYLSSHDIAQQTLSGLSGSAPDVLQVHDVKTPLGPGQDPQGEGPNPDHSCAEFLHSLTLTGFTPKNHAKTVSGGRPPLGFLGKRKPGKHPHYGGFSRHHRWLRIHSETQSLSLSEGIYTQHLSQACGLAQEPKEAKRAGPALDDPRGLTLAHAASLPEERNSSLQDARPSVRRLYVEPYAAAVVAQDEKPWASLSPPSGGRITLPSPTGPDVSQEGPTASPMSEILSSML

SEQ ID NO: 917088 - protein, 446 aa, Homo sapiens
MGGCAGSRRRFSDSEGEETVPEPRLPLLDHQGAHWKNAVGFWLLGLCNNFSYVVMLSAAHDILSHKRTSGNQSHVDPGPTPIPHNSSSRFDCNSVSTAAVLLADILPTLVIKLLAPLGLHLLPYRSGPRVLVSGICAAGSFVLVAFSHSVGTSLCGVVFASISSGLGEVTFLSLTAFYPRAVISWWSSGTGGAGLLGALSYLGLTQAGLSPQQTLLSMLGIPALLLASYFLLLTSPEAQDPGGEEEAESAARQPLIRTEAPESKPGSSSSLSLRERWTVFKVRMMAGGLLWYIVPLVVVYFAEYFINQGLFELLFFWNTSLSHAQQYRWYQMLYQAGVFASRSSLRCCRIRFTWALALLQCLNLVFLLADVWFGFLPSIYLVFLIILYEGLLGGAAYVNTFHNIALETSDEHREFAMAATCISDTLGISLSGLLALPLHDFLCQLS

SEQ ID NO: 917089 - protein, 121 aa, Homo sapiens
SADSDAQLAAAESSPSAGRAADRPTEAPIGRLSTAQKEQLLRAPPRRAEAEPRAAGEPCRCHSGRGSALAEVCLTIRLRLPDKRNLVEFDGKVLSPPQRRPRSPRLLSPARPLLPQSRGCP

SEQ ID NO: 917090 - protein, 213 aa, Homo sapiens
MKILFVEPAIFLSAFAMTLTGPLTTQYVYRRIWEETGNYTFSSDSNISECEKNKSSPIFAFQEEVQKKVSRFNLQMDISGLIPGLVSTFILLSISDHYGRKFPMILSSVGALATSVWLCLLCYFAFPFQLLIASTFIGAFCGNYTTFWGACFAYIVDQCKEHKQKTIRIAIIDFLLGLVTGLTGLSSGYFIRELGFENGYDRVCQYNTDDVFR

SEQ ID NO: 917091 - protein, 110 aa, Homo sapiens
ENVFCRNSLGFQEGRPSSGVPWEQRSCHSNTKELDLYEKHSFVFSFLSPHPEWPEPKPAPSEKSLPPDLRLIFRHLGHNILHSLGMLISNCSLAFPALVLLRQGIPALLY

SEQ ID NO: 917092 - protein, 83 aa, Homo sapiens
SQPSEIAGLGVGGKEKILQPSDSMESRKKDIKKRILGDIFDSLDQTLPEAHISEISRYKNKYFLFIVLLDLRQALSFSDSSSS

SEQ ID NO: 917093 - protein, 83 aa, Homo sapiens; identical to SEQ ID NO: 917092

SEQ ID NO: 917094 - protein, 96 aa, Homo sapiens
SQPSEIAGLGVGGKEKILELDLYEKHSFVFSFLSPHPEWPEPKPAPSEKSLPPDLRLIFRHLGHNILHSLGMLISNCSLAFPALVLLRQGIPALLY

SEQ ID NO: 917095 - protein, 149 aa, Homo sapiens
STAWLLLMLIQGPRALQPACGECCQTWDSPFKAVGSPLAQGRSRNAIQELRPGIWDPNSIVGALPHCDQASTYADFWFLRRCFCQPSDSMESRKKDIKKRILGDIFDSLDQTLPEAHISEISRYKNKYFLFIVLLDLRQALSFSDSSSS

SEQ ID NO: 917096 - protein, 1263 aa, Homo sapiens
MPAKGRYFLNEGEEGPDQDALYEKYQLTSQHGPLLLTLLLVAATACVALIIIAFSQGDPSRHQAILGMAFLVLAVFAALSVLMYVECLLRRWLRALALLTWACLVALGYVLVFDAWTKAACAWEQVPFFLFIVFVVYTLLPFSMRGAVAVGAVSTASHLLVLGSLMGGFTTPSVRVGLQLLANAVIFLCGNLTGAFHKHQMQDASRDLFTYTVKCIQIRRKLRIEKRQQENLLLSVLPAHISMGMKLAIIERLKEHGDRRCMPDNNFHSLYVKRHQNVSILYADIVGFTQLASDCSPKELVVVLNELFGKFDQIAKANECMRIKILGDCYYCVSGLPVSLPTHARNCVKMGLDMCQAIKQVREATGVDINMRVGIHSGNVLCGVIGLRKWQYDVWSHDVSLANRMEAAGVPGRVHITEATLKHLDKAYEVEDGHGQQRDPYLKEMNIRTYLVIDPRSCLATPTGEGLRHVFLDRGGGLRPKGDAALKMRASVRMTRYLESWGAARPFAHLNHRESVSSGETHVPNGRRPKSVPQRHRRTPDRNQSFLAPGPSAWPHDGAPVVWCPGGVSGVGGREGDDCGCPGPHANPGGVAEDALDWGSGLPSASGLAAGQLGHAGPCWVLTRPLWASVGPTHSFTIPPEVLGPHWCLRPHPPLGELEVVAVLMQLWVSDSRSMSPKGRSEDDSYDDEMLSAIEGLSSTSPHLTAAAPAHRPCCSKSDDFYTFGSIFLEKGFEREYRLAPIPRARHDFACASLIFVCILLVHVLLMPRTAALGVSFGLVACVLGLVLGLCFATKFSRCCPARGTLCTISERVETQPLLRLTLAVLTIGSLLTVAIINLVGPVVGRQASGVEGDLQIWDAYNVALKAASGCPLPRAQQPLMPFQVPELPVGNETGLLAASSKTRALCEPLPYYTCSCVLGFIACSVFLRMSLEPKVVLLTVALVAYLVLFNLSPCWQWDCCGQGLGNLTKPNGTTSGTPSCSWKDLKTMTNFYLVLFYITLLTLSRQIDYYCRLDCLWKKKFKKEHEEFETMENVNRLLLENVLPAHVAAHFMVTEVKWCKVRFLPIQDWYHQSYDCVCVMFASVPDFKVFYTECDVNKEGLECLRLLNEIIADFDELLLKPKFSGVEKIKTIGSTYMAAAGLSVASGHENQELERQHAHIGVMVEFSIALMSKLDGINRHSFNSFRLRVGINHGPVIAGVIGARKPQYDIWGNTVNVASRMESTGELGKIQVFFPPLKTTGLSSFSGYRGDLHHPPGPRVLL

SEQ ID NO: 917097 - protein, 1263 aa, Homo sapiens; identical to SEQ ID NO: 917096

SEQ ID NO: 917098 - protein, 851 aa, Homo sapiens
PLPLGRPLGRRWSGSAQQLLANAVIFLCGNLTGAFHKHQMQDASRDLFTYTVKCIQIRRKLRIEKRQQENLLLSVLPAHISMGMKLAIIERLKEHGDRRCMPDNNFHSLYVKRHQNVSILYADIVGFTQLASDCSPKELVVVLNELFGKFDQIAKANECMRIKILGDCYYCVSGLPVSLPTHARNCVKMGLDMCQAIKQVREATGVDINMRVGIHSGNVLCGVIGLRKWQYDVWSHDVSLANRMEAAGVPGRVHITEATLKHLDKAYEVEDGHGQQRDPYLKEMNIRTYLVIDPRSQQPPPPSQHLPRPKGDAALKMRASVRMTRYLESWGAARPFAHLNHRESVSSGETHVPNGRRPKSVPQRHRRTPDRSMSPKGRSEDDSYDDEMLSAIEGLSSTRPCCSKSDDFYTFGSIFLEKGFEREYRLAPIPRARHDFACASLIFVCILLVHVLLMPRTAALGVSFGLVACVLGLVLGLCFATKFSRCCPARGTLCTISERVETQPLLRLTLAVLTIGSLLTVAIINLPLMPFQVPELPVGNETGLLAASSKTRALCEPSRGTPSCSWKDLKTMTNFYLVLFYITLLTLSRQIDYYCRLDCLWKKKFKKEHEEFETMENVNRLLLENVLPAHVAAHFIGDKDWYHQSYDCVCVMFASVPDFKVFYTECDVNKEGLECLRLLNEIIADFDELLLKPKFSGVEKIKTIGSTYMAAAGLSVASGHENQELERQHAHIGVMVEFSIALMSKLDGINRHSFNSFRLRVGINHGPVIAGVIGARKPQYDIWGNTVNVASRMESTGELGKIQVTEETCTILQGLGYSCECRGLINVKGKGELRTYFVCTDTAKFQGLGLN

SEQ ID NO: 917099 - protein, 139 aa, Homo sapiens
MQGSDPQPVPQELERQHAHIGVMVEFSIALMSKLDGINRHSFNSFRLRVGINHGPVIAGVIGARKPQYDIWGNTVNVASRMESTGELGKIQVTEETCTILQGLGYSCECRGLINVKGKGELRTYFVCTDTAKFQGLGLN

SEQ ID NO: 917100 - protein, 567 aa, Homo sapiens
PLPLGRPLGRRWSGSAQQLLANAVIFLCGNLTGAFHKHQMQDASRDLFTYTVKCIQIRRKLRIEKRQQENLLLSVLPAHISMGMKLAIIERLKEHGDRRCMPDNNFHSLYVKRHQNVSILYADIVGFTQLASDCSPKELVVVLNELFGKFDQIAKANECMRIKILGDCYYCVSGLPVSLPTHARNCVKMGLDMCQAIKQVREATGVDINMRVGIHSGNVLCGVIGLRKWQYDVWSHDVSLANRMEAAGVPGRVHITEATLKHLDKAYEVEDGHGQQRDPYLKEMNIRTYLVIDPRSQQPPPPSQHLPRPKGDAALKMRASVRMTRYLESWGAARPFAHLNHRESVSSGETHVPNGRRPKSVPQRHRRTPDRSMSPKGRSEDDSYDDEMLSAIEGLSSTRPCCSKSDDFYTFGSIFLEKGFEREYRLAPIPRARHDFACASLIFVCILLVHVLLMPRTAALGVSFGLVACVLGLVLGLCFATKFSRCCPARGTLCTISERVETQPLLRLTLAVLTIGSLLTVAIINLPLMPFQVPELPVGNETGLLAASSKTRALCEPLPHLHTVFSR

SEQ ID NO: 917101 - protein, 601 aa, Homo sapiens
PLPLGRPLGRRWSGSAQQLLANAVIFLCGNLTGAFHKHQMQDASRDLFTYTVKCIQIRRKLRIEKRQQENLLLSVLPAHISMGMKLAIIERLKEHGDRRCMPDNNFHSLYVKRHQNVSILYADIVGFTQLASDCSPKELVVVLNELFGKFDQIAKANECMRIKILGDCYYCVSGLPVSLPTHARNCVKMGLDMCQAIKQVREATGVDINMRVGIHSGNVLCGVIGLRKWQYDVWSHDVSLANRMEAAGVPGRVHITEATLKHLDKAYEVEDGHGQQRDPYLKEMNIRTYLVIDPRSQQPPPPSQHLPRPKGDAALKMRASVRMTRYLESWGAARPFAHLNHRESVSSGETHVPNGRRPKSVPQRHRRTPDRSMSPKGRSEDDSYDDEMLSAIEGLSSTRPCCSKSDDFYTFGSIFLEKGFEREYRLAPIPRARHDFACASLIFVCILLVHVLLMPRTAALGVSFGLVACVLGLVLGLCFATKFSRCCPARGTLCTISERVETQPLLRLTLAVLTIGSLLTVAIINLVGPVVGRQASGVEGDLQIWDAYNVALKAASGCPLPRAQQVDVGGSPLYTQGSSPLGSQMRTLGAQRACVASSRRM

SEQ ID NO: 917102 - protein, 495 aa, Homo sapiens
MPAKGRYFLNEGEEGPDQDALYEKYQLTSQHGPLLLTLLLVAATACVALIIIAFSQGDPSRHQAILGMAFLVLAVFAALSVLMYVECLLRRWLRALALLTWACLVALGYVLVFDAWTKAACAWEQVPFFLFIVFVVYTLLPFSMRGAVAVGAVSTASHLLVLGSLMGGFTTPSVRVGLQLLANAVIFLCGNLTGAFHKHQMQDASRDLFTYTVKCIQIRRKLRIEKRQQENLLLSVLPAHISMGMKLAIIERLKEHGDRRCMPDNNFHSLYVKRHQNVSILYADIVGFTQLASDCSPKELVVVLNELFGKFDQIAKANECMRIKILGDCYYCVSGLPVSLPTHARNCVKMGLDMCQAIKQVREATGVDINMRVGIHSGNVLCGVIGLRKWQYDVWSHDVSLANRMEAAGVPGRVHITEATLKHLDKAYEVEDGHGQQRDPYLKEMNIRTYLVIDPRDPTVEEAVPLPWPGGARLGLSAARPWPASGSPARLATSL

SEQ ID NO: 917103 - protein, 116 aa, Homo sapiens
ELEDPLGGTARCPCNGWRQRSTRPGAHHGGHAKAPGQGVRGGGWARAAAGPLPQGDEHPHLPGHRPPGPLVAPGPHGGGGSSTALARWGPPWPVCCPTLACFRESGTSGHFSVNHP

SEQ ID NO: 917104 - protein, 955 aa, Homo sapiens
PLPLGRPLGRRWSGSAQQLLANAVIFLCGNLTGAFHKHQMQDASRDLFTYTVKCIQIRRKLRIEKRQQENLLLSVLPAHISMGMKLAIIERLKEHGDRRCMPDNNFHSLYVKRHQNVSILYADIVGFTQLASDCSPKELVVVLNELFGKFDQIAKANECMRIKILGDCYYCVSGLPVSLPTHARNCVKMGLDMCQAIKQVREATGVDINMRVGIHSGNVLCGVIGLRKWQYDVWSHDVSLANRMEAAGVPGRVHITEATLKHLDKAYEVEDGHGQQRDPYLKEMNIRTYLVIDPRSQQPPPPSQHLPRPKGDAALKMRASVRMTRYLESWGAARPFAHLNHRESVSSGETHVPNGRRPKSVPQRHRRTPDRSMSPKGRSEDDSYDDEMLSAIEGLSSTRPCCSKSDDFYTFGSIFLEKGFEREYRLAPIPRARHDFACASLIFVCILLVHVLLMPRTAALGVSFGLVACVLGLVLGLCFATKFSRCCPARGTLCTISERVETQPLLRLTLAVLTIGSLLTVAIINLVGPVVGRQASGVEGDLQIWDAYNVALKAASGCPLPRAQQPLMPFQVPELPVGNETGLLAASSKTRALCEPLPYYTCSCVLGFIACSVFLRMSLEPKVVLLTVALVAYLVLFNLSPCWQWDCCGQGLGNLTKPNGTTSGTPSCSWKDLKTMTNFYLVLFYITLLTLSRQIDYYCRLDCLWKKKFKKEHEEFETMENVNRLLLENVLPAHVAAHFIGDKDWYHQSYDCVCVMFASVPDFKVFYTECDVNKEGLECLRLLNEIIADFDELLLKPKFSGVEKIKTIGSTYMAAAGLSVASGHENQELERQHAHIGVMVEFSIALMSKLDGINRHSFNSFRLRVGINHGPVIAGVIGARKPQYDIWGNTVNVASRMESTGELGKIQVTEETCTILQGLGYSCECRGLINVKGKGELRTYFVCTDTAKFQGLGLN

SEQ ID NO: 917105 - protein, 928 aa, Homo sapiens
PLPLGRPLGRRWSGSAQQLLANAVIFLCGNLTGAFHKHQMQDASRDLFTYTVKCIQIRRKLRIEKRQQENLLLSVLPAHISMGMKLAIIERLKEHGDRRCMPDNNFHSLYVKRHQNVSILYADIVGFTQLASDCSPKELVVVLNELFGKFDQIAKANECMRIKILGDCYYCVSGLPVSLPTHARNCVKMGLDMCQAIKQVREATGVDINMRVGIHSGNVLCGVIGLRKWQYDVWSHDVSLANRMEAAGVPGRVHITEATLKHLDKAYEVEDGHGQQRDPYLKEMNIRTYLVIDPRSQQPPPPSQHLPRPKGDAALKMRASVRMTRYLESWGAARPFAHLNHRESVSSGETHVPNGRRPKSVPQRHRRTPDRSMSPKGRSEDDSYDDEMLSAIEGLSSTRPCCSKSDDFYTFGSIFLEKGFEREYRLAPIPRARHDFACASLIFVCILLVHVLLMPRTAALGVSFGLVACVLGLVLGLCFATKFSRCCPARGTLCTISERVETQPLLRLTLAVLTIGSLLTVAIINLPLMPFQVPELPVGNETGLLAASSKTRALCEPSRGTPSCSWKDLKTMTNFYLVLFYITLLTLSRQIDYYCRLDCLWKKKFKKEHEEFETMENVNRLLLENVLPAHVAAHFIGDKDWYHQSYDCVCVMFASVPDFKVFYTECDVNKEGLECLRLLNEIIADFDELLLKPKFSGVEKIKTIGSTYMAAAGLSVASGHENQVLKPKKVKFSCLSSLKGDLSPYLKGVPLSRPGGGAQVLVGLSQDFSGGDPQQELARQGPLGLGALEMQGSDPQPVPQELERQHAHIGVMVEFSIALMSKLDGINRHSFNSFRLRVGINHGPVIAGVIGARKPQYDIWGNTVNVASRMESTGELGKIQVTEETCTILQGLGYSCECRGLINVKGKGELRTYFVCTDTAKFQGLGLN

SEQ ID NO: 917106 - protein, 729 aa, Homo sapiens
PLPLGRPLGRRWSGSAQQLLANAVIFLCGNLTGAFHKHQMQDASRDLFTYTVKCIQIRRKLRIEKRQQENLLLSVLPAHISMGMKLAIIERLKEHGDRRCMPDNNFHSLYVKRHQNVSILYADIVGFTQLASDCSPKELVVVLNELFGKFDQIAKANECMRIKILGDCYYCVSGLPVSLPTHARNCVKMGLDMCQAIKQVREATGVDINMRVGIHSGNVLCGVIGLRKWQYDVWSHDVSLANRMEAAGVPGRVHITEATLKHLDKAYEVEDGHGQQRDPYLKEMNIRTYLVIDPRSQQPPPPSQHLPRPKGDAALKMRASVRMTRYLESWGAARPFAHLNHRESVSSGETHVPNGRRPKSVPQRHRRTPDRSMSPKGRSEDDSYDDEMLSAIEGLSSTRPCCSKSDDFYTFGSIFLEKGFEREYRLAPIPRARHDFACASLIFVCILLVHVLLMPRTAALGVSFGLVACVLGLVLGLCFATKFSRCCPARGTLCTISERVETQPLLRLTLAVLTIGSLLTVAIINLPLMPFQVPELPVGNETGLLAASSKTRALCEPSRGTPSCSWKDLKTMTNFYLVLFYITLLTLSRQIDYYCRLDCLWKKKFKKEHEEFETMENVNRLLLENVLPAHVAAHFIGDKDWYHQSYDCVCVMFASVPDFKVFYTECDVNKEGLECLRLLNEIIADFDELLLKPKFSGVEKIKTIGSTYMAAAGLSVASGHENQVLKPKR

SEQ ID NO: 917107 - protein, 721 aa, Homo sapiens
PLPLGRPLGRRWSGSAQQLLANAVIFLCGNLTGAFHKHQMQDASRDLFTYTVKCIQIRRKLRIEKRQQENLLLSVLPAHISMGMKLAIIERLKEHGDRRCMPDNNFHSLYVKRHQNVSILYADIVGFTQLASDCSPKELVVVLNELFGKFDQIAKANECMRIKILGDCYYCVSGLPVSLPTHARNCVKMGLDMCQAIKQVREATGVDINMRVGIHSGNVLCGVIGLRKWQYDVWSHDVSLANRMEAAGVPGRVHITEATLKHLDKAYEVEDGHGQQRDPYLKEMNIRTYLVIDPRSQQPPPPSQHLPRPKGDAALKMRASVRMTRYLESWGAARPFAHLNHRESVSSGETHVPNGRRPKSVPQRHRRTPDRSMSPKGRSEDDSYDDEMLSAIEGLSSTRPCCSKSDDFYTFGSIFLEKGFEREYRLAPIPRARHDFACASLIFVCILLVHVLLMPRTAALGVSFGLVACVLGLVLGLCFATKFSRCCPARGTLCTISERVETQPLLRLTLAVLTIGSLLTVAIINLVGPVVGRQASGVEGDLQIWDAYNVALKAASGCPLPRAQQPLMPFQVPELPVGNETGLLAASSKTRALCEPLPYYTCSCVLGFIACSVFLRMSLEPKVVLLTVALVAYLVLFNLSPCWQWDCCGQGLGNLTKPNGTTSVKGYNLSLSSIICKMGTNITAHLAVVEDNMGSWGDRVLDTERVTSTWVPTMAITIPTP

SEQ ID NO: 917108 - protein, 201 aa, Homo sapiens
MVNIQHTSSPFYADLLPADPQAACCSFSGFLSTSSLLLTLLLTPNFIHMVGEDDEKFFTTGQKELYLEACKLMGVVPVSYFIRNMEESYVNLNHHGLGPRGTKAIAIALVSNMAVTKLELEDNCIMEEGVLSLVEMLQENYYLQEMVLCPPVLALTIIPGDSQPTGDKPEALPGPRLPPGSCPPLPFPHDFLEEGHITGLK

SEQ ID NO: 917109 - protein, 201 aa, Homo sapiens; identical to SEQ ID NO: 917108

SEQ ID NO: 917110 - protein, 772 aa, Homo sapiens
MTPDCMASSPTKGLTMSVPVAPKKSCYTQLRDNRNAARNNNESILSLGDTNANQIMLEVSSSHDESKTCDLGDEIGNTNSSEPENRTHFHKEFHQLQGFGKGSQAGSASLKDFRLSSTIQRELNEEHTVERGTDSLQTTRSIQGPSLSSWRNVMSEASLDVLAKRDAEIPRHVPKDKLAKTLDNEELRRHSLERASSSVAAVGSLTPQHPQPLSLDSREARGQIPGGGEGPQKTLPDHAVPAAFPATDSTSEGKSVRHPKPSTSESKQSTPSETQTVGAHVLQVCSEHTSHSAHPEPALNLTLASKEIPSKLEAQLGQGKGEAKLDLKYVPPRRVEQEGKAAQEGYLGCHKEENLSALEGRDPCGEAHPEATDALGHLLNSDLHHLGVGRGNCEEKRGVNPGEQDSLHTTPKQGSASLGGADNQPTGKISPCAGEKLGERTSSSFSPGDSHVAFIPNNLTDSKPLDVIEEERRLGSGNKDSVMVLVFNPSVGENKTEVPEPLDPQSGRSEARESKEVTTSVAENRNLLENADKIESTSARADSVLNIPAPLHPETTVNMTYQPTTPSSSFQDVSVFGMDAGSPLVVPPPTDSARLLNTSPKVPDKNTCPSGIPKPVFTHSKDTPSSQEGMENYQVEKTEERTETKPIIMPKPKHVRPKIITYIRRNPQALGQVDASLVPVGLPYAPPTCTMPLPHEEKAAGGDLKPSANLYEKFKPDLQKPRVFSSGLMVSGIKPPGHPFSQMSEKFLQEVRECHYDMVYKLTVPISVTYFQ

SEQ ID NO: 917111 - protein, 401 aa, Homo sapiens
MWGVVHLARNGARDLRVLLIEALCKIFLDESAPDNVLEVTARAITYYLDVSAECTRRIVGVDGAIKALCNRLVVVELNNRTSRDLAEQCVKVLELICTRESGAVFEAGGLNCVLTFIRDSGHLVHKDTLHSAMAVVSRLCGKMEPQDSSLEICVESLSSLLKHEDHQVSDGALRCFASLADRFTRRGVDPAPLAKHGLTEELLSRMAAAGGTVSGPSSACKPGRSTTGAPSTTADSKLSNQVSTIDLLRSELPDSIESALQGDERCVLDTMRLVDLLLVLLFEGRKALPKSSAGSTGRIPGLRRLDSSGERSHRQLIDCIRSKDTDALIDAIDTGAFEVNFMDDVGQTLLNWASAFGTQEMTLLRHGANPDLRDEDGKTPLDKARERGHSEVVAILQSPEG

SEQ ID NO: 917112 - protein, 243 aa, Homo sapiens
MSFALLCHSGSERAAPSSNISLRAVSRLARGTHPSRHGAVSVGCTGWEEPEEVLVEATVKHYGKLFTASQDTQKRLEAFCQMIQAVHRSLESLEEDHRALMLSLKIRLCQLQKKCYRKQEQWWQLKHSITYQKDIDFDTHTSSSYNDQLLGYMQMTITNMARQCCPSAHGVPKSMDLFSKLDLIKDSVMHGMLHSQIQEREPHPHLLSSTMNSAHAEGRSPVSFISNSLCLPGGWHKAGGARC

SEQ ID NO: 917113 - protein, 126 aa, Homo sapiens
MAAMDTGQRADPSNPGDKEGDLQGLWQELYQLQAKQKKLKREVEKHKLFEDYLIKVLEKIPEGCTGWEEPEEVLVEATVKHYGKLFTASQDTQKRLEAFCQMIQAVHRSLESLEEDHRALMLVTAA

SEQ ID NO: 917114 - protein, 211 aa, Homo sapiens
MAAMDTGQRADPSNPGDKEGDLQGLWQELYQLQAKYLLCCLGDAAMGVYLICLWLSLLSSEMKVQRLLSLGQLIKWQKKLKREVEKHKLFEDYLIKVLEKIPEGCSKQQHLLEGSLPPRSVVLIQNPCLSLWLNFPRLHGMGGAGGGAGGGHGEALREALHSQPGHAEAPRGLLPDDPGCPPEPGVSGGGPQGSHVGNSCLKSAPFPVAQG

SEQ ID NO: 917115 - protein, 129 aa, Homo sapiens
MYSSFRHLEKSTEPQEPDKEDDSSAQQQRHRNISQENASQKKTVTQVVTHTLQIRKLRLKVILTSGAAKADTLVLWFPVSGGPHPGCDSSSMDYCKNQDADKMANLRRDGQAKWSTTESLLLRQCGVAP

SEQ ID NO: 917116 - protein, 626 aa, Homo sapiens
MVVSGSLGLSQLLWQFSSRSKARMEWKLEQSMREQALLKAQLTQLKESLKEVQLERDEYAEHLKGERARWQQRMRKMSQEVCSLKKEKKHDKYRVETLERSLSKLKHQMGEDGAGVTWQQDWHQRAVRVAWSAPARWVDGKGFEERERGLCQETASLVISMSLSVPISKEGPLSATRSALSLKVVWKTGYHLAEPLPPEPPAVPSEVELQHLRKELERVAGALQAQVEYNQRISLLNEGQKERLREQEERLQEQQERLREQEERLQQLAEPQNSFKELNNENKSVLQLEQQVKELQEKLGKVKETVTSTPSKKVWEVELKSQEAQSLQQQPDHYLGHLQQYVATYQQQERLEAASQQKQQLTAQLSLMALPGEGHGGEHLDSEGEEAPRPMPSVPEDLESREAMVAFFKSAGASAQEKQAQLQEQVKEQRVCCQRLAHPVASAQKEPEAAVPAPGPGGESSGFMDHLEEKADLSELVEKEELGFFQYYRERCHQKVYHPITKPGGSAKDAAPGGGHHQAGPGQGGDEGRVCNISAGVGVAVTVSAGSSVTAEHPSLQVKLLELQEMVLQLRGACARRGQGGFSPRQAYCTADRAGPPGAPRLGQQLLCAILLLGLAAKKKEINMTI

SEQ ID NO: 917117 - protein, 122 aa, Homo sapiens
ALEAWRSLSSQKFSEGEGPTSPAGQALATESQKPRAEAKSQSQRGWGTPTTERRLRNPSETTLSVLLHLDRMSQQHRRKRPSSERQVSKTATDGSYLLVFTSYVISSPVWAGPGDLLPVNRI

SEQ ID NO: 917118 - protein, 171 aa, Homo sapiens
MQQLWEPRDHCCPVIVSPTMGERPGRFPQRTVQAVWRQWSTLRCGLCGFAFYSRHKIRGLLAWADPGHRLPCRLGSYNLKHLESESPALPPAAASFFCPVGPRGNWLGRGRGGGTGGLGQSPAVLENEFRSCPAPGWHWAQGQALDPARTPLLKPPQPPPSLSVHSAGLKT

SEQ ID NO: 917119 - protein, 122 aa, Homo sapiens; identical to SEQ ID NO: 917117

SEQ ID NO: 917120 - protein, 807 aa, Homo sapiens
MAGHRLTGWAFGGPHGSGSRAAPVCSLTRGDTWFEHVSMLVIMLNCVTLGMFRPCEDVECGSERCNILEAFDAFIFAFFAVEMVIKMVALGLFGQKCYLGDTWNRLDFFIVVAGMMEYSLDGHNVSLSAIRTVRVLRPLRAINRVPSMRILVTLLLDTLPMLGNVLLLCFFVFFIFGIVGVQLWAGLLRNRCFLDSAFVRNNNLTFLRPYYQTEEGEENPFICSSRRDNGMQKCSHIPGRRELRVPCTLGWEAYTQPQAEGVGAARNACINWNQYYNVCRSGDSNPHNGAINFDNIGYAWIAIFQVITLEGWVDIMYYVMDAHSFYNFIYFILLIIVGSFFMINLCLVVIATQFSETKQRESQLMREQRARHLSNDSTLASFSEPGSCYEELLKYVGHIFRKVKRRSLRLYARWQSRWRKKVDPSAVQGQGPGHRQRRAGRHTASVHHLVYHHHHHHHHHYHFSHGSPRRPGPEPGACDTRLVRAGAPPSPPSPGRGPPDAESVHSIYHADCHIEGPQERARVAHAAATAAASLRLATGLGTMNYPTILPSGVGSGKGSTSPGPKGKWAGGPPGTGGHGPLSLNSPDPYEKIPHVVGEHGLGQAPGHLSGLSVPCPLPSPPAGTLTCELKSCPYCTRALEDPEGELSGSESGDSDGRGVYEFTQDVRHGDRWDPTRPPRATDTPGPGPGSPQRRAQQRAAPGEPGWMGRLWVTFSGKLRRIVDSKYFSRGIMMAILVNTLSMGVEYHEQPEELTNALEISNIVFTSMFALEMLLKLLACGPLGYIRNPYNIFDGIIVVIRHYGVRTC

SEQ ID NO: 917121 - protein, 788 aa, Homo sapiens
RPRSWCLRLVCNPWFEHVSMLVIMLNCVTLGMFRPCEDVECGSERCNILEAFDAFIFAFFAVEMVIKMVALGLFGQKCYLGDTWNRLDFFIVVAGMMEYSLDGHNVSLSAIRTVRVLRPLRAINRVPSMRILVTLLLDTLPMLGNVLLLCFFVFFIFGIVGVQLWAGLLRNRCFLDSAFVRNNNLTFLRPYYQTEEGEENPFICSSRRDNGMQKCSHIPGRRELRVPCTLGWEAYTQPQAEGVGAARNACINWNQYYNVCRSGDSNPHNGAINFDNIGYAWIAIFQVITLEGWVDIMYYVMDAHSFYNFIYFILLIIVGSFFMINLCLVVIATQFSETKQRESQLMREQRARHLSNDSTLASFSEPGSCYEELLKYVGHIFRKVKRRSLRLYARWQSRWRKKVDPSAVQGQGPGHRQRRAGRHTASVHHLVYHHHHHHHHHYHFSHGSPRRPGPEPGACDTRLVRAGAPPSPPSPGRGPPDAESVHSIYHADCHIEGPQERARVAHAAATAAASLRLATGLGTMNYPTILPSGVGSGKGSTSPGPKGKWAGGPPGTGGHGPLSLNSPDPYEKIPHVVGEHGLGQAPGHLSGLSVPCPLPSPPAGTLTCELKSCPYCTRALEDPEGELSGSESGDSDGRGVYEFTQDVRHGDRWDPTRPPRATDTPGPGPGSPQRRAQQRAAPGEPGWMGRLWVTFSGKLRRIVDSKYFSRGIMMAILVNTLSMGVEYHEQPEELTNALEISNIVFTSMFALEMLLKLLACGPLGYIRNPYNIFDGIIVVIRHYGVRTC

SEQ ID NO: 917122 - protein, 129 aa, Homo sapiens
RPRSWCLRLVCNPWFEHVSMLVIMLNCVTLGMFRPCEDVECGSERCNILEAFDAFIFAFFAVEMVIKMVALGLFGQKCYLGDTWNRLDFFIVVAGMMEYSLDGHNVSLSAIRTVRVLRPLRAINRVPSK

SEQ ID NO: 917123 - protein, 212 aa, Homo sapiens
HLRQTRYRVPLSMSLTLSLMLEYSGNTQVSLAIFPLSFRQTAADGAIWMETWDSGLCFPGCLSLKGPGSVTGTAGDSLTVWCQYESMYKGYNKYWCRGQYDTSCESIVETKGEEKVERNGRVSIRDHPEALAFTVTMQNLNEDDAGSYWCKIQTVWVLDSWSRDPSDLVRVYVSPAITTPRRTTHPATPPIFLVVNPGRNLSTGEVLTQNSG

SEQ ID NO: 917124 - protein, 166 aa, Homo sapiens
MWLLPALLLLCLSGCLSLKGPGSVTGTAGDSLTVWCQYESMYKGYNKYWCRGQYDTSCESIVETKGEEKVERNGRVSIRDHPEALAFTVTMQNLNEDDAGSYWCKIQTVWVLDSWSRDPSDLVRVYVSPAITTPRRTTHPATPPIFLVVNPGRNLSTGEVLTQNSG

SEQ ID NO: 917125 - protein, 173 aa, Homo sapiens
MASRWRQAPRHDPLAAGAPRSGREASPQTKLEPMRSLGVQSSPGSALTRGSASPRSRAQSGAHRAPVADDCVLRGIIESVHKSLTDQTSQGDRGVELPQDLPHSDGKQMALEERFISCICGISPSTGKNLMLSYQPLWGFHLCSKKMDSFKNSKINWNGASSVQRVINGPGAD

SEQ ID NO: 917126 - protein, 174 aa, Homo sapiens
MEKQSVVLDRRLNIIKKKKKLIIRQGEDTDYHQIGKIKPSDDVCGAVTGKGPKPDPKRGFFDLEQERIWDKSTGNVAQQVSASFYPAPIQVKVALLPMPLTYFPPPFYKRTTNPKGCRESISILTAIHNSEFQQKVISGRLANVQFKKTASKLILHSYTTSTTGIYSTIVKQNK

SEQ ID NO: 917127 - protein, 492 aa, Homo sapiens
LERARALGQEGGRSLQERPVEGLRASDKPLSGVLGAQDTWLMPSPQRLACEAGALAHSGYGGTMFGGHGTSGPSCALLALISPPGDYSIVKSHNDKNKKLEEGSPGYNPPEEAPVKSVGRRVLDGLKHCYHSFSLLWMDTRTATHSLWGILSGHMLTHREHRQFVRVRADLFCLVPLLIFAVVLFMELLRSERQERPNNEEIMRFPKLFEDELTLDNLTCQQLLKSTLQTLPETVVKGAQVKVDKVKEAIPRNEVEEATPERPVADQQPEVPDVILPSEALKDTAPVLEILKEEKITKEEMGVLSDACSKLKEQNKSLTKEKEELELLKEDVQDDSDDLQEIKKEVSKTSKEKYVEKSKASKTLTKRVQQMIWWIDSLIAQLEMDQRPGKLGQAEDSGGAGEKVIGITELISTMKQIKNIPENKLISLASTLDKSKNGKVNTDKLIKVIELVDKDVHISTSQVAEIVAMLEKEERWRRRRRLRERLRRRLQK

SEQ ID NO: 917128 - protein, 336 aa, Homo sapiens
MAEISDLDRQIEQLRRCELIKESEVKALCAKAREILVEESNVQRVDSPVTVCGDIHGQFYDLKELFRVGGDVPETNYLFMGDFVDRGFYSVETFLLLLALKVRYPDRITLIRGNHESRQITQVYGFYDECLRKYGSVTVWRYCTEIFDYLSLSAIIDGKVKPAQGSMGQGEEGGFRPQPRPLSLLSPVDLLRARGPLPLHPDLDQIRTIDRKQEVPHDGPMCDLLWSDPEDTTGWGVSPRGAGYLFGSDVVAQFNAANDIDMICRAHQLVMEGYKWHFNETVLTVWSAPNYCYRCGNVAAILELDEHLQKDFIIFEAAPQETRGIPSKKPVADYFL

SEQ ID NO: 917129 - protein, 207 aa, Homo sapiens
MAEISDLDRQIEQLRRCELIKESEVKALCAKAREILVEESNVQRVDSPVTVCGDIHGQFYDLKELFRVGGDVPETNYLFMGDFVDRGFYSVETFLLLLALKVRYPDRITLIRGNHESRQITQVYGFYDECLRKYGSVTVWRYCTEIFDYLSLSAIIDGKIFCVHGGLSPSIQTWIRFGQSTESKRCLMMGPCVTSSGLTQKTPQAGA

SEQ ID NO: 917130 - protein, 161 aa, Homo sapiens
MHWVRQATGKGLEWVSAIGTAGDTYYPGSVKGRFTISRENAKNSLYLQMNSLRAGDTAVYYCARDTVRGMFLLPVKWGCGSCCQSSRSQAHSLQLRWGSGCGSCSHVEEADGTFLSPIAQHPPVCHVETHLRMEVANSSEGDELVWTKWDVDVKFILCCAK

SEQ ID NO: 917131 - protein, 164 aa, Homo sapiens
MFSTIWQNLNDTGFRTENVRERGSMKSKDIKTEVSYGKEFTKRFKGLSISSLLSTILHMCQPQGFCTYVEIFGSISVLQGKLSSVGGKQKTVESTEPWTVTQRMSTRSSLLCHSAQHDVNSTADRCSQEDRSPSTNSHQRKLFPRTQYVGPLTLHTAHDAEVQC

SEQ ID NO: 917132 - protein, 314 aa, Homo sapiens
EYSLFASTMLYVMWKNVGRFLASTPGHSHTPTPVSLFRETFFAGPVLGLLLFVVGLAVFIIYEVQVSGDGSRTRQALVIYYSFNIVCLGLTTLVSLSGSIIYRFDRRAMDHHKNPTRTLDVALLMGAALGQYAISYYSIVAVVAGTPQDLLAGLNLTHALLMIAQHTFQNMFIIESLHRGPPGAEPHSTHPKEPCQDLTFTNLDALHTLSACPPNPGLVSPSPSDQREAVAIVSTPRSQWRRQCLKDISLFLLLCNVILWIMPAFGARPHFSNTVEVDFYGYSLWAVIVNICLPFGIFYRMHAVSSLLEVYVLS

SEQ ID NO: 917133 - protein, 206 aa, Homo sapiens
MNACLLLSLKFFNNPYSKEKGTSLQWTIGARSIHCLPPVQYVEKLQFLLRTLDCLLSTRTSAPACINLNAFRDVRPPKSADGRNQSQRVQENFRRLTEQKRGEKSKPMFLDGKQTECGGKNTNFRISLPRTNPGLVLMTLAHFCKSQFCVCQAELEFWLGHFLVVTLDEFLKFLVPHLFPHLSSGEIPHQMKRLTLHISLGVVRVK

SEQ ID NO: 917134 - protein, 203 aa, Homo sapiens
MLKESKADIFVDPVLHTACALDIKHHCAAITPGRGRQMSCLMEALEDKRVRLQPECKKRLNDRIEMWSYAAKVAPADGFSDLAMQVMTSPSKNYILSVISGSICILFLIGLMCGRITKRVTRELKDRSTLGPRQGRGLHRGVGGQPFPRLCGVLLSSAETVTLSSFHPNQPLLVTAPQPWVLANSYSSWVTVIWTYQFMPVSL

SEQ ID NO: 917135 - protein, 481 aa, Homo sapiens
IVDKTEGWTSGEPGLLSHSQPEVTWREALSLELITNKELKEKNAELQEKLRLVETEKSEIQLHIKELKRKLETDKIPLPQVQTNTLQEKMWRQEEELRDQEELRDQEKLRKHEEKMWRQEQRLRDQEKELREQEQQMQEQEEQMRKQEEQMRKQEEQMRKQEEQMRKQEEQMRKQEEQMRKQEEQMGKQEEQMGEQEEQMRKQEKQMLKQKEQMRKQEEQMWKQEEQIGEQEEQMRKQEEQMWKQEEQIGEQEEQMRKQEEQMWKQEEQMGEQMRKQEEQMGEQEEQIRKQEEQMGEQEEQMRKQEEQMGEQEEQMRKQEEQMGEQEEQMRKQEEQMGEQEEQMGEQEEQMRKQVERLQFKEERLWDEYEKMQEEEEKIRRQVEKRREKKERMGEQEKTQEERCSEPCLPPSKYPSDMSHPGSLEPAREAGKGYSHDNRTAQIMQLPPGMKNAQERPGLGSTSCIPFFYGGDKKKIKIISI

SEQ ID NO: 917136 - protein, 615 aa, Homo sapiens
MVSFFAHDMTAGFGGHSDVEAPVSTCFSCLPKAQDHTIRILMCQKTELETALHDSQDAARKFEEDSKDLAARLHHSWHFAGELQRALSAMSAEHERADKDAVSCPEDSMGHFLLLLCVVVRGRLGLSQLLWLLLCLLYPDLTFLCLQYIKELTKEREAMSLELFRNIITNKELKEKNAELQEKLRLVETEKSEIQLHIKELKRKLETDKIPLPQVQTNTLQEKMWRQEEELRDQEELRDQEKLRKHEEKMWRQEQRLRDQEKELREQEQQMQEQEEQMRKQEEQMRKQEEQMRKQEEQMRKQEEQMRKQEEQMRKQEEQMGKQEEQMGEQEEQMRKQEKQMLKQKEQMRKQEEQMWKQEEQIGEQEEQMRKQEEQMWKQEEQIGEQEEQMRKQEEQMWKQEEQMGEQMRKQEEQMGEQEEQIRKQEEQMGEQEEQMRKQEEQMGEQEEQMRKQEEQMGEQEEQMRKQEEQMGEQEEQMGEQEEQMRKQVERLQFKEERLWDEYEKMQEEEEKIRRQVEKRREKKERMGEQEKTQEERCSEPCLPPSKYPSDMSHPGSLEPAREAGKGYSHDNRTAQIMQLPPGMKNAQERPGLGSTSCIPFFYGGDKKKIKIISI

SEQ ID NO: 917137 - protein, 224 aa, Homo sapiens
MTARAWASWRSSALLLLLVPGYFPLSHPMTVAGPVGGSLSVQCRYEKEHRTLNKFWCRPPQILRCDKIVETKGSAGKRNGRVSIRDSPANLSFTVTLENLTEEDAGTYWCGVDTPWLRDFHDPIVEVEVSVFPAGTTTASSPQSSMGTSGPPTKLPVHTWPSVTRKDSPEPSPHPGSLFSNVRFLLLVLLELPLLLSMLGAVLWVNRPQRSSRSRQNWPKGENQ

SEQ ID NO: 917138 - protein, 140 aa, Homo sapiens
MTARAWASWRSSALLLLLVPGYFPLSHPMTVAGPVGGSLSVQCRYEKEHRTLNKFWCRPPQILRCDKIVETKGSAGKRNGRVSIRDSPANLSFTVTLENLTEEDAGTYWCGVDTPWLRDFHDPIVEVEVSVFPGEPLLFS

SEQ ID NO: 917139 - protein, 148 aa, Homo sapiens
MKQRTQVVPRFLTHRYRVIINAYCLKPPSFLGNGSETVKKKKEGEEGEGGGGRGGAGGGREGGEGGEEERKKEKEKEKKLIWFGFVYPPKSHVELFNANPIKIPITFFTEIEKTILKFIWNHKGTRIAKAIISKKNKARGIKLYYKAT

SEQ ID NO: 917140 - protein, 152 aa, Homo sapiens
MLKGNKTKKKKEWKGGLADAVTDVEGPVINKMCPSNIEMRTLTSKKVMGTEEEQNQSVKLFVILQPILCLYTVQLLLPGKIFDFTCEVEDTGISRLRSDMTCAGALEMQVQWLVGYLASWVSQAQVHPYTPLGNHKTLSLARINYWEDNTLD

SEQ ID NO: 917141 - protein, 152 aa, Homo sapiens; identical to SEQ ID NO: 917140

SEQ ID NO: 917142 - protein, 793 aa, Homo sapiens
MLRGDHPDVLEDKNERADEEILRVRFGRCTRPTPWMWLREPGKPGMSLLLLFVVEELEACAFRVQVGQLRLYEDDQRTKVVEIVRHPQYNESLSAQGGADIALLKLEAPVPLSELIHPVSLPSASLDVPSGKTCWVTGWGVIGRGELLPWPLSLWEATVKVRSNVLCNQTCRRRFPSNHTERFERLIKDDMLCAGDGNHGSWPGDNGGPLLCRRNCTWVQVEVVSWGKLCGLRGYPGMYTRVTSYVSWIRQVLLVPQDVALRAAPLPPAPDLQEAEVPIMRTRACERMYHKGPTAHGQVTIIKAAMPCAGRKGQGSCQGKWSWQVSLRIYSYHWASWVPICGGSLIHPQWVLTAAHCIFRKDTDPSTYRIHTRDVYLYGGRGLLNVSQISLEFTDSDNCWNTGWGMVGLLDMLPPPYRPQQVKVLTLSNADCERQTYDAFPGAGDRKFIQDDMICAGRTGRRTWKGDSGGPLVCKKKGTWLQAGVVSWGFYSDRPSIGVYTPFTHVTCYPTAIPRPFTHVTCYLMAVPSTLTHVTCYPTAVPRPFTHVTCYLMAVPSTLTHITCYMMAVPRPFTHITCYPMAVPSTLTHAFNHATCYTTAIPSTLTHVTCYTMAVPRPITHVTCYTIAAHGCVLYLSLENDLVGIVGGHNAPPGKWPWQVSLRVYSYHWASWAHICGGSLIHPQWVLTAAHCIFWKDTDPSIYRIHAGDVYLYGGRGLLNVSRIIVHPNYVTAGLGADVALLQLSLPPPYRLQQASVQVLENAVCEQPYRNASGHTGDRQLILDDMLAETPAT

SEQ ID NO: 917143 - protein, 877 aa, Homo sapiens
MATPVPLSPTVLAVIQAPLSSIPPPCPPPPPARAPLDSGAWVRSSTRHAEPLPVLQRPLLECGRGTPFRRRRPGPSHSLTEPRSVTVPLLRSTVLGLRTAPPPRPPAPLPSSRFVPLTGGEIRSHSAPGSSEDRSLTVPGLGVTVRGPGVGTFEEEDRALRGSPSCIEVHAGCLGPRGRPGAAPWTAGDFVPRPLRPRPRVSVSDVLVVAALALRTLRLRQRGLAAPAPARPRPPTSCLSPNTAALPCGGPFSVSPARPVHFGAMNDQYHRAARDGYLELLKEATRKELNAPDEDGMTPTLWAAYHGNLESLRLIVSRGYCPVPEHVVGAGDPSFLPSPWAAPWAQHQSWLPPHSPPRPAKARHLLSHSGLPGLALLPADTALPADMQAHTSHTLIPGWGPAHTTHCQDSSLVPPECFPCRGDPDKCDIWGNTPLHLAASNGHLHCLSFLVSFGANIWCLDNDYHTPLDMAAMKGHMECVRYLDSIAAKQSSLNPKLVGKLKDKAFREAERRIPECAKLQRRHHERMERRYRRELAERSDTLSFSSLTSSTLSRRLQHLALGSHLPYSQATLHGTARGKTKMQKKLERRKQGGEGTFKVSEDGRKRRSLSGLQLGSDVMFVRQGTYANPKEWGRAPLRDMFLSDEDSVSRATLAAEPAHSEVSTDSGHDSLFTRPGLGTMVFRRNYLSSGLHGLGREDGGLDGVGAPRGRLQSSPSLDDDSLGSANSLQDRSCGEELPWDELDLGLDEDLEPETSPLETFLASLHMEDFAALLRQEKIDLEALMLCSDLDLRSISVPLGPRKKILGAVRRRRQAMERRRPWRTQSYNRGLLSPDQNELQVATTYGGVSRSSQLPALQPPSPGARTSWGDSFESLSAP

SEQ ID NO: 917144 - protein, 68 aa, Homo sapiens
MSEKTRQNKLAEAKKKFTDYRQWNIAGVGTRATDTKKKKINNGTNPETTTSEGCHSPEDTQQNRAQLK

SEQ ID NO: 917145 - protein, 738 aa, Homo sapiens
MALTLRQPLRRVAIHLRMWVLAGRSPEDKGHKGRSREKKASHQHQEALRREIEESPRISPAACIIPGTLQESYSGLSLLCPHGTRRQTGITNEELKKKNAELQEKLRLAESEKSEIQLNVKELKRKLERAKFLLPQEEMWRQEEELREQEKKIRKQEEKMWRQEERLREQEGKMREQEEKMRRQEKRLREQEKELREQEKELREQKKLREQEEQMQEQEEKMWEQEEKMREQEEKMWRQEERLWEQEKQMREQEQKMRDQEERMWEQDERLREKEERMREQEKMWEQVEKMREEKKMQEQEKKTRDQEEKMQEEERIREREKKMREEEETMREQEEKMQKQEENMWEQEEKEWQQQRLPEQKEKLWEQEKMQEQEEKIWEQEEKIRDQEEMWGQEKKMWRQEKMREQEDEQEKQMWEQEEKMRDQEQKMWDQEERMWEQDERLREKEERMREQKKMWQQVEKMREEKKTQEQEKKTWDQEEKMREEERMREREKKMREEEEMMREQEEKMQEQEEKMREQEEKMWEQEEKMQEQEEKMWEQEEKMWEQEEKMWEQQRLPEQKEKLWEHEKMQEQEIQEQKMWDQKERMWEQDERLREKEERMREQKMWQQVEKMREKKKTQEEKMQEGSRRRRCGSRRRRCGSRRRRCWSTEEKMQGQEEKMREQEEKMQGQEEKMREQEEKMRGQEENMWGQEEKMWGQEEKMWGQEEMREKEERILDHKEKMQERLPEHEERSAQD

SEQ ID NO: 917146 - protein, 145 aa, Homo sapiens
MATQISTRGSQCTIGQEEYSLYSSLSEDELVQMAIEQSLADKTRGPTTAEATASACTNRQPAHFYPWTSPTSSSQSQDFLKQRHPDMTPPTTAMHGCNFKGSNSQKSKEKQLVLTSPALSECSSTNLMMASASQTSFLGLPGTPS

SEQ ID NO: 917147 - protein, 135 aa, Homo sapiens
MALSGATLNATLTVRTPEVKSSVTQDCSPLQIPVTCSGSSDYPHFYPTWLQIGSSHDPSSGMDGGALTDTSLTDSYFSTSFIGVNGFGSPVETKYPLMQTGSCCVTQAEVQWRNHGPLQLQPSRHKQYSSLASAS

SEQ ID NO: 917148 - protein, 693 aa, Homo sapiens
MKPVHERSQECLPPKKRDLPVTSEDMGRTTSCSTNHTPSSDASEWSRGVVVAGQSQAGARVSLGGDGAEAITGLTVDQYGMLYKVAVPPATFSPTGLPSVVNMSPLPPTFNVASSLIQHPGIHYPPLHYAQLPSTSLQFIGSPYSLPYAVPPNFLPSPLLSPSANLATSHLPHFVPYASLLAEGATPPPQAPSPAHSFNKAPSATSPSGQLPHHSSTQPLDLAPGRMPIYYQMSRLPAGYTLHETPPAGASPVLTPQESQSALEAAAANGGQRPRERNLVRRESEALDSPNSKGEGQGLVPVVECVVDGQLFSGSQTPRVEVAAPAHRGTPDTDLEVQRVVGALASQDYRVVAAQRKEEPSPLNLSHHTPDHQGEGRGSARNPAELAEKSQARGFYPQSHQEPVKHRPLPKAMVVANGNLVPTGTDSGLLPVGSEILVASSLDVQARATFPDKEPTPPPITSSHLPSHFMKGAIIQLATGELKRVEDLQTQDFVRSAEVSGGLKIDSSTVVDIQESQWPGFVMLHFVVGEQQSKVSIEVPPEHPFFVYGQGWSSCSPGRTTQLFSLPCHRLQVGDVCISISLQSLNSNSVSQASCAPPSQLGPPRERPERTVLGSRELCDSEGKSQPAGEGSRVVEPSQPESGAQACWPAPSFQRYSMQGEEARAALLRPSFIPQEVLPPPNTISYPLILPDL

SEQ ID NO: 917149 - protein, 220 aa, Homo sapiens
MFTEYQALKGQNHPPTGPALGPGHPAGAGCAERHAELWDSGAQETDNERSAQGTSAPLLPLLQRFQSIICRKDAPHSEGDMHMRQVWEATCLWRRLRSVRADFLVSTEPSLKHALLNQYQKRTTKIVACFVGPSFVLGSVQGMSPELSLCLVPAPPLIGVDVFLNSLKQTVVTLASSADVLSTEQSASQAMLQSGWSMLLPTAEKQARALCSPALRSFRQ

SEQ ID NO: 917150 - protein, 138 aa, Homo sapiens
SPASARPSGRERRRDRGRRLSQRLLGGCVRTPAGRGGPALRVRPETWEEAGEKMPSESLCLAARARLDSKWLKTDIQMESCSVAQAGVQWCHLGSLQALPPGFMPLSCLSLLSSWNYRRPPSYLVNFCIFSRDGVLPC

SEQ ID NO: 917151 - protein, 136 aa, Homo sapiens
QGCSDSKRTLMPLNPFPIGTVPTSWNKEQGPCLCGYSPPAGPPKTTDASYGAGLGTARLSLAIHPPGVGSNSFLSVAAESGGKLQRMDKTHRPSVHLLCFVNLFSNVKHSIAVVRHHLKTYHLGKGILLKIYKNHS

SEQ ID NO: 917152 - protein, 135 aa, Homo sapiens
AATAMVSAKGIQDACAMRTPLKGHTVARSPPAEMIHSQIQKPAEHRIQRQWGSKPAVLAAHQLSCLRFLGLITHCGDLGPVADNERVPASQHWRKGDCKCRQTLPSFLPLWVTVSFCANQRLRLKEGCADRTNPE

SEQ ID NO: 917153 - protein, 114 aa, Homo sapiens
MQKEMEQDVKRLGQAAWATAIPRLEKLKLMLAQETLQLMRAKELYLNCKRAEIQGKMEDLPEQEKNINVVDELEIQFYEIQLELYEVKFEILKNKEILLTTQLDSLERLIKVKP

SEQ ID NO: 917154 - protein, 131 aa, Homo sapiens
MQKEMEQDVKRLGQAAWATAIPRLEKLKLMLAQETLQLMRAKELYLNCKRAEIQGKMEDLPEQEKNINVVDELEIQFYEIQLELYEVKFEILKNKEILLTTQLDSLERLIKEKQDEVVYYDPCESPEELSH

SEQ ID NO: 917155 - protein, 207 aa, Homo sapiens
MVALMKVYQEEDEAYQELVTVATTFFQYLLRPFRAMEKLQLYKSLDEDDLGPRRVVALEKEAEEWTRRAGEAVVSIQDITVNYFKETVKALAGMQKEMEQDVKRLGQAAWATAIPRLEKLKLMLAQETLQLMRAKELYLNCKRAEIQGKMEDLPEQEKNINVVDELEIQFYEIQLELYEVKFEILKNKEILLTTQLDSLERLIKVKP

SEQ ID NO: 917156 - protein, 166 aa, Homo sapiens
MIISVISCRLQWTPLRKVITEENRCQQFGREGLGLNTQTNYSKSHQGGRCLPSAHGVSQSPKYSSPEQSHLYCQMQKPQPGARRCLDSSKSCRSSRPLATVIEFPVKALACSSSSPGLMPGPGDERTNKITLPSGSFQSKETQEAQHNVMISVTWLSPGGHKKRGL

SEQ ID NO: 917157 - protein, 285 aa, Homo sapiens
MHTKKRVSSFRGNKIGLKDVITLRRHVETKVRAKIRKRKVTTKINRHDKINGKRKTARKQKMFQRAQELRRRAEDYHKCKIPPSARKPLCNWVRMVAAEHRHSSGLPYWLYLTAETLKNRMGRQPPPPTQQHSITDNSLSLKTPPECLLTPLPPSVDDNIKECPLAPLPPSPLPPSVDDNLKECLFVLLPPSPLPPSVDDNLKTPPLATQEAEVEKPPKPKRWRVDEVEQSPKPKRRRVDEVEQSPKPKRQREAEAQQLPKPKRRRLSKLRTRHCTQAWAIRINP

SEQ ID NO: 917158 - protein, 216 aa, Homo sapiens
LQVRMAAAEHRHSSGLPYWLYLTAETLKNRMGRQPPPPTQQHSITDNSLSLKTPPECLLTPLPPSVDDNIKECPLAPLPPSPLPPSVDDNLKECLFVPLPPSPLPPSVDDNLKECLFVPLPPSPLPPSVDDNLKTPPLATQEAEVEKPPKPKRWRVDEVEQSPKPKRRRVDEVEQSPKPKRQREAEAQQLPKPKRRRLSKLRTRHCTQAWAIRINP

SEQ ID NO: 917159 - protein, 160 aa, Homo sapiens
MHTKKRVSSFRGNKIGLKDVITLRRHVETKVRAKIRKRKVTTKINRHDKINGKRKTARKQKMFQRAQELRRRAEDYHKCKIPPSARKPLCNWVSLFVFLAFEHSLPGQDMDTFFSLQLCAQALQREMAERKAAYRHHSPIPVGNRVVQKHLHPHPVGPLI

SEQ ID NO: 917160 - protein, 151 aa, Homo sapiens
GTFRGLWMWADIITNTVTEGFLYPGVSCLGVLEEANHTWAWRMSVKFYCVEVALSGRRIHKGALLNDQLLVSSSADVLLLMCGCPLGCVCGTGRGVGVENGYYRYRMGRGRPGWCREMQQLGRKCLSSPRKVTSGFVNSSIAAQLTLVVSC

SEQ ID NO: 917161 - protein, 137 aa, Homo sapiens
MMECNLFIYYYYYYFQFFILSSEVHVQDVQVCYRDKLRGYMKNSRLQQQSGPSAANQLEFAGGPLQTLFAWVSPVEVAEQQILQNGKCCCLILPVEASSQRGTRLYEVSVGPYWEVSPRNFYLCLKMQFKSSHFLEM

SEQ ID NO: 917162 - protein, 149 aa, Homo sapiens
YRCMSLCLTYYYFILINGSIDATRTMPQVNISGVHLLLWIGGIYIPSVSSDHSLMVHNEIFLIWFGCVPTQISHGSSHNSYGKESVGESPRLSLACCHVRPDFAIIVRPPQPRGTGLTLYPGWSAVEQSRLTVASISGVQAILPSQPPE

SEQ ID NO: 917163 - protein, 515 aa, Homo sapiens
MLHPETSPGRGHLLAVLLALLGTTWAEVWPPQLQEQAPMAGALNRKESFLLLSLHNRLRSWVQPPAADMRRLDWSDSLAQLAQARAALCGIPTPSLASGLWRTLQVGWNMQLLPAGLASFVEVVSLWFAEGQRYSHAAGECARNATCTHYTQLVWATSSQLGCGRHLCSAGQTAIEAFVCAYSPGGNWEVNGKTIIPYKKGAWCSLCTASVSGCFKAWDHAGGLCEVPRNPCRMSCQNHGRLNISTCHCHCPPGYTGRYCQVRCSLQCVHGRFREEECSCVCDIGYGGAQCATKVHFPFHTCDLRIDGDCFMVSSEADTYYRARMKCQIKSQKVQDILAFYLGRLETTNEVIDSDFETRNFWIGECPADWGNPGPWRLPADGKGVLRAWSPERGQLLTPFPGEGPGREHMGAASAGKRGQKGSWQQTPGSEWANLDYPGPGLTYKTAKDSFRWATGEHQAFTSFAFGQPDNHGFGNCVELQASAAFNWNDQRCKTRNRYICQFAQEHISRWGPGS

SEQ ID NO: 917164 - protein, 174 aa, Homo sapiens
ACVSRGRSAELEGARSVHTCSRGAESVFVCPGEDLQNWRETELCMCVPGEQRVCTCVQGKICRIGERRSVHVCPGGAWSGHACPRGTSVQGKEEGANPSNCVTFHNGGSDARLREEKLPQWSLLPTLNIGNRGEGQALHLHPGVSTHRVVLREWLSLSGPHNITSLKMIPPLSK

SEQ ID NO: 917165 - protein, 277 aa, Homo sapiens
MPPDADRPVESRVVPPGPYRATKLWNEVTTSFRAGMPLRKHRQHFKKYGNCFTAGEAGDWLYDLLRNNSNFGPEVTRQQLLRKFLKNRIIEDIKGRWGSENVDDNNQLFRFPATLPLKTLPRRHPELRKNSIENFSKDKDSIFKLQNLSRRTAEKHGLHLSQENAEKIKHEIINEDQENAVDDRELSQEDVEEVWRYFILIYLQTILEVDLDELLAGRLVSFLMDHDQEILQVPSYLQTAVEKHLDYLKRGHIESPGDGLFAPLPTYSYEDEDVKEV

SEQ ID NO: 917166 - protein, 411 aa, Homo sapiens
RYVNQTHEQQLVISIFPAVSQAPGHFAASTKGPSVFPLAPSSKSTSGGTAALGCLVKDYFPEPVTVSWNSGALTSGVHTFPAVLQSSGLYSLSSVVTVPSSSLGTQTYICNVNHKPSNTKVDKKVAPELLGGPSVFLFPPKPKDTLMISRTPEVTCVVVDVSHEDPEVKFNWYVDGVEVHNAKTKPREEQYNSTYRVVSVLTVLHQDWLNGKEYKCKVSNKALPAPIEKTISKAKGQPREPQVYTLPPSRDELTKNQVSLTCLVKGFYPSDIAVEWESNGQPENNYKTTPPVLDSDGSFFLYSKLTVDKSRWQQGNVFSCSVMHEALHNHYTQKSLSLSPELQLEESCAEAQDGELDGLWTTITIFITLFLLSVCYSATVTFFKVKWIFSSVVDLKQTIIPDYRNMIGQGA

SEQ ID NO: 917167 - protein, 414 aa, Homo sapiens
MITVTRIGYGDLSESDYCVQGALLTVSSVAASTKGPSVFPLAPSSKSTSGGTAALGCLVKDYFPEPVTVSWNSGALTSGVHTFPAVLQSSGLYSLSSVVTVPSSSLGTQTYICNVNHKPSNTKVDKKVAPELLGGPSVFLFPPKPKDTLMISRTPEVTCVVVDVSHEDPEVKFNWYVDGVEVHNAKTKPREEQYNSTYRVVSVLTVLHQDWLNGKEYKCKVSNKALPAPIEKTISKAKGQPREPQVYTLPPSRDELTKNQVSLTCLVKGFYPSDIAVEWESNGQPENNYKTTPPVLDSDGSFFLYSKLTVDKSRWQQGNVFSCSVMHEALHNHYTQKSLSLSPELQLEESCAEAQDGELDGLWTTITIFITLFLLSVCYSATVTFFKVKWIFSSVVDLKQTIIPDYRNMIGQGA

SEQ ID NO: 917168 - protein, 400 aa, Homo sapiens
MPDRGVVLVLRDTCWCLNELWLSICKKSEFLAFTSGGTAALGCLVKDYFPEPVTVSWNSGALTSGVHTFPAVLQSSGLYSLSSVVTVPSSSLGTQTYICNVNHKPSNTKVDKKVAPELLGGPSVFLFPPKPKDTLMISRTPEVTCVVVDVSHEDPEVKFNWYVDGVEVHNAKTKPREEQYNSTYRVVSVLTVLHQDWLNGKEYKCKVSNKALPAPIEKTISKAKGQPREPQVYTLPPSRDELTKNQVSLTCLVKGFYPSDIAVEWESNGQPENNYKTTPPVLDSDGSFFLYSKLTVDKSRWQQGNVFSCSVMHEALHNHYTQKSLSLSPELQLEESCAEAQDGELDGLWTTITIFITLFLLSVCYSATVTFFKVKWIFSSVVDLKQTIIPDYRNMIGQGA

SEQ ID NO: 917169 - protein, 381 aa, Homo sapiens
MAPPLLQPPPRAHRTSGGTAALGCLVKDYFPEPVTVSWNSGALTSGVHTFPAVLQSSGLYSLSSVVTVPSSSLGTQTYICNVNHKPSNTKVDKKVAPELLGGPSVFLFPPKPKDTLMISRTPEVTCVVVDVSHEDPEVKFNWYVDGVEVHNAKTKPREEQYNSTYRVVSVLTVLHQDWLNGKEYKCKVSNKALPAPIEKTISKAKGQPREPQVYTLPPSRDELTKNQVSLTCLVKGFYPSDIAVEWESNGQPENNYKTTPPVLDSDGSFFLYSKLTVDKSRWQQGNVFSCSVMHEALHNHYTQKSLSLSPELQLEESCAEAQDGELDGLWTTITIFITLFLLSVCYSATVTFFKVKWIFSSVVDLKQTIIPDYRNMIGQGA

SEQ ID NO: 917170 - protein, 208 aa, Homo sapiens
MYQPSWKPPHVPDQMGHTPVSTESELAVSRGKENLGPQFLQQAAHEAKPNLCGNGPRMVRALSILVSFPIVDYCFQLNTHERKPNMLLMQSHKISRGSQLPCCGDAQGALRRGPCDEELRGLGPKASGELRSPVSSHISKYSGSTSSIPSQYLNFNLMKDLEPSSATPRLLTHRYCVRHLESQIVGDEKDLRNHEKHHGRGDWGALEP

SEQ ID NO: 917171 - protein, 292 aa, Homo sapiens
MVKTPELLSPGPWLLSLHQTVTVHLLSRLPRQPPLPSPPCRRAYAQPPCNALITDTQTHPSPSSPLDHTSAGPQKWDPDVTPSDSKAHNRPLQKGTYTASWHPPQHIQHASSAENSDRVPRPPLARTPYQGPLSRPPASCAPGGGARLSPRPLRPQVNPKGERSGRGARSGLPQRRAAERGPGSWLRSALALPIRLPPQRLPRPGPVPPPPPPLTSSAPPAPVLPPPPPPETVPPQRRRRRRREEAGAAQPTPTQSSERPTAFPRTDPRGMTLRRAGPPGGLSGCRHDMADS

SEQ ID NO: 917172 - protein, 292 aa, Homo sapiens; identical to SEQ ID NO: 917171

SEQ ID NO: 917173 - protein, 127 aa, Homo sapiens
MATVEHLNPSMTLFCTSAHEVLCNCTSHKPKIALPLHFQYLLSTLEKKKKYSLSLYLYELPLNFVVGLNQIIFRILTCYTCCELSSIIILVDLRGMIGEVDLEEDSPFDSVRTITQTQDHSDIQGRG

SEQ ID NO: 917174 - protein, 245 aa, Homo sapiens
PGEAESMRSGLGAALGGSGPGPQTRRGPAGPARLPLGSSAAAGLGHPCQRGPADSAVHTRGGRGRCSARGATCRLVWALPRGCCGAVWRLPWLSLAPSAAPGASWLCRCCPLPGPQGPGSTWRRLLASRFRCSKKSAVQQLTPLLLRSPQVAIFLAGAGRALGSGRPPCSGRRRLSVPAARGGEGATSRHWAPAASPAAGGAGKKDARKRKAPAGPRVARGCAPWFLAREQLLGPPLAKLLPEKL

SEQ ID NO: 917175 - protein, 142 aa, Homo sapiens
MVKLSIVLTPQFLSHDQSQFTKELQQHVKSVTCPCEYLRKVINSLAVYRHRETDFGVGVRDHPGQHGKTPSPQKLDNLIIIIIGFLRRYTFNILFCTSCLCVSILTFCRGILVITNKNKLYKTIHVSGLHYEYVVLPKKSGK

SEQ ID NO: 917176 - protein, 125 aa, Homo sapiens
KVRMWCRSVHFQYKLFLPRQVILHLGTVFNFPFSTPILAPGTEHVIQVRHHRRLLLVKFSFAYCGEMRSLPAGGGVAETQMDLRLSDSHLYGWYVTHLSSGGLSKDYQSPDNFTRTWSQGELAIG

SEQ ID NO: 917177 - protein, 125 aa, Homo sapiens; identical to SEQ ID NO: 917176

SEQ ID NO: 917178 - protein, 125 aa, Homo sapiens; identical to SEQ ID NO: 917176

SEQ ID NO: 917179 - protein, 125 aa, Homo sapiens; identical to SEQ ID NO: 917176

SEQ ID NO: 917180 - protein, 125 aa, Homo sapiens; identical to SEQ ID NO: 917176

SEQ ID NO: 917181 - protein, 196 aa, Homo sapiens
MEERGRRSVDEEKRTRRRESRQEITREGRAKSGAGRGTENNNTGTEAIKKGIRRRVTIEKRGHAEKKKNTTRDYGYLDNVKTKRRCEKSESNYKLRGKRRETMTPQHKGREKRNREESGGAEGGEEDAGKSGGGGGGAAQCELVAPKQSEWRDTPSGCREVQGVEWSHRIIDPYDSGRKTRHVTHDRPQLSTRQED

SEQ ID NO: 917182 - protein, 122 aa, Homo sapiens
MQRLWWQDRQEAIGATAPLWWFTCPPVAGVAPPVRSPEQNTPQATRLMKANSVSPLVFGDIKAVPKGLPSLLTLEGLLSGVDPLMANVVCLMLKDPPPLTALLGFLPLKRNEHGNPLKGIFK

SEQ ID NO: 917183 - protein, 174 aa, Homo sapiens
MVWTDNRRCFSGLLPAGLGAAWEPRVGEIKLKEDSVFVILRASKSIRAAAAAARRHDGQPKTVRSSCLDKKATGCHPGPCVRIPTAQPCTSAVCNEKGWDESGRARVGAVSKAVFKEWKEEWGKDLGSIGSARFPFVSLYNGFVRNAKPGIQRRKYPTMPRKERSCCFVEGVGV

SEQ ID NO: 917184 - protein, 147 aa, Homo sapiens
MQNRYAMCRSGLSRDLQTPGSTSFTSFLPPATGPETSQITSSQQIHSFTHLPFYEFIRPVVIEHSVCSRHCARYKGWYTAQERDSVLDFMGITFWWRTPAWNKESQLRLYPAKILKSAIKKVHNDRAQFLDSGVGHLGQAVKSQAGN

SEQ ID NO: 917185 - protein, 267 aa, Homo sapiens
MGQESGSQPPAALMPRDFQQVELKSQEAQSLQQQRGQYLGHLKQPGSLDQLQQQEAQGKAVAKMARQKLQETQGRELLRTGPQEGQPGNLCAFSPSFLASQEHLEATSQQNQQLQAQLSLMALPGEGDLESRETVVAFFNSAGTSAQEEQRMCCQPLAHPVASSQKKPEAAAPAPGTGGKYITPYGSQGTVPKMRHREEEEIVRLAQDREEMKVNLLEMQGQVLRLVRDHNEGHGKFLATAQNPADEPTLGAPAPQELVCADKQDGQ

SEQ ID NO: 917186 - protein, 174 aa, Homo sapiens [sequence omitted]

SEQ ID NO: 917187 - protein, 561 aa, Homo sapiens
VASRFAELKSGDAAIVDIVPGKPMCAESFSDHPLLSCFAVGDVRQTVAVGVIKAVDKKAAGAGKVTRKLRRDVYGAERDVAAAAGLETCQVFPNYHIYPPTAPHVAYMQPKANAPSFFMADELRQELINRHLITMAQIDQADMPAVPTEVDSYHSLFPLEPLPPPNRIQKSSNFGYITSCYKAVNSKDDLPYCLRRIHGFRLVNTKCMVLVDMWKKIQHSNIVTLREVFTTKAFAEPSLVFAYDFHAGGETMMSRHFNDPNADAYFTKRKWGQHEGPLPRQHAGLLPESLIWAYIVQLSSALRTIHTAGLACRVMDPTKILITGKTRLRVNCVGVFDVLTFDNSQNNNPLALMAQYQQADLISLGKVVLALACNSLAGIQRENLQKAMELVTINYSSDLKNLILYLLTDQNRMRSVNDIMPMIGARFYTQLDAAQMRNDVIEEDLAKEVQNGRLFRLLAKLGTINERPEFQKDPTWSETGDRYLLKLFRDHLFHQVTEAGAPWIDLSHIISCLNKLDAGVPEKISLISRDEKSVLVVTYSDLKRCFENTFQELIAAANGQL

SEQ ID NO: 917188 - protein, 147 aa, Homo sapiens
MMTMAVFKAETAAAGSQEECSVEEHTHRHQHAGRPLTGKTTRCLAGAVGGALGPPSRPTPGKTISLLAPPSAKSCDDCTMNMQDVTIGGSWIKGKKTSFYGVTSHGISGDPVSPILPPSLAFWWGFPVLVGVLQGRLVLQGAQGCGR

SEQ ID NO: 917189 - protein, 147 aa, Homo sapiens; identical to SEQ ID NO: 917188

SEQ ID NO: 917190 - protein, 144 aa, Homo sapiens
AEGGGRPSRRQRRRRFVVKEDGHGDSSVVRVVGAGHQRELLHAWLLGATACGPLACLTVVGGGGDRDCSTTKVAFLALPAQLLHARRRRRHLEPATPRLASLREGGINGDCSAPEWRAGGCSQGWGSGLQQWTGCSSGQVVGAL

SEQ ID NO: 917191 - protein, 170 aa, Homo sapiens
DKGRRPRVSMHTTSENTDRAAPPKCWQATVHVDSPPQGKNQGRKVHSTRLGSMLMYKTPRIVRPPQPCGTIPELGTLNTHSAVSAIQGHSQSMLKLLLSGAFAIYSGTWVPSFLVSIFSRSQKKRRERASGGTVYGPFMEVTPGVTSAYVPLDRIQLNGHTRGIVPGFAG

SEQ ID NO: 917192 - protein, 149 aa, Homo sapiens
MPDAVVTTPAIWEDSRQTLTLLPRLECSGVIIAHCSFKPLGLNDPPTSATQEAGTTGAPPAQATSTASPIRVRIAAPGALRIGPGCFSEEGTLSPSRLHSCLDGRCMGGEGNHTNRDMDGLVQNINTLFAYVYVTQRNHGNNKFPITMQ

SEQ ID NO: 917193 - protein, 99 aa, Homo sapiens
WDSPPPPPGTPWPVLSSCPRSFPLRHLGSGSVLLTQGQEPPGGPRCTPSPGDINGQPHTREDCGTRGAQDWAGLLLRRGDIEPKQAALLLGRKVHGWGG

SEQ ID NO: 917194 - protein, 972 aa, Homo sapiens
VPLWYRIVRVQGSQRCSRNGERWCSSVIVVDLSVSCYMSGRSRGSPYSEILITSRKRQVKSAVNELGSDSESESSLSGEELVTKPVGGNYGKQPLLLSEDEEDTKRVVRSAKDKRFEELTNLIRTIRNAMKIRDVTKCLEEFELLGKAYGKAKSIVDKEGVPRFYIRILADLEDYLNELWEDKEGKKKMNKNNAKALSTLRQKIRKYNRDFESHITSYKQNPEQSADEDAEKNEEDSEGSSDEDEDEDGVSAATFLKKKSEAPSGESRKFLKKMDDEDEDSEDSEDDEDWDTGSTSSDSDSEEEEGKQTALASRFLKKAPTTDEDKKAAEKKREDKAKKKHDRKSKRLDEEEEDNEGGEWERVRGGVPLVKEKPKMFAKGTEITHAVVIKKLNEILQARGKKGTDRAAQIELLQLLVQIAAENNLGEGVIVKIKFNIIASLYDYNPNLATYMKPEMWGKCLDCINELMDILFANPNIFVGENILEESENLHNADQPLRVRGCILTLVERMDEEFTKIMQNTDPHSQEYVEHLKDEAQVCAIIERVQRYLEEKGTTEEVCRIYLLRILHTYYKFDYKAHQRQLTPPEGSSKSEQDQAENEGEDSAVLMERLCKYIYAKDRTDRIRTCAILCHIYHHALHSRWYQARDLMLMSHLQDNIQHADPPVQILYNRTMVQLGICAFRQGLTKDAHNALLDIQSSGRAKELLGQGLLLRSLQERNQEQEKVERRRQVPFHLHINLELLECVYLVSAMLLEIPYMAAHESDARRRMISKQFHHQLRVGERQPLLGPPESMREHVVAASKAMKMGDWKTCHSFIINEKMNGKVWDLFPEADKVRTMLVRKIQEESLRTYLFTYSSVYDSISMETLSDMFELDLPTVHSIISKMIINEELMASLDQPTQTVVMHRTEPTAQQNLALQLAEKLGSLVENNERVFDHKQGTYGGYFRDQKDGYRKNEGYMRRGGYRQQQSQTAY

SEQ ID NO: 917195 - protein, 831 aa, Homo sapiens
MVLSPQTSCPWHCGQLSGYLLHPRSATRADLEDYLNELWEDKEGKKKMNKNNAKALSTLRQKIRKYNRDFESHITSYKQNPEQSADEDAEKNEEDSEGSSDEDEDEDGVSAATFLKKKSEAPSGESRKFLKKMDDEDEDSEDSEDDEDWDTGSTSSDSDSEEEEGKQTALASRFLKKAPTTDEDKKAAEKKREDKAKKKHDRKSKRLDEEEEDNEGGEWERVRGGVPLVKEKPKMFAKGTEITHAVVIKKLNEILQARGKKGTDRAAQIELLQLLVQIAAENNLGEGVIVKIKFNIIASLYDYNPNLATYMKPEMWGKCLDCINELMDILFANPNIFVGENILEESENLHNADQPLRVRGCILTLVERMDEEFTKIMQNTDPHSQEYVEHLKDEAQVCAIIERVQRYLEEKGTTEEVCRIYLLRILHTYYKFDYKAHQRQLTPPEGSSKSEQDQAENEGEDSAVLMERLCKYIYAKDRTDRIRTCAILCHIYHHALHSRWYQARDLMLMSHLQDNIQHADPPVQILYNRTMVQLGICAFRQGLTKDAHNALLDIQSSGRAKELLGQGLLLRSLQERNQEQEKVERRRQVPFHLHINLELLECVYLVSAMLLEIPYMAAHESDARRRMISKQFHHQLRVGERQPLLGPPESMREHVVAASKAMKMGDWKTCHSFIINEKMNGKVWDLFPEADKVRTMLVRKIQEESLRTYLFTYSSVYDSISMETLSDMFELDLPTVHSIISKMIINEELMASLDQPTQTVVMHRTEPTAQQNLALQLAEKLGSLVENNERVFDHKQGTYGGYFRDQKDGYRKNEGYMRRGGYRQQQSQTAY

SEQ ID NO: 917196 - protein, 708 aa, Homo sapiens
MVIDLIDLLCICIFSVMYCIELTWCTSMCSTSSDSDSEEEEGKQTALASRFLKKAPTTDEDKKAAEKKREDKAKKKHDRKSKRLDEEEEDNEGGEWERVRGGVPLVKEKPKMFAKGTEITHAVVIKKLNEILQARGKKGTDRAAQIELLQLLVQIAAENNLGEGVIVKIKFNIIASLYDYNPNLATYMKPEMWGKCLDCINELMDILFANPNIFVGENILEESENLHNADQPLRVRGCILTLVERMDEEFTKIMQNTDPHSQEYVEHLKDEAQVCAIIERVQRYLEEKGTTEEVCRIYLLRILHTYYKFDYKAHQRQLTPPEGSSKSEQDQAENEGEDSAVLMERLCKYIYAKDRTDRIRTCAILCHIYHHALHSRWYQARDLMLMSHLQDNIQHADPPVQILYNRTMVQLGICAFRQGLTKDAHNALLDIQSSGRAKELLGQGLLLRSLQERNQEQEKVERRRQVPFHLHINLELLECVYLVSAMLLEIPYMAAHESDARRRMISKQFHHQLRVGERQPLLGPPESMREHVVAASKAMKMGDWKTCHSFIINEKMNGKVWDLFPEADKVRTMLVRKIQEESLRTYLFTYSSVYDSISMETLSDMFELDLPTVHSIISKMIINEELMASLDQPTQTVVMHRTEPTAQQNLALQLAEKLGSLVENNERVFDHKQGTYGGYFRDQKDGYRKNEGYMRRGGYRQQQSQTAY

SEQ ID NO: 917197 - protein, 913 aa, Homo sapiens
MSRFFTTGSDSESESSLSGEELVTKPVGGNYGKQPLLLSEDEEDTKRVVRSAKDKRFEELTNLIRTIRNAMKIRDVTKCLEEFELLGKAYGKAKSIVDKEGVPRFYIRILADLEDYLNELWEDKEGKKKMNKNNAKALSTLRQKIRKYNRDFESHITSYKQNPEQSADEDAEKNEEDSEGSSDEDEDEDGVSAATFLKKKSEAPSGESRKFLKKMDDEDEDSEDSEDDEDWDTGSTSSDSDSEEEEGKQTALASRFLKKAPTTDEDKKAAEKKREDKAKKKHDRKSKRLDEEEEDNEGGEWERVRGGVPLVKEKPKMFAKGTEITHAVVIKKLNEILQARGKKGTDRAAQIELLQLLVQIAAENNLGEGVIVKIKFNIIASLYDYNPNLATYMKPEMWGKCLDCINELMDILFANPNIFVGENILEESENLHNADQPLRVRGCILTLVERMDEEFTKIMQNTDPHSQEYVEHLKDEAQVCAIIERVQRYLEEKGTTEEVCRIYLLRILHTYYKFDYKAHQRQLTPPEGSSKSEQDQAENEGEDSAVLMERLCKYIYAKDRTDRIRTCAILCHIYHHALHSRWYQARDLMLMSHLQDNIQHADPPVQILYNRTMVQLGICAFRQGLTKDAHNALLDIQSSGRAKELLGQGLLLRSLQERNQEQEKVERRRQVPFHLHINLELLECVYLVSAMLLEIPYMAAHESDARRRMISKQFHHQLRVGERQPLLGPPESMREHVVAASKAMKMGDWKTCHSFIINEKMNGKVWDLFPEADKVRTMLVRKIQEESLRTYLFTYSSVYDSISMETLSDMFELDLPTVHSIISKMIINEELMASLDQPTQTVVMHRTEPTAQQNLALQLAEKLGSLVENNERVFDHKQGTYGGYFRDQKDGYRKNEGYMRRGGYRQQQSQTAY

SEQ ID NO: 917198 - protein, 812 aa, Homo sapiens
MSCHPRQSIPQTSHKEGRAVVLELESKKWRVENQENVSNLVIEDTNVHEHSCPISEATKQNPEQSADEDAEKNEEDSEGSSDEDEDEDGVSAATFLKKKSEAPSGESRKFLKKMDDEDEDSEDSEDDEDWDTGSTSSDSDSEEEEGKQTALASRFLKKAPTTDEDKKAAEKKREDKAKKKHDRKSKRLDEEEEDNEGGEWERVRGGVPLVKEKPKMFAKGTEITHAVVIKKLNEILQARGKKGTDRAAQIELLQLLVQIAAENNLGEGVIVKIKFNIIASLYDYNPNLATYMKPEMWGKCLDCINELMDILFANPNIFVGENILEESENLHNADQPLRVRGCILTLVERMDEEFTKIMQNTDPHSQEYVEHLKDEAQVCAIIERVQRYLEEKGTTEEVCRIYLLRILHTYYKFDYKAHQRQLTPPEGSSKSEQDQAENEGEDSAVLMERLCKYIYAKDRTDRIRTCAILCHIYHHALHSRWYQARDLMLMSHLQDNIQHADPPVQILYNRTMVQLGICAFRQGLTKDAHNALLDIQSSGRAKELLGQGLLLRSLQERNQEQEKVERRRQVPFHLHINLELLECVYLVSAMLLEIPYMAAHESDARRRMISKQFHHQLRVGERQPLLGPPESMREHVVAASKAMKMGDWKTCHSFIINEKMNGKVWDLFPEADKVRTMLVRKIQEESLRTYLFTYSSVYDSISMETLSDMFELDLPTVHSIISKMIINEELMASLDQPTQTVVMHRTEPTAQQNLALQLAEKLGSLVENNERVFDHKQGTYGGYFRDQKDGYRKNEGYMRRGGYRQQQSQTAY

SEQ ID NO: 917199 - protein, 825 aa, Homo sapiens
HSGSWRLVQGITPCSALNIALSCCGVCHMPGLGAPGPVTNCGFSSPVWNAPLPELPNPSAGEMGKSIFTCYKQNPEQSADEDAEKNEEDSEGSSDEDEDEDGVSAATFLKKKSEAPSGESRKFLKKMDDEDEDSEDSEDDEDWDTGSTSSDSDSEEEEGKQTALASRFLKKAPTTDEDKKAAEKKREDKAKKKHDRKSKRLDEEEEDNEGGEWERVRGGVPLVKEKPKMFAKGTEITHAVVIKKLNEILQARGKKGTDRAAQIELLQLLVQIAAENNLGEGVIVKIKFNIIASLYDYNPNLATYMKPEMWGKCLDCINELMDILFANPNIFVGENILEESENLHNADQPLRVRGCILTLVERMDEEFTKIMQNTDPHSQEYVEHLKDEAQVCAIIERVQRYLEEKGTTEEVCRIYLLRILHTYYKFDYKAHQRQLTPPEGSSKSEQDQAENEGEDSAVLMERLCKYIYAKDRTDRIRTCAILCHIYHHALHSRWYQARDLMLMSHLQDNIQHADPPVQILYNRTMVQLGICAFRQGLTKDAHNALLDIQSSGRAKELLGQGLLLRSLQERNQEQEKVERRRQVPFHLHINLELLECVYLVSAMLLEIPYMAAHESDARRRMISKQFHHQLRVGERQPLLGPPESMREHVVAASKAMKMGDWKTCHSFIINEKMNGKVWDLFPEADKVRTMLVRKIQEESLRTYLFTYSSVYDSISMETLSDMFELDLPTVHSIISKMIINEELMASLDQPTQTVVMHRTEPTAQQNLALQLAEKLGSLVENNERVFDHKQGTYGGYFRDQKDGYRKNEGYMRRGGYRQQQSQTAY

SEQ ID NO: 917200 - protein, 234 aa, Homo sapiens
RRTSKLPLARDPTDTGNFGFKNMLDTRVEGDVDVPKTVKVKGTAGLSQNSTLEVQTLSVAPKALETVQERKLAADHPFLKEMQDQGENLYVVNGGGGDGAGDKGHEVTLEALPKDVLLSKETVGAILYFVGALTELSEAQQKLLVKSMEKKILPVESTMEQNFLLDKEGVFPLQPELLSSLGDEELTLTEALVGLSGLEVQRSGPQYMWHPDTLPRLCALYAGLSLLQQLTKAS

SEQ ID NO: 917201 - protein, 173 aa, Homo sapiens
MVWKLSNLGCVAGAGKFYQQETAYDYYLDTNMPLPPVRSSQGLRPSTLCFLNAADFSDTFTAFSSTLCHAQSTTILHSKEHTHLLGTQSLAHRCSKSEEELTGLLTAGLLSCWLKCLHWAGGEWGLSGLPHCPLVLYRLPWAVWEALPKRPWEHLQAPSQPELLINCSDLLKA

SEQ ID NO: 917202 - protein, 184 aa, Homo sapiens
MTFFSRLAEKRLEEGVPLLILTRVSYGLAPVLQVLQAGQLEQGVARAWVPPEEHSPDTVRGLEAALQYQPRSWAIQGFSVELGKPGLLRDTVEGVGNPCPVPWHGGGLLIPGQVQATVAAGQQPECEPQSWLPGGGRRAEREATLRGGGVQEFFLWYLPPLGSRTHWLRFTDATTEAWRGQIPL

SEQ ID NO: 917203 - protein, 147 aa, Homo sapiens
EEVAQMIIKPDKPPRSAVHKEADGVNPVQIQSPGHEKSYFFSSSLKTGKMKIPPYSGEGEPFCSIQAFNRLDQISISVHQLSQPRNTLSDTARMLYQICEHLANLRDIASSVPGHSNKANIAIKMNVVLAGMKTILISLNISIELLG

SEQ ID NO: 917204 - protein, 148 aa, Homo sapiens [sequence omitted]

SEQ ID NO: 917205 - protein, 329 aa, Homo sapiens
LITLFQDFKQAALISRTNGSLCHATAMCHHRINEFEEAVNFFTWALKINPCFLDAYVGRGNSYMEYGHDEATKQAQKDFLKALHINPAYIKARISFGYNLQAQGKFQKAWNHFTIAIDTDPKNYLAYEGRAVVCLQMGNNFAAMQDINAAMKISTTAEFLTNRGVIHEFMGHKQNAMKDYQDAITLNPKYSLAYFNAGNIYFHHRQFSQASDYFSKALKFDPENEYVLMNRAITNTILKKYEEAKEDFANVIESCPFWAAVYFNRAHFYYCLKQYELAEEDLNKALSLKPNDALVYNFRAKVRGKIGLIEEAMADYNQALDLEDYASVI

SEQ ID NO: 917206 - protein, 329 aa, Homo sapiens; identical to SEQ ID NO: 917205

SEQ ID NO: 917207 - protein, 140 aa, Homo sapiens
MGSNTGIGGGRTADPNNFRLLKGGGENGREEWKGKRKNICLGAPRRTLCTLIKTIIHDLSSVFGFIHRKGLERGTAIQVNTVHYPYAREDELLRAYKSRSSDALESQSRQNAKNAWSYKDHVVATLTSRAWHKTKKKKGK

SEQ ID NO: 917208 - protein, 176 aa, Homo sapiens
MPLTSVRREQWFFSSGLEKGKEGIQKQKYGQPFRMGHCSAGSRKGFATDKKRSVTAKKVSPDIAKCPLKEKESPCSFPMRKEDSAVSQQQKTLCFSGLLSFVIEFGSPAYAHAIIERGFKTMAYVPVPLTGSERRRGEKSSNENKSWYWKKVESFLEGQTTEACFSNLEYIYKKSS

SEQ ID NO: 917209 - protein, 176 aa, Homo sapiens; identical to SEQ ID NO: 917208

SEQ ID NO: 917210 - protein, 143 aa, Homo sapiens
MGSEAAQLLEAADFAARKHRQQRRKDPEGTPYINHPIGVARILTHEAGITDIVVLQAALLHDTVEDTDTTLDEVELHFGAQVRRLVEEVTDDKTLPKLERKRLQVEQAPHSSPGAKLVKLADKLYNLRDLNRCTPEGTLSYGL

SEQ ID NO: 917211 - protein, 143 aa, Homo sapiens; identical to SEQ ID NO: 917210

SEQ ID NO: 917212 - protein, 143 aa, Homo sapiens; identical to SEQ ID NO: 917210

SEQ ID NO: 917213 - protein, 164 aa, Homo sapiens
TSQHQQPEALSLGAMRMQCEPTSRLLLHTRGQQGFRAIGKLLSASINPVPSGEPAPVTYAISCPVIPNLDLGQMEVPQLSCMEKPKPGDFSQPQPPPLGFLQYLFTLQWDKTHSCSQTRPRWLDPVPWHRLGLCLLAILFLTFSIWGIQYKSKREEVAFVKGER

SEQ ID NO: 917214 - protein, 339 aa, Homo sapiens
VILLKIGDSVERIMGMSTWLPDNVTFEEGALIDPLSVGIHACRRGGVTLGHKVLVCGAGAIGVVTLLVAKAMGAAQVVVTDLSATRLSKAKEIGADLVLQISKESPQEIARKVEGLLGCKPEVTIECTGQRPPSRQASTVTADYCLFCLPDLGTDKLPMPDSPLSDPPATYGKLAENCPAALGAEEAVGEREERVPPWQCREFQLESASPLLHCHRQWSPCGKGQKEAEAQRGTMDLCVIDLPMATRSGGTLVLVGLGSEMTTVPLLHAAIREVDIKGVFRYCNTWPVAISMLASKSVNVKPLVTHRFPLEKALEAFETFKKGLGLKIMLKCDPSDQNL

SEQ ID NO: 917215 - protein, 264 aa, Homo sapiens
MCMLQCMLSQTHEDPSILDRQPSVLTGNPRAASYDLNAHLKLQRIPDAVIYMDEHAPVNRCHLHVGFHACKRGRFTLSHNVLVCGASPIVMVTSFVREGNAEQLKYLCASDLSATRLSKAKEIGADLVLQISKESPQEIARKVEGLLGCKPEVTIECTGAEASIQAGIYATRSGGTLVLVGLGSEMTTVPLLHAAIREVDIKGVFRYCNTWPVAISMLASKSVNVKPLVTHRFPLEKALEAFETFKKGLGLKIMLKCDPSDQNL

SEQ ID NO: 917216 - protein, 140 aa, Homo sapiens
MASGQARPPFEEESPQPSTTVRSPEVVVDDEVPGPSDESEEELEEELELERAPEPEDTWVVETLCGLKMKLKRKRASSVLPEHHEAFNRLLGDPVVQKFLAWDKDLRVSDKYLLAMVIAYFSRAGLFSWQYQRIHFFLAL

SEQ ID NO: 917217 - protein, 164 aa, Homo sapiens
MAHVYVWLLPVLPHVLQTSTPLSTTHFECVVTHLSLPPEVWFRAWYTKSALWIFVSINPWAQGDLLVGQSKELLLWDLNLSPLPNLGLHTAGKKGQLRRACSVIPPLDAAPDSPPPSSSAHRPMLASGIFQLLRIHVSKCVQTMEGSTEELSLLLAANTSLPAM

SEQ ID NO: 917218 - protein, 141 aa, Homo sapiens
GVSRGVKAAMNRVLCAPAAGAVRALRLIGWASRSLHPLPGSRDRAHPAAEEEDDPDRPIEFSSSKANPHRWSVGHTMGKGHQRPWWKVLPLSCFLVALIIWCYLREESEADQWLRQVWGEVPEPSDRSEEPETPAAYRART

SEQ ID NO: 917219 - protein, 141 aa, Homo sapiens; identical to SEQ ID NO: 917218

SEQ ID NO: 917220 - protein, 144 aa, Homo sapiens
RLVGLGVTRHRGMNRVLCAPAAGAVRALRLIGWASRSLHPLPGSRDRAHPAAEEEDDPDRPIEFSSSKANPHRWSVGHTMGKGHQRPWWKVLPLSCFLVALIIWCYLREESEADQWLRQVWGEVPEPSDRSEEPETPAAYRART

SEQ ID NO: 917221 - protein, 315 aa, Homo sapiens
MFVRLVKQTQCLGVSLKTAIYDKNNQNNEGISHRKSLRISDGQDKGIFAIVCKEQVLDGLLDSPKMRTSLQAVALWGQKAPPHSITAIMITDDQRTIVTGSQEGQLCLWNLSHELKTGKGLNAQGYAPLSVMTGKDSMLFSEMEPSGLLRKKISAKELLFGHSASVTCLARARDFSKQPYIVSAAENGEMCVWNVTNGQCMEKATLPYRHTAICYYHCSFRMTGEGWLLCCGEYQDVLIIDAKTLAVVHSFRSSQFPDWINCMCIVHSMRIQEDSLLVVSVAGELKVWDLSSSINSIQVGLGTLLFFPYNFKHIH

SEQ ID NO: 917222 - protein, 161 aa, Homo sapiens
MSLKASARGVKAWGQRLQDSKHCECSVAQLGVGLCDGKKHPKVDVARDGRSHRRGGKDSDRVPRERRVLVIREFSPHDCGPMAYNQIPTYSTSTVSPAKPPCRKSQHSVNVGFASHEYCIFHPHSVEKELRGKFCQPWPALGHQWTSPELVVKIPGDRSSE

SEQ ID NO: 917223 - protein, 195 aa, Homo sapiens [sequence omitted]

SEQ ID NO: 917224 - protein, 134 aa, Homo sapiens
MYLAFQISHNIALPCLFVSISQYFPKPTGATWAWQAMVTMYPQSRQKSTAKFSRTIVSQLPCLKVRAHGDSKLPAGLHLLLHDKRFHADSIWGNLAGPRRSFLWVICHPPWVESQRSAAGPTAGFACLFPTASL

SEQ ID NO: 917225 - protein, 37 aa, Homo sapiens
MLANRKAARGRAGLSPARRGRRCPEEEGDPARDGRPA

SEQ ID NO: 917226 - protein, 152 aa, Homo sapiens
KECMSEKEAICKFTLLPSWGSSNCLPCFYSLCGAATGARAEQAALLPTWRTLKPEGLCRKLLFGPSGFPEEPLFLLLARGLQSIWILKFSIPYAQDLRARPRCGAQLGESRGTQGTAGAHPTNAGRHHRHLGPPFQYFAQCLGYPRGSVPAC

SEQ ID NO: 917227 - protein, 503 aa, Homo sapiens
QICLDLPRNLTANEKYEMFLNQARKNTDKEYNKCEMLDHFDVITEEVPEDEPAEVSAHLQMEVERLIVQSYVLEHQKTTTPDPMDDPCFSHRSRRKLAKIQLPEYILDFGYIILGEVRTHIIKIINTSHFPVSFHADKRVLHETGFSTELDRVKNLPHCETEIFEVRFDPQGANLPVGSKEVILPIKVVGGPTVHICLQAKVTIPTMTLSRGKVDFATIQCGQCLVETIQLSNHLQVPCEWFVQSQKPVDKLEKHMPKYLRQKLRAELKPKTRIFEIQPISGVLDPGEKSNVQVKFMPKEEKFYSQTLVFQIAQSAQKLTLLARGQGLEPRLEFSPSVLDLGPLLLCAPGDEAEVIVKNPCNFPIEFYSLEFDQQYLIEEKQILRKLKGYDSYNTLLLPPHNPGEKLPPELYEYFKEIKKSKEEQMRAKYLENLAQENETGALKAGGGHSHKQKTSPSIVLRPNSNRRAVLCSQNCALSGPPPLSYPIICPGALVCLAIKVPR

SEQ ID NO: 917228 - protein, 486 aa, Homo sapiens
MFLNQARKNTDKEYNKCEMLDHFDVITEEVPEDEPAEVSAHLQMEVERLIVQSYVLEHQKTTTPDPMDDPCFSHRSRRKLAKIQLPEYILDFGYIILGEVRTHIIKIINTSHFPVSFHADKRVLHETGFSTELDRVKNLPHCETEIFEVRFDPQGANLPVGSKEVILPIKVVGGPTVHICLQAKVTIPTMTLSRGKVDFATIQCGQCLVETIQLSNHLQVPCEWFVQSQKPVDKLEKHMPKYLRQKLRAELKPKTRIFEIQPISGVLDPGEKSNVQVKFMPKEEKFYSQTLVFQIAQSAQKLTLLARGQGLEPRLEFSPSVLDLGPLLLCAPGDEAEVIVKNPCNFPIEFYSLEFDQQYLIEEKQILRKLKGYDSYNTLLLPPHNPGEKLPPELYEYFKEIKKSKEEQMRAKYLENLAQENETGALKAGGGHSHKQKTSPSIVLRPNSNRRAVLCSQNCALSGPPPLSYPIICPGALVCLAIKVPR

SEQ ID NO: 917229 - protein, 192 aa, Homo sapiens
MGLVNIGLSCAASGFTFDDYTMHWVRQAPGKGLEWVSLISWDGGSTYYADSVKGRFTISRDNSKNSLYLQMNSLRTEDTALYYCAKDTQDPVTPSSGSAQISAELVRLLRVEHRTWLQHQPWHGRQRAALGAWVRCIVLPAGGGREVLTQGPETVGSIQNIHFYFISVDDIETNMQSVNNGDSYICPNCFIP

SEQ ID NO: 917230 - protein, 120 aa, Homo sapiens
MPHPDILCRGIKKVTQVSPGYLKRLIVQVLKNPWTEFSQLLPQGKNCCCQGEEAYLIQTVNQSKTQADTQNPTAGGDGGNPGGQHGEEWFPVEGRKMVKAQPRRRLGSSAKVVICVVPIR

SEQ ID NO: 917231 - protein, 749 aa, Homo sapiens
MNTRGMKASSSDSFLRCVQSMGKPMKGNTGGHCCFIQLDKNVVAVKAQICPKRCVCQILSPNLATLCAKKGLLFVPPNIDRRTVELRLADNFVTNIKRKDFANMTSLVDLTLSRNTISFITPHAFADLRNLRALHLNSNRLTKITNDMFSGLSNLHHLILNNNQLTLISSTAFDDVFALEELDLSYNNLETIPWDAVEKMVSLHTLSLDHNMIDNIPKGTFSHLHKMTRLDVTSNKLQKLPPDPLFQRAQVLATSGIISPSTFALSFGGNPLHCNCELLWLRRLSREDDLETCASPPLLTGRYFWSIPEEEFLCEPPLITRHTHEMRVLEGQRATLRCKARGDPEPAIHWISPEGKLISNATRSLVYDNGTLDILITTVKDTGAFTCIASNPAGEATQIVDLHIIKLPHLLNSTNHIHEPDPGSSDISTSTKSGSNTSSSNGDTKLSQDKIVVAEATSSTALLKFNFQRNIPGIRMFQIQYNGTYDDTLVYRMIPPTSKTFLVNNLAAGTMYDLCVLAIYDDGITSLTATRVVGCIQFTTEQDYVRCHFMQSQFLGGTMIIIIGGIIVASVLVFIIILMIRYKVCNNNGQHKVTKVSNVYSQTNGAQIQGCSVTLPQSVSKQAVGHEENAQCCKATSDNVIQSSETCSSQDSSTTTSALPPSWTSSTSVSQKQKRKTGTKPSTEPQNEAVTNVESQNTNRNNSTALQLASRPPDSVTEGPTSKRAHIKPNALLTNVDQIVQETQRLELI

SEQ ID NO: 917232 - protein, 667 aa, Homo sapiens
  misc_feature (663)..(663): Xaa can be any naturally occurring amino acid
MNTRGMKASSSDSFLRCVQSMGKPMKGNTGGHCCFIQLDKNVVAVKAQICPKRCVCQILSPNLATLCAKKGLLFVPPNIDRRTVELRLADNFVTNIKRKDFANMTSLVDLTLSRNTISFITPHAFADLRNLRALHLNSNRLTKITNDMFSGLSNLHHLILNNNQLTLISSTAFDDVFALEELDLSYNNLETIPWDAVEKMVSLHTLSLDHNMIDNIPKGTFSHLHKMTRLDVTSNKLQKLPPDPLFQRAQVLATSGIISPSTFALSFGGNPLHCNCELLWLRRLSREDDLETCASPPLLTGRYFWSIPEEEFLCEPPLITRHTHEMRVLEGQRATLRCKARGDPEPAIHWISPEGKLISNATRSLVYDNGTLDILITTVKDTGAFTCIASNPAGEATQIVDLHIIKLPHLLNSTNHIHEPDPGSSDISTSTKSGSNTSSSNGDTKLSQDKIVVAEATSSTALLKFNFQRNIPGIRMFQIQYNGTYDDTLVYRMIPPTSKTFLVNNLAAGTMYDLCVLAIYDDGITSLTATRVVGCIQFTTEQDYVRCHFMQSQFLGGTMIIIIGGIIVASVLVFIIILMIRYKVCNNNGQHKVTKVSNVYSQTNGAQIQGCSVTLPQSVSKQAVGHEENAQCCKATSDNVIQSSETCSSQDSTYLLLSGSDLXQEKS

SEQ ID NO: 917233 - protein, 872 aa, Homo sapiens
MAVALDSQIDAPLEVEGCLIMKVEKDPEWASEPILEGSDSSETFRKCFRQFCYEDVTGPHEAFSKLWELCCRWLKPEMRSKEQILELLVIEQFLTILPEKIQAWAQKQCPQSGEEAVALVVHLEKETGRLRQQVSSPVHREKHSPLGAAWEVADFQPEQVETQPRAVSREEPGSLHSGHQEQLNRKRERRPLPKNGLHSSNKRSILRSNYVKEKSVHAIQVPARSAGKTWREQQQWGLEDEKIAGVHWSYEETKTFLAILKESRFYETLQACPRNSQVYGAVAEWLRECGFLRTPEQCRTKFKSLQKSYRKVRNGHMLEPCAFFEDMDALLNPAARAPSTDKPKEMIPVPRLKRIAISAKEHISLVEEEEAAEDSDDDEIGIEFIRKSEIHGAPVLFQNLSGVHWGYEETKTFLDILRETRFYEALQACHRKSKLYGAVAEQLRECGFLRTPEQCRTKFKSLQKSYRKVKNGHVLESCAFYKEMDALINSRASAPSPSTPEEVPSPSRQERGGIEVEPQEPTGWEPEETSQEAVIEDSCSERMSEEEIVQEPEFQGPPGLLQSPNDFEIGSSIKEDPTQIVYKDMEQHRALIEKSKRVVSQSTDPSKYRKRECISGRQWENLQGIRQGKPMSQPRDLGKAVVHQRPFVGKRPYRLLKYGESFGRSTRLMCRMTHHKENPYKCGVCGKCFGRSRSLIRHQRIHTGEKPFKCLDCGKSFNDSSNFGAHQRIHTGEKPYRCGECGKCFSQSSSLIIHQRTHTGEKPYQCGECGKSFTNSSHFSAHRRVHTGENPYKCVDCEKSFNNCTRFREHRRIHTGEKPYGCAQCGKRFSKSSVLTKHREVHVREKPLPHPPSLYCPENPHKGKTDEFRKTF

SEQ ID NO: 917234 - protein, 160 aa, Homo sapiens
MRIQHLFNRSTKNPIILKETSKAGKTCQMIVRRIYVAHLSGAHVSCLYARYDLVSASSTPALLCSVMLGLGVCELPFPGSPASWLPVMFCQNKALSGVQKARRGKGKKGLQFCKRAAMVHHSVVHSRSSTHFKRHNGNDKKTDTKDKLYQPKYQQNGEKS

SEQ ID NO: 917235 - protein, 134 aa, Homo sapiens
RRRRGPPCQWERGAGLPAGRSGGPPSSLPARPLSLSGRLSILSPVARLLRGSPAAGAAEPRPGYLRKRDVVVGRNKPARPRIRLGGVRTDSDFSFPMSTFIEHLICDTRGCKKRNAAGGEKPELFLCEPLPPGP

SEQ ID NO: 917236 - protein, 1176 aa, Homo sapiens
MALSLWPLLLLLLLLLLLSFAVTLAPTGPHSLDPGLSFLKSLLSTLDQAPQGSLSRSRFFTFLANISSSFEPGRMGEGPVGEPPPLQPPALRLHDFLVTLRGSPDWEPMLGLLGDMLALLGQEQTPRDFLVHQAGVLGGLVEVLLGALVPGGPPTPTQPPCTRDGPSDCVLAADWLPSLLLLLEGTRWQALVQVQPSVDPTNATGLDGREAAPHFLQGLLGLLTPTGELGSKEALWGGLLRTVGAPLYAAFQEGLLRVTHSLQDEVFSILGQPEPDTNGQCQGGNLQQLLLWGVRHNLSWDVQALGFLSGSPPPPPALLHCLSTGVPLPRASQPSAHISPRQRRAITVEALCENHLGPAPPYSISNFSIHLLCQHTKPATPQPHPSTTAICQTAVWYAVSWAPGAQGWLQACHDQFPDEFLDAICSNLSFSALSGSNRRLVKRLCAGLLPPPTSCPEGLPPVPLTPDIFWGCFLENETLWAERLCGEASLQAVPPSNQAWVQHVCQGPTPDVTASPPCHIGPCGERCPDGGSFLVMVCANDTMYEVLVPFWPWLAGQCRISRGGNDTCFLEGLLGPLLPSLPPLGPSPLCLTPGPFLLGMLSQLPRCQSSVPALAHPTRLHYLLRLLTFLLGPGAGGAEAQGMLGRALLLSSLPDNCSFWDAFRPEGRRSVLRTIGEYLEQDEEQPTPSGFEPTVNPSSGISKMELLACFSAYLHMPPENLQQLVLSAEREAAQGFLTLMLQGKLQGKLQVPPSEEQALGRLTALLLQRYPRLTSQLFIDLSPLIPFLAVSDLMRFPPSLLANDSVQQGYRGSEENSLEEDKGLRPMTPRSLAAIRDYSPGMRPEQKEALAKRLLAPELFGEVPAWPQELLWAVLPLLPHLPLENFLQLSPHQIQALEDSWPAAGLGPGHARHVLRSLVNQSVQDGEEQVRRLGPLACFLSPEELQSLVPLSDPTGPVERGLLECAANGTLSPEGRLSLEELCSLHLLLPGLSPQTLQAIPRRVLVGACSCLAPELSRLSACQTAALLQTFRQPIPTTWPDCLLPLLPLKLLQLDSLALLANRRRYWELPWSEQQAQFLWKKMQVPTNLTLRNLQALGTLAGGMSCEFLQQINSMVDFLEVVHMIYQLPTRVRGSLRACIWAELQRRMAMPEPEWTTVGPELNGLDSKLLLDLPIK

SEQ ID NO: 917237 - protein, 322 aa, Homo sapiens
MVRVDSVLKEVQMKCSEASKGGRISSGGKIGQWFVTLPKKPYSAPVSQMESIPATSEAASPPAILVTVESPEMDLNDFVKIPLTFGGVVEGEEEDRAVMHLRLCGDDSPMSESLHFIKLPRTVLVDEDARPEEKELRKTKASSVISDEIKISSTEIERIYSSQSQVEDQESLQTCEQNEMLSIGIEEVFDILPLFGVLQPHSSHQISFTFYGHANIIAQAKALCEVEEGPTYEITLKGEASLVNYSFDTKDIHYGLQLFDHVTEREITLTNMGKVGFEFKVLTDHQSSPDNLLPGVPLILPVSVSKWWEGPEFKPTSPTPKQ

SEQ ID NO: 917238 - protein, 170 aa, Homo sapiens
IRVASVDMELLHFVPKRALPGFTIALEVHRRPYTRAQPWAHPKRAHLHPRVETPHISFLSSAPPLCPWYSGSNPWLRNPLKPRLAALFQRSAAPRLHFSGAASLQEDHRNKPKGHRGQMYQRTPLKSRRISTKTISVFLVAFCPSKWKVEVSEKSTERTCSKLKPQTPKA

SEQ ID NO: 917239 - protein, 170 aa, Homo sapiens; identical to SEQ ID NO: 917238

SEQ ID NO: 917240 - protein, 162 aa, Homo sapiens
MELISHKIPSSISVSLQVTRLGLKMQHNYHFPTPRGSFSFRQREKPVGRPSGSEEGKSFRWEEQRGEGSKGDSPLLEIRPVPPRAGQHCPGGTSGAAGLGSLAPPVPATHAPIAIGFTWNSPPATPRGYYGENLLLFLGPKIKGAFSVSAFIPWTLPELILG

SEQ ID NO: 917241 - protein, 237 aa, Homo sapiens
TRSLPPRSTPRPPAAHAAGPGSRRPAPAPRAPPPPPPSKAGLGLELLMEKVPGEMEIERRERKRELSEAERKAVQAMWARLYANCEDVGVAILVRFFVNFPSAKQYFSQFKHMEDPLEMERSPQLRKHACRVMGALNTVVENLHDPDKVSSVLALVGKAHALKHKVEPVYFKILSGVILEVVAEEFASDFPPETQRAWAKLRGLIYSHVTAAYKEVGWVQQVPNATTPPATLPSSGP

SEQ ID NO: 917242 - protein, 213 aa, Homo sapiens
AGTGPGVLGIRRRAKPGWAWSCSWRKCQARWRSSAGSGSEELSEAERKAVQAMWARLYANCEDVGVAILVRFFVNFPSAKQYFSQFKHMEDPLEMERSPQLRKHACRVMGALNTVVENLHDPDKVSSVLALVGKAHALKHKVEPVYFKILSGVILEVVAEEFASDFPPETQRAWAKLRGLIYSHVTAAYKEVGWVQQVPNATTPPATLPSSGP

SEQ ID NO: 917243 - protein, 237 aa, Homo sapiens; identical to SEQ ID NO: 917241

SEQ ID NO: 917244 - protein, 273 aa, Homo sapiens
TRSLPPRSTPRPPAAHAAGPGSRRPAPAPRAPPPPPPSKAGLGLELLMEKVPGEMEIERRERKRELSEAERKAVQAMWARLYANCEDVGVAILVRFFVNFPSAKQYFSQFKHMEDPLEMERSPQLRKHACRVMGALNTVVENLHDPDKVSSVLALVGKAHALKHKVEPVYFKPTGHTALFGAVGPLTPPPSLAAPRAEGRVLKTLLDAPFLGAKEAGGIPDSTSPKEASVAARVPPWSCWEAALAAWMLTPARRAERGPLFLAFLLTVRERPS

SEQ ID NO: 917245 - protein, 167 aa, Homo sapiens
MIFTINDNKKKNSCNLSNPGLVQFCSGERCHIHYLQPWRHRQSHDSSWANLSLGGEDMREQPCASQEEEALPRIQRNPYHGVPGHPKEMPTVLSDQWPPPGEKDFSLPITRMEEKARGPEERQEKDGDRGVDSRGESSPLHAYPPMVADAIDNTGFATGLEILARTH

SEQ ID NO: 917246 - protein, 649 aa, Homo sapiens
MWPQARLPPHPAMAEETRQSKLAAAKRKLKEYWQRNSPGVPAGAKRNRKTNGSIHETATSGGCHSPGDSATGIHGESPTSSATLKDLESPCQELAVVPDSRSVKVSQLKNTIKSLKQQKKQVVHQLEEVNMISLFARDMTARFGGHSDVEAPSLVSPTPSLGKKAHPPESTPSPTGSLITRSHGWACPGAGAVEKKANNEKQKAERELEGESFGPHLNSLITEESKDLAVRLQHSLQRKGELERALSAVTATQKKKAERQFSSRSKARTEWKLEQSMREQALLKAQLTQGPFPLCFGQVCSLKKEKKHDKYRVETLERSLSKLKNQMAEPLPPEPPAVPSEAELQHLRKELERVAGALQAQVEYNQRISLLNEGQKERLREQQERLPEQEERLQQLAEPQNSFKELNNENKSVLQLEQQVKELQEKLGKERLEAASQQKQQLTAQLSLMALPGEGDGGGHLDSEGEEAPRPIPSIPQDLESREAMSSFMDHLEEKADLSELVKKQELRFIQYWQERCHQKIHHLLSEPGGRAKDAALGGGHHQAGAQGGDEDEAAGAAADGIAAYSNYNNGHRKFLAAAHNPADEPGPGAPAPQELGAADKHGGEAREDPLLDKPTAQPIVQDHQEHPGLGNNCCVPFFCWAWLPRRRR

SEQ ID NO: 917247 - protein, 190 aa, Homo sapiens
TEVKVWEPPPRFQKMYGNAWMPRQKFAAGVGTSWGTSARAVQKGNVGWEPTHKVPTGAPPSGAVRLGTLSSRPQNGGSTDSLHCAPGKAVDTQHQPMKVAMREAVPCKATGAELPKTMGIPLLLKAQFLRLSPHNLSDAKQEPQIVVPVLYRTNPDVVPDSYSFWLTSYKSGFPQPPPQKEVELPPPPTE

SEQ ID NO: 917248 - protein, 176 aa, Homo sapiens
MEAWPWVWTASVGPSPCAAAFCPGHPSLCRQLQEPASCTGRPCPLQAASGSCLLPWPPFSLQAAFRKAPVEAGQPEHVDFGSRSCPALLILWPSNWVLMLAFLCIKPGGFASFTPLCPGHHVCERAGWCFVALRSVAEAQVWVSRARRDLAVRVCASVSAVGLRHVCPGDQHVWDP

SEQ ID NO: 917249 - protein, 176 aa, Homo sapiens; identical to SEQ ID NO: 917248

SEQ ID NO: 917250 - protein, 685 aa, Homo sapiens
MESEEDYVEEKESEKCVKEGVTNPSNSSQQALLKADYKALKNGVPSPIMATKIPKKVIAPVDTGDLEAGRRKRRRKRRSLAINLTNCKYESVRRAAQMCGLKEVGEDEEWTLYWTDCAVSLERVMDMKRFQKINHFPGMTEICRKDLLARNLNRMYKLYPSEYNIFPRTWCLPAEKSSMRPRESLDAQKPFDQALSAHSYGDFQSYGRQRKARTYICKPDSGCQGRGIFITRNPREIKPGEHMICQQYISKPLLIDGFKFDMRVYVLITSCDPLRIFTYEEGLARFATTPYMEPSHNNLDNVCMHLTNYAINKHNENFVRDGAVGSKRKLSTLNIWLQEHSYNPGELWGDIEDIIIKTIISAHSVLRHNYRTCFPQYLNGGTCACFEILGFDILLDHKLKPWLLEECRFGIPSALIFTTDSCLDQEVKDALLCDAMTLVNLRGCDKRKVMEEDKRRVKERLFQCYRQPRESRKEKTESSHVAMLDQERYEDSHLGKYRRIYPGPDTEKYARFFKHNGSLFQETAASKAREECARQQLEEIRLKQEQQETSGTKRQKARDQNQGESAGEKSRPRAGLQSLSTHLAYRNRNWEKELLPGQLDTMRPQEIVEEEELERMKALLQRETLIRSLGIVEQLTRLQHPGPQGQKKLHENMTSSKLQLQTFSFTGNLLSIFLSQNNPTLMTDK

SEQ ID NO: 917251 - protein, 565 aa, Homo sapiens
MESEEDYVEEKESEKCVKEGVTNPSNSSQQALLKADYKALKNGVPSPIMATKIPKKVIAPVDTGDLEAGRRKRRRKRRSLAINLTNCKYESVRRAAQMCGLKEVGEDEEWTLYWTDCAVSLERVMDMKRFQPLLIDGFKFDMRVYVLITSCDPLRIFTYEEGLARFATTPYMEPSHNNLDNVCMHLTNYAINKHNENFVRDGAVGSKRKLSTLNIWLQEHSYNPGELWGDIEDIIIKTIISAHSVLRHNYRTCFPQYLNGGTCACFEILGFDILLDHKLKPWLLEECRFGIPSALIFTTDSCLDQEVKDALLCDAMTLVNLRGCDKRKVMEEDKRRVKERLFQCYRQPRESRKEKTESSHVAMLDQERYEDSHLGKYRRIYPGPDTEKYARFFKHNGSLFQETAASKAREECARQQLEEIRLKQEQQETSGTKRQKARDQNQGESAGEKSRPRAGLQSLSTHLAYRNRNWEKELLPGQLDTMRPQEIVEEEELERMKALLQRETLIRSLGIVEQLTRLQHPGPQGQKKLHENMTSSKLQLQTFSFTGNLLSIFLSQNNPTLMTDK

SEQ ID NO: 917252 - protein, 134 aa, Homo sapiens
MPLGPPWIDIKLYTGYFLVTLGNSTLCSLRAAVCRPQNEKIGPEQLVWPCECRRNNIRVVYLGGQQLREQPAAHCVARVSCGPPVKDSPAHDKPARCSCKLTFKVSRLPRSWSKGLFGQAYEARVRRAVSDGAI

SEQ ID NO: 917253 - protein, 134 aa, Homo sapiens; identical to SEQ ID NO: 917252

SEQ ID NO: 917254 - protein, 423 aa, Homo sapiens
MAGPFSRLLSARPGLRLLALAGAGSLAAGFLLRPEPVRAASERRRLYPPSAEYPDLRKHNNCMASHLTPAVYARLCDKTTPTGWTLDQCIQTGVDNPGHPFIKTVGMVAGDEETYEVFADLFDPVIQERHNGYDPRTMKHTTDLDASKIRSGYFDERYVLSSRVRTGRSIRGLSLPPACTRAERREVERVVVDALSGLKGDLAGRYYRLSEMTEAEQQQLIDDHFLFDKPVSPLLTAAGMARDWPDARGIWHNNEKSFLIWVNEEDHTRVISMEKGGNMKRVFERFCRGLKEVERLIQERGWEFMWNERLGYILTCPSNLGTGLRAGVHIKLPLLSKVKELWGYRGVSRFPKILENLRLQKRGTGGVDTAATGGVFDISNLDRLGKSEDQIPGGDPTTRRKRGTIIPPDLGFISFALVGHGSP

SEQ ID NO: 917255 - protein, 277 aa, Homo sapiens
MNTTPGIYMPIKIRSGYFDERYVLSSRVRTGRSIRGLSLPPACTRAERREVERVVVDALSGLKGDLAGRYYRLSEMTEAEQQQLIDDHFLFDKPVSPLLTAAGMARDWPDARGIWHNNEKSFLIWVNEEDHTRVISMEKGGNMKRVFERFCRGLKEVERLIQERGWEFMWNERLGYILTCPSNLGTGLRAGVHIKLPLLSKYRFPKILENLRLQKRGTGGVDTAATGGVFDISNLDRLGKSEDQIPGGDPTTRRKRGTIIPPDLGFISFALVGHGSP

SEQ ID NO: 917256 - protein, 390 aa, Homo sapiens
KNLFKPCFQLFRMCLAVELLMTWWLCVSSFVELLAAEFLMTWWLCVSSFEEPLAVELLMTWWLCVSSFEEPLAAEFLMTWWLYVSSFEEPLAAELLMTWWLCVSSFAEPLAVELLMTCVVDSLHLLDKGMIRVPGGAEETQVTETVESQKAELLCVSQYSAWWSGSVGRAPAGTQVQRPQGAARARLELRLTLCALRGAHIDEKDWQTCQGMQIRVLAGTKLSLWLQGEQRTVLAVLKLELSVENWTFVCSPASQCVRTFSGDHCRMSQNHAWVKDPFKVQDRPMDFRRTKLEKCGDRVQLQLAVRSLPLLSAVSGRSSEHTEKAFRCPSLSSCISSWGCNVLSCLSHSGPSWSIACRWEARGFPGSAFKRFAKRQRMLFLSPNILKTVS

SEQ ID NO: 917257 - protein, 274 aa, Homo sapiens
MKLPKGTRSSVYFAQHPEKEPLPSRQEVKQTPVIMAKIKGPGPAKYLRPSCTGYIDHDISMFKAPAYTLHSRHSEKRMVCHSSPGPCYLLDPKITRFGMSSCPQVPMEERISNLRLNPTLASCQYYFEKIHPPGERRAPQYTFGYRRPYRVMDLNPAPNQYQMPLLLGPNTPVSRAAPCYSLASRDKNWFYKEDVAGGPGPTTYARPEPSIYQNRSPTYSMAKRFAYPLDLTPRPGPGSHEVQQVTVHKPHIPAFTMGIKHSLHLCPLVIDIRD

SEQ ID NO: 917258 - protein, 329 aa, Homo sapiens
STVKVSLPQRTFCTSGPGDGPGGSAMEDEVPAFFQVVNFTCQVRSKHTQTILLSNRTNQTWNLHPIFEGEHWEGPEFITLEAHQQNKPYEITYRPRTMNLENRKHQGTLFFPLPDGTGWLYALHGTSELPKAVANIYREVPCKTPYTELLPITNWLNKPQRFRVIVEILKPEKPDLSITMKGLDYIDVLSGSKKDYKLNFFSHKEGTYAAKALDNRQHNTAILEKEGKLMTNPHDYPGSLPKDNFLDYNSVIFRNEVTNEFLYYNVSFRVIPSGIIKTIEMVTPVRQVASASIKLENPLPYSVTFSTECQMPDIALPSQFVVPANSEPT

SEQ ID NO: 917259 - protein, 170 aa, Homo sapiens
MISDGCSFRTSINPECILGSAVLGFLLMFAARMKSDKRQSAQKSGWFIANTCCEGGVDLTSLRQMKLQRPMSMLTDVKHFLSSGGNVNEKNDEGVTLKWDEKEQALRKEENQEDEMSSEPSENFEEAGGMIDYQILLSDVTSLAVFPNARNLHMMVPLLSLYKHPAYPVS

SEQ ID NO: 917260 - protein, 138 aa, Homo sapiens
MKQCLALTPGVECSGMIMGNGSLTSWAKEILTLASQSAWITDVNHHTEPTLVISDMICYQKGNGLITDKVLVVWIEDETSHNIPLIQSLIQSKALMLFKSVKAERVIEWLNELKNRIQPCAACKTLSFKDKYRVKAGK

SEQ ID NO: 917261 - protein, 347 aa, Homo sapiens
QGRAEGGKGVPGRRNSKHRDLEKVSSGPGPGPGDTWDLEMIQTQCLPLGSLHPGGEGAHVYEERHQVSVSRTDDVGCVVPSECLRACGAEVGCSNIAYPKLVMELMPIGLRGLMIAVMLAALMSSLTSIFNSSSTLFTMDIWRRLRPRSGERELLLVGRYGGGGQLVIVALIGVSVAWIPVLQDSNSGQLFIYMQSVTSSLAPPVTAVFVLGVFWRRANEQGAFWGLIAGLVVGATRLVLEFLNPAPPCGEPDTRPAVLGSIHYLHFAVALFALSGAVVVAGSLLTPPPQSVQIENLTWWTLAQDVPLGTKAGDGQTPQKHAFWARVCGFNAILLMCVNIFFYAYFA

SEQ ID NO: 917262 - protein, 230 aa, Homo sapiens
MTVDYRKLNQVVSPIAAAVPDVVLLLEQINTSPDTWYAAIDLANAFFSIPVHKAQQKQFAFSWQGQQYTFTVLPQGYISSLALCHNLIRRDLDGFLLLQNITLLVHYVDDIMLIGSKLHPVSRTSLKDSSEGKSSQWAELQAVHLVVHFAGRNTVTRTHNDNSIKLEVKIDTRTLWAPPTFKSMKPKKGVTVLAGVIDPGYQDEISLLLHNGDAEGSVYLVTPKILWRQQ

SEQ ID NO: 917263 - protein, 136 aa, Homo sapiens [sequence omitted]

SEQ ID NO: 917264 - protein, 230 aa, Homo sapiens; identical to SEQ ID NO: 917262

SEQ ID NO: 917265 - protein, 230 aa, Homo sapiens; identical to SEQ ID NO: 917262

SEQ ID NO: 917266 - protein, 136 aa, Homo sapiens
PVSKISIMLMQWIAESYGKKSKYFNFIRNCQAISKVAESFYIPTSDVCFSRQKFPASSIRAAFAGVIEAITREYTKCIQFEGIITSLGQSQKPQSIASPALCGGKSKLEDHPGFMGRRPNKCECWKGDFPVGQLWR

SEQ ID NO: 917267 - protein, 144 aa, Homo sapiens
MSSSSCSLSSISLSPLPSLPSSCCHHDCPVIFTVLITITTCTITIITIIVAVIITIIVTIIITSHLLLNITISFTITISISTVVISTTTSIMAASMLDHLLCAWHHAKLFAHIVSFNFHRDPMKPSCYSHFRGEENEDPKGYTV

SEQ ID NO: 917268 - protein, 4242 aa, Homo sapiens
MPVPHRWPGRAVAKGAELATRPAPPCPVRPGRGALCSKALGGARTAAPASERAAELPERPGPRAPSGRRSAAGRGRSPIQPRARHAVRRPRLSRGLRARAGLGTAGPCARCPNDAARRARPPGAGPGPGACGSGRWRRGPGAAAGPCEPPCLCGLAPGAACRVNCSGRGRGLRTLGPALRIPADATALTAMAKADGDVKKYGSKRGALALTHGHSLLRDVSHNLLRALDVGLLANLSALAELPGPQHLPLPCRNLSGNPFECDCGLAWLPQWAEEQQVRVVQPEAATCAGPGSLAGQPLLGIPLLDSGCGEEYVACLPDNSSGTVAAVSFSAAHEGLLQPEACSAFCFSTGQGLAALSEQGWCLCGAAQPSSASFACLSLCSGPPAPPAPTCRGPTLLQHVFPASPGATLVGPHGPLASGQLAAFHIAAPLPVTATRWDFGDGSAEVDAAGPAASHRYVLPGRYHVTAVLALGAGSALLGTDVQVEAAPAALELVCPSSVQSDESLDLSIQNRGGSGLEAAYSIVALGEEPARAVHPLCPSDTEIFPGNGHCYRLVVEKAAWLQAQEQCQAWAGAALAMVDSPAVQRFLVSRVTRSLDVWIGFSTVQGVEVGPAPQGEAFSLESCQNWLPGEPHPATAEHCVRLGPTGWCNTDLCSAPHSYVCELQPGGPVQDAENLLVGAPSGDLQGPLTPLAQQDGLSAPHEPVEVMVFPGLRLSREAFLTTAEFGTQELRRPAQLRLQVYRLLSTAGTPENGSEPESRSPDNRTQLAPACMPGGRWCPGANICLPLDASCHPQACANGCTSGPGLPGAPYALWREFLFSVPAGPPAQYSVTLHGQDVLMLPGDLVGLQHDAGPGALLHCSPAPGHPGPRAPYLSANASSWLPHLPAQLEGTWGCPACALRLLAQREQLTVLLGLRPNPGLRLPGRYEVRAEVGNGVSRHNLSCSFDVVSPVAGLRVIYPAPRDGRLYVPTNGSALVLQVDSGANATATARWPGGSLSARFENVCPALVATFVPACPWETNDTLFSVVALPWLSEGEHVVDVVVENSASRANLSLRVTAEEPICGLRATPSPEARVLQGVLVRYSPVVEAGSDMVFRWTINDKQSLTFQNVVFNVIYQSAAVFKLSLTASNHVSNVTVNYNVTVERMNRMQGLQVSTVPAVLSPNATLALTAGVLVDSAVEVAFLWTFGDGEQALHQFQPPYNESFPVPDPSVAQVLVEHNVTHTYAAPGEYLLTVLASNAFENLTQQVPVSVRASLPSVAVGVSDGVLVAGRPVTFYPHPLPSPGGVLYTWDFGDGSPVLTQSQPAANHTYASRGTYHVRLEVNNTVSGAAAQADVRVFEELRGLSGAPVVVSAAVQTGDNITWTFDMGDGTVLSGPEATVEHVYLRAQNCTVTVGAGSPAGHLARSLHVLVFVLEVLRVEPAACIPTQPDARLTAYVTGNPAHYLFDWTFGDGSSNTTVRGCPTVTHNFTRSGTFPLALVLSSRVNRAHYFTSICVEPEVGNVTLQPERQFVQLGDEAWLVACAWPPFPYRYTWDFGTEEAAPTRARGPEVTFIYRDPGSYLVTVTASNNISAANDSALVEVQEPVLVTSIKVNGSLGLELQQPYLFSAVGRGRPASYLWDLGDGGWLEGPEVTHAYNSTGDFTVRVAGWNEVSRSEAWLNVTVKRRVRGLVVNASRTVVPLNGSVSFSTSLEAGSDVRYSWVLCDRCTPIPGGPTISYTFRSVGTFNIIVTAENEVGSAQDSIFVYVLQLIEGLQVVGGGRYFPTNHTVQLQAVVRDGTNVSYSWTAWRDRGPALAGSGKGFSLTVLEAGTYHVQLRATNMLGSAWADCTMDFVEPVGWLMVAASPNPAAVNTSVTLSAELAGGSGVVYTWSLEEGLSWETSEPFTTHSFPTPGLHLVTMTAGNPLGSANATVEVDVQVPVSGLSIRASEPGGSFVAAGSSVPFWGQLATGTNVSWCWAVPGGSSKRGPHVTMVFPDAGTFSIRLNASNAVSWVSATYNLTAEEPIVGLVLWASSKVVAPGQLVHFQILLAAGSAVTFRLQVGGANPEVLPGPRFSHSFPRVGDHVVSVRGKNHVSWAQAQVRIVVLEAVSGLQVPNCCEPGIATGTERNFTARVQRGSRVAYAWYFSLQKVQGDSLVILSGRDVTYTPVAAGLLEIQVRAFNALGSENRTLVLEVQDAVQYVALQSGPCFTNRSAQFEAATSPSPRRVAYHWDFGDGSPGQDTDEPRAEHSYLRPGDYRVQVNASNLVSFFVAQATVTVQVLACREPEVDVVLPLQVLMRRSQRNYLEAHVDLRDCVTYQTEYRWEVYRTASCQRPGRPARVALPGVDVSRPRLVLPRLALPVGHYCFVFVVSFGDTPLTQSIQANVTVAPERLVPIIEGGSYRVWSDTRDLVLDGSESYDPNLEDGDQTPLSFHWACVASTQATSPLVLGLQREAGGCALNFGPRGSSTVTIPRERLAAGVEYTFSLTVWKAGRKEEATNQTVLIRSGRVPIVSLECVSCKAQAVYEVSRSSYVYLEGRCLNCSSGSKRGRWAARTFSNKTLVLDETTTSTGSAGMRLVLRRGVLRDGEGYTFTLTVLGRSGEEEGCASIRLSPNRPPLGGSCRLFPLGAVHALTTKVHFECTGWHDAEDAGAPLVYALLLRRCRQGHCEEFCVYKGSLSSYGAVLPPGFRPHFEVGLAVVVQDQLGAAVVALNRSLAITLPEPNGSATGLTVWLHGLTASVLPGLLRQADPQHVIEYSLALVTVLNEYERALDVAAEPKHERQHRAQIRKNITETLVSLRVHTVDDIQQIAAALAQCMGPSRELVCRSCLKQTLHKLEAMMLILQAETTAGTVTPTAIGDSILNITGDLIHLASSDVRAPQPSELGAESPSRMVASQAYNLTSALMRILMRSRVLNEEPLTLAGEEIVAQGKRSDPRSLLCYGGAPGPGCHFSIPEAFSGALANLSDVVQLIFLVDSNPFPFGYISNYTVSTKVASMAFQTQAGAQIPIERLASERAITVKVPNNSDWAARGHRSSANSANSVVVQPQASVGAVVTLDSSNPAAGLHLQLNYTLLDGHYLSEEPEPYLAVYLHSEPRPNEHNCSASRRIRPESLQGADHRPYTFFISPGSRDPAGSYHLNLSSHFRWSALQVSVGLYTSLCQYFSEEDMVWRTEGLLPLEETSPRQAVCLTRHLTAFGASLFVPPSHVRFVFPEPTADVNYIVMLTCAVCLVTYMVMAAILHKLDQLDASRGRAIPFCGQRGRFKYEILVKTGWGRGSGTTAHVGIMLYGVDSRSGHRHLDGDRAFHRNSLDIFRIATPHSLGSVWKIRVWHDNKGLSPAWFLQHVIVRDLQTARSAFFLVNDWLSVETEANGGLVEKEVLAASKGLVPWSHSVEGDAALLRFRRLLVAELQRGFFDKHIWLSIWDRPPRSRFTRIQRATCCVLLICLFLGANAVWYGAVGDSAYSTGHVSRLSPLSVDTVAVGLVSSVVVYPVYLAILFLFRMSRSKVAGSPSPTPAGQQVLDIDSCLDSSVLDSSFLTFSGLHAEQAFVGQMKSDLFLDDSKSWPDLLSDPSIVGSNLRQLARGQAGHGLGPEEDGFSLASPYSPAKSFSASGLVEGLRKVLLPAWCASLAHGLSLLLVAVAVAVSGSATFLASFLGWEPLKVLLEALYFSLVAKRLHPDEDDTLVESPAVTPVSARVPRVRPPHGFALFLAKEEARKVKRLHGMLRSLLVYMLFLLVTLLASYGDASCHGHAYRLQSAIKQELHSRAFLAITRGLWPWMAHVLLPYVHGNQSSPELGPPRLRQSLLVYMLFLLVTLLASYGDASCHGHAYRLQSAIKQELHSRAFLAITRYGHPELWPWMAHVLLPYVHGNQSSPELGPPRLRQVGAPSPALSGVAAVTSQEPTLTPPAPAGLGGFHSPSATPALARPAVGLHAAVTLRLEFPAAGRALAALSVRPFALRRLSAGLSLPLLTSFFFRPPEPCPPQVCLLLFAVHFAVAEARTWHREGRWRVLRLGAWARWLLVALTAATALVRLAQLGAADRQWTRFVRGRPRRFTSFDQVAHVSSAARGLAASLLFLLLVKGCKKTDFSSAAAQHVRFVRQWSVFGKTLCRALPELLGVTLGLVVLGVAYAQLAILLLPAADGLSVILGRLGTRCEPEPSRLQAVFEALLTQFDRLNQATEDVYQLEQQLHSLQGRRSSRAPAGSSRGPSPGLRPALPSRLARASRGVDLATGPSRTPFRAKNKVHPSST

SEQ ID NO: 917269 - protein, 154 aa, Homo sapiens
MIPLQAVRQAVAQTVEELKLKPTMMNLVEAQLMNPDATARQEAVISLGVLGIRSPQVFHLLLDLLDAENHQAVKKSLQETLILCASIDPWIQNKLKNKVLSVYEAPKTNVKAEPTRFQKEPENPEELTIQDFRSLPEDASQAPMRKQSILIFRE

SEQ ID NO: 917270 - protein, 290 aa, Homo sapiens
APLAGKGKQLEEKMRTQVGDEGKLVPVLQTLIKKSSSEASLEAALCLGFLRPCSNMVQEFLLQCLCQGLKTQRMKALRMLVKVMHVHSAPVIKAILDQLCSSSVLEDRFEATQMLKTIGLEQIQAQGLEELTFNLLRRKTHNEPFLGVLGIRSPQVFHLLLDLLDAENHQAVKKSLQETLILCASIDPWIQNKLKNKVLSVYEAPKTNVKAEPTRFQKEPENPEELTIQDFRLAKLNPLFIAKSITKVGQKKTPAFPPCCSKPRKHRPQVIGPWQPRIKKQLRVLAEIAK

SEQ ID NO: 917271 - protein, 193 aa, Homo sapiens
LILIPLQAVRQAVAQTVEELKLKPTMMNLVEAQLMNPDATARQEAVISLGVLGIRSPQVFHLLLDLLDAENHQAVKKSLQETLILCASIDPWIQNKLKNKVLSVYEAPKTNVKAEPTRFQKEPENPEELTIQDFRLAKLNPLFIAKSITKVGQKKTPAFPPCCSKPRKHRPQVIGPWQPRIKKQLRVLAEIAK

SEQ ID NO: 917272 - protein, 161 aa, Homo sapiens
DTVKGMMSSFTGAVLDVHAVSTEMLSFGKRAFYHCFYALTVSLEKHGSLYLGAEERVQAAQKDTPALSTENCMEVMDLYDLTVPLPGSSQNLCPTSELGLPPSYCDHTWWKERGSSLGYCIRTLIPFMKRSLNTFQRRPKAPPPATVTMELRFQHMPCGGS

SEQ ID NO: 917273 - protein, 154 aa, Homo sapiens
METGLQLHAWSPYSNRSNFSLINYYDLKALTNNTKVLKSSRVSIVFWGTKHVTFHKIVMATDSSFACSPGVSGDSSHSLATASRSNSALSCGYALGVADAAGSAGGALWQREGIAHRRCRWVHGSVLRGGRGVSNAKLRQQKQQPQQTEQPTWI

SEQ ID NO: 917274 - protein, 222 aa, Homo sapiens
SSSPMRVIQRGPDPGREQPCWLHSPGITMACFSLDEVPGGFPKTSGPDKILLEFLSCQVLSPSLNLNEKQNNQMYKEFEFQLYKYRETAAKELKTALTYAVVSKIGGFLTSLTSRRKPQTLTAGSAGGPGAASSPAGLGAKMLTPWGQRRPAALSVGPAEPAPIQHSRWPTRAMRGPGSCPVARVGTEAKEALRASEGCQHAVTSHCGDKIGEQVISEPSGI

SEQ ID NO: 917275 - protein, 159 aa, Homo sapiens
LTLQNPSQTCPLTLLEPQLDAVVAHAPEHQPGEGGLGLGHQDEEDPAVEAELDAEDLTLEHLKEEEIWLIFRAEKQIQNYLKKQVTPLFIHFRNNTNNWREIPENLMDQYSEVNAISTACSNGVPECEEMVSGLFKQWMENPNNNPSSLNLSTVWDPLV

SEQ ID NO: 917276 - protein, 134 aa, Homo sapiens
  misc_feature (7)..(7): Xaa can be any naturally occurring amino acid
RGPRDTXARDDRRGEQFRNATLVNEADKLRAALACSKELWILNRLWCSWTWVFSNIQLGTPSSPWMRVPTSHHVPHMPLPGCSKEEPPLGRVWWLIPVIPALWKTEVDGSPEVRSSRPAWPTWRNPVSTKNTKN

SEQ ID NO: 917277 - protein, 375 aa, Homo sapiens
MASEQPCPGLSLSTAQNDLFSTSGNEWVLLNLNVTGYYRVNYDEENWRKIQTQLQRDHSAIPVINRAQIINDAFNLASAHKVPVTLALNNTLFLIEERQYMPWEAALSSLSYFKLMFDRSEVYGPMKNYLKKQVTPLFIHFRNNTNNWREIPENLMDQYSEVNAISTACSNGVPECEEMVSGLFKQWMENPNNNPIHPNLRSTVYCNAIAQGGEEEWDFAWEQFRNATLVNEADKLRAALACSKELWILNRYLSYTLNPDLIRKQDATSTIISITNNVIGQGLVWDFVQSNWKKLFNDYGGGSFSFSNLIQAVTRRFSTEYELQQLEQFKKDNEETGFGSGTRALEQALEKTKANIKWVKENKEVVLQWFTENSK

SEQ ID NO: 917278 - protein, 498 aa, Homo sapiens
LLSAPSPPPQGASVLRMLSSFLSEDVFKQGLASYLHTFAYQNTIYLNLWDHLQEAVNNRSIQLPTTVRDIMNRWTLQMGFPVITVDTSTGTLSQEHFLLDPDSNVTRPSEFNYVWIVPITSIRDGRQQQDYWLIDVRAQNDLFSTSGNEWVLLNLNVTGYYRVNYDEENWRKIQTQLQRDHSAIPVINRAQIINDAFNLASAHKVPVTLALNNTLFLIEERQYMPWEAALSSLSYFKLMFDRSEVYGPMKNYLKKQVTPLFIHFRNNTNNWREIPENLMDQYSEVNAISTACSNGVPECEEMVSGLFKQWMENPNNNPIHPNLRSTVYCNAIAQGGEEEWDFAWEQFRNATLVNEADKLRAALACSKELWILNRYLSYTLNPDLIRKQDATSTIISITNNVIGQGLVWDFVQSNWKKLFNDYGGGSFSFSNLIQAVTRRFSTEYELQQLEQFKKDNEETGFGSGTRALEQALEKTKANIKWVKENKEVVLQWFTENSK

SEQ ID NO: 917279 - protein, 498 aa, Homo sapiens; identical to SEQ ID NO: 917278

SEQ ID NO: 917280 - protein, 498 aa, Homo sapiens; identical to SEQ ID NO: 917278

SEQ ID NO: 917281 - protein, 380 aa, Homo sapiens
  misc_feature (373)..(373): Xaa can be any naturally occurring amino acid
LLSAPSPPPQGASVLRMLSSFLSEDVFKQGLASYLHTFAYQNTIYLNLWDHLQEAVNNRSIQLPTTVRDIMNRWTLQMGFPVITVDTSTGTLSQEHFLLDPDSNVTRPSEFNYVWIVPITSIRDGRQQQDYWLIDVRAQNDLFSTSGNEWVLLNLNVTGYYRVNYDEENWRKIQTQLQRDHSAIPVINRAQIINDAFNLASAHKVPVTLALNNTLFLIEERQYMPWEAALSSLSYFKLMFDRSEVYGPMKNYLKKQVTPLFIHFRNNTNNWREIPENLMDQYSEVNAISTACSNGVPECEEMVSGLFKQWMENPNNNPKKKTKKKKKILCGGHLGHERKSFIKTHFWVGDAGPRVRCSLHTWRPYRWCSPERXNPRPRRT

SEQ ID NO: 917282 - protein, 137 aa, Homo sapiens
LLSAPSPPPQGASVLRMLSSFLSEDVFKQGLASYLHTFAYQNTIYLNLWDHLQEAVNNRSIQLPTTVRDIMNRWTLQMGFPVITVDTSTGTLSQEHFLLDPDSNVTRPSEFNYVWIVPITSIRDGRQQQDYWLIDVR

SEQ ID NO: 917283 - protein, 84 aa, Homo sapiens
MGTLKWEWKARGLRELLLKAVQGPSRTENLLFFWQLEQFKKDNEETGFGSGTRALEQALEKTKANIKWVKENKEVVLQWFTENS

SEQ ID NO: 917284 - protein, 375 aa, Homo sapiens; identical to SEQ ID NO: 917277

SEQ ID NO: 917285 - protein, 498 aa, Homo sapiens; identical to SEQ ID NO: 917278

SEQ ID NO: 917286 - protein, 498 aa, Homo sapiens; identical to SEQ ID NO: 917278

SEQ ID NO: 917287 - protein, 498 aa, Homo sapiens; identical to SEQ ID NO: 917278

SEQ ID NO: 917288 - protein, 365 aa, Homo sapiens
LLSAPSPPPQGASVLRMLSSFLSEDVFKQGLASYLHTFAYQNTIYLNLWDHLQEAVNNRSIQLPTTVRDIMNRWTLQMGFPVITVDTSTGTLSQEHFLLDPDSNVTRPSEFNYVWIVPITSIRDGRQQQDYWLIDVRAQNDLFSTSGNEWVLLNLNVTGYYRVNYDEENWRKIQTQLQRDHSAIPVINRAQIINDAFNLASAHKVPVTLALNNTLFLIEERQYMPWEAALSSLSYFKLMFDRSEVYGPMKNYLKKQVTPLFIHFRNNTNNWREIPENLMDQYSEVNAISTACSNGVPECEEMVSGLFKQWMENPNNNPIHPNLRSTVYCNAIAPAPHANPALGLAWHLSPSALGLISGKPSSRAR

SEQ ID NO: 917289 - protein, 273 aa, Homo sapiens
LLSAPSPPPQGASVLRMLSSFLSEDVFKQGLASYLHTFAYQNTIYLNLWDHLQEAVNNRSIQLPTTVRDIMNRWTLQMGFPVITVDTSTGTLSQEHFLLDPDSNVTRPSEFNYVWIVPITSIRDGRQQQDYWLIDVRAQNDLFSTSGNEWVLLNLNVTGYYRVNYDEENWRKIQTQLQRDHSAIPVINRAQIINDAFNLASAHKVPVTLALNNTLFLIEERQYMPWEAALSSLSYFKLMFDRSEVYGPMKVRRCMVGFKNQFAPVPESALLGS

SEQ ID NO: 917290 - protein, 216 aa, Homo sapiens
LLSAPSPPPQGASVLRMLSSFLSEDVFKQGLASYLHTFAYQNTIYLNLWDHLQEAVNNRSIQLPTTVRDIMNRWTLQMGFPVITVDTSTGTLSQEHFLLDPDSNVTRPSEFNYVWIVPITSIRDGRQQQDYWLIDVRAQNDLFSTSGNEWVLLNLNVTGYYRVNYDEENWRKIQTQLQRDHSAIPVINRAQIINDAFNLARTTGRSWITPLVSGWI

SEQ ID NO: 917291 - protein, 259 aa, Homo sapiens
FFFFFFFFTSTIFYLAAGNSVLQKVELLVHYDTKLFQKAILAQMTANQGLLKLRPPYSTLQIASSSAQRKHADVQGKEFPKADLHGIMDMLWTLHRTCCCSFKLGWAKVEKALALIEGLAGRSSLCSPSPPELEAAQSTEICARISKRMAIKNTGSSAEAPVVISPNRYWPSPPNEIAILTLWQSKGGKVGGWDGMKHMKRLNQDNIYYSVDVDTKSPAMATMPYSHILTIPTLLHPCASSACEMLVSPPPGTHGLPTH

SEQ ID NO: 917292 - protein, 253 aa, Homo sapiens
MTALGLHVLAPPDSSQSEARLPTHGSRRFNSLGHEGRFLLNQGSPGFRRKFLRGGAEPAFRMSPYLPGPCHRASLLGCGWVHSPCCITLHRSVGGLGGPVTAGLCCLRALGWQAPQAPQAPAASTGSTGSRRPPQASTGLHRLPQASTGSTGSTGSRRPPQAPAASTGSTGSTGSRSLHRPPQRPADLHRPPQASTGSRGPPQASTGSRGPPQASTGSRGPPAGLLQSGSPLRFLEGWYGPTTCESDPAVMEV

SEQ ID NO: 917293 - protein, 253 aa, Homo sapiens; identical to SEQ ID NO: 917292

SEQ ID NO: 917294 - protein, 586 aa, Homo sapiens
TWVEPDPEPGSDILGYINIIDPNIWNPQPSQMNRIKIRDTSQASAQHQLWKQSQDSRPRPEPCPPPEPSAPQDGVPAENGLPQGDPEPLPPVPKPRTVPVADVLARDSSDIGWVLELPKEEAPQNGTDHRLPRMAGPGHAPLQRQLSVTQDDPESLGVGLPNGLDGVEEEDDDDYVTLSDQDSHSGSSGRGPGPRRPSVASSVSEEYFEVREHSVPLRRRHSEQVANGPTPPPRRQLSAPHITRGTFVGPQGGSPWAQSRGREEADALKRMQAQRSTDKEAQGQQFHHHRVPASGTRDKDGFPGPPRYRSAADSVQSSTRNAGPAMAGPHHWQAKGGQVPRLLPDPGSPRLAQNARPMTDGRATEEHPSPFGIPYSKLSQSKHLKARTGGSQWASSDSKRRAQAPRDRKDPYAACPSLEPHLLRPQPRLMTRRADRPPGPTRAHWDGRKVGWAGDVGTHLVGAPVPGGHDGQAKGHPGPRQVPCVGVSKHVHGVCTWQVAGGVGNGPGGNGLGVGCLQLPVTTDLVKSWRGQGGTGTVWWLRGPDSLGSPLPSSHKKLPDASNLSFFHLIFPSVWKGVRVEGCFFF

SEQ ID NO: 917295 - protein, 586 aa, Homo sapiens; identical to SEQ ID NO: 917294

SEQ ID NO: 917296 - protein, 586 aa, Homo sapiens; identical to SEQ ID NO: 917294

SEQ ID NO: 917297 - protein, 586 aa, Homo sapiens; identical to SEQ ID NO: 917294

SEQ ID NO: 917298 - protein, 586 aa, Homo sapiens; identical to SEQ ID NO: 917294

SEQ ID NO: 917299 - protein, 400 aa, Homo sapiens
MVSEGGPLAEQQGAMAQNVYGPGVRIGNWNEDVYLEEELMKDFLEKRDKGKLLIQRSRRLKQNLLRPMQLSVTEDGYIHYGDKVMLVNPDDPDTEADVFLRGDLSLCMTPDEIQSHLKDELEVPCGLSAVQAKTPIGRNTFIILSVHRDATGQVLRYGQDFCLGITGGFDNKMLYLSSDHRTLLKSSKRSWLQEVYLTDEVSHVNCWQAAFPDPQLRLEYEGFPVPANAKILINHCHTNRGLAAHRHLFLSTYFGKEAEVVAHTYLDSHRVEKPRNHWMLVTGNPRDASSSMLDLPKPPTEDTRAMEQAMGLDTQLEYVVSNMTSRYINNLLLASELDFDGNLEYWQGETGSPGCSRCMDLCTVTLAHSTSAATSSGAQSQIVESILRAVCSHSLYRKCH

SEQ ID NO: 917300 - protein, 157 aa, Homo sapiens
VFYTFQSRQDMPSEDVLSLQVSLVNLDMKCYPDRVDYIDKVLETAAEIFNKLNLEQYVTFFYFDYESRKSMSCYVLSSVLDYNTEIVSQDQVDSIMNLVSTLIQDQPDQPVEDPDPEDFADEQSVVGPSFICCALRTLTSSTWTVVLCSVSYVICTE

SEQ ID NO: 917301 - protein, 226 aa, Homo sapiens
LYLVPEALDPLFMDPDLAYGTYTGSCGHVMHAVCWQKYFEAVQLSSQQRIHVDLFDLESGEYLCPLCKSLCNTVIPIIPLQPQKINSENADALAQLLTLARWIQTVLARISGYNIRHAKGENPIPIFFNQGMGDSTLEFHSILSFGVESSIKYSNSIKEMVILFATTIYRIGLKVPPDERDPRVPMLTWSTCAFTIQAIGKAHKKTGLEVSVRINFDHSFLNSFFH

SEQ ID NO: 917302 - protein, 142 aa, Homo sapiens
MPGPNSLKSQERCHLMVLTGRLWMSNLSASHTEPEARLAAPVNGMESQGISCILSVQLSDATVVYDDRGQLRFSEETYHLMAEAFTKNSSRYVLLICKLGSDPRATWSLGDLLLPGTESHSLSLTNISGSVFQVKLFCQCHE

SEQ ID NO: 917303 - protein, 140 aa, Homo sapiens
SQGQVPAGMLAAAAPLQGEPPTSCPAHLPHWKVTHPLFGLGSLMFLITQEDGHATGRPRTLHPADGCSRDCQTETTPHTQKAPKSQSLILFLERHCIILDHKICVIGFVSKTWDSGDKTSLQGYLCHCILAAFEAKHFNI

SEQ ID NO: 917304 - protein, 122 aa, Homo sapiens
FSGTGTSWDVGSSRSPARRTSHFLSRTPASLESDAPTVWPRQPDVSHHTGRRSCYRKTSDFASSRCEFKFQLCNLQAQRWICWEAKQAYLQSPQLAWAPPKTLTSFCIHNFVVFSLQKAAQI

SEQ ID NO: 917305 - protein, 214 aa, Homo sapiens
MSPPHPTGTPVHQLNETIDYNEQFTWRLKENYAAEYANALEKGLPDPVLYLAEKFTPSSPCGLYHQYHLAGHYASATLWVAFCFWLLSNVLLSTPAPLYGGLALLTTGAFALFGVFALASISSVPLCPLRLGSSALTTQYGAAFWVTLATGVLCLFLGGAVVSLQYVRPSALRTLLDQSAKDCSQERGGSPLILGDPLHKQAALPDLKCITTNL

SEQ ID NO: 917306 - protein, 436 aa, Homo sapiens
MSFPHFGHPYRGASQFLASASSSTTCCESTQRSVSDVASGSTPAPALCCAPYDSRLLGSARPELGAALGIYGAPYAAAAAAQSYPGYLPYSPEPPSLYGALNPQYEFKEAAGSFTSSLAQPGAYYPYERTLGQYQYERYGAVELSGAGRRKNATRETTSTLKAWLNEHRKNPYPTKGEKIMLAIITKMTLTQVSTWKENKMTWAPKNKGGEERKAEGGEEDSLGCLTADTKEVTASQEARGLRLSDLEDLEEEEEEEEEAEDEEVVATAGDRLTEFRKGAQSLPGPCAAAREGRLERRECGLAAPRFSFNDPSGSEEADFLSAETGSPRLTMHYPCLEKPRIWSLAHTATASAVEGAPPARLGHEVLSAVMIPGQPPASARRLSVPRDSACDESSCIPKAFGNPKFALQGLPLNCAPCPRRSEPVVQCQYPSGAEG

SEQ ID NO: 917307 - protein, 183 aa, Homo sapiens
MKPRGITGFFLLCSFFLPPVSLGWDLWSLRKKGQGPSSIFSLPLPLPCTPLLPTFPDPIDHSSMWCPVCFSMFARKVRSLAPPFLERHEKERVAFMLKVGRGPPGEAGSLGASPRNARRWQMANTCPEALERDEGGKKLGEEEEEADARPEFLRREEAGWERGNDKAAPLVVAGARKRGLRGS

SEQ ID NO: 917308 - protein, 183 aa, Homo sapiens; identical to SEQ ID NO: 917307

SEQ ID NO: 917309 - protein, 226 aa, Homo sapiens
TATTRRKMRTTAAPSGHTCQQITTAPTDGAPGGPFSGISDKWQPLLSTVTGVHRYKWLKQNVQDLYPQSPLLSTIAEFALKEEPVDLEVWQCPESNSLSLFEREPLTDCLKDVDLIPPFNRMLLEVTFGKLYAWTVQNILNVLMDASAKFKELGIQPVPLQTITSENPLGPSLGSIPQARFLLMMLSMLTLQHSANNLDLLLNSGTLALTQTALRLIVLPDVELLI

SEQ ID NO: 917310 - protein, 435 aa, Homo sapiens
MFLGQNITDEELKEKNAELQEKLRLVESEKSEIQLNVKDLKRKLERAQLLLPQASSCSPGGCGSPIRLGPWSRDHQQLQVEADRLGKELQSVSAKLQAQVEENELWNLLNQQQEEKMWRQEEKIQEQEEKMCEQELKIREQEEKMWRQEEKMHEQEEKIREQEDKMWRQEEKIREQEEKIREQEEKMWRQEEKIREQDEKIQEQEEEMWRQEEKIREQEEKRQEKMWRQEKKMREQDEKIREQEEEMWRQEEKIRELEEMMQDQEEKLREVEEKMQEEEEKMQEQEEKIQRQEEKIQEQEEKTWRQEKLLKQEEKIWEQEEKMWRQEEKMWEQEEKMQEQEEKMQRQEEKMREQEVRLWQQEEKMQEQEVRLQELEERLGKLGQKAELLGGAGRESGSQRLPTLTPILQVELKSQEAQSLQQQQDHYRGHLQQHN

SEQ ID NO: 917311 - protein, 197 aa, Homo sapiens
MWGGGGAWLGAGTGGVPAAPRTFAPTSPASEAGELDQQPPGASESPSPGLPRSPERWDAGLGSRQRNMAPWTLWRCCQRVVGWVPVLFITFVVVWSYYAYVVELCVFTIFGNEENGKTVVYLVAFHLFFVMFVWSYWMTIFTSPASPSKEFYLSNSEKERYEKEFSQERQQEILRRAARALPIYTTSASKSLMQSTK

SEQ ID NO: 917312 - protein, 131 aa, Homo sapiens [sequence omitted]

SEQ ID NO: 917313 - protein, 432 aa, Homo sapiens
MWGGGGAWLGAGTGGVPAAPRTFAPTSPASEAGELDQQPPGASESPSPGLPRSPERWDAGLGSRQRNMAPWTLWRCCQRVVGWVPVLFITFVVVWSYYAYVVELCVFTIFGNEENGKTVVYLVAFHLFFVMFVWSYWMTIFTSPASPSKEFYLSNSEKERYEKEFSQERQQEILRRAARALPIYTTSASKTIRYCEKCQLIKPDRAHHCSACDSCILKMDHHCPWVNNCVGFSNYKFFLLFLLYSLLYCLFVAATVLEYFIKFWTNELTDTRAKFHVLFLFFVSAMFFISVLSLFSYHCWLVGKNRTTIESFRAPTFSYGPDGNGFSLGCSKNWRQVFGDEKKYWLLPIFSSLGDGCSFPTRLVGMDPEQASVTNQNEYARSSGSNQPFPIKPLSESKNRLLDSESQWLENGAEEGIVKSGTNNHVTVAIEN

SEQ ID NO: 917314 - protein, 177 aa, Homo sapiens
MFVWSYWMTIFTSPASPSKEFYLSNSEKERYEKEFSQERQQEILRRAARALPIYTTSASKTIRYCEKCQLIKPDRAHHCSACDSIGSTTWEPEPLLWFLWGRQGKQILDWLAAGIAEDSGIGAISSCLVPGPGMMKAEDCCLLECKRQIEEVVLSVGSGLFSLCMKDVLLARKISLR

SEQ ID NO: 917315 - protein, 422 aa, Homo sapiens
MWGGGGAWLGAGTGGVPAAPRTFAPTSPASEAGELDQQPPGASESPSPGLPRSPERWDAGLGSRQRNMAPWTLWRCCQRVVGWVPVLFITFVVVWSYYAYVVELCVFTIFGNEENGKTVVYLVAFHLFFVMFVWSYWMTIFTSPASPSKEFYLSNSEKERYEKEFSQERQQEILRRAARALPIYTTSASKTIRYCEKCQLIKPDRAHHCSACDSCILKMDHHCPWVNNCVGFSNYKFFLLFLLYSLLYCLFVAATVLEYFIKFWTNELTDTRAKFHVLFLFFVSAMFFISVLSLFSYHCWLVGKNRTTIESFRAPTFSYGPDGNGFSLGCSKNWRQVFGDEKKYWLLPIFSSLGDGCSFPTRLVGMDPEQASVTNQNEYARSSGSNQPFPIKPLSESKNRLLDSESQWLENGAEEGIVKSGV

SEQ ID NO: 917316 - protein, 422 aa, Homo sapiens; identical to SEQ ID NO: 917315

SEQ ID NO: 917317 - protein, 107 aa, Homo sapiens
MHSGGAKHPGWVAETTMYTCFSQEARQGPCKRLVDRHAYRIDMSQSCGLEPMRGSAVFVPDGELLLQLVTQVPRWGKEGNGENLQHSGSHHPGRDQSCLRIAQAAAG

SEQ ID NO: 917318 - protein, 281 aa, Homo sapiens
MQAVHSRCTPWCHGTCTNPMECARVFHTGGARLVLCGKNWERLENLYDALISVADPSKQTFTPKLVLLDLSDISCVPDVAKEVLDCYGCVDILINNASVKVKGPAHKISLELDKKIMDANYFGPITLTKALLPNMISRRTGQIVLVNNIQGKFGIPFRTTYAASKHAALGFFDCLRAEVEEYDVVISTVSPTFIRSYHVYPEQGNWEASIWKFFFRKLTYGVHPVEVAEEVMRTVRRKKQEVFMANPIPKAAVYVRTFFPEFFFAVVACGVKEKLNVPEEG

SEQ ID NO: 917319 - protein, 229 aa, Homo sapiens
MQAVHSRCTPWCHGTCTNPMECARVFHTGGARLVLCGKNWERLENLYDALISVADPSKQTFTPKLVLLDLSDISCVPDVAKEVLDCYGCVDILINNASVKVKGPAHKISLELDKKIMDANYFGPITLTKALLPNMISRRTGQIVLVNNIQGKFGIPFRTTFFFRKLTYGVHPVEVAEEVMRTVRRKKQEVFMANPIPKAAVYVRTFFPEFFFAVVACGVKEKLNVPEEG

SEQ ID NO: 917320 - protein, 747 aa, Homo sapiens
MHLQQAEEKGQPPIRPLPRLKPLKLGPNRHLSRFGSTFIMIREWVPGITKVRGSFLGSRCSKLKEYQQRNSPGVPAGVKMKKKNTGSSPETATFGGCHSPGAIQDILKVLVSNLNHSNGVALPHWISGSICLAFLPNIQFQAIDILTLEKADLKTTLYHTKRAARHFEEESKDLAGRLQYSLQRIQELERALSAVSTQQQEEDRDGVSCPEGSMVISRYFCVWLLEAAAVGELGGTVESEHWMQSSEAKCLPCPFLASSSCREAVLQWRLQQTIKEQALLNAHVTQEQDERLREQEEWRVREQERLCEQNERLREQQKTLREQGERLRKQEQRLCKQEERLRKEEERLRKQEKRLWDQEERLWDQEERLWEKEERLQKQEERLMLSQNHKLDKQLAEPQCSFEDLNNENKSALQLEQQVKELQERLGEKETVTSAPSKKGWEEPAASHQNQQLETQLSLVALPGEGDGGQHLDSEEEEAPRPTPNIPEDLESREATEEQARLCGQWKVRRLCHLHLAHLVALAWKEPEAEAPAPGTGGDFVCGESYQALKEAMEKVKSGFMDLPKEKVGRKEQVEKLELGFVQLSGATDGMREYITEYESQGAVPNTRHQEKEDIIRLAQKEEEMKVKLLELQELVLPLVGDHEGHGKFLTAAQNPADEPAPGAPAPQELGAADEQGDFYEVSLDDSEEPAPGAAGEGSPHDNPTAQQIVQLPPVMQDTQEHPGLPGNPCVSFFYQAAENREINIII

SEQ ID NO: 917321 - protein, 747 aa, Homo sapiens; identical to SEQ ID NO: 917320

SEQ ID NO: 917322 - protein, 152 aa, Homo sapiens
MCLFLSLAAQVTCLARAGVAAEEEPQLLLSSFERKLPAGGWLEGLEPCLCGHQPPRAPKRKENRKSTPLWPRRLPIRSPHPRRLPAGRLALLAWTGPGGELQAAKSPLPGAEELGGRAQALLLPGAATRNPLRLGCVQGVGPARRTAASADV

SEQ ID NO: 917323 - protein, 205 aa, Homo sapiens
WFINCDRLLIRAPVYKSFRMKHYPFTSLQTFRSFRVMNNAVNIHVQVFMWTFEDIHRYPLMCRDRNGKLKAGAKVTLFISEYHSFLESSSSFSRSYWLSALNPESLRFQCTGQLLSQLQLPPSDGGGSSGAAAAVKAAAVGGGAPGAVPSVEPVGDTGLCSRSCLQYIWSSQSLTWSQCLCWCLVLPAPQQQLVCLAVRSGRIPH

SEQ ID NO: 917324 - protein, 205 aa, Homo sapiens; identical to SEQ ID NO: 917323

SEQ ID NO: 917325 - protein, 205 aa, Homo sapiens; identical to SEQ ID NO: 917323

SEQ ID NO: 917326 - protein, 205 aa, Homo sapiens; identical to SEQ ID NO: 917323

SEQ ID NO: 917327 - protein, 653 aa, Homo sapiens
IIRADFLLAVFMMESTGVEKTPPEILQKSFLRELVAPVHPAPGEEKGREPALRGGLSLTPPLMSQKTGRKLPAPGCGGACCSAPALAGALYTGRRGASAGPGGGRRAGKARGVVCRFPSAKERSALSCAQSLRPDLKKREGERAKGAIQRARQAGRRPRAAPARALAPRPGGRWVSAAAGPQHPGAPRREWEGGEGAGAREGKVSEPGAGAAGDGNRPDAGAEPGHRKLCSGGESGVRGGRRKLVSGRGAPGIGASASGWRLSLWVLCVTSGPQPAGPPGSGRRCAGGCARVPRPPPPGPRPRPSGAADCFHSSRHAWAGKILNAAWAGRRTAAAQRLQDRERCGARPGDPGTRGSGRTGAGEGAGTGGPGTGGAAAVSRVSKMEKAGPVVDHSGEGGISRLSRPALLQKPSGGTWSKLNVVDAVFTVKIRFKERLGAQPLGSDRFSHCLSCSEPPYSKDGDGGSHIQGLMRRIQRGNPHPGLTDIASQTEDLAQPRRAYQRMASSPELPTEDEQGSWGIDDLHISLQGKENRAGQEGSGVGGVTILDRTVRVDLLDEVLSEPGFEGGICRSNPGGGDGDLGQGGGDGGGEKWSYPEYIVRVDLTGYLEALDMKRERKGGGNLDEGGKSGVWFLEAGEENDHLYQMLLMGPAG

SEQ ID NO: 917328 - protein, 164 aa, Homo sapiens
MSPKLKTIMAAHLFRSTSSPQYSYWGTGATLHCAAGQLPAGRARTALRRRPLAEGELREPALPLGSWFCPERRKRHLQFQPVAAGTATTATAKPELLIGRRRYVLQLHCLHRQCEEGLRWGLTDTCGARGHQTAGSQRQPPPCWLLWLPPGCPDMHCLEPNGTS

SEQ ID NO: 917329 - protein, 116 aa, Homo sapiens
VCVQAQYPTTGIATLTHGQSPQVVFCFREAERLQLRMDCLSPSLHMFTEAEAKSEISLPTILPQAVSFFPTHLLQHLLTFVTVSNFRMNRCRSNISLECSFTSNLLTMISSSIFIF

SEQ ID NO: 917330 - protein, 145 aa, Homo sapiens
MENEFDKSTELGFRRWVITNSSKLKEDILTQCKEAKNHEKRLEELLTGISSLEKNISDLIELKNIARELQQAYTSINSQIDQVEERISEIEDQLNEIKTNDKNHVSISIDAEKAFDKSQYPFMLKTKNNKLGIDGMHVKNHKSYL

SEQ ID NO: 917331 - protein, 150 aa, Homo sapiens
MAHSFLRTSRRVKWLTVVIPSLWEAEGGESRGQEIETILANMVKPCLYKKLAGHGGAHLYSQLLERLRQEDRLNPGSGGCSESRLHPEIAPLYPSLATGTPSHTNKKTKNNNKKNISLPQKETLYPFAVTPHSSLPQQPIICFLPVVDIS

SEQ ID NO: 917332 - protein, 153 aa, Homo sapiens
MPGGRRCHVQQKEKGPRLHAQLTRLFPEERAFADLDSFPQGPQASPRVHRPVAETLKVEMWKKGPTDCPRSRMLQSSREALGEICPHGFLIFVHQQGDVYDPGLQHTFLGRVENSTSQFFLEILRATLREQRTYKCCPIHGDSPWPLGLSEQR

SEQ ID NO: 917333 - protein, 156 aa, Homo sapiens
MVIILCDPWRWQEALDIHGVGAPPEAVGILLDVVWAWKEGQWRQWMILFLADHWMWQGVLGHVWCGLLQVLRSPERVSTLNCMSIGGGNPSPVAPEASWQWKGRGPCMRVPHSLLSGSQSDDFIVPWKPCRIQHVLCSSGSPSCTFEENPEVEVDL

SEQ ID NO: 917334 - protein, 163 aa, Homo sapiens
EPTLKRIMFLSLEITQSIPTTKQGSAFLLFIITHFVLVPAAVIEYYALGSFNNKHLLLTVLEPEKIKVLAVPVSGGNTLPGLWIVIFPTNIRVIEVLVTTQRTWTGQCHAQMKEYSTAAKRNGFDLHEEEEERFESGHSALSPCDCPATPWNSAESPQQEGLT

SEQ ID NO: 917335 - protein, 780 aa, Homo sapiens
MPAPPQESTENLVPFLDTWDSAGEQPLEPEQFLASQQDLKDKLSPQERLPVSPKKLKKDPAQRWSLAEIIGIARQLSTPQSQKQTLQNEYSSTDTPYPSSLPPELRVKSDEPPGPSEQVGPSQFHLEPETQNPETLEDIQSSSLQQEAPAQLPQLLEEEPSSMQQEAPALPPESSMESLTLPNHEVSVQPPGEDQAYYHLPNITVKPADVEVTITSEPTNETESSQAQQETPIQFPEEVEPSATQQEAPIEPPVSPMEHELSISEQQQPVQPSESSREVESSLTQQETPGQPPEHHEVTVSPPGHHQTHHLDSPSVSVKPPDVQLTIAAEPSAEVGTSLVHQEATARLSGSGNDVEPPAIQHGGPPLLPESSEEAGPLAVQQETSFQSPEPINNENPSPTQQEAAAEHPQTAEEGESSLTHQEAPAQTPEFPNVVVAQPPEHSHLTQATVQPLDLGFTITPESMTEVELSPTMKETPTQPPKKVVPQLRVYQGVTNPTPGQDQAQHPVSPSVTVQLLDLGLTITPEPTTEVGHSTAPKRTIVSPKHPEVTLPHPDQVQTQHSHLTRATVQPLDLGFTITPKSMTEVEPSTALMTTAPPPGHPEVTLPPSDKGQAQHSHLTQATVQPLDLELTITTKPTTEVKPSPTTEETSTQPPDLGLAIIPEPTTETGHSTALEKTTAPHPDRVQSLHRSLTEVTGPPTELEPAQDSLVQSESYTQNKALTAPEEQKASTSTNICELCTCGDEMLSCIDLNPEQRLRQVPVPEPNTHNGTFTIFLGTE

SEQ ID NO: 917336 - protein, 920 aa, Homo sapiens
MPAPPQESTENLVPFLDTWDSAGEQPLEPEQFLASQQDLKDKLSPQERLPVSPKKLKKDPAQRWSLAEIIGIARQLSTPQSQKQTLQNEYSSTDTPYPSSLPPELRVKSDEPPGPSEQVGPSQFHLEPETQNPETLEDIQSSSLQQEAPAQLPQLLEEEPSSMQQEAPALPPESSMESLTLPNHEVSVQPPGEDQAYYHLPNITVKPADVEVTITSEPTNETESSQAQQETPIQFPEEVEPSATQQEAPIEPPVSPMEHELSISEQQQPVQPSESSREVESSLTQQETPGQPPEHHEVTVSPPGHHQTHHLDSPSVSVKPPDVQLTIAAEPSAEVGTSLVHQEATARLSGSGNDVEPPAIQHGGPPLLPESSEEAGPLAVQQETSFQSPEPINNENPSPTQQEAAAEHPQTAEEGESSLTHQEAPAQTPEFPNVVVAQPPEHSHLTQATVQPLDLGFTITPESMTEVELSPTMKETPTQPPKKVVPQLRVYQGVTNPTPGQDQAQHPVSPSVTVQLLDLGLTITPEPTTEVGHSTAPKRTIVSPKHPEVTLPHPDQVQTQHSHLTRATVQPLDLGFTITPKSMTEVEPSTALMTTAPPPGHPEVTLPPSDKGQAQHSHLTQATVQPLDLELTITTKPTTEVKPSPTTEETSTQPPDLGLAIIPEPTTETGHSTALEKTTAPHPDRVQSLHRSLTEVTGPPTELEPAQDSLVQSESYTQNKALTAPEEQKASTSTNICELCTCGDEMLSCIDLNPEQRLRQVPVPEPNTHNGTFTILNFQGNYISYIDGNVWKAYSWTEKLILRENNLTELHKDSFEGLLSLQYLDLSCNKIQSIERHTFEPLPFLKFINLSCNVITELSFGTFQAWHGMQFLHKLILPSHMACCLCQLKNSIEAVCRQSSCIAQCCLSTPTLSLDGGVCS

SEQ ID NO: 917337 - protein, 875 aa, Homo sapiens
MPAPPQESTENLVPFLDTWDSAGEQPLEPEQFLASQQDLKDKLSPQERLPVSPKKLKKDPAQRWSLAEIIGIARQLSTPQSQKQTLQNEYSSTDTPYPSSLPPELRVKSDEPPGPSEQVGPSQFHLEPETQNPETLEDIQSSSLQQEAPAQLPQLLEEEPSSMQQEAPALPPESSMESLTLPNHEVSVQPPGEDQAYYHLPNITVKPADVEVTITSEPTNETESSQAQQETPIQFPEEVEPSATQQEAPIEPPVSPMEHELSISEQQQPVQPSESSREVESSLTQQETPGQPPEHHEVTVSPPGHHQTHHLDSPSVSVKPPDVQLTIAAEPSAEVGTSLVHQEATARLSGSGNDVEPPAIQHGGPPLLPESSEEAGPLAVQQETSFQSPEPINNENPSPTQQEAAAEHPQTAEEGESSLTHQEAPAQTPEFPNVVVAQPPEHSHLTQATVQPLDLGFTITPESMTEVELSPTMKETPTQPPKKVVPQLRVYQGVTNPTPGQDQAQHPVSPSVTVQLLDLGLTITPEPTTEVGHSTAPKRTIVSPKHPEVTLPHPDQVQTQHSHLTRATVQPLDLGFTITPKSMTEVEPSTALMTTAPPPGHPEVTLPPSDKGQAQHSHLTQATVQPLDLELTITTKPTTEVKPSPTTEETSTQPPDLGLAIIPEPTTETGHSTALEKTTAPHPDRVQSLHRSLTEVTGPPTELEPAQDSLVQSESYTQNKALTAPEEQKASTSTNICELCTCGDEMLSCIDLNPEQRLRQVPVPEPNTHNGTFTILNFQGNYISYIDGNVWKAYSWTEKLILRENNLTELHKDSFEGLLSLQYLDLSCNKIQSIERHTFEPLPFLKFINLSCNVITELSFGTFQAWHGMQFLHKL

SEQ ID NO: 917338 - protein, 141 aa, Homo sapiens [sequence omitted]

SEQ ID NO: 917339 - protein, 1085 aa, Homo sapiens
MSPPLNSLKIWLEFGHYFALVFPSAPYLSHPLQVSTFCCSKCQAHSTHIRQACLSSHALTCPAAPSLHSHTGAQNPISWEVQRFDGWYNNLMEHRWGSKGSRLQRLVPASYADGVYQPLGEPHLPNPRDLSNTISRGPAGLASLRNRTVLGVFFAPPPALPAGYHVLSDLVSVETPGCPAEFLNIRIPPGDPMFDPDQRGDVVLPFQRSRWDPETGRSPSNPRDPPRTPAGPRPSLARRRPSTRAHPPRAPQANQVTGWLDGSAIYGSSHSWSDALRSFSRGQLASGPDPAFPRDSQNPLLMWAAPDPATGQNGPRGLYGEATGAGRGRLGVCECGLPRSRYRSSPPLRPHALGLLWFRYHNLWAQRLARQHPDWEDEELFQHARKGSSPPTRSAVRAPRRPPFRNIAVYEWLPSFLQKTLPEYTGYRPFLDPSISPEFVVASEQFFSTMVPPGVYMRNASCHFRKVLNKGFQSSQALRVCNNYWIRENPNLNSTQEVNELLLGMASQISELEDNIVVEDLRDYWPGPGKFSRTDYVASSIQRGRDMGLPSYSQALLAFGLDIPRNWSDLNPNVDPQVLEATAALYNQDLSQLELLLGGLLESHGDPGPLFSAIVLDQFVRLRDGDRYWFENTRNGLFSKKEIEDIRNTTLRDVLVAVINIDPSALQPNVFVWHKGAPCPQPKQLTTDGLPQCAPLTVLDFFEGSSPGFAITIIALCCLPLVSLLLSGVVAYFRGREHKKLQKKLKESVKKEAAKDGVPAMEWPGPKERSSPIIIQLLSDRCLQVLNRHLTVLRVVQLQPLQQVNLILSNNRGCRTLLLKIPKEYDLVLLFSSEEERGAFVQQLWDFCVRWALGLHVAEMSEKELFRKAVTKQQRERILEIFFRHLFAQVLDINQADAGTLPLDSSQKVREALTCELSRAEFAESLGLKPQDMFVESMFSLADKDGNGYLSFREFLDILVVFMKGSPEDKSRLMFTMYDLDENGFLSKDEFFTMMRSFIEISNNCLSKAQLAEVVESMFRESGFQDKEELTWEDFHFMLRDHDSELRFTQLCVKGGGGGGNGIRDIFKQNISCRVSFITRTPGER

SEQ ID NO: 917340 - protein, 557 aa, Homo sapiens
LTFMPDKDIGLQGTGVNVDNSDQHVPQGGISDVFNCAPCPQPKQLTTDGLPQCAPLTVLDFFEGSSPGFAITIIALCCLPLVSLLLSGVVAYFRGREHKKLQKKLKESVKKEAAKDGVPAMEWPGPKERSSPIIIQLLSDRCLQVLNRHLTVLRVVQLQPLQQVNLILSNNRGCRTLLLKIPKEYDLVLLFSSEEERGAFVQQLWDFCVRWALGLHVAEMSEKELFRKAVTKQQRERILEIFFRHLFAQVLDINQADAGTLPLDSSQKVREALTCELSRAEFAESLGLKPQDMFVESMFSLADKDGNGYLSFREFLDILVVFMKGSPEDKSRLMFTMYDLDENGFLSKDEFFTMMRSFIEISNNCLSKAQLAEVVESMFRESGFQDKEELTWEDFHFMLRDHDSELRFTQLCVKGGGGGGNGIRDIFKQNISCRVSFITRTPGERSHPQGLGPPAPEAPELGGPGLKKRFGKKAAVPTPRLYTEALQEKMQRGFLAQKLQQYKRFVENYRRHIVCVAIFSAICVGVFADRAYYYGFALPPSDIAQTTLVGIILSRGT

SEQ ID NO: 917341 - protein, 624 aa, Homo sapiens
TSSVQQPDDAAPCCSLSQLELLLGGLLESHGDPGPLFSAIVLDQFVRLRDGDRYWFENTRNGLFSKKEIEDIRNTTLRDVLVAVINIDPSALQPNVFVWHKGAPCPQPKQLTTDGLPQCAPLTVLDFFEGSSPGFAITIIALCCLPLVSLLLSGVVAYFRGREHKKLQKKLKESVKKEAAKDGVPAMEWPGPKERSSPIIIQLLSDRCLQVLNRHLTVLRVVQLQPLQQVNLILSNNRGCRTLLLKIPKEYDLVLLFSSEEERGAFVQQLWDFCVRWALGLHVAEMSEKELFRKAVTKQQRERILEIFFRHLFAQVLDINQADAGTLPLDSSQKVREALTCELSRAEFAESLGLKPQDMFVESMFSLADKDGNGYLSFREFLDILVVFMKGSPEDKSRLMFTMYDLDENGFLSKDEFFTMMRSFIEISNNCLSKAQLAEVVESMFRESGFQDKEELTWEDFHFMLRDHDSELRFTQLCVKGGGGGGNGIRDIFKQNISCRVSFITRTPGERSHPQGLGPPAPEAPELGGPGLKKRFGKKAAVPTPRLYTEALQEKMQRGFLAQKLQQYKRFVENYRRHIVCVAIFSAICVGVFADRAYYYGFALPPSDIAQTTLVGIILSRGTA

SEQ ID NO: 917342 - protein, 169 aa, Homo sapiens
GASSTGLSPRAEAIRAALQVLIFSKNGSVCLMDVAKREIICAFAPPGAFPLEVPWKPVFAVSPDHPCFLLRGDYSHETASTDDAGIQYSVFYFNFEACPLLENISKNCTIPQRDLDNMAFPQALPLEKRCERFLQKSYRKLEKNPEKEEEHWARLQRYSLSLQRENFKK

SEQ ID NO: 917343 - protein, 437 aa, Homo sapiens
SGGSRSFFQTTLGEMIEVPPPGQGRGVQPGISPFWEGQAGGYPEGTTFKSPLEVFAKIKDCYGLGSGQNHFIKDSQWEQQAEIFNASYKKYLDREWEEEPLSTATFYFLLPSCLFAMPPEVKGPSGMACVLGIHWTRSHNFFLYSLNRTLKDKADPEGVWPCAAPIAVSQLSCSSSYLVLACEDGVLTLWDLAKGFPLGVAALPQGCFCQSIHFLKYFSVHKGQNMYPEGQVKSQMKCVVLCTDASLHLVEASGTQGPTISVLVERPVKHLDKTICAVAPVPALPGMVLIFSKNGSVCLMDVAKREIICAFAPPGAFPLEVPWKPVFAVSPDHPCFLLRGDYSHETASTDDAGIQYSVFYFNFEACPLLENISKNCTIPQRDLDNMAFPQALPLEKRCERFLQKSYRKLEKNPEKEEEHWARLQRYSLSLQRENFKK

SEQ ID NO: 917344 - protein, 437 aa, Homo sapiens; identical to SEQ ID NO: 917343

SEQ ID NO: 917345 - protein, 169 aa, Homo sapiens; identical to SEQ ID NO: 917342

SEQ ID NO: 917346 - protein, 159 aa, Homo sapiens
MAFVFQIRMCPPDLHAVQFLGQTNSRLLIGNEQEFLQLLMLPPSRNNEGKSMRTKPRHRRKAAIKVSEKRSRSLIILLILVHTHTHTLPMVSASDNTQLGIGTQPVPYTIQDATVGTGMTSSKVTLSGPEGASEENFSSFLVFPACYFQTRVPFLMFSQ

SEQ ID NO: 917347 - protein, 78 aa, Homo sapiens
TFCTYVAWIVFRRQHLTEIEEEVGRLFRTNMFNIPRRRREDEESGGEKKRMTFVQFRYDLLTFLCSGVFLFFLSFLFF

SEQ ID NO: 917348 - protein, 405 aa, Homo sapiens
MKPELLNSEDEETRLREIKQLNQKSYSQFAAEDSVQWLLKHHPHFTPAAEVKEKGKKGKAVHFAETDGPASDRLTDKRLAAKDDKSAKAVEKRGQQGTITLDDVKFVTLLLLQDTEMQRICSFTTFMRNKNLDNFLMALLYYLSHYLEKNSLEKKPKSYMVGLVEKKEMELVLSELEAAQRYLAQKYCILVLGLAVPDKHHMCCGKEKISDTQKDWKFFESFYTFCTYVAWIVFRRQHLTEIEEEVGRLFRTNMFNIPRRRREDEESGGEKKRMTFVQFRRMMAKRPAIKKAINMRSPVMSTLLPSLREKAQNVFEKKYHQVDVRFPAEMQKHVGTLDSVPMPVVGILGEPRCLFNPHTLHPLDPEENTKSFGRYPSLMENNNMRIQDTLDLVMKTLSSHTSCPK

SEQ ID NO: 917349 - protein, 131 aa, Homo sapiens
MDEARSHHSQQTNTGTENQTPYVLTHKWELNNENIRTQGGEHHTWGPVGAIHLFVSLLLQVSEISAALSPRLLIPTFPLHPGCHPAEMLHSVVGAVGVSEVLLSFLSYGHQSDVRAAEFCLVSSEFIGGTG

SEQ ID NO: 917350 - protein, 173 aa, Homo sapiens
ASTRQWGRSPSAGTMWKTWSRHDLQDAQWFCVITDSKGFRRRPVGSGQDMPSLALGASSALAPTLAVLEEPFSPPLHCGSPFLGWPRPEPAPSACWEVWRERCGLRAALAGQRKFLVGVDSAGPALGEAGRPARKPGAVRGLAPGPAFAVLDFSPGLSCFPAGQGLGPAARHA

SEQ ID NO: 917351 - protein, 140 aa, Homo sapiens
MTIQRQVTILAGTRGSWSKSCAAEEGSEWELWKEEETGSPSELHEASGQERKQESEVSTLGTVARSDDLSKAALGLENLASLDFLGLPGRTGDQSRSDTMTLVKCLLPTYLIHKMGMVPTVEAFCQDDKSHLHKEHVVDT

SEQ ID NO: 917352 - protein, 137 aa, Homo sapiens
MWSVLMELRWVEPSWRTTARAVQREIVGCKPSHRLPTGAVPSGAARKESLSSRPQNGSSTDSLHLAPGKATDTQGLPVKAAGRGGYTLQSHRGRAAKAMGAHLLHQCDLDMRHGVKGNHFGALRFDCCQALNKSHKI

SEQ ID NO: 917353 - protein, 430 aa, Homo sapiens
MINGSQGGMQLACLNKFMGWQTEELYGDFEDLETGDVHKGKSGPDTQRNKEEIDPDKEESAKKKHLDKKRKLKEMFDEEYDEGESTYFDDLKGEMQKQAQLNRTEFEDQDDEARVPYEGFRPGVYVRVEIENVPCEFVQNFDPHYPIILGGLGNSEGNVGDVQVGPFAAYLVPKALWISPPSIILHSHPPQMHLKKHRWYKKILKSRDPIIFSVGWRRFQTIPLYYIEDHNGRQRLLKYTPQHMHCGAAFWEGAFRASFEDKLLMSDIVFMRTWYPVSIPAFYNPVTSLLKPVGEKDTWSGMWTTGQLRLAYGVRLKANKDSLYKKKEKIKNKPKTQAKDRRRLAVMREPHERKILTLLDALSMVHSQKMKKAKEQRHLHNKEHFRAKQKEEEEKLKWQKDLRKKLFQIQGQKERRNQKSSLKGAEGQFQ

SEQ ID NO: 917354 - protein, 430 aa, Homo sapiens; identical to SEQ ID NO: 917353

SEQ ID NO: 917355 - protein, 72 aa, Homo sapiens
RIIWGFALEARIRHEAGPSPLMHHYGNSDILDVTPVIPTALTPGQAPLCIYWSGPWALAENLLRAQCRSCDA

SEQ ID NO: 917356 - protein, 432 aa, Homo sapiens
LLLLVLAIMYVFASHHFRRRSFRGFWLTHHLYILLYALLIIHGSYALIQLPTFHIYFLVPAIIYGGDKLVSLSRKKVEISVVKAELLPSGVTYLQFQRPQGFEYKSGQWVRIACLALGTTEYHPFTLTSAPHEDTLNLHIRAVGPWTTRLRRSTHPQRAMAVLDTQRCPSLGTMLPGFWHWQRISAFPYPESRSSSRPKASLGEDRGASEKTRMFCILPLPVSPFLVSELGQGQAHFISPLSWQLYLDGPFGEGHQEWHKFEVSVLVGGGIGVTPFASILKDLVFKSSLGSQMLCKKIYFIWVTRTQRQFEWLADIIQEVEENDHQDLVSVHIYVTQLAEKFDLRTTMLYICERHFQKVLNRSLFTGLRSITHFGRPPFEPFFNSLQEVHPQVRKIGVFSCGPPGMTKNVEKACQLVNRQDRAHFMHHYENF

SEQ ID NO: 917357 - protein, 157 aa, Homo sapiens
KDLKYFENSEIMHTRNVQLKTKREQDDILQSHARCRHVECEAFLPASPRSRSLPHLPFHLPDCALPVALGLRVQHFCNSFFCKGKVDSCKLDPLLYPANAESPASPLVFKWLYKRGSSTAISNNAIRILLTCATIQIHNSLRTLFRVDHMGAFIKLW

SEQ ID NO: 917358 - protein, 373 aa, Homo sapiens
GRQFFHRRQGMGHRMLMVLPAILPSFVFYVLSPKVTLRNPGSSGRKERPEAGTGSWLGRTRNQVINTLADHRHRGTDFGGSPWLLIITVFLRSYKFAISLCTSYLCVSFLKTIFPSQNGHDGSTDVQQRARRSNRRRQEGIKIVLEDIFTLWRQVETKVRAKIRKMKVTTKVNRHDKINGKRKTAKEHLRKLSMKEREHGEKERQVSEAEENGKLDMKEIHTYMEMFQRAQALRRRAEDYYRCKITPSARKPLCNRVRMAAVEHRHSSGLPYWPYLTAETLKNRMGHQPPPPTQQHSIIDNSLSLKTPSECLLYPLPPSADDNLKTPPECLLTPLPPSALPSADDNLKTPAECLLYPLPPSADDNLKKLTKNK

SEQ ID NO: 917359 - protein, 117 aa, Homo sapiens
MKVTTKVNRHDKINGKRKTAKEHLRKLSMKEREHGEKERQVSEAEENGKLDMKEIHTYMEMFQRAQALRRRAEDYYRCKITPSARKPLCNRDDNLKTPPECVCSLPFHPQRMIISRN

SEQ ID NO: 917360 - protein, 156 aa, Homo sapiens
  misc_feature (140)..(140): Xaa can be any naturally occurring amino acid
  misc_feature (142)..(142): Xaa can be any naturally occurring amino acid
AGSPSPTPAGQQVLDVDSCLDSSVLDSSFLTFEASTLSEGSTGGPAALAQLGLKTLCTSQQAFAGQMKSDFFLEDSKQVINTLADHRHRGTDFGGSPWLLIITVFLRSYKFAISLCTSYLWVINTLADHRHRGTDFGGSXWXLIITVFLRSYKFAI

SEQ ID NO: 917361 - protein, 291 aa, Homo sapiens
KHIHIGVYLFHIQFAISLCTSYLCVSFLKTIFPSQNGHDGSTDVQQRARRSNRRRQEGIKIVLEDIFTLWRQVETKVRAKIRKMKVTTKVNRHDKINGKRKTAKEHLRKLSMKEREHGEKERQVSEAEENGKLDMKEIHTYMEMFQRAQALRRRAEDYYRCKITPSARKPLCNRVRMAAVEHRHSSGLPYWPYLTAETLKNRMGHQPPPPTQQHSIIDNSLSLKTPSECLLYPLPPSADDNLKTPPECLLTPLPPSALPSADDNLKTPAECLLYPLPPSADDNLKKLTKNK

SEQ ID NO: 917362 - protein, 228 aa, Homo sapiens
MLLSWRRWLVETKVRAKIRKMKVTTKVNRHDKINGKRKTAKEHLRKLSMKEREHGEKERQVSEAEENGKLDMKEIHTYMEMFQRAQALRRRAEDYYRCKITPSARKPLCNRVRMAAVEHRHSSGLPYWPYLTAETLKNRMGHQPPPPTQQHSIIDNSLSLKTPSECLLYPLPPSADDNLKTPPECLLTPLPPSALPSADDNLKTPAECLLYPLPPSADDNLKKLTKNK

SEQ ID NO: 917363 - protein, 227 aa, Homo sapiens
MKVTTKVNRHDKINGKRKTAKEHLRKLSMKEREHGEKERQVSEAEENGKLDMKEIHTYMEMFQRAQALRRRAEDYYRCKITPSARKPLCNRVRMAAVEHRHSSGLPYWPYLTAETLKNRMGHQPPPPTQQHSIIDNSLSLKTPSECLLTPLPPSALPSADDNLKTPAECLLYPLPPSADDNLKTPPECLLTPLPPSAPPSVDDNLKTPPECVCSLPFHPQRMIISRN

SEQ ID NO: 917364 - protein, 158 aa, Homo sapiens
MKVTTKVNRHDKINGKRKTAKEHLRKLSMKEREHGEKERQVSEAEENGKLDMKEIHTYMEMFQRAQALRRRAEDYYRCKITPSARKPLCNRVRMAAVEHRHSSGLPYWPYLTAETLKNRMGHQPPPPTQQHSIIDNSLSLKTPSECRASALSPSTLSG

SEQ ID NO: 917365 - protein, 158 aa, Homo sapiens; identical to SEQ ID NO: 917364

SEQ ID NO: 917366 - protein, 122 aa, Homo sapiens
MKVTTKVNRHDKINGKRKTAKEQEMFQRAQALRRRAEDYYRCKITPSARKPLCNRVRMAAVEHRHSSGLPYWPYLTAETLKNRMGHQPPPPTQQHSIIDNSLSLKTPSECRASALSPSTLSG

SEQ ID NO: 917367 - protein, 109 aa, Homo sapiens
MKVTTKVNRHDKINGKRKTAKEHLRKLSMKEREHGEKERQVSEAEENGKLDMKEIHTYMEMFQRAQALRRRAEDYYRCKITPSARKPLCNRCTYNLVLPGSEKKYYSHA

SEQ ID NO: 917368 - protein, 130 aa, Homo sapiens
MKEREHGEKERQVSEAEENGKLDMKEIHTYMEMFQRAQALRRRAEDYYRCKITPSARKPLCNRVRMAAVEHRHSSGLPYWPYLTAETLKNRMGHQPPPPTQQHSIIDNSLSLKTPSECRASALSPSTLSG

SEQ ID NO: 917369 - protein, 112 aa, Homo sapiens
AGSPSPTPAGQQVLDVDSCLDSSVLDSSFLTFEASTLSEGSTGGPAALAQLGLKTLCTSQQAFAGQMKSDFFLEDSKSDLEEPWELRKEGAPRSRDRELVGEDQKSGYQYSG

SEQ ID NO: 917370 - protein, 112 aa, Homo sapiens; identical to SEQ ID NO: 917369

SEQ ID NO: 917371 - protein, 107 aa, Homo sapiens
MKEIHTYMEMFQRAQALRRRAEDYYRCKITPSARKPLCNRVRMAAVEHRHSSGLPYWPYLTAETLKNRMGHQPPPPTQQHSIIDNSLSLKTPSECRASALSPSTLSG

SEQ ID NO: 917372 - protein, 208 aa, Homo sapiens
MKVTTKVNRHDKINGKRKTAKEHLRKLSMKEREHGEKERQVSEAEENGKLDMKEIHTYMEMFQRAQALRRRAEDYYRCKITPSARKPLCNRVRMAAVEHRHSSGLPYWPYLTAETLKNRMGHQPPPPTQQHSIIDNSLSLKTPSECLLYPLPPSADDNLKTPPECLLTPLPPSALPSADDNLKTPAECLLYPLPPSADDNLKKLTKNK

SEQ ID NO: 917373 - protein, 208 aa, Homo sapiens; identical to SEQ ID NO: 917372

SEQ ID NO: 917374 - protein, 158 aa, Homo sapiens; identical to SEQ ID NO: 917364

SEQ ID NO: 917375 - protein, 109 aa, Homo sapiens; identical to SEQ ID NO: 917367

SEQ ID NO: 917376 - protein, 153 aa, Homo sapiens
MKVTTKVNRHDKINGKRKTAKEHLRKLSMKEREHGEKERQVSEAEENGKLDMKEIHTYMEMFQRAQALRRRAEDYYRCKITPSARKPLCNRVRMAAVEHRHSSGLPYWPYLTAETLKNRMGHQPPPPTQQHSIIDNSLSLKTPSECLLTPLLS

SEQ ID NO: 917377 - protein, 108 aa, Homo sapiens
MKVTTKVNRHDKINGKRKTAKEQDYYRCKITPSARKPLCNRVRMAAVEHRHSSGLPYWPYLTAETLKNRMGHQPPPPTQQHSIIDNSLSLKTPSECRASALSPSTLSG

SEQ ID NO: 917378 - protein, 107 aa, Homo sapiens; identical to SEQ ID NO: 917371

SEQ ID NO: 917379 - protein, 117 aa, Homo sapiens; identical to SEQ ID NO: 917359

SEQ ID NO: 917380 - protein, 112 aa, Homo sapiens; identical to SEQ ID NO: 917369

SEQ ID NO: 917381 - protein, 154 aa, Homo sapiens
RCLSQESYRRHRHMWIWFRRCDLALEPEPDEMMKEALGSLGSHSPQMAEAPDMPVTSFQMIPATLLHEGPRVTTAPVISVDTQSLRGIIWAANLTWRPESRNSGNGTLPAFSGRVLVAPSDPGLLLVYVAPGENASYLWRSCSNLYLSPRQCPL

SEQ ID NO: 917382 - protein, 168 aa, Homo sapiens
MWSKVETYEPCDGHLEREKGRRLEIGLFTLSAKAADKALDATGPGWGLRHCCASQIPGDVGVAGVPGTHGLCHTSQYHQTLARVYTSSETGITSSCLKRDTQATLLCLPTKLLSPRSSRHLLELSVKSTTGKAFLHRATSVQCPSRLSQCCVSACVPKQHPWYHMDRL

SEQ ID NO: 917383 - protein, 160 aa, Homo sapiens
LSLLSPELMVPVAGRPLCRSSSMELLLLLPLHIPREQMLLAGAMAKLLRASWVVSVKSLLPVGCWSQRSELGWVGSMGHGCSSGILQMLSGWHPLAEVTLRGGDRGASPPGVTGCRKEEHTSQYKATPTATWAQKACQNQGCCSRSCYIHSAEKTHSSVD

SEQ ID NO: 917384 - protein, 170 aa, Homo sapiens
FHFFCDSSVTSGHLGVYMQDLLPWEKGWGQSWPTTATGTNLPLCCQSSRLKARLEGRSLCTSDYDPSIIYLSIYLSIYLSFIYLSSIYYLSSIYLSSIYYLSSVYHLSIYLSIYLSIYLSIYLSVFTAINTMTASHSNTLDPGVKSSSSTNQLCNLEQVLIFSTSHFSLL

SEQ ID NO: 917385 - protein, 644 aa, Homo sapiens
HLSSASVMLGAADWSSVTHAGDVCKCLCGLRSKAQVCSRSAGLGVYLPGAGLSQLSLSAGKYTDLKITIPRPSVASTQSTSGSFHCGQQPEKKDLQPMEPTVELYSPRENFSGLVVTEGEPPSGGSRTDLGLQIDHIGHDMLPNIRESNKSQDLGPKELPDHNRLVVREFENLPGETEEKSILLESDNEDEKLSRGQHCIEISSLPGDLVIVEKDHSATTEPLDVTKTQTFSVVPNQDKNNEIMKLLTVGTSEISSRDIDPHVEGQIGQVAEMQKNKISKDDDIMSEDLPGHQGDLSTFLHQEGKREKITPRNGELFHCVSENEHGAPTRKDMVRSSFVTRHSRIPVLAQEIDSTLESSSPVSAKEKLLQKKAYQPDLVKLLVEKRQFKSFLGDLSSASDKLLEEKLATVPAPFCEEEVLTPFSRLTVDSHLSRSAEDSFLSPIISQSRKSKIPRPVSWVNTDQVNSSTSSQFFPRPPPGKPPTRPGVEARLRRYKVLGSSNSDSDLFSRLAQILQNGSQKPRSTTQCKSPGSPHNPKTPPKSPVVPRRSPSASPRSSSLPRTSSSSPSRAGRPHHDQRSSSPHLGRSKSPPSHSGSSSSRRSCQQEHCKPSKNGLKGSGSLHHHSASTKTPQGKSKPASKLSR

SEQ ID NO: 917386 - protein, 584 aa, Homo sapiens
FIGTSLFIATSLFIGTSLFIGTSLFIGTQPEKKDLQPMEPTVELYSPRENFSGLVVTEGEPPSGGSRTDLGLQIDHIGHDMLPNIRESNKSQDLGPKELPDHNRLVVREFENLPGETEEKSILLESDNEDEKLSRGQHCIEISSLPGDLVIVEKDHSATTEPLDVTKTQTFSVVPNQDKNNEIMKLLTVGTSEISSRDIDPHVEGQIGQVAEMQKNKISKDDDIMSEDLPGHQGDLSTFLHQEGKREKITPRNGELFHCVSENEHGAPTRKDMVRSSFVTRHSRIPVLAQEIDSTLESSSPVSAKEKLLQKKAYQPDLVKLLVEKRQFKSFLGDLSSASDKLLEEKLATVPAPFCEEEVLTPFSRLTVDSHLSRSAEDSFLSPIISQSRKSKIPRPVSWVNTDQVNSSTSSQFFPRPPPGKPPTRPGVEARLRRYKVLGSSNSDSDLFSRLAQILQNGSQKPRSTTQCKSPGSPHNPKTPPKSPVVPRRSPSASPRSSSLPRTSSSSPSRAGRPHHDQRSSSPHLGRSKSPPSHSGSSSSRRSCQQEHCKPSKNGLKGSGSLHHHSASTKTPQGKSKPASKLSR

SEQ ID NO: 917387 - protein, 667 aa, Homo sapiens
PSDEEPEVLQVLEASPQDEKLQLGPWAENDHLKKETSGVVLALSAEGPPTAASEQYTDRLELQPGAASQFIAATPTSLMEAQAEGPLTAITIPRPSVASTQSTSGSFHCGQQPEKKDLQPMEPTVELYSPRENFSGLVVTEGEPPSGGSRTDLGLQIDHIGHDMLPNIRESNKSQDLGPKELPDHNRLVVREFENLPGETEEKSILLESDNEDEKLSRGQHCIEISSLPGDLVIVEKDHSATTEPLDVTKTQTFSVVPNQDKNNEIMKLLTVGTSEISSRDIDPHVEGQIGQVAEMQKNKISKDDDIMSEDLPGHQGDLSTFLHQEGKREKITPRNGELFHCVSENEHGAPTRKDMVRSSFVTRHSRIPVLAQEIDSTLESSSPVSAKEKLLQKKAYQPDLVKLLVEKRQFKSFLGDLSSASDKLLEEKLATVPAPFCEEEVLTPFSRLTVDSHLSRSAEDSFLSPIISQSRKSKIPRPVSWVNTDQVNSSTSSQFFPRPPPGKPPTRPGVEARLRRYKVLGSSNSDSDLFSRLAQILQNGSQKPRSTTQCKSPGSPHNPKTPPKSPVVPRRSPSASPRSSSLPRTSSSSPSRAGRPHHDQRSSSPHLGRSKSPPSHSGSSSSRRSCQQEHCKPSKNGLKGSGSLHHHSASTKTPQGKSKPASKLSR

SEQ ID NO: 917388 - protein, 150 aa, Homo sapiens
MTASPGEEENHLSQEKWLYTYFNLKSSGLHLSPVLDASCPQTSDSEFFSFWTPGLTPVVCQGLSGHWPHNEGCTVGFPTSEVLGLRLIHYWLSRSSTCRQPIVGFYLVTMLGTGGGIPLQKTKTNNASENFRMVDRDLKERRHMTPKDIC

SEQ ID NO: 917389 - protein, 116 aa, Homo sapiens
  misc_feature (98)..(98): Xaa can be any naturally occurring amino acid
MGKRYIARNQEGLGPIVHDRKSQTLPVSRNRTGMMHARLQQLGSLDNSLTFNHSYGHSDADVLHQSLLEANIATEVCLTALDTLSLFTLAFKNQLLGXGYQTRRMRKCSISWDWAI

SEQ ID NO: 917390 - protein, 1658 aa, Homo sapiens
IKYNRKISADFHVDLNHFSVRQMLATTSPALMNGSGQSPSVLKGILHEAAMQYPKQGIFSVTCPHPDIFLVARIEKVLQGSITHCAEPYMKSSDSSKVAQKVLKNAKQACQRLGQYRMPFAWAARTLFKDASGNLDKNARFSAIYRQDSNKLSNDDMLKLLADFRKPEKMAKLPVILGNLDITIDNVSSDFPNYVNSSYIPTKQFETCSKTPITFEVEEFVPCIPKHTQPYTIYTNHLYVYPKYLKYDSQKSFAKARNIAICIEFKDSDEEDSQPLKCIYGRPGGPVFTRSAFAAVLHHHQNPEFYDEIKIELPTQLHEKHHLLLTFFHVSCDNSSKGSTKKRDVVETQVGYSWLPLLKDGRVVTSEQHIPVSANLPSGYLGYQELGMGRHYGPEIKWVDGGKPLLKISTHLVSTVYTQDQHLHNFFQYCQKTESGAQALGNELVKYLKSLHAMEGHVMIAFLPTILNQLFRVLTRATQEEVAVNVTRVIIHVVAQCHEEGLESHLRSYVKYAYKAEPYVASEYKTVHEELTKSMTTILKPSADFLTSNKLLKYSWFFFDVLIKSMAQHLIENSKVKLLRNQRFPASYHHAVETVVNMLMPHITQKFRDNPEASKNANHSLAVFIKRCFTFMDRGFVFKQINNYISCFAPGDPKTLFEYKFEFLRVVCNHEHYIPLNLPMPFGKGRIQRYQDLQLDYSLTDEFCRNHFLVGLLLREVGTALQEFREVRLIAISVLKNLLIKHSFDDRYASRSHQARIATLYLPLFGLLIENVQRINVRDVSPFPVNAGMTVKDESLALPAVNPLVTPQKGSTLDNSLHKDLLGAISGIASPYTTSTPNINSVRNADSRGSLISTDSGNSLPERNSEKSNSLDKHQQSSTLGNSVVRCDKLDQSEIKSLLMCFLYILKSMSDDALFTYWNKASTSELMDFFTISEVCLHQFQYMGKRYIASVRKISSVLGISVDNGYGHSDADVLHQSLLEANIATEVCLTALDTLSLFTLAFKNQLLADHGHNPLMKKVFDVYLCFLQKHQSETALKNVFTALRSLIYKFPSTFYEGRADMCAALCYEILKCCNSKLSSIRTEASQLLYFLMRNNFDYTGKKSFVRTHLQVIISVSQLIADVVGIGGTRFQQSLSIINNCANSDRLIKHTSFSSDVKDLTKRIRTVLMATAQMKEHENDPEMLVDLQYSLAKSYASTPELRKTWLDSMARIHVKNGDLSEAAMCYVHVTALVAEYLTRKGVFRQGCTAFRVITPNIDEEASMMEDVGMQDVHFNEDVLMELLEQCADGLWKAERYELIADIYKLIIPIYEKRRDFERLAHLYDTLHRAYSKVTEVMHSGRRLLGTYFRVAFFGQGFFEDEDGKEYIYKEPKLTPLSEISQRLLKLYSDKFGSENVKMIQDSGKVNPKDLDSKYAYIQVTHVIPFFDEKELQERKTEFERSHNIRRFMFEMPFTQTGKRQGGVEEQCKRRTILTAIHCFPYVKKRIPVMYQHHTDLNPIEVAIDEMSKKVAELRQLCSSAEVDMIKLQLKLQGSVSVQVNAGPLAYARAFLDDTNTKRYPDNKVKLLKEVFRQFVEACGQALAVNERLIKEDQLEYQEEMKANYREMAKELSEIMHEREICPLEEKTSVLPNSLHIFNAISGTPTSTMVHGMTSSSSVV

SEQ ID NO: 917391 - protein, 1681 aa, Homo sapiens
IKYNRKISADFHVDLNHFSVRQMLATTSPALMNGSGQSPSVLKGILHEAAMQYPKQGIFSVTCPHPDIFLVARIEKVLQGSITHCAEPYMKSSDSSKVAQKVLKNAKQACQRLGQYRMPFAWAARTLFKDASGNLDKNARFSAIYRQDSNKLSNDDMLKLLADFRKPEKMAKLPVILGNLDITIDNVSSDFPNYVNSSYIPTKQFETCSKTPITFEVEEFVPCIPKHTQPYTIYTNHLYVYPKYLKYDSQKSFAKARNIAICIEFKDSDEEDSQPLKCIYGRPGGPVFTRSAFAAVLHHHQNPEFYDEIKIELPTQLHEKHHLLLTFFHVSCDNSSKGSTKKRDVVETQVGYSWLPLLKDGRVVTSEQHIPVSANLPSGYLGYQELGMGRHYGPEIKWVDGGKPLLKISTHLVSTVYTQDQHLHNFFQYCQKTESGAQALGNELVKYLKSLHAMEGHVMIAFLPTILNQLFRVLTRATQEEVAVNVTRVIIHVVAQCHEEGLESHLRSYVKYAYKAEPYVASEYKTVHEELTKSMTTILKPSADFLTSNKLLKYSWFFFDVLIKSMAQHLIENSKVKLLRNQRFPASYHHAVETVVNMLMPHITQKFRDNPEASKNANHSLAVFIKRCFTFMDRGFVFKQINNYISCFAPGDPKTLFEYKFEFLRVVCNHEHYIPLNLPMPFGKGRIQRYQDLQLDYSLTDEFCRNHFLVGLLLREVGTALQEFREVRLIAISVLKNLLIKHSFDDRYASRSHQARIATLYLPLFGLLIENVQRINVRDVSPFPVNAGMTVKDESLALPAVNPLVTPQKGSTLDNSLHKDLLGAISGIASPYTTSTPNINSVRNADSRGSLISTDSGNSLPERNSEKSNSLDKHQQSSTLGNSVVRCDKLDQSEIKSLLMCFLYILKSMSDDALFTYWNKASTSELMDFFTISEVCLHQFQYMGKRYIASVRKISSVLGISVDNGYGHSDADVLHQSLLEANIATEVCLTALDTLSLFTLAFKNQLLADHGHNPLMKKVFDVYLCFLQKHQSETALKNVFTALRSLIYKFPSTFYEGRADMCAALCYEILKCCNSKLSSIRTEASQLLYFLMRNNFDYTGKKSFVRTHLQVIISVSQLIADVVGIGGTRFQQSLSIINNCANSDRLIKHTSFSSDVKDLTKRIRTVLMATAQMKEHENDPEMLVDLQYSLAKSYASTPELRKTWLDSMARIHVKNGDLSEAAMCYVHVTALVAEYLTRKEAVQWEPPLLPHSHSACLRRSRGGVFRQGCTAFRVITPNIDEEASMMEDVGMQDVHFNEDVLMELLEQCADGLWKAERYELIADIYKLIIPIYEKRRDFERLAHLYDTLHRAYSKVTEVMHSGRRLLGTYFRVAFFGQGFFEDEDGKEYIYKEPKLTPLSEISQRLLKLYSDKFGSENVKMIQDSGKVNPKDLDSKYAYIQVTHVIPFFDEKELQERKTEFERSHNIRRFMFEMPFTQTGKRQGGVEEQCKRRTILTAIHCFPYVKKRIPVMYQHHTDLNPIEVAIDEMSKKVAELRQLCSSAEVDMIKLQLKLQGSVSVQVNAGPLAYARAFLDDTNTKRYPDNKVKLLKEVFRQFVEACGQALAVNERLIKEDQLEYQEEMKANYREMAKELSEIMHEREICPLEEKTSVLPNSLHIFNAISGTPTSTMVHGMTSSSSVV

SEQ ID NO: 917392 - protein, 1693 aa, Homo sapiens
IKYNRKISADFHVDLNHFSVRQMLATTSPALMNGSGQSPSVLKGILHEAAMQYPKQGIFSVTCPHPDIFLVARIEKVLQGSITHCAEPYMKSSDSSKVAQKVLKNAKQACQRLGQYRMPFAWAARTLFKDASGNLDKNARFSAIYRQDSNKLSNDDMLKLLADFRKPEKMAKLPVILGNLDITIDNVSSDFPNYVNSSYIPTKQFETCSKTPITFEVEEFVPCIPKHTQPYTIYTNHLYVYPKYLKYDSQKSFAKARNIAICIEFKDSDEEDSQPLKCIYGRPGGPVFTRSAFAAVLHHHQNPEFYDEIKIELPTQLHEKHHLLLTFFHVSCDNSSKGSTKKRDVVETQVGYSWLPLLKDGRVVTSEQHIPVSANLPSGYLGYQELGMGRHYGPEIKWVDGGKPLLKISTHLVSTVYTQDQHLHNFFQYCQKTESGAQALGNELVKYLKSLHAMEGHVMIAFLPTILNQLFRVLTRATQEEVAVNVTRVIIHVVAQCHEEGLESHLRSYVKYAYKAEPYVASEYKTVHEELTKSMTTILKPSADFLTSNKLLKYSWFFFDVLIKSMAQHLIENSKVKLLRNQRFPASYHHAVETVVNMLMPHITQKFRDNPEASKNANHSLAVFIKRCFTFMDRGFVFKQINNYISCFAPGDPKTLFEYKFEFLRVVCNHEHYIPLNLPMPFGKGRIQRYQDLQLDYSLTDEFCRNHFLVGLLLREVGTALQEFREVRLIAISVLKNLLIKHSFDDRYASRSHQARIATLYLPLFGLLIENVQRINVRDVSPFPVNAGMTVKDESLALPAVNPLVTPQKGSTLDNSLHKDLLGAISGIASPYTTSTPNINSVRNADSRGSLISTDSGNSLPERNSEKSNSLDKHQQSSTLGNSVVRCDKLDQSEIKSLLMCFLYILKSMSDDALFTYWNKASTSELMDFFTISEVCLHQFQYMGKRYIASVRKISSVLGISVDNGYGHSDADVLHQSLLEANIATEVCLTALDTLSLFTLAFKNQLLADHGHNPLMKKVFDVYLCFLQKHQSETALKNVFTALRSLIYKFPSTFYEGRADMCAALCYEILKCCNSKLSSIRTEASQLLYFLMRNNFDYTGKKSFVRTHLQVIISVSQLIADVVGIGGTRFQQSLSIINNCANSDRLIKHTSFSSDVKDLTKRIRTVLMATAQMKEHENDPEMLVDLQYSLAKSYASTPELRKTWLDSMARIHVKNGDLSEAAMCYVHVTALVAEYLTRKDLLSGDAFPHVLEAVQWEPPLLPHSHSACLRRSRGGVFRQGCTAFRVITPNIDEEASMMEDVGMQDVHFNEDVLMELLEQCADGLWKAERYELIADIYKLIIPIYEKRRDFERLAHLYDTLHRAYSKVTEVMHSGRRLLGTYFRVAFFGQGFFEDEDGKEYIYKEPKLTPLSEISQRLLKLYSDKFGSENVKMIQDSGKVNPKDLDSKYAYIQVTHVIPFFDEKELQERKTEFERSHNIRRFMFEMPFTQTGKRQGGVEEQCKRRTILTAIHCFPYVKKRIPVMYQHHTDLNPIEVAIDEMSKKVAELRQLCSSAEVDMIKLQLKLQGSVSVQVNAGPLAYARAFLDDTNTKRYPDNKVKLLKEVFRQFVEACGQALAVNERLIKEDQLEYQEEMKANYREMAKELSEIMHEREICPLEEKTSVLPNSLHIFNAISGTPTSTMVHGMTSSSSVV

SEQ ID NO: 917393 - protein, 740 aa, Homo sapiens
MDFFTISEVCLHQFQYMGKRYIARTGMMHARLQQLGSLDNSLTFNHSYGHSDADVLHQSLLEANIATEVCLTALDTLSLFTLAFKNQLLADHGHNPLMKKVFDVYLCFLQKHQSETALKNVFTALRSLIYKFPSTFYEGRADMCAALCYEILKCCNSKLSSIRTEASQLLYFLMRNNFDYTGKKSFVRTHLQVIISVSQLIADVVGIGGTRFQQSLSIINNCANSDRLIKHTSFSSDVKDLTKRIRTVLMATAQMKEHENDPEMLVDLQYSLAKSYASTPELRKTWLDSMARIHVKNGDLSEAAMCYVHVTALVAEYLTRKGVFRQGCTAFRVITPNIDEEASMMEDVGMQDVHFNEDVLMELLEQCADGLWKAERYELIADIYKLIIPIYEKRRDFERLAHLYDTLHRAYSKVTEVMHSGRRLLGTYFRVAFFGQGFFEDEDGKEYIYKEPKLTPLSEISQRLLKLYSDKFGSENVKMIQDSGKVNPKDLDSKYAYIQVTHVIPFFDEKELQERKTEFERSHNIRRFMFEMPFTQTGKRQGGVEEQCKRRTILTAIHCFPYVKKRIPVMYQHHTDLNPIEVAIDEMSKKVAELRQLCSSAEVDMIKLQLKLQGSVSVQVNAGPLAYARAFLDDTNTKRYPDNKVKLLKEVFRQFVEACGQALAVNERLIKEDQLEYQEEMKANYREMAKELSEIMHEREICPLEEKTSVLPNSLHIFNAISGTPTSTMVHGMTSSSSVV

SEQ ID NO: 917394 - protein, 545 aa, Homo sapiens
DEDAVFADVVGIGGTRFQQSLSIINNCANSDRLIKHTSFSSDVKDLTKRIRTVLMATAQMKEHENDPEMLVDLQYSLAKSYASTPELRKTWLDSMARIHVKNGDLSEAAMCYVHVTALVAEYLTRKGVFRQGCTAFRVITPNIDEEASMMEDVGMQDVHFNEDVLMELLEQCADGLWKAERYELIADIYKLIIPIYEKRRDFERLAHLYDTLHRAYSKVTEVMHSGRRLLGTYFRVAFFGQGFFEDEDGKEYIYKEPKLTPLSEISQRLLKLYSDKFGSENVKMIQDSGKVNPKDLDSKYAYIQVTHVIPFFDEKELQERKTEFERSHNIRRFMFEMPFTQTGKRQGGVEEQCKRRTILTAIHCFPYVKKRIPVMYQHHTDLNPIEVAIDEMSKKVAELRQLCSSAEVDMIKLQLKLQGSVSVQVNAGPLAYARAFLDDTNTKRYPDNKVKLLKEVFRQFVEACGQALAVNERLIKEDQLEYQEEMKANYREMAKELSEIMHEREICPLEEKTSVLPNSLHIFNAISGTPTSTMVHGMTSSSSVV

SEQ ID NO: 917395 - protein, 1246 aa, Homo sapiens
IKYNRKISADFHVDLNHFSVRQMLATTSPALMNGSGQSPSVLKGILHEAAMQYPKQGIFSVTCPHPDIFLVARIEKVLQGSITHCAEPYMKSSDSSKVAQKVLKNAKQACQRLGQYRMPFAWAARTLFKDASGNLDKNARFSAIYRQDSNKLSNDDMLKLLADFRKPEKMAKLPVILGNLDITIDNVSSDFPNYVNSSYIPTKQFETCSKTPITFEVEEFVPCIPKHTQPYTIYTNHLYVYPKYLKYDSQKSFAKARNIAICIEFKDSDEEDSQPLKCIYGRPGGPVFTRSAFAAVLHHHQNPEFYDEIKIELPTQLHEKHHLLLTFFHVSCDNSSKGSTKKRDVVETQVGYSWLPLLKDGRVVTSEQHIPVSANLPSGYLGYQELGMGRHYGPEIKWVDGGKPLLKISTHLVSTVYTQDQHLHNFFQYCQKTESGAQALGNELVKYLKSLHAMEGHVMIAFLPTILNQLFRVLTRATQEEVAVNVTRVIIHVVAQCHEEGLESHLRSYVKYAYKAEPYVASEYKTVHEELTKSMTTILKPSADFLTSNKLLKYSWFFFDVLIKSMAQHLIENSKVKLLRNQRFPASYHHAVETVVNMLMPHITQKFRDNPEASKNANHSLAVFIKRCFTFMDRGFVFKQINNYISCFAPGDPKTLFEYKFEFLRVVCNHEHYIPLNLPMPFGKGRIQRYQDLQLDYSLTDEFCRNHFLVGLLLREVGTALQEFREVRLIAISVLKNLLIKHSFDDRYASRSHQARIATLYLPLFGLLIENVQRINVRDVSPFPVNAGMTVKDESLALPAVNPLVTPQKGSTLDNSLHKDLLGAISGIASPYTTSTPNINSVRNADSRGSLISTDSGNSLPERNSEKSNSLDKHQQSSTLGNSVVRCDKLDQSEIKSLLMCFLYILKSMSDDALFTYWNKASTSELMDFFTISEVCLHQFQYMGKRYIASVRKISSVLGISVDNGYGHSDADVLHQSLLEANIATEVCLTALDTLSLFTLAFKNQLLADHGHNPLMKKVFDVYLCFLQKHQSETALKNVFTALRSLIYKFPSTFYEGRADMCAALCYEILKCCNSKLSSIRTEASQLLYFLMRNNFDYTGKKSFVRTHLQVIISVSQLIADVVGIGGTRFQQSLSIINNCANSDRLIKHTSFSSDVKDLTKRIRTVLMATAQMKEHENDPEMLVDLQYSLAKSYASTPELRKTWLDSMARIHVKNGDLSEAAMCYVHVTALVAEYLTRKEAVVKSQ

SEQ ID NO: 917396 - protein, 849 aa, Homo sapiens
IKYNRKISADFHVDLNHFSVRQMLATTSPALMNGSGQSPSVLKGILHEAAMQYPKQGIFSVTCPHPDIFLVARIEKVLQGSITHCAEPYMKSSDSSKVAQKVLKNAKQACQRLGQYRMPFAWAARTLFKDASGNLDKNARFSAIYRQDSNKLSNDDMLKLLADFRKPEKMAKLPVILGNLDITIDNVSSDFPNYVNSSYIPTKQFETCSKTPITFEVEEFVPCIPKHTQPYTIYTNHLYVYPKYLKYDSQKSFAKARNIAICIEFKDSDEEDSQPLKCIYGRPGGPVFTRSAFAAVLHHHQNPEFYDEIKIELPTQLHEKHHLLLTFFHVSCDNSSKGSTKKRDVVETQVGYSWLPLLKDGRVVTSEQHIPVSANLPSGYLGYQELGMGRHYGPEIKWVDGGKPLLKISTHLVSTVYTQDQHLHNFFQYCQKTESGAQALGNELVKYLKSLHAMEGHVMIAFLPTILNQLFRVLTRATQEEVAVNVTRVIIHVVAQCHEEGLESHLRSYVKYAYKAEPYVASEYKTVHEELTKSMTTILKPSADFLTSNKLLKYSWFFFDVLIKSMAQHLIENSKVKLLRNQRFPASYHHAVETVVNMLMPHITQKFRDNPEASKNANHSLAVFIKRCFTFMDRGFVFKQINNYISCFAPGDPKTLFEYKFEFLRVVCNHEHYIPLNLPMPFGKGRIQRYQDLQLDYSLTDEFCRNHFLVGLLLREVGTALQEFREVRLIAISVLKNLLIKHSFDDRYASRSHQARIATLYLPLFGLLIENVQRINVRDVSPFPVNAGMTVKDESLALPAVNPLVTPQKGSTLDNSLHKDLLGAISGIGNAPCSCGLLSTITLKVSWSQ

SEQ ID NO: 917397 - protein, 384 aa, Homo sapiens
QKGMLQCSAAHGKRSSSRTWQGVEVGLAEKSLSVSASSSPSLYQLLRNQRFPASYHHAVETVVNMLMPHITQKFRDNPEASKNANHSLAVFIKRCFTFMDRGFVFKQINNYISCFAPGDPKEFREVRLIAISVLKNLLIKHSFDDRYASRSHQARIATLYLPLFGLLIENVQRINVRDVSPFPVNAGMSGVQKSKIKVSVGLVPTGGSWAMLLSQLLMLQATFGALWLVVASRQSLPLSSLGVRSPWCLLEVRLDIRDAKTVKDESLALPAVNPLVTPQKGSTLDNSLHKDLLGAISGIASPYTTSTPNINSVRNADSRGSLISTDSGNSLPERNSEKSNSLDKHQQSSTLGNSVVRCDKLDQSEIKSLLMCFLYILKSMSDDK

SEQ ID NO: 917398 - protein, 1702 aa, Homo sapiens
IKYNRKISADFHVDLNHFSVRQMLATTSPALMNGSGQSPSVLKGILHEAAMQYPKQGIFSVTCPHPDIFLVARIEKVLQGSITHCAEPYMKSSDSSKVAQKVLKNAKQACQRLGQYRMPFAWAARTLFKDASGNLDKNARFSAIYRQDSNKLSNDDMLKLLADFRKPEKMAKLPVILGNLDITIDNVSSDFPNYVNSSYIPTKQFETCSKTPITFEVEEFVPCIPKHTQPYTIYTNHLYVYPKYLKYDSQKSFAKARNIAICIEFKDSDEEDSQPLKCIYGRPGGPVFTRSAFAAVLHHHQNPEFYDEIKIELPTQLHEKHHLLLTFFHVSCDNSSKGSTKKRDVVETQVGYSWLPLLKDGRVVTSEQHIPVSANLPSGYLGYQELGMGRHYGPEIKWVDGGKPLLKISTHLVSTVYTQDQHLHNFFQYCQKTESGAQALGNELVKYLKSLHAMEGHVMIAFLPTILNQLFRVLTRATQEEVAVNVTRVIIHVVAQCHEEGLESHLRSYVKYAYKAEPYVASEYKTVHEELTKSMTTILKPSADFLTSNKLLKYSWFFFDVLIKSMAQHLIENSKVKLLRNQRFPASYHHAVETVVNMLMPHITQKFRDNPEASKNANHSLAVFIKRCFTFMDRGFVFKQINNYISCFAPGDPKTLFEYKFEFLRVVCNHEHYIPLNLPMPFGKGRIQRYQDLQLDYSLTDEFCRNHFLVGLLLREVGTALQEFREVRLIAISVLKNLLIKHSFDDRYASRSHQARIATLYLPLFGLLIENVQRINVRDVSPFPVNAGMTVKDESLALPAVNPLVTPQKGSTLDNSLHKDLLGAISGIASPYTTSTPNINSVRNADSRGSLISTDSGNSLPERNSEKSNSLDKHQQSSTLGNSVVRCDKLDQSEIKSLLMCFLYILKSMSDDALFTYWNKASTSELMDFFTISEVCLHQFQYMGKRYIARTGMMHARLQQLGSLDNSLTFNHSYGHSDADVLHQSLLEANIATEVCLTALDTLSLFTLAFKNQLLADHGHNPLMKKVFDVYLCFLQKHQSETALKNVFTALRSLIYKFPSTFYEGRADMCAALCYEILKCCNSKLSSIRTEASQLLYFLMRNNFDYTGKKSFVRTHLQVIISVSQLIADVVGIGGTRFQQSLSIINNCANSDRLIKHTSFSSDVKDLTKRIRTVLMATAQMKEHENDPEMLVDLQYSLAKSYASTPELRKTWLDSMARIHVKNGDLSEAAMCYVHVTALVAEYLTRKEAVQWEPPLLPHSHSACLRRSRGGVFRQGCTAFRVITPNIDEEASMMEDVGMQDVHFNEDVLMELLEQCADGLWKAERYELIADIYKLIIPIYEKRRDFERLAHLYDTLHRAYSKVTEVMHSGRRLLGTYFRVAFFGQGNYQFTDSETDVEGFFEDEDGKEYIYKEPKLTPLSEISQRLLKLYSDKFGSENVKMIQDSGKVNPKDLDSKYAYIQVTHVIPFFDEKELQERKTEFERSHNIRRFMFEMPFTQTGKRQGGVEEQCKRRTILTAIHCFPYVKKRIPVMYQHHTDLNPIEVAIDEMSKKVAELRQLCSSAEVDMIKLQLKLQGSVSVQVNAGPLAYARAFLDDTNTKRYPDNKVKLLKEVFRQFVEACGQALAVNERLIKEDQLEYQEEMKANYREMAKELSEIMHEREICPLEEKTSVLPNSLHIFNAISGTPTSTMVHGMTSSSSVV

SEQ ID NO: 917399 - protein, 1586 aa, Homo sapiens
IKYNRKISADFHVDLNHFSVRQMLATTSPALMNGSGQSPSVLKGILHEAAMQYPKQGIFSVTCPHPDIFLVARIEKVLQGSITHCAEPYMKSSDSSKVAQKVLKNAKQACQRLGQYRMPFAWAARTLFKDASGNLDKNARFSAIYRQDSNKLSNDDMLKLLADFRKPEKMAKLPVILGNLDITIDNVSSDFPNYVNSSYIPTKQFETCSKTPITFEVEEFVPCIPKHTQPYTIYTNHLYVYPKYLKYDSQKSFAKARNIAICIEFKDSDEEDSQPLKCIYGRPGGPVFTRSAFAAVLHHHQNPEFYDEIKIELPTQLHEKHHLLLTFFHVSCDNSSKGSTKKRDVVETQVGYSWLPLLKDGRVVTSEQHIPVSANLPSGYLGYQELGMGRHYGPEIKWVDGGKPLLKISTHLVSTVYTQDQHLHNFFQYCQKTESGAQALGNELVKYLKSLHAMEGHVMIAFLPTILNQLFRVLTRATQEEVAVNVTRVIIHVVAQCHEEGLESHLRSYVKYAYKAEPYVASEYKTVHEELTKSMTTILKPSADFLTSNKLLKYSWFFFDVLIKSMAQHLIENSKVKLLRNQRFPASYHHAVETVVNMLMPHITQKFRDNPEASKNANHSLAVFIKRCFTFMDRGFVFKQINNYISCFAPGDPKTLFEYKFEFLRVVCNHEHYIPLNLPMPFGKGRIQRYQDLQLDYSLTDEFCRNHFLVGLLLREVGTALQEFREVRLIAISVLKNLLIKHSFDDRYASRSHQARIATLYLPLFGLLIENVQRINVRDVSPFPVNAGMTVKDESLALPAVNPLVTPQKGSTLDNSLHKDLLGAISGIASPYTTSTPNINSVRNADSRGSLISTDSGNSLPERNSEKSNSLDKHQQSSTLGNSVVRCDKLDQSEIKSLLMCFLYILKSMSDDALFTYWNKASTSELMDFFTISEVCLHQFQYMGKRYIASVRKISSVLGISVDNGYGHSDADVLHQSLLEANIATEVCLTALDTLSLFTLAFKNQLLADHGHNPLMKKVFDVYLCFLQKHQSETALKNVFTALRSLIYKFPSTFYEGRADMCAALCYEILKCCNSKLSSIRTEASQLLYFLMRNNFDYTGKKSFVRTHLQVIISVSQLIADVVGIGGTRFQQSLSIINNCANSDRLIKAAMCYVHVTALVAEYLTRKGVFRQGCTAFRVITPNIDEEASMMEDVGMQDVHFNEDVLMELLEQCADGLWKAERYELIADIYKLIIPIYEKRRDFERLAHLYDTLHRAYSKVTEVMHSGRRLLGTYFRVAFFGQGFFEDEDGKEYIYKEPKLTPLSEISQRLLKLYSDKFGSENVKMIQDSGKVNPKDLDSKYAYIQVTHVIPFFDEKELQERKTEFERSHNIRRFMFEMPFTQTGKRQGGVEEQCKRRTILTAIHCFPYVKKRIPVMYQHHTDLNPIEVAIDEMSKKVAELRQLCSSAEVDMIKLQLKLQGSVSVQVNAGPLAYARAFLDDTNTKRYPDNKVKLLKEVFRQFVEACGQALAVNERLIKEDQLEYQEEMKANYREMAKELSEIMHEREICPLEEKTSVLPNSLHIFNAISGTPTSTMVHGMTSSSSVV

SEQ ID NO: 917400 - protein, 1004 aa, Homo sapiens
LTNAIWKVQRNIMFMVAHYIPLNLPMPFGKGRIQRYQDLQLDYSLTDEFCRNHFLVGLLLREVGTALQEFREVRLIAISVLKNLLIKHSFDDRYASRSHQARIATLYLPLFGLLIENVQRINVRDVSPFPVNAGMTVKDESLALPAVNPLVTPQKGSTLDNSLHKDLLGAISGIASPYTTSTPNINSVRNADSRGSLISTDSGNSLPERNSEKSNSLDKHQQSSTLGNSVVRCDKLDQSEIKSLLMCFLYILKSMSDDALFTYWNKASTSELMDFFTISEVCLHQFQYMGKRYIASVRKISSVLGISVDNGYGHSDADVLHQSLLEANIATEVCLTALDTLSLFTLAFKNQLLADHGHNPLMKKVFDVYLCFLQKHQSETALKNVFTALRSLIYKFPSTFYEGRADMCAALCYEILKCCNSKLSSIRTEASQLLYFLMRNNFDYTGKKSFVRTHLQVIISVSQLIADVVGIGGTRFQQSLSIINNCANSDRLIKHTSFSSDVKDLTKRIRTVLMATAQMKEHENDPEMLVDLQYSLAKSYASTPELRKTWLDSMARIHVKNGDLSEAAMCYVHVTALVAEYLTRKGVFRQGCTAFRVITPNIDEEASMMEDVGMQDVHFNEDVLMELLEQCADGLWKAERYELIADIYKLIIPIYEKRRDFERLAHLYDTLHRAYSKVTEVMHSGRRLLGTYFRVAFFGQGFFEDEDGKEYIYKEPKLTPLSEISQRLLKLYSDKFGSENVKMIQDSGKVNPKDLDSKYAYIQVTHVIPFFDEKELQERKTEFERSHNIRRFMFEMPFTQTGKRQGGVEEQCKRRTILTAIHCFPYVKKRIPVMYQHHTDLNPIEVAIDEMSKKVAELRQLCSSAEVDMIKLQLKLQGSVSVQVNAGPLAYARAFLDDTNTKRYPDNKVKLLKEVFRQFVEACGQALAVNERLIKEDQLEYQEEMKANYREMAKELSEIMHEREICPLEEKTSVLPNSLHIFNAISGTPTSTMVHGMTSSSSVV

SEQ ID NO: 917401 - protein, 451 aa, Homo sapiens
MATAQMKEHENDPEMLVDLQYSLAKSYASTPELRKTWLDSMARIHVKNGDLSEAAMCYVHVTALVAEYLTRKGVFRQGCTAFRVITPNIDEEASMMEDVGMQDVHFNEDVLMELLEQCADGLWKAERYELIADIYKLIIPIYEKRRDFERLAHLYDTLHRAYSKVTEVMHSGRRLLGTYFRVAFFGQGFFEDEDGKEYIYKEPKLTPLSEISQRLLKLYSDKFGSENVKMIQDSGKVNPKDLDSKYAYIQVTHVIPFFDEKELQERKTEFERSHNIRRFMFEMPFTQTGKRQGGVEEQCKRRTILTAIHCFPYVKKRIPVMYQHHTDLNPIEVAIDEMSKKVAELRQLCSSAEVDMIKLQLKLQGSVSVQVNAGPLAYARAFLDDTNTKRYPDNKVKLLKEVFRQFVEACGQALAVNERLIKEDQLEYQEEMKANYREMAKELSEIMHELG

SEQ ID NO: 917402 - protein, 1114 aa, Homo sapiens
IKYNRKISADFHVDLNHFSVRQMLATTSPALMNGSGQSPSVLKGILHEAAMQYPKQGIFSVTCPHPDIFLVARIEKVLQGSITHCAEPYMKSSDSSKVAQKVLKNAKQACQRLGQYRMPFAWAARTLFKDASGNLDKNARFSAIYRQDSNKLSNDDMLKLLADFRKPEKMAKLPVILGNLDITIDNVSSDFPNYVNSSYIPTKQFETCSKTPITFEVEEFVPCIPKHTQPYTIYTNHLYVYPKYLKYDSQKSFAKARNIAICIEFKDSDEEDSQPLKCIYGRPGGPVFTRSAFAAVLHHHQNPEFYDEIKIELPTQLHEKHHLLLTFFHVSCDNSSKGSTKKRDVVETQVGYSWLPLLKDGRVVTSEQHIPVSANLPSGYLGYQELGMGRHYGPEIKWVDGGKPLLKISTHLVSTVYTQDQHLHNFFQYCQKTESGAQALGNELVKYLKSLHAMEGHVMIAFLPTILNQLFRVLTRATQEEVAVNVTRVIIHVVAQCHEEGLESHLRSYVKYAYKAEPYVASEYKTVHEELTKSMTTILKPSADFLTSNKLLKYSWFFFDVLIKSMAQHLIENSKVKLLRNQRFPASYHHAVETVVNMLMPHITQKFRDNPEASKNANHSLAVFIKRCFTFMDRGFVFKQINNYISCFAPGDPKTLFEYKFEFLRVVCNHEHYIPLNLPMPFGKGRIQRYQDLQLDYSLTDEFCRNHFLVGLLLREVGTALQEFREVRLIAISVLKNLLIKHSFDDRYASRSHQARIATLYLPLFGLLIENVQRINVRDVSPFPVNAGMTVKDESLALPAVNPLVTPQKGSTLDNSLHKDLLGAISGIASPYTTSTPNINSVRNADSRGSLISTDSGNSLPERNSEKSNSLDKHQQSSTLGNSVVRCDKLDQSEIKSLLMCFLYILKSMSDDALFTYWNKASTSELMDFFTISEVCLHQFQYMGKRYIASVRKISSVLGISVDNGYGHSDADVLHQSLLEANIATEVCLTALDTLSLFTLAFKNQLLADHGHNPLMKKVFDVYLCFLQKHQSETALKNVFTALRSLIYKFPSTFYEGRADMCAALCYEILKCCNSKLSSIRTEASQLLYFLMRNNFDYTGKKSFVRTHLQVRVV

SEQ ID NO: 917403 - protein, 216 aa, Homo sapiens
ERSCTVGWRSRGTAWNPGRPRGERSASGRGRRAPKAAGEVKPPQPAGGTLGGRDGGRWRRRTLQRRRGWRRGGSRAGTGLGTGRSSAAGRQRRGAGTAPAAGPRPRGRRLPPHLLHGWPATPPAMMPGQIPDPSVTTGSLPGLGPLTGLPSSALTVEELKYADIRNLGAMIAPLHFLEVKLGKRPQPVKSEVHRQHGLRVGKLSPLLGEAHLAEQL

SEQ ID NO: 917404 - protein, 174 aa, Homo sapiens
MVAGWPATPPAMMPGQIPDPSVTTGSLPGLGPLTGLPSSALTVEELKYADIRNLGAMIAPLHFLEVKLGKRPQPVKSELDEEEERRKRRREKNKVAAARCRNKKKERTEFLQRESERLELMNAELKTQIEELKQERQQLILMLNRHRPTCIVRTDSVKTPESEGNPLLEQLEKK

SEQ ID NO: 917405 - protein, 287 aa, Homo sapiens
ERSCTVGWRSRGTAWNPGRPRGERSASGRGRRAPKAAGEVKPPQPAGGTLGGRDGGRWRRRTLQRRRGWRRGGSRAGTGLGTGRSSAAGRQRRGAGTAPAAGPRPRGRRLPPHLLHGWPATPPAMMPGQIPDPSVTTGSLPGLGPLTGLPSSALTVEELKYADIRNLGAMIAPLHFLEVKLGKRPQPVKSELDEEEERRKRRREKNKVAAARCRNKKKERTEFLQRESERLELMNAELKTQIEELKQERQQLILMLNRHRPTCIVRTDSVKTPESEGNPLLEQLEKK

SEQ ID NO: 917406 - protein, 174 aa, Homo sapiens; identical to SEQ ID NO: 917404

SEQ ID NO: 917407 - protein, 133 aa, Homo sapiens
APTLGRGQSDVIGKALEAFLWSPGKSRSSLGVGSRFFYGWDGCAGITAASVQWLLLNPATAPCLLMKQCRDGVEGTGDAGCLPWGRNGNLVLDGTLLPVSVQLCSGLQGGGDLRGNRGRGQVLGPISAPSTQP

SEQ ID NO: 917408 - protein, 163 aa, Homo sapiens
MMPGQIPDPSVTTGSLPGLGPLTGLPSSALTVEELKYADIRNLGAMIAPLHFLEVKLGKRPQPVKSELDEEEERRKRRREKNKVAAARCRNKKKERTEFLQRESERLELMNAELKTQIEELKQERQQLILMLNRHRPTCIVRTDSVKTPESEGNPLLEQLEKK

SEQ ID NO: 917409 - protein, 153 aa, Homo sapiens
MYALNQCPIYGTDSPMARIHGSRNQRGEVALLTITPSDPLAKFLLPVPATLCSAGLEVLVPEGGTLPPVYTTTIPLKWKLILPPGHFGLLLPLCQQAKKEVTVLAGVIDPGYQDKISLLLHNGGSNLGTVHCRSNNNMGTRWPWSLTSSSVLR

SEQ ID NO: 917410 - protein, 811 aa, Homo sapiens
AYFLILVQRILLELDMQNIQDNLAKHLSEGQKRKLTFGITILGDPQILLLDEPTTGLDPFSRDQVWSLLRERRADHVILFSTQSMDEADILADRKVIMSNGRLKCAGSSMFLKRRWGLGYHLSLHRNEICNPEQITSFITHHIPDAKLKTENKEKLVYTLPLERTNTFPDLFSDLDKCSDQGVTGYDISMSTLNEVFMKLEGQSTIEQDFEQVEMIRDSESLNEMELAHSSFSEMQTAVSDMGLWRMQVFAMARLRFLKLKRQTKVLLTLLLVFGIAIFPLIVENIMYAMLNEKIDWEFKNELYFLSPGQLPQEPRTSLLIINNTGLPSCAPQIRSLSIRHDPDYSFRAYLTPLHSSTLSSESNIEDFIKSLKHQNILLEVDDFENRNGTDGLSYNGAIIVSGKQKTKQLNLSTFTILSQKLSKMFRISPQSRDAKPNPEEPIDEDEDIQTERIRTATALTTSILDEKPVIIASCLHKEYAGQKKSCFSKRKKKIAARNISFCVQEGEILGLLGPNGAGKSSSIRMISGITKPTAGEVELKGCSSVLGHLGYCPQENVLWPMLTLREHLEVYAAVKGLRKADARLAIARLVSAFKLHEQLNVPVQKLTAGITRKLCFVLSLLGNSPVLLLDEPSTGIDPTGQQQMWQAIQAVVKNTERGVLLTTHNLAEAEALCDRVAIMVSGRLRCIGSIQHLKNKLGKDYILELKVKETSQVTLVHTEILKLFPQAAGQERYSSLLTYKLPVADVYPLSQTFHKLEAVKHNFNLEEYSLSQCTLEKVFLELSKEQEVGNFDEEIDTTMRWKLLPHSDEP

SEQ ID NO: 917411 - protein, 905 aa, Homo sapiens
MLRKERSKQLQQSPTPTCPTPELGSPLPSRTGSLTDEPADPARVSSRQRLELVALVYSSCIAENLVPNLFLELFFVFQLLTARRMVTAKDSDPELSPAVLGQVLSNLDKGTLKLLAENERLLCFSPALQGRLRAAYEGSVAKPETDNRANFSSDRAFHTFKKQRAMMGQLSAACSHSHFVRLFQKQLLQMCQSPGGAGGTVLGEAPDVLSMLGADKLGRLWRLQERLMAPQSSGGPCPPPTFPGCQGFFRDFILSASSFQFNQHLMDSLSLKIQELNGLALPQHEPNDEDGESDVDWQGERKQFAVVLLSLRLLAKFLGFVAFLPYRGPEPPPTGELQDSILALRSQVPPVLDVRTLLQRGLQARRAVLTVPWLVEFLSFADHVVPLLEYYRDIFTLLLRLHRSLVLSQESEGKMCFLNKLLLLAVLGWLFQIPTVPEDLFFLEEGPSYAFEVDTVAPEHGLDNAPVVDQQLLYTCCPYIGELRKLLASWVSGSSGRSGGFMRKITPTTTTSLGAQPSQTSQGLQAQLAQAFFHNQPPSLRRTVEFVAERIGSNCVKHIKATLVADLVRQAESLLQEQLVTQGEEGGDPAQLLEILCSQLCPHGAQALALGREFCQRKSPGAVRALLPEETPAAVLSSAENIAVGLATEKACAWLSANITALIRREVKAAVSRTLRAQGPEPAARGERRGCSRACEHHAPLPSHLISEIKDVLSLAVGPRDPDEGVSPEHLEQLLGQLGQTLRCRQFLCPPAEQHLAKCSVELASLLVADQIPILGPPAQYRLERGQARRLLHMLLSLWKEDFQGPVPLQLLLSPRNVGLLADTRPREWDLLLFLLRELVEKGLMGRMEIEACLGSLHQAQWPGDFAEELATLSNLFLAEPHLPEPQLRACELVQPNRGTVLAQS

SEQ ID NO: 917412 - protein, 175 aa, Homo sapiens
MKAPWQSPGQDLQASEKKRIKELKLTRSPHQMLDPSFTIFPSNSQAPLLQVCWSLLEVHSRPCFPGYHQRRLQNSKDCCPFLPLEALSQRGTCQIPAGALLYEVSDNPCWEVSPSALSKGDGSFIYKPLTGAAAFLSEMSCPERRNLERQSGYSGFAELQLTLPSSSFQAALFTL

SEQ ID NO: 917413 - protein, 174 aa, Homo sapiens
MFAEYMNDCNILIFISLCVGIKRWGLWKVSRSWGYSPAENIEIVAKQTFDKEMSMVEGSQMLLIKTTEEGPPEAIFGAAPPILGPECQDPGARTISSLCSLQSDAVLLGCPSCGSSGSRCSSDGLSGGHKQEAFVTSTWCQLCRHTECKSCENVATSTQLPRDALENFCDQAQT

SEQ ID NO: 917414 - protein, 366 aa, Homo sapiens
MARLWGALSLWPLWAAVPWGGAAAVGVRACSSTAAPDGVEGPALRRSYWRHLRRLVLGPPEPPFSHVCQVGDPVLRGVAAPVERAQLGGPELQRLTQRLVQVMRRRRCVGLSAPQLGVPRQVLALELPEALCRECPPRQRALRQMEPFPLRVFVNPSLRVLDSRLVTFPEGCESVAGFLACVPRFQAVQISGAGGGDRGCWSSARVSSARLRESAEVVALYSELDNLITRVGNQVERLVMDRDEGRFPVRRGAAVYICHLLLPLVNGNSQDRGQGAVTSFAGLDPNGEQVVWQASGWAARIIQHEMDHLQGCLFIDKMDSRTFTNVYWMKTELEEDVRNVCPEISYGQNVGYNLRRKITPKGVDIS

SEQ ID NO: 917415 - protein, 670 aa, Homo sapiens
ELQTRAGTDPRNVSPGCRPHSTSSNSSKLPFMHSVLPISGSSDFCSRANHVVLENETDSDPTPNDCFEPVSPEFCGKEAIRIKNLKKEYAGKCERVEALKGSVTVYNHTLSRMADIENISKFTGFCPQSNVQFGFLTVKENLRLFAKIKGILPHEVEKEVQRVVQELEMENIQDILAQNLSGGQNRKLTFGIAILGDPQVLLLDEPTAGLDPLSRHRIWNLLKEGKSDRVILFSTQFIDEADILADRKVFISNGKLKCAGSSLFLKKKWGIGYHLSLHLNERCDPESITSLVKQHISDAKLTAQSEEKLVYILPLERTNKFPELYRDLDRCSNQGIEDYGVSITTLNEVFLKLEGKSTIDESDIGIWGQLQTDGAKDIGSLVELEQVLSSFHETRKTISGVALWRQQVCAIAKVRFLKLKKERKSLWTIFIPQLLEHLFYESYQKSYPWELSPNTYFLSPGQQPQDPLTHLLVINKTGEHGAEMQLLNVVLVERFPPKNMNSQEKNKLWSTIDNFLHSLRRQNIAIEVDAFGTRNGTDDPSYNGAIIVSGDEKDHRFSIACNTKRLNCFPVLLDVISNGLLGIFNSSEHIQTDRSTFFEEHMDYEYGYRSNTFFWIPMAASFTPYIAMSSIGDYKVRRVKVFTCFLYLENPSHTLTTINLHASGKSNFCT

SEQ ID NO: 917416 - protein, 2326 aa, Homo sapiens
EYKPPSPSRASKRHQRVLATRVRNITKKSSHLPLGSPLKRQQNTRDPDTMVPLTDFSPVMDHSREKDNDLSDTDSNYSLDSLSCVYAKALIEPLKPEERKWDFPEPENSESDDSQLSEDSLAEKRYQSPKNRLGGNRPTNNRGQPRTRTRASVRGFTAASDSDLLAQTHRSFSLDSLIDAEEELGEDQQEEPFPGSADEIPTETFWHLEDSSLPVMDQEAICRLGPINYRTAARLDAVLPMSSSFYLDPQFQPHCELQPHCELQPHCELQPHCEQAESQVEPSYSEQADSLQGMQLSRESPLMSMDSWFSCDSKINPSSPPGIVGSLCPSPDMQEFHSCKGERPGYWPNTEELKPSDAETVLPYSSKLHQGSTELLCSARDEHTASAADTSRLSLWGIQRLIQPGADGTFQGRCIPDMTQQGSSEASHNSSVSNVLAASATTLTHVGSTHERDWSALQQKYLLELSCPVLEAIGAPKPAYPYLEEDSGSLAQASSKGGDTLLPVGPRVSSNLNLNNFPVHLSRIRRLRAEKEQDSLNAKLEGVSDFFSTSEKEASYDETYSADLESLSASRSTNAQVFATENAIPDSMTEACEVKQNNLEECLQSCRKPGLMTSSDEDFFQKNACHSNVTTATKADHWSQGWAPLRKNSAVQPGQLSPDSHYPLEEEKTDCQESSKEAVRRHINVSFALPSGPELYLHSAPWNPLSSSLQPPLLETFYVTKSRDALTETALEIPACREVRVPSPPPREAWGFGHNHQALQGAYLKNNLPVLLQNQNSKIASSQQVTAEIPVDLNTREVIRESGKCPGNITEESHDSVYSSVTQNRHFLPSTSTKVCEFENQVVILNKKHSFPALEGGEVTAQSCCGASSDSTESGKSLLFRESEAREEEELDQNTVLRQTINVSLEKDMPGESAVSLKSRSVDRRVSSPVMVAQGGGPTPKWEGKNETGLLEKGLRPKDSSEEFKLPGTKPAYERFQLVACPQERNPSECKSQEMLNPNREPSGKKQNKRVNNTDEMARLIRSVMQLENGILEIESKQNKQVHASHTPGTDKELVFQDQKEQEKTDHAFRPDSSGNPLPSKDQPSSPRQTDDTVFRDSEAGAMEVNSIGNHPQVQKITPNPFRSREGVRESEPVREHTHPAGSDRPARDICDSLGKHTTCREFTNTSLHPQRMKALARALPLQPRLERSSKNNGQFVKASASLKGQPWGLGSLEELETVKGFQESQVAEHVSSSNQEEPKAQGKVEEMPMQRGGSLQEENKVTQKFPSLSQLCRDTFFRQETVSPLLSRTEFCTAPLHQDLSNTLPLNSPRWPRRCLHVPVALGISSLDCVLDLTMLKIHNSPLVTGVEHQDQSTETRSHSPEGNVRGRSSEAHTAWCGSVRSMAMGSHSQSGVPESIPLGTEDRISASTSPQDHGKDLRITLLGFSTSEDFASEAEVAVQKEIRVSSLNKVSSQPEKRVSFSLEEDSDQASKPRQKAEKETEDVGLTSGVSLAPVSLPRVPSPEPRLLEPSDHASMCLAILEEIRQAKAQRKQLHDFVARGTVLSYCETLLEPECSSRVAGRPQCKQIDQSSSDQTRNEGEAPGFHVASLSAEAGQIDLLPDERKVQATSLSADSFESLPNTETDREPWDPVQAFSHAAPAQDRKRRTGELRQFAGASEPFICHSSSSEIIEKKKDATRTPSSADPLAPDSPRSSAPVEEVRRVVSKKVVAALPSQAPYDDPRVTLHELSQSVPQETAEGIPPGSQDSSPEHQEPRTLDTTYGEVSDNLLVTAQGEKTAHFESQSVTCDVQNSTSASGPKQDHVQCPEASTGFEEVPSRAYEMDETGEISRGPDVHLTHGLEPKDVNREFRLTESSTCEPSTVAAVLSRAQGCRSPSAPDVRTGSFSHSATDGSVGLIGVPEKKVAEKQASTELEAASFPAGMYSEPLRQFRDSSVGDQNAQVCQTNPEPPATTQGPHTLDLSEGSAESKLVVEPQHECLENTTRCFLEKPQFSTELRDHNRLDSQAKFVARLKHTCSPQEDSPWQEEEQHRDQASGGGEGFAQGVNPLPDEDGLDGCQILDAGREEVAVAKPPVSKILSQGFKDPATVSLRQNETPQPAAQRSGHLYTGREQPAPNHRGSLPVTTIFSGPKHSRSSPTPQFSVVGSSRSLQELNLSVEPPSPTDEDTQGPNRLWNPHLRGYSSGKSVARTSLQAEDSNQKASSRLDDGTTDHRHLKPATPPYPMPSTLSHMPTPDFTTSWMSGTLEQAQQGKREKLGVQVRPENWCSQMDKGMLHFGSSDISPYALPWRPEEPARISWKQYMSGSAVDVSCSQKPQGLTLSNQH

SEQ ID NO: 917417 - protein, 836 aa, Homo sapiens
EYKPPSPSRASKRHQRVLATRVRNITKKSSHLPLGSPLKRQQNTRDPDTMVPLTDFSPVMDHSREKDNDLSDTDSNYSLDSLSCVYAKALIEPLKPEERKWDFPEPENSESDDSQLSEDSLAEKRYQSPKNRLGGNRPTNNRGQPRTRTRASVRGFTAASDSDLLAQTHRSFSLDSLIDAEEELGEDQQEEPFPGSADEIPTETFWHLEDSSLPVMDQEAICRLGPINYRTAARLDAVLPMSSSFYLDPQFQPHCELQPHCELQPHCELQPHCEQAESQVEPSYSEQADSLQGMQLSRESPLMSMDSWFSCDSKINPSSPPGIVGSLCPSPDMQEFHSCKGERPGYWPNTEELKPSDAETVLPYSSKLHQGSTELLCSARDEHTASAADTSRLSLWGIQRLIQPGADGTFQGRCIPDMTQQGSSEASHNSSVSNVLAASATTLTHVGSTHERDWSALQQKYLLELSCPVLEAIGAPKPAYPYLEEDSGSLAQASSKGGDTLLPVGPRVSSNLNLNNFPVHLSRIRRLRAEKEQDSLNAKLEGVSDFFSTSEKEASYDETYSADLESLSASRSTNAQVFATENAIPDSMTEACEVKQNNLEECLQSCRKPGLMTSSDEDFFQKNACHSNVTTATKADHWSQGWAPLRKNSAVQPGQLSPDSHYPLEEEKTDCQESSKEAVRRHINVSFALPSGPELYLHSAPWNPLSSSLQPPLLETFYVTKSRDALTETALEIPACREVRVPSPPPREAWGFGHNHQALQGAYLKNNLPVLLQNQNSKIASSQQVTAEIPVDLNTREVIRESGKCPGNITEESHDSVYSSVTQNRHFLPSTSTKDM

SEQ ID NO: 917418 - protein, 180 aa, Homo sapiens
MSNIIYGHLRLSDHSIQLTTLEGGKLQAIGSLFNLFGPQFPHRSLGRSLGSSDLICPGSFWDLFIKHQDDSYDSAVGTLEPARVSTLVHLLQVRSPLCHAPRALRPGGPGLVRGLRCSLSHVHLRGLPFLPSQGLDARACEAGISEDLRREGMSEQEYEYVSFEWKHCYASIKHPALTEM

SEQ ID NO: 917419 - protein, 181 aa, Homo sapiens
MRLSFFQILNHILTPNICHSTASMFPCLCPARVIQQEKEIKGIQIGRAEIKLFLFADYIILYPENPKDSSKRLLELINDFVFCLFATQVISKSSERVVLMERINAYPNSHKLAYLQGNITLAFEERGYAGIQTRKCVTISEVAKSNNEMEKDVKDVTVNVGHPQGSLWQDNAGASPLHETD

SEQ ID NO: 917420 - protein, 323 aa, Homo sapiens [sequence omitted]

SEQ ID NO: 917421 - protein, 263 aa, Homo sapiens
MADFTGAARTRARRSRLPSPYSLPSGEAPPGDRQASPSSAASGVRGPPLSTRGQPCPGRLARSRTPRLQSKVGQRRAGSQPERPTGCRNASVGRRGWLHPCAAFLCQPRLKLLRPSFLAASPRPRPPQLQELRAVLLAVDAQRVQVLLAVALRHLGQPLHQARQLQVGAECLRPRGGLAAGAENGAIRRRLPGHAALGRRGRNCGRTRLSRARRTAAGTAGRTAPGAGGRAQPTWRAWVEEDSFLLAGSPSPACHPLIPQVYG

SEQ ID NO: 917422 - protein, 263 aa, Homo sapiens; identical to SEQ ID NO: 917421

SEQ ID NO: 917423 - protein, 197 aa, Homo sapiens
GPLPPTAMEDEQLDSLEGWAPVRQGLFADAERHRLRFLVAWNGAEGKLAVTCHDLTAQQPQRREGARLGLEPKPKAAVSPPSCRVPAQLPCSRPTGPAGSRPRAALWPPLERCSPQLDVGGGGAWSLGLGLWALLWQARAGPGEVALQELCGQLERYLGAAAHGCGGATVRHAVFAAKGRAADCESPREFRERALRA

SEQ ID NO: 917424 - protein, 131 aa, Homo sapiens
MQKEMEQDVKRFGQAAWATAIPRLEKLKLMLAQETLQLMRAKELYLNRKRAEIQGKMEDLPEQEKNINVVDELEMQFYEIQLELYEVKFEILKNEEILLTTQLDSLKRLIKEIFNFYEVVFIDFFPYGFCF

SEQ ID NO: 917425 - protein, 302 aa, Homo sapiens
MSLLRILTCQASCEITRPHVCEDALHLESTKLSSRPTRLRSLHLRAWASSSGMRGGPAARPVRHCGRRPRGLQDPDPKMAAPSEVAAIAPGEGDGGGGGFGSWLDGRLEALGVDRAVYGAYILGILQEEEEEEKLDALQGILSAFLEEDSLLNICKEIVERWSETQNVVTKVKKEDEVQAIATLIEKQAQIVVKPRMVSEEEKQRKAALLAQYADVTDEEDEADEKDDSGATTMNIGSDKLLFRNTNVEDVLNARKLERDSLRDESQRKKEQDKLQRERDKLAKQERKEKEKKRTQRGERKR

SEQ ID NO: 917426 - protein, 225 aa, Homo sapiens
AVLAGIFGIAIAPGEGDGGGGGFGSWLDGRLEALGVDRAVYGAYILGILQEEEEEEKLDALQGILSAFLEEDSLLNICKEIVERWSETQNVVTKVKKEDEVQAIATLIEKQAQIVVKPRMVSEEEKQRKAALLAQYADVTDEEDEADEKDDSGATTMNIGSDKLLFRNTNVEDVLNARKLERDSLRDESQRKKEQDKLQRERDKLAKQERKEKEKKRTQRGERKR

SEQ ID NO: 917427 - protein, 202 aa, Homo sapiens
GRVGRATLFGGPAGLSLASTVFGREQIRGLSYQPPTVPPISLSAFLEEDSLLNICKEIVERWSETQNVVTKVKKEDEVQAIATLIEKQAQIVVKPRMVSEEEKQRKAALLAQYADVTDEEDEADEKDDSGATTMNIGSDKLLFRNTNVEDVLNARKLERDSLRDESQRKKEQDKLQRERDKLAKQERKEKEKKRTQRGERKR

SEQ ID NO: 917428 - protein, 231 aa, Homo sapiens
MSLLRILTCQASCEITRPHVCEDALHLESTKLSSRPTRLRSLHLRAWASSSGMRGGPAARPVRHCGRRPRGLQDPDPKMAAPSEVAAIAPGEGDGGGGGFGSWLDGRLEALGVDRAVYGAYILGILQEEEEEEKLDALQGILSAFLEEDSLLNICKEIVERWSETQNVVTKVKKEDEVQAIATLIEKQAQIVVKPRMVSEEEKQRKAALLAQYADVTDEEEYPFWSLGTIP

SEQ ID NO: 917429 - protein, 232 aa, Homo sapiens
MSLLRILTCQASCEITRPHVCEDALHLESTKLSSRPTRLRSLHLRAWASSSGMRGGPAARPVRHCGRRPRGLQDPDPKMAAPSEVAAIAPGEGDGGGGGFGSWLDGRLEALGVDRAVYGAYILGILQEEEEEEKLDALQGILSAFLEEDSLLNICKEIVERWSETQNVVTKVKKEDEVQAIATLIEKQAQIVVKPRMVSEEEKQRKAALLAQYADVTDEEDSVPKHQCGRCP

SEQ ID NO: 917430 - protein, 112 aa, Homo sapiens
MDTKLGLHGLSFPFSMAPEPCPLNCQALRRQQMPMSSVQVLPMWTSGSVSLFSLIQPCSSFHHLPDEVQAIATLIEKQAQIVVKPRMVSEEEKQRKAALLAQYADVTDEEEY

SEQ ID NO: 917431 - protein, 198 aa, Homo sapiens
PCPSSRSLEWKLTLGSLSGAMTPQQLGVHSSSHALDGAGGLGVLLLGGRVDHKVHHPVAAAKFIPGKEPDKVAIEDHGVEASEEIIDDDSVHFAELKAALVTRYPIWPNPLTQTLTIVSWMRLTLHEQMELFASSEGQMSSPERQLLSDEELTYECIRCPNKVSLELESGITETFQKRAEVTQGRPWELGFGPVGSAW

SEQ ID NO: 917432 - protein, 198 aa, Homo sapiens; identical to SEQ ID NO: 917431

SEQ ID NO: 917433 - protein, 102 aa, Homo sapiens
ILSSQWLVWRPTDFILRTDLQAPRLPTDLPGMGGNRELVGKQEDSGLSTEPHLLCGTHRAVSLQSSSHHLCKGRLSPPFCDEEMEAPGGKMQPGPEAPGGCA

SEQ ID NO: 917434 - protein, 198 aa, Homo sapiens; identical to SEQ ID NO: 917431

SEQ ID NO: 917435 - protein, 102 aa, Homo sapiens; identical to SEQ ID NO: 917433

SEQ ID NO: 917436 - protein, 236 aa, Homo sapiens
MRRSSGFGGQKGQGPSCSFTGCWCCRGDDVAESDDSPFAQCGYNIQEKHLGKLHRAASRGEVSKVECILSSGSADLDERDKKKRTALHLACANGHPEVVALLVDRGCQLDVFDNKNRTALLKAVQCQEEECATILLEHGADPDLPDVYGNTTLHYAIYNEDIPMTKKLLLHHANIESANKACRVQPHRVGGFSPRVRRRESVEIKTQDKQIKDSWARGTTTTKMRRPVVAQNARLR

SEQ ID NO: 917437 - protein, 137 aa, Homo sapiens
IIKLLDGKRSQTVGILISSLHLEMKDIQQAIFNVDDSVVDLETLAALYENRAQEDELVKIRKYYETSKEEELKLLDKPEQFLHELAQIPNFAERAQCIIFRSVFSEGITSLHRKVEIITRASKQLLILLVPSLPTAY

SEQ ID NO: 917438 - protein, 181 aa, Homo sapiens
IIKLLDGKRSQTVGILISSLHLEMKDIQQAIFNVDDSVVDLETLAALYENRAQEDELVKIRKYYETSKEEELKLLDKPEQFLHELAQIPNFAERAQCIIFRSVFSEGITSLHRKVEIITRASKDLLHVKSVKDILALILAFGNYMNGGNRTRGQADGYSLEILPKLKDVKSRVFIFHNKFP

SEQ ID NO: 917439 - protein, 165 aa, Homo sapiens
MCATLLDTPAHSGSVSPTSDDSAAAPKTPWGINIIKKNKKAAPRAFGVRLEECQPATENQVGLCHTPEQARQGETKAQRHVPLIVAARCHIVEARGLESTGFYRVPGNNAVVSSLQEQLNPGPGDINQQDERWQDLNVINSLLKSFFRKLPEPLFTAAICPGDIC

SEQ ID NO: 917440 - protein, 181 aa, Homo sapiens
MCATLLDTPAHSGSVSPTSDDSAAAPKTPWGINIIKKNKKAAPRAFGVRLEECQPATENQVGLCHTPEQARQGETKAQRHVPLIVAARCHIVEARGLESTGFYRVPGNNAVVSSLQEQLNPGPGDINQQDERWQDLNVINSLLKSFFRKLPEPLFTADKYNDFIEANCIEDVRRGFGSLDN

SEQ ID NO: 917441 - protein, 343 aa, Homo sapiens
MATLGHTFPFYAGPKPTFPMDTTLASIIMIFLTALATFIVILPGIRGKTRLFWLLRVVTSLFIGAAILAVNFSSEWSVGQVSTNTSYKAFSSEWISADIGLQVGLGGVNITLTGTPVQQLNETINYNEEFTWRLGENYAEEYAKALEKGLPDPVLYLAEKFTPRSPCGLYRQYRLAGHYTSAMLWVAFLCWLLANVMLSMPVLVYGGYMLLATGIFQLLALLFFSMATSLTSPCPLHLGASVLHTHHGPAFWITLTTGLLCVLLGLAMAVAHRMQPHRLKAFFNQSVDEDPMLEWSPEEGGLLSPRYRSMADSPKSQDIPLSEASSTKAYCKEAHPKDPDCAL

SEQ ID NO: 917442 - protein, 359 aa, Homo sapiens
MATLGHTFPFYAGPKPTFPMDTTLASIIMIFLTALATFIVILPGIRGKTRLFWLLRVVTSLFIGAAILAVNFSSEWSVGQVSTNTSYKAFSSEWISADIGLQVGLGGVNITLTGTPVQQLNETINYNEEFTWRLGENYAEEYAKALEKGLPDPVLYLAEKFTPRSPCGLYRQYRLAGHYTSAMLWQVEVPGPVLTGSWLSRVAFLCWLLANVMLSMPVLVYGGYMLLATGIFQLLALLFFSMATSLTSPCPLHLGASVLHTHHGPAFWITLTTGLLCVLLGLAMAVAHRMQPHRLKAFFNQSVDEDPMLEWSPEEGGLLSPRYRSMADSPKSQDIPLSEASSTKAYCKEAHPKDPDCAL

SEQ ID NO: 917443 - protein, 129 aa, Homo sapiens
SETNLRGLQTWKRVPLAKVTGEESIKVGAKEPDIKEENEHQELGRAPREGVGKRGTACPHLEDLANPSNKLGSVKLHSLSTTQDTGDQNNSKEKVMRCTEKFREYSKAAEDIKNRISQKKRHFYPSNPQ

SEQ ID NO: 917444 - protein, 212 aa, Homo sapiens
MLQTADGTFHIQPLIGFSPTRPAPQRCCWWSALWGRVEREALRERLCMRASVHGASLDPCGCGMGACCLPGSILRAMLGGLATSILAPTLGSQYGGCPHFTDGDTGLEMPHHLCRTTSDGGGPPEEALEDSSGQSPVSSEGQRHCRPPTLVAVSGTGILGVLEADCREALPQRSHVVGPWWDVLAPGGLEAPAGGQLGPVFLEEAVLPCGYL

SEQ ID NO: 917445 - protein, 530 aa, Homo sapiens
MSTAIREVGVWRQTRTLLLKNYLIKCRTKKSSVQEILFPLFFLFWLILISMMHPNKKYEEVPNIELNPMDKFTLSNLILGYTPVTNITSSIMQKVSTDHLPDVIITEEYTNEKEMLTSSLSKPSNFVGVVFKDSMSYELRFFPDMIPVSSIYMDSRAGCSKSCEAAQYWSSGFTVLQASIDAAIIQLKTNVSLWKELESTKAVIMGETAVVEIDTFPRGVILIYLVIAFSPFGYFLAIHIVAEKEKKIKEFLKIMGLHDTAFCGIQKTYRKKGENVEALRNLSFDIYEGQITALLGHSGTGKSTLMNILCGLCPPSDGFASIYGHRVSEIDEMFEARKMIGICPQLDIHFDVLTVEENLSILASIKGIPANNIIQEVQKVLLDLDMQTIKDNQAKKLSGGQKRKLSLGIAVLGNPKILLLDEPTAGMDPCSRHIVWNLLKYRKANRVTVFSTHFMDEADILAGLFSALDSHSNLGVISYGVSMTTLEDVFLKLEVEAEIDQADLYFLKPGDKPHKYKTSLLLQNSAGESV

SEQ ID NO: 917446 - protein, 530 aa, Homo sapiens; identical to SEQ ID NO: 917445

SEQ ID NO: 917447 - protein, 169 aa, Homo sapiens
SSSHHIAMCKDHRKKTLEAVKQNLDCLNSDLEKDLQKLDMENQVLLRKIKEKEETISSLERKLALSLEEAKEEEELNYVIDEQEESLRELELETAKLEKSNAILSRNVVEVQKKISGLFTNIGLEEETTKQILEEMKARLQKSTESCAKQEEELAKAEAMSLPLRVCPG

SEQ ID NO: 917448 - protein, 153 aa, Homo sapiens
MPLKSACQVWPLQHKYKESDDTRRRACPTPLARTLLGGLRLFSWRPPDFRLLTSEPGCFVLQHGLSELLETSQNCSYSQIHMITVDCQIHMITPPQVPFWLIEPGADPRNGNEEERPHEDKVAICKPGRGPSPEPEPDQNLANPLSKMSIISA

SEQ ID NO: 917449 - protein, 313 aa, Homo sapiens
MSYLLAADIIHSVNIMKEVRRALCNAATDDSKLLLLSAVGSVFCSGLDYSYLIGRLSSDRRKESTRIAEAIRDFVKAFIQFKKPIVVAINGPALGLGASILPLCDIVWASEKAWFQTPYATIRLTPAGCSSYTFPQILGVALKQVWTGESTDDSWHVGSTCCVLGWAVNAVHAPVRQDSCDPHFADVETEAREVYPTSPQAGTQPWMVLGLTDANEMLFCGRKLTAQEACSRGLVSQVFWPTTFSQEVMLRVKEMASCSAVVLEESKCLVRSFLKSVLEDVNEKECLMLKQLWSSSKGLDSLFSYLQDKIYEV

SEQ ID NO: 917450 - protein, 156 aa, Homo sapiens
MSSYISHFLDLCHAHPYLENSHSSNTEVAFSSSRASNHLLLCDRYDRCPRQVTSPALPNAGSLIVGKHTTSNKVQLSDTGTPHRLSQPLQGRDAKKTCTFPATQNCLLHGMVLTGETLKDHRSWRFHVSLSSNIRWVQNRRKRTQDSRATELLIGG

SEQ ID NO: 917451 - protein, 782 aa, Homo sapiens
VTILAAQQKSPLPRRRLWVCISLESQSSQHVPHLKDFISSPLSCGTLPGLQLPSSPDKASLRMRRQQQLSKSLGDSKNRHKKPKDPKPKVKKLKYHQYIPPDQKAEKSPPPMDSAYARLLQQQQLFLQLQILSQQQQQQQHRFSYLGMHQAQLKEPNEQMVRNPNSSSTPLSNTPLSPVKNSFSGQTGVSSFKPGPLPPNLDDLKVSELRQQLRIRGLPVSGTKTALMDRLRPFQDCSGNPVPNFGDITTVTFPVTPNTLPNYQSSSSTSALSNGFYHFGSTSSSPPISPASSDLSVAGSLPDTFNDASPSFGLHPSPVHVCTEESLMSSLNGGSVPSELDGLDSEKDKMLVEKQKVINELTWKLQQEQRQVEELRMQLQKQKRNNCSEKKPLPFLAASIKQEEAVSSCPFASQVPVKRQSSSSECHPPACEAAQLQPLGNAHCVESSDQTNVLSSTFLSPQCSPQHSPLGAVKSPQHISLPPSPNNPHFLPSSSGAQGEGHRVSSPISSQVCTAQIHEFNAFLHILPMQMAGLHSSDKVGPKFSIPSPTFSKSSSAISEVTQPPSYEDAVKQQMTRSQQMDELLDVLIESGEMPADAREDHSCLQKVPKIPRSSRSPTAVLTKPSASFEQASSGSQIPFDPYATDSDEHLEVLLNSQSPLGKMSDVTLLKIGSEEPHFDGIMDGFSGKAAEDLFNAHEILPGPLSPMQTQFSPSSVDSNGLQLSFTESPWETMEWLDLTPPNSTPGFSALTTSSPSIFNIDFLDVTDLNLNSSMDLHLQQW

SEQ ID NO: 917452 - protein, 222 aa, Homo sapiens
GNPCPKSPCVQQKQMTRSQQMDELLDVLIESGEMPADAREDHSCLQKVPKIPRSSRSPTAVLTKPSASFEQASSGSQIPFDPYATDSDEHLEVLLNSQSPLGKMSDVTLLKIGSEEPHFDGIMDGFSGKAAEDLFNAHEILPGPLSPMQTQFSPSSVDSNGLQLSFTESPWETMEWLDLTPPNSTPGFSALTTSSPSIFNIDFLDVTDLNLNSSMDLHLQQW

SEQ ID NO: 917453 - protein, 134 aa, Homo sapiens
MSRTVSPPDPTRNKKTPLPTSMVPTSPGRLCCLAVHSSGSGIGDFGWNRGCALTQNRDSNTGCVRDRSEVIFMYYGAVCSQSIHVLLFSHQKHLTPAIGVHGGGHQFLCWLRSFSEGMDNSLPPWKKAEMSVQI

SEQ ID NO: 917454 - protein, 166 aa, Homo sapiens
MRNNNLSFKGVLKRQEGGNEKRMTVFLSLKGAQYLLSQQVYTVSTPECHQPKPDQRRVPCYSECKPCSRAGHGILRPLPSPIGSVLPASALPPAHWVPAVRASLLFNGMRPMPLLGTQDPGPRTRVQQRPFTEAILPKRPLRNGVFYFAFCTGRTNGEKSPEIGLV

SEQ ID NO: 917455 - protein, 158 aa, Homo sapiens
MADEALFLLLHNEMVSGVYKSAEQGEVENGRCITKLENMGFRVGQGLIERFTKDTARFKDELDIMKFICKDFWTTVFKKQIDNLRTNHQGIYVLQDNKFRLLTQMSAGKQYLEHASKYLAFTCGLIRGGLSNLGIKSIVTAEVSSMPACKFQVMIQKL

SEQ ID NO: 917456 - protein, 158 aa, Homo sapiens; identical to SEQ ID NO: 917455

SEQ ID NO: 917457 - protein, 158 aa, Homo sapiens; identical to SEQ ID NO: 917455

SEQ ID NO: 917458 - protein, 158 aa, Homo sapiens; identical to SEQ ID NO: 917455

SEQ ID NO: 917459 - protein, 130 aa, Homo sapiens
MADEALFLLLHNEMVSGVYKSAEQGEVENGRCITKLENMGFRVGQGLIERFTKDTARFKDELDIMKFICKDFWTTVFKKQIDNLRTNHQYLAFTCGLIRGGLSNLGIKSIVTAEVSSMPACKFQVMIQKL

SEQ ID NO: 917460 - protein, 143 aa, Homo sapiens
MQHQVQCHFTGLPFSFLKTFTTLALFVHPSRSAEKHSPHTLHVSCEWIFHFTCQFWKTLNLCVDGKLKFSGIFAPHSPNFSKELFQCYFSLVSLFSLSLLEYNFIRSPQSTIDKLTLKNTACNVVLVYVTRLQLTASASFHRV

SEQ ID NO: 917461 - protein, 134 aa, Homo sapiens
MQWAKCALSSEILASSPAERMRLAQRSPSEYAFSLCWVPGIVLGTGNKGYLLLLIDYLMLYNLSGYKQQSVICNIRKATVSFRGSKRASYLPKVTQPVLMALDSDLGILVLEPLILTQGASVPPQDRVWLQRGP

SEQ ID NO: 917462 - protein, 895 aa, Homo sapiens
QLINGNHTANKWKPFSCEFNMEANQCPLVVEPSYPDLVINVGEVTLGEENRKKLQKIQRDQEKERVMRAACALLNSGGGVIRMAKKVEHPVEMGLDLEQSLRELIQSSDLQAFFETKQQGRCFYIFVKSWSSGPFPEDRSVKPRLCSLSSSLYRRSETSVRSMDSREAFCFLKTKRKPKILEEGPFHKIHKGVYQELPNSDPADPNSDPADLIFQKDYLEYGEILPFPESQLVEFKQFSTKHFQEYVKRTIPEYVPAFANTGGGYLFIGVDDKSREVLGCAKENVDPDSLRRKIEQAIYKLPCVHFCQPQRPITFTLKIVNVLKRGELYGYACMIRVNPFCCAVFSEAPNSWIVEDKYVCSLTTEKWVGMMTDTDPDLLQLSEDFECQLSLSSGPPLSRPVYSKKGLEHKKELQQLLFSEACSIIQLKKKKTYAMIRSWAVDLNLQEKPGVICDALLIAQNSTPILYTILREQDAEGQDYCTRTAFTLKQKLVNMGGYTGKVCVRAKVLCLSPESSAEALEAAVSPMDYPASYSLAGTQHMEALLQSLVIVLLGFRSLLSDQLGCEVLNLLTAQQYEIFSRSLRKNRELFVHGLPGSGKTIMAMKIMEKIRNVFHCEAHRILYVCENQPLRNFISDRNICRAETRKTFLRENFEHIQHIVIDEAQNFRTEDGDWYGKAKSITRRAKGGPGILWIFLDYFQTSHLDCSGLPPLSDQYPREELTRIVRNADPIAKYLQKEMQVIRSNPSFNIPTGCLEVFPEAEWSQGVQGTLRIKKYLTVEQIMTCVADTCRRFFDRGYSPKDVAVLVSTAKEVEHYKYELLKAMRKKRVVQLSDACDMLGDHIVLDSVRRFSGLERSIVFGIHPRTADPAILPNVLICLASRAKQHLYIFPWGGH

SEQ ID NO: 917463 - protein, 895 aa, Homo sapiens; identical to SEQ ID NO: 917462

SEQ ID NO: 917464 - protein, 895 aa, Homo sapiens; identical to SEQ ID NO: 917462

SEQ ID NO: 917465 - protein, 877 aa, Homo sapiens
QLINGNHTANKWKPFSCEFNMEANQCPLVVEPSYPDLVINVGEVTLGEENRKKLQKIQRDQEKERVMRAACALLNSGGGVIRMAKKVEHPVEMGLDLEQSLRELIQSSDLQAFFETKQQGRCFYIFVKSWSSGPFPEDRSVKPRLCSLSSSLYRRSETSVRSMDSREAFCFLKTKRKPKILEEGPFHKIHKGVYQELPNSDPADPNSDPADLIFQKDYLEYGEILPFPESQLVEFKQFSTKHFQEYVKRTIPEYVPAFANTGGGYLFIGVDDKSREVLGCAKENVDPDSLRRKIEQAIYKLPCVHFCQPQRPITFTLKIVNVLKRGELYGYACMIRVNPFCCAVFSEAPNSWIVEDKYVCSLTTEKWVGMMTDTDPDLLQLSEDFECQLSLSSGPPLSRPVYSKKGLEHKKELQQLLFSEACSIIQLKKKKTYAMIRSWAVDLNLQEKPGVICDALLIAQNSTPILYTILREQDAEGQDYCTRTAFTLKQKLVNMGGYTGKVCVRAKVLCLSPESSAEALEAAVSPMDYPASYSLAGTQHMEALLQSLVIVLLGFRSLLSDQLGCEVLNLLTAQQYEIFSRSLRKNRELFVHGLPGSGKTIMAMKIMEKIRNVFHCEAHRILYVCENQPLRNFISDRNICRAETRKTFLRENFEHIQHIVIDEAQNFRTEDGDWYGKAKSITRRAKGGPGILWIFLDYFQTSHLDCSGLPPLSDQYPREELTRIVRNADPIAKYLHLEVFPEAEWSQGVQGTLRIKKYLTVEQIMTCVADTCRRFFDRGYSPKDVAVLVSTAKEVEHYKYELLKAMRKKRVVQLSDACDMLGDHIVLDSVRRFSGLERSIVFGIHPRTADPAILPNVLICLASRAKQHLYIFPWGGH

SEQ ID NO: 917466 - protein, 211 aa, Homo sapiens
IIWPRQPKSTGQQALMLFCTTAMSPFRTKVHIPYDFSRSTDRKTSAILSLSTLQLVQQHQRFSSDHGIHWSYHMLQYPETSDLAVLWTVLVKVQLWYQLADEIGHGPFYPKSHQLPQQQGKGHRKSSDRCYVTQSSGNITGNSSRYVRREISHNGACTIFGRAGGGEVTFFKAFRENQRHQQASMLPLAPGPSLLFVDFKHQLKLMGPACL

SEQ ID NO: 917467 - protein, 232 aa, Homo sapiens
MRAPSDSRHRPAARPPPGAVTPARRFRSAHIWLSHCAAGPGSIFFSTLIMTTQVITCKTRRMNNSQCKMLENICFAGLVYQSPTLCLNGVQVPEAIDFYIVKCGNITSCPKTIVSSSLHCLWSILKVENYQTALQVEYFVRINEHNFCTAIATNAITITITITTITTTITITTTTINTYTITTISTIISTIIITMPPPPPLPLPMPEWKRSGGARCLRQNFLPQILHYHHCC

SEQ ID NO: 917468 - protein, 169 aa, Homo sapiens
MALCQYLEEHAEELNFQDAKILEIGAGPGLVSIVASILGAQVTATDLPDVLGNLQYNLLKNTLQCTAHLPEVKELVWGEDLDKNFPKSAFYYDYVLASDVVYHHYFLDKLLTTMVYLSQPGTVLLWANKFRFSTDYEFLDKFKQVFDTTLLAEYPESSVKLFKGILKWD

SEQ ID NO: 917469 - protein, 178 aa, Homo sapiens
SLIISPLQAMALCQYLEEHAEELNFQDAKILEIGAGPGLVSIVASILGAQVTATDLPDVLGNLQYNLLKNTLQCTAHLPEVKELVWGEDLDKNFPKSAFYYDYVLASDVVYHHYFLDKLLTTMVYLSQPGTVLLWANKFRFSTDYEFLDKFKQVFDTTLLAEYPESSVKLFKGILKWD

SEQ ID NO: 917470 - protein, 245 aa, Homo sapiens
MCGNIKETVKSLRHQQINTVQNLRAKTFEGGVCPVLSWAPGVGSARKLCLREPAAGDFPARTWRVEDGGWKDSVQLRLGGIPRLLGPQERLHVLEHGALGRQGAPECATPPNLLPCCVGQPGSRCRGSAPARWPPPGREDACPRTAPVFPSPLFGPGGRGPRRRAREPGDPAIDSNREAAVYSNTAPPGPSPGNAARPGAPSAWRGHPPSQLPWAAASPARPRPLPSPDIIRRVRGLSGPREAVR

SEQ ID NO: 917471 - protein, 586 aa, Homo sapiens
MTQSLICSLILDKPPLLFGLVFPEEVEKKANNERQKAERVLEVQIQTLIIQKEELNTDLYHMERSLRYFEEESKDLAVRLQHSLQCKGELERALSAVIATEKKKANQLSSCSKAHTEWELEQSLQDQALLKAQLTQLKESFQQLQLERDECAEHIEGERARWHQRMSKMSQEICTLKKEKQDMRWVEQLEWSLSKLKNQTAEPLPPEPPAVPSEVELQHLRKELERVAGELQSQVKNNQHISLLNRRQEERIREQEERLRKQEERLQEQHEKLRQLAKPQSVFEELNNENKSTLQLEQQVKELQEKLGEVELKSQEVQSLQQQPDHYLGHLQQYVATYQQQVAAYQQLTCEKEALRMLTSCPQVAFFKSAGASAQEKQAQLQEQVKEQRVCCQRLAHPVASAQKEPEAARGPGAPGPGGESVSGETHRALQEVTEKLAHARTHLRLLHDLKMPPEGRSLPRCDCNILAPEQLYGPPEGEGRPEAIRGAPASEPCPPAGKSITFYQNQGAVPKMQHWEEDTIRLELREEMKVKLLELQQMVLRLTATTTMGTENSWPLPTTLLMSPVQEPQPPRSLGLQTSMVIFVR

SEQ ID NO: 917472 - protein, 579 aa, Homo sapiens
MDVVEVAGSWWAQEREDIIMKYEKGHRAGLPEDKGPKPFRSYNNNVDHLGIVHETELPPLTAREAKQIRREISRKSKWVDMLGDWEKYKSSRKLIDRAYKGMPMNIRGPMWSVLLNIEEMKLKNPGRYQIMKEKGKRSSEHIQRIDRDISGTLRKHMFFRDRYGTKQRELLHILLAYEEYNPEVGYCRDLSHIAALFLLYLPEEDAFWALVQLLASERHSPAGDFTAQMAGPSRGSKDQQEHVVATSQSKTMGHQDKKDLCGQCSPLGCLIRILIDGISLGLTLRLWDVYLVEGEQALMPITRIAFKVQQKRLTKTSRCGPWARFCNRFVDTWARDEDTVLKHLRASMKKLTRKQGDLPPPAKPEQGSSASRPVPASRGGKTLCKGDRQAPPGPPARFPRPIWSASPPRAPRSSTPCPGGAVREDTYPVGTQGVPSPALAQGGPQGSWRFLQWNSMPRLPTDLDVEGPWFRHYDFRQSCWVRAISQEDQLAPCWQAEHPAERVRSAFAAPSTDSDQGTPFRARDEQQLSFLEEEQLLLLVTSTFRNGDYSVNRQGDDLSAQATPGHAGHLPAPVIIIAI

SEQ ID NO: 917473 - protein, 598 aa, Homo sapiens
YTAKAHLGIVQSCPSWESAPQEGPCPPFPVPSPGLSPELERDRASPFWGSAPRLGPLQAPCSSSALPGLPYSETELPPLTAREAKQIRREISRKSKWVDMLGDWEKYKSSRKLIDRAYKGMPMNIRGPMWSVLLNIEEMKLKNPGRYQIMKEKGKRSSEHIQRIDRDISGTLRKHMFFRDRYGTKQRELLHILLAYEEYNPEVGYCRDLSHIAALFLLYLPEEDAFWALVQLLASERHSPAGDFTAQMAGPSRGSKDQQEHVVATSQSKTMGHQDKKDLCGQCSPLGCLIRILIDGISLGLTLRLWDVYLVEGEQALMPITRIAFKVQQKRLTKTSRCGPWARFCNRFVDTWARDEDTVLKHLRASMKKLTRKQGDLPPPAKPEQGSSASRPVPASRGGKTLCKGDRQAPPGPPARFPRPIWSASPPRAPRSSTPCPGGAVREDTYPVGTQGVPSPALAQGGPQGSWRFLQWNSMPRLPTDLDVEGPWFRHYDFRQSCWVRAISQEDQLAPCWQAEHPAERVRSAFAAPSTDSDQGTPFRARDEQQLSFLEEEQLLLLVTSTFRNGDYSVNRQGDDLSAQATPGHAGHLPAPVIIIAI

SEQ ID NO: 917474 - protein, 630 aa, Homo sapiens
MDVVEVAGSWWAQEREDIIMKYEKAPSGLQGHRAGLPEDKGPKPFRSYNNNVDHLGIVHETELPPLTAREAKQIRREISRKSKWVDMLGDWEKYKSSRKLIDRAYKGMPMNIRGPMWSVLLNIEEMKLKNPGRYQIMKEKGKRSSEHIQRIDRDISGTLRKHMFFRDRYGTKQRELLHILLAYEEYNPPLFQRKPLLQRKPLQSPLPSPMNESSQVTSALPGDVLPWCLWLLQEVGYCRDLSHIAALFLLYLPEEDAFWALVQLLASERHSPAGDFTAQMAGPSRGSKDQQEHVVATSQSKTMGHQDKKDLCGQCSPLGCLIRILIDGISLGLTLRLWDVYLVEGEQALMPITRIAFKVQQKRLTKTSRCGPWARFCNRFVDTWARDEDTVLKHLRASMKKLTRKQGDLPPPAKPEQGSSASRPVPASRGGKTLCKGDRQAPPGPPARFPRPIWSASPPRAPRSSTPCPGGAVREDTYPVGTQGVPSPALAQGGPQGSWRFLQWNSMPRLPTDLDVEGPWFRHYDFRQSCWVRAISQEDQLAPCWQAEHPAERVRSAFAAPSTDSDQGTPFRARDEQQLSFLEEEQLLLLVTSTFRNGDYSVNRQGDDLSAQATPGHAGHLPAPVIIIAI

SEQ ID NO: 917475 - protein, 478 aa, Homo sapiens
MPMNIRGPMWSVLLNIEEMKLKNPGRYQIMKEKGKRSSEHIQRIDRDISGTLRKHMFFRDRYGTKQRELLHILLAYEEYNPEVGYCRDLSHIAALFLLYLPEEDAFWALVQLLASERHSPAGDFTAQMAGPSRGSKDQQEHVVATSQSKTMGHQDKKDLCGQCSPLGCLIRILIDGISLGLTLRLWDVYLVEGEQALMPITRIAFKVQQKRLTKTSRCGPWARFCNRFVDTWARDEDTVLKHLRASMKKLTRKQGDLPPPAKPEQGSSASRPVPASRGGKTLCKGDRQAPPGPPARFPRPIWSASPPRAPRSSTPCPGGAVREDTYPVGTQGVPSPALAQGGPQGSWRFLQWNSMPRLPTDLDVEGPWFRHYDFRQSCWVRAISQEDQLAPCWQAEHPAERVRSAFAAPSTDSDQGTPFRARDEQQLSFLEEEQLLLLVTSTFRNGDYSVNRQGDDLSAQATPGHAGHLPAPVIIIAI

SEQ ID NO: 917476 - protein, 208 aa, Homo sapiens
CGAAAARRSRRRLLFMRLRRAGRTPPQRRRPQGRSGPSPRLPARPPGGGLVTSAAGTCSRSRCPPLPAGRRSPLRAVPCPAPRTASSPGPPDAGLAPPQPCGPQGAPPHARPAPRPLPSHWLRPPSPRFLRRGWGSLAGRLAGPSHPLRRRRTVPSPIAGSVILKPRSTHSSRPLARRSSLHWLAAPVRFLGEFSTSRQEEAPASLGA

SEQ ID NO: 917477 - protein, 208 aa, Homo sapiens; identical to SEQ ID NO: 917476

SEQ ID NO: 917478 - protein, 226 aa, Homo sapiens
LPGMYKLQCNNCATNGATERKQAAGSGAGYALPSALQSIPQGSYATARFLVAKRPTTGHLEKEFMFHCRKQPGSPSRGLGLLWPWPDIEFVPRQDKLTQSSVLVPQICACQTRPNWLNEQPATSAGVRLEEVDQPPTLPSQGSGWPCSHSLSGCHLMADGAKALGKADGPWPYLFVRRTDVPCPAAMSPSGALVTQECGFISCKALWNPADIIMIIKQNTQRNCQP

SEQ ID NO: 917479 - protein, 141 aa, Homo sapiens
MVHGERSSSEPRWGERFKPRPGSLLRFQSTLVIAEHANDSLAPITLNTITAATRLGGEVSCLVAGTKCDKVAQDLCKVAGIAKVLVAQHDVYKGLLPEELTPLILATQKQFNYTHICAGASAFGKKWGFAIAAQALLELLA

SEQ ID NO: 917480 - protein, 188 aa, Homo sapiens
MTIYTEQDLYNHVVPKPRNKRVPILPFVIGAGVLGGVGTGTGGITTSIQFYYKLSQELNGDMERVSDSLVTLQDQLNSLAANRSCKATNGSSNGAPDAIHEKQLALLHYEQVEKFTAHLVTQKRSGGQGDHHQSLQQVFHFLLISKPVGPGVTQGDLTRSTLCAAQVYQPWNDAHFPCVTTNSLQFLL

SEQ ID NO: 917481 - protein, 157 aa, Homo sapiens
MTSCSKGQLLIGGHLLLIGGHVLLQVTQVMVWLLLQTLSLLALQLHLQEDPGCAFSSAWSCRDCSNSHSVCALLQLDNWMVKSEKFQSGEPGHFHTVPLNRARARPNIQLGRGRQSSYQGEAEMAQQETCPQNATNAPGQAHPWDQIIFVTRRKPTK

SEQ ID NO: 917482 - protein, 441 aa, Homo sapiens
MLLSGAPPAGSRPGPRTQGSAGGGPGGSRRGAGGAGAGPGGGGSGGVAKWLREHLGFRGGGGGGGGSKPAPPEPDYRPPAPSPAAPPAPPPDILAAYRLQRERDFEDPYSGGSSGSAALATPVAPGPTPPPRHGSPPHRLIRVETPGPPAPPADERISGPPASSDRLAILEDYADPFDVQETGEGSAGASGAPEKVPENDGYMEPYEAQKMMAEIRGSKETATQPLPLYDTPYEPEEDGATPEGEGAPWPRESRLPEDDERPPEEYDQPWEWKKERISKAFAAQFEGPEKSCLSPGREEKGRLPPRLSAGNPKSAKPLSMEPSSPLGEWTDPALPLENQVWYHGAISRTDAENLLRLCKEASYLVRNSETSKNDFSLSLKSSQGFMHMKLSRTKEHKYVLGQNSPPFSSVPEIVHHYASRKLPIKGAEHMSLLYPVAIRTL

SEQ ID NO: 917483 - protein, 364 aa, Homo sapiens
ETCLDCKPVSVEFGCMRSSSGWLPPGAAADERISGPPASSDRLAILEDYADPFDVQETGEGSAGASGAPEKVPENDGYMEPYEAQKMMAEIRGSKETATQPLPLYDTPYEPEEDGATPEGEGAPWPRESRLPEDDERPPEEYDQPWEWKKERISKAFAVDIKVIKDLPWPPPVGQLDSSPSLPDGDRDISGPASPLPEPSLEDSSAQFEGPEKSCLSPGREEKGRLPPRLSAGNPKSAKPLSMEPSSPLGEWTDPALPLENQVWYHGAISRTDAENLLRLCKEASYLVRNSETSKNDFSLSLKSSQGFMHMKLSRTKEHKYVLGQNSPPFSSVPEIVHHYASRKLPIKGAEHMSLLYPVAIRTL

SEQ ID NO: 917484 - protein, 295 aa, Homo sapiens
MLLSGAPPAGSRPGPRTQGSAGGGPGGSRRGAGGAGAGPGGGGSGGVAKWLREHLGFRGGGGGGGGSKPAPPEPDYRPPAPSPAAPPAPPPDILAAYRLQRERDFEDPYSGGSSGSAALATPVAPGPTPPPRHGSPPHRLIRVETPGPPAPPADERISGPPASSDRLAILEDYADPFDVQETGEGSAGASGAPEKVPENDGYMEPYEAQKMMAEIRGSKETATQPLPLYDTPYEPEEDGATPEGEGAPWPRESRLPEDDERPPEEYDQPWEWKKERISKAFAGESWWRGQVSWGL

SEQ ID NO: 917485 - protein, 440 aa, Homo sapiens
MYDGAPPAGSRPGPRTQGSAGGGPGGSRRGAGGAGAGPGGGGSGGVAKWLREHLGFRGGGGGGGGSKPAPPEPDYRPPAPSPAAPPAPPPDILAAYRLQRERDFEDPYSGGSSGSAALATPVAPGPTPPPRHGSPPHRLIRVETPGPPAPPADERISGPPASSDRLAILEDYADPFDVQETGEGSAGASGAPEKVPENDGYMEPYEAQKMMAEIRGSKETATQPLPLYDTPYEPEEDGATPEGEGAPWPRESRLPEDDERPPEEYDQPWEWKKERISKAFAAQFEGPEKSCLSPGREEKGRLPPRLSAGNPKSAKPLSMEPSSPLGEWTDPALPLENQVWYHGAISRTDAENLLRLCKEASYLVRNSETSKNDFSLSLKSSQGFMHMKLSRTKEHKYVLGQNSPPFSSVPEIVHHYASRKLPIKGAEHMSLLYPVAIRTL

SEQ ID NO: 917486 - protein, 295 aa, Homo sapiens
MLLSGAPPAGSRPGPRTQGSAGGGPGGSRRGAGGAGAGPGGGGSGGVAKWLREHLGFRGGGGGGGGSKPAPPEPDYRPPAPSPAAPPAPPPDILAAYRLQRERDFEDPYSGGSSGSAALATPVAPGPTPPPRHGSPPHRLIRVETPGPPAPPADERISGPPASSDRLAILEDYADPFDVQETGEGSAGASGAPEKVPENDGYMEPYEAQKMMAEIRGSKETATQPLPLYDTPYEPEEDGATPEGEGAPWPRESRLPEDDERPPEEYDQPWEWKKERISKAFAARLENHRILIFFL

SEQ ID NO: 917487 - protein, 932 aa, Homo sapiens
MGVSRSASTVIAYAMKEYGWNLDRAYDYVKERRTVTKPNPSFMRQLEEYQGILLASKQRHNKLWRSHSDSDLSDHHEPICKPGLELNKKDITTSADQIAEVKTMESHPPIPPVFVEHMVPQDANQKGLCTKERMICLEFTSREFHAGQIEDELNLNDINGCSSGCCLNESKFPLDNCHASKALIQPGHVPEMANKFPDLTVEDLETDALKADMNVHLLPMEELTSPLKDPPMSPDPESPSPQPSCQTEISDFSTDRIDFFSALEKFVELSQETRSRSFSHSRMEELGGGRNESCRLSVVEVAPSKVTADDQRSSSLSNTPHASEESSMDEEQSKAISELVSPDIFMQSHSENAISVKEIVTEIESISQGVGQIQLKGDILPNPCHTPKKNSIHELLLERAQTPENKPGHMEQDEDSCTAQPELAKDSGMCNPEGCLTTHSSIADLEEGEPAEGEQELQGSGMHPGAKWYPGSVRRATLEFEERLRQEQEHHGAAPTCTSLSTRKNSKNDSSVADLAPKGKSDEAPPEHSFVLKEPEMSKGKGKYSGSEAGSLSHSEQNATVPAPRVLEFDHLPDPQEGPGSDTGTQQEGVLKDLRTVIPYQESETQAVPLPLPKRVEIIEYTHIVTSPNHTGPGSEIATSEKSGEQGLRKVNMEKSVTVLCTLDENLNRTLDPNQVSLHPQVLPLPHSSSPEHNRPTDHPTSILSSPEDRGSSLSTALETAAPFVSHTTHLLSASLDYLHPQTMVHLEGFTEQSSTTDEPSAEQVSWEESQESPLSSGSEVPYKDSQLSSADLSLISKLGDNTGELQEKMDPLPVACRLPHSSSSENIKSLSHSPGVVKERAKEIESRVVFQAGLTKPSQMRRSASLAKLGYLDLCKDCLPEREPASCESPHLKLLQPFLRTDSGMHAMEDQESLENPGVICKEHALYWLIL

SEQ ID NO: 917488 - protein, 1030 aa, Homo sapiens
MGVSRSASTVIAYAMKEYGWNLDRAYDYVKERRTVTKPNPSFMRQLEEYQGILLASKQRHNKLWRSHSDSDLSDHHEPICKPGLELNKKDITTSADQIAEVKTMESHPPIPPVFVEHMVPQDANQKGLCTKERMICLEFTSREFHAGQIEDELNLNDINGCSSGCCLNESKFPLDNCHASKALIQPGHVPEMANKFPDLTVEDLETDALKADMNVHLLPMEELTSPLKDPPMSPDPESPSPQPSCQTEISDFSTDRIDFFSALEKFVELSQETRSRSFSHSRMEELGGGRNESCRLSVVEVAPSKVTADDQRSSSLSNTPHASEESSMDEEQSKAISELVSPDIFMQSHSENAISVKEIVTEIESISQGVGQIQLKGDILPNPCHTPKKNSIHELLLERAQTPENKPGHMEQDEDSCTAQPELAKDSGMCNPEGCLTTHSSIADLEEGEPAEGEQELQGSGMHPGAKWYPGSVRRATLEFEERLRQEQEHHGAAPTCTSLSTRKNSKNDSSVADLAPKGKSDEAPPEHSFVLKEPEMSKGKGKYSGSEAGSLSHSEQNATVPAPRVLEFDHLPDPQEGPGSDTGTQQEGVLKDLRTVIPYQESETQAVPLPLPKRVEIIEYTHIVTSPNHTGPGSEIATSEKSGEQGLRKVNMEKSVTVLCTLDENLNRTLDPNQVSLHPQVLPLPHSSSPEHNRPTDHPTSILSSPEDRGSSLSTALETAAPFVSHTTHLLSASLDYLHPQTMVHLEGFTEQSSTTDEPSAEQVSWEESQESPLSSGSEVPYKDSQLSSADLSLISKLGDNTGELQEKMDPLPVACRLPHSSSSENIKSLSHSPGVVKERAKEIESRVVFQAGLTKPSQMRRSASLAKLGYLDLCKDCLPEREPASCESPHLKLLQPFLRTDSGMHAMEDQESLENPGAPHNPEPTKSFVEQLTTTECIVQSKPVERPLVQYAKEFGSSQQYLLPRAGLELTSSEGGLPVLQTQGLQCACPAPGLAVAPRQQHGRTHPLRRLKKANDKKRTTNPFYNTM

SEQ ID NO: 917489 - protein, 138 aa, Homo sapiens
MLEMHGCTGNLTCLADRHCRSQAGLEHSRFWHLRVVLKPVPHRYGELTAFQVKFMRIPRAEKKTASLEEENSNVTEIWEAEVKVQGFSSGWKLILERRKPRSVSSKICTKMPNRKTQLPIPSEIPSAWNSMDHSSANH

SEQ ID NO: 917490 - protein, 148 aa, Homo sapiens
MGTMQRHLADGPASAEGNGSVKAIVFKSLETPIKKSQSRITKPKHHVRYPQQNQVKRCPYKCQALSHTNQTTIVRRRQRGKRGTSDVLTNNPKLTTDSHLKAQQANLRRAVKSGWELSRLEFPGKTDVARDVWDLCTLDTNHPNLPSR

SEQ ID NO: 917491 - protein, 902 aa, Homo sapiens
MEANHCSLGVYPSYPDLVIDVGEVTLGEENRKKLQKTQRDQERARVIRAACALLNSGGGVIQMEMANRDERPTEMGLDLEESLRKLIQYPYLQAFFETKQHGRCFYIFVKSWSGDPFLKDGSFNSRICSLSSSLYCRSGTSVLHMNSRQAFDFLKTKERQSKYNLINEGSPPSKIMKAVYQNISESNPAYEVFQTDTIEYGEILSFLESPSIEFKQFSTKHIQQYVENIIPEYISAFANTEGGYLFIGVDDKSRKVLGCAKEQVDPDSLKNVIARAISKLPIVHFCSSKPRVEYSTKIVEVFCGKELYGYLCVIKVKAFCCVVFSEAPKSWMVREKYIRPLTTEEWVEKMMDADPEFPPDFAEAFESQLSLSDSPSLCRPVYSKKGLEHKADLQQHLFPGTDCQFLHQERRKSFNTFRGKQIHERLCPADPGVHSDNATSLLGMIPPGHLECTPESLWKELSLQHEGLKELIHKQMRPFSQGIVILSRSWAVDLNLQEKPGVICDALLIAQNSTPILYTILREQDAEGQDYCTRTAFTLKQKLVNMGGYTGKVCVRAKVLCLSPESSAEALEAAVSPMDYPASYSLAGTQHMEALLQSLVIVLLGFRSLLSDQLGCEVLNLLTAQQYEIFSRSLRKNRELFVHGLPGSGKTIMAMKIMEKIRNVFHCEAHRILYVCENQPLRNFISDRNICRAETRETFLREKFEHIQHIVIDEAQNFRTEDGDWYRKAKTITQREKDCPGVLWIFLDYFQTSHLGHSGLPPLSAQYPREELTRVVRNADEIAEYIQQEMQLIIENPPINIPHGYLAILSEAKWVPGVPGNTKIIKNFTLEQIVTYVADTCRCFFERGYSPKDVAVLVSTVTEVEQYQSKLLKAMRKKMVVQLSDACDMLGVHIVLDSDLLH

SEQ ID NO: 917492 - protein, 197 aa, Homo sapiens
ICEAKVNNGVGAARMINSDAPKGLRDRNRAGRIPSILTASRARLPWQPRRSTTRALERFASRGRAAPPVGLAPATEPAARRRRSLGHRSVKIFKGMCFAIYASESTCQIKVCCLNMITRKAKSLFLDFFSYKPPIDTYPLLYGAQMKDIGHLQHLAQRLQWNRRAVNICGMHGWTKDLSPHSRMPSMLEHVKHYMSC

SEQ ID NO: 917493 - protein, 168 aa, Homo sapiens
ICEAKVNNGVGAARMINSDAPKGLRDRNRAGRIPSILTASRARLPWQPRRSTTRALERFASRGRAAPPVGLAPATEPAARRRRSLGHITRKAKSLFLDFFSYKPPIDTYPLLYGAQMKDIGHLQHLAQRLQWNRRAVNICGMHGWTKDLSPHSRMPSMLEHVKHYMSC

SEQ ID NO: 917494 - protein, 168 aa, Homo sapiens; identical to SEQ ID NO: 917493

SEQ ID NO: 917495 - protein, 139 aa, Homo sapiens
MTTGSTRGYLGGHGLGVGVKVQRRNSSLGQPLSEGPPAMAASGGQGPSGHWRGQSSSFLSDPREGKWQLVLAHGPSPIPAAPPQQPPPRLTAVVSRWAEGWGGGFPTLDSSGLQRPAHRTTEGVRPQIAVLKDNDNTHF

SEQ ID NO: 917496 - protein, 138 aa, Homo sapiens
MANNGLSKTSLLDNPVIDNRSKMVRIVTRTIAVTNQQHCSDTYNVCINLLTLTTALSIPVLNKNVTTPERMPVTCFAGPSSTAVSKRPSATGGGGRCPSNHRPPETKLQRPGQGECGQGKLSWGIFEFVMILSLTRTG

SEQ ID NO: 917497 - protein, 138 aa, Homo sapiens; identical to SEQ ID NO: 917496

SEQ ID NO: 917498 - protein, 1618 aa, Homo sapiens
PPAPRVPMQPWQCLRRFALAWWERTAEGRARSPREEAGPRDPGGRGEPGEQARGKMTSCVNVAQGQPEDRVEGYIRDPERSSPPMLSADDAEYPREYRTLGGGGGGGSGGRRFSNVGLVHTSERRHTVIAAQSLEALSGLQKADADRKRDAFMDHLKSKYPQHALALRGQQDRMREQAGVSGDRGDAATSLRRSSAGLRRRGRAEGGGRERGCARRRAAPRQVESRLPGRLGPGPARRRPRRLSHCSKGHRRRRPRLRRRPGERRARAGGSRGPPSPAGRRTWGWGPRTYTCGRSKGERLWGPGSPPRVGRGAGTRRWGPAPRHREPSRGGGRPGHCRLCTGVRICTDTFWYGRWASGLQAVAAALGESGWDEGETEGCGLALVVSLELSHSLSVTSTSGPSLLPLAHFYAAFLLPRPTPTQWTFPGLDMGSDKQRGGGVLILGSSHPARPLQTRSSRHTQGAQPGLADQAAKLSYASAESLETMSEAELPLGFSRMNRFRQSLPLSRSASQTKLRSPAHFPSVSAPPALPPLPFPCPSSFNCLESSGCLERLESRPGAPAGSMRGAWVHLHSGAASSLRPCRCGAGAAPKSSPRSPGGRRGDGSSDSEGGVSFAGVLFLQFGEETRRVHITHEVSSLDTLHALIAHMFPQKLTMGMLKSPNTAILIKDEARNVFYELEDVRDIQDRSIIKIYRKEPLYAAFPGSHLTNGDLRREMVYASRESSPTRRLNNLSPAPHLASGSPPPGLPSGLPSGLQSGSPSRSRLSYAGGRPPSYAGSPVHHAAERLGGAPAAQGVSPSPSAILERRDVKPDEDLASKAGGMVLVKGEGLYADPYGLLHEGRLSLAAAAGDPFAYPGAGGLYKRGSVRSLSTYSAAALQSDLEDSLYKAAGGGGPLYGDGYGFRLPPSSPQKLADVAAPPGGPPPPHSPYSGPPSRGSPVRQSFRKDSGSSSVFAESPGGKTRSAGSASTAGAPPSELFPGPGERSLVGFGPPVPAKDTETRERMEAMEKQIASLTGLVQSALLRGSEPETPSEKIEGSNGAATPSAPCGSGGRSSGATPVSGPPPPSASSTPAGQPTAVSRLQMQLHLRGLQNSASDLRGQLQQLRKLQLQNQESVRALLKRTEAELSMRVSEAARRQEDPLQRQRTLVEEERLRYLNDEELITQQLNDLEKSVEKIQRDVSHNHRLVPGPELEEKALVLKQLGETLTELKAHFPGLQSKMRVVLRVEVEAVKFLKEEPQRLDGLLKRCRGVTDTLAQIRRQVDEGVWPPPNNLLSQSPKKVTAETDFNKSVDFEMPPPSPPLNLHELSGPAEGASLTPKGGNPTKGLDTPGKRSVDKAVSVEAAERDWEEKRAALTQYSAKDINRLLEETQAELLKAIPDLDCASKAHPGPAPTPDHKPPKAPHGQKAAPRTEPSGRRGSDELTVPRYRTEKPSKSPPPPPPRRSFPSSHGLTTTRTGEVVVTSKKDSAFIKKAESEELEVQKPQVKLRRAVSEVARPASTPPIMASAIKDEDDEDRIIAELESGGGSVPPMKVVTPGASRLKAAQGQAGSPDKSKHGKQRAEYMRIQAQQQATKPSKEMSGSNETSSPVSEKPSASRTSIPVLTSFGARNSSISF

SEQ ID NO: 917499 - protein, 255 aa, Homo sapiens
MSFELNQMRANGNTTSNKNSAAMDAEIVLRSLMDFLDKTLSLSAKICEKTVLKRVLKELWKLVLNKIEKQIVLPPLTDQTGPQMIFIAAKDLGQLSKLKEHMIREDARGLTPRQCAIMEVVLATIKQYFHAGGNGLKKNFLEKSPDLQSLRYALSLYTQTTDALIKKFIDTQTSQKIIENVSTSQKSQMQAQTSEPNKSYTTEIIKNPHITQLLTMIKPNGQHQSPVNKSCFLLVLLNQPKPHPHGKAPGQSSRP

SEQ ID NO: 917500 - protein, 378 aa, Homo sapiens
MGISGAGKARDPRIFFMDVSFSIHAPTLCFCSLAHELRLSCMERKKVQIRSMDPSALASDRFNLILADTNSDRLFTVNDVKVGGSKYGIINLQSLKTPTLKVFMHENLYFTNRKWSLACLEGSHTLHSPIPLAGIDRPGMLCSFRIPGAWSCAWSLNIQANNCFSTGLSRRVLLTNVVTGHRQSFGTNSDVLAQQFALMAPLLFNGCRSGEIFAIDLRCGNQGKGWKATRLFHDSAVTSVRILQDEQYLMASDMAGKVGDHGLSQATGSRGPVPCQIKLWDLRTTKCVRQYEGHVNEYAYLPLHVHEEEGILVAVGQDCYTRIWSLHDARLLRTIPSPYPASKADIPSVAFSSRLGGSRGAPGLLMAVGQDLYCYSYS

SEQ ID NO: 917501 - protein, 284 aa, Homo sapiens
MDEESELIQPQDQSCWAFLPDLCLCRVFWWLGDRDRSRAALVCRKWNQMMYSAELWRYRTITFSGRPSRVHASEVESAVWYVKKFGRYLEHLEVKFMNPYNAVLTKKFQVTMRGLLSCLSKSNNRLKSLSIQYLELDRLVWRNSIRSSFISSLSFFLKKMGKRLDYLNLKGARLTVEQGCQILDSLSYMRNENVISELNIEDYFSHHLAVYNSPQFKKTMSTFHNLVSLNLNYNCISDELLENLCENASTLRTINIKCHVHDPHGQVIWGDPDQEHQSEKLLFQ

SEQ ID NO: 917502 - protein, 784 aa, Homo sapiens
TVTVAVGTILNWVTKEAFLMRHHLSRYLKGTVTLDRSNKGFHNCYQVREESDIISLSQEPDEHPGDIFFKQTPTKDILTELYKLTTERERLLTNLLSSDHILGITMGNQEGKLQELSVSLAPEDDCFQSAGDWQGELPVGPLNKRSTHGNKKPRRSSGRRESFGALPQKRTKRKGRGGRESAPLMGKDKICSSHSLPLSRTRPNLWVLEEKGNLLPNGALACSLQRRESCPPDIPKTPDTDLGFGSFETAFKDTGLGREVLPPDCSSTEAGGDGIRRPPSGLEHQQTGLSESHQDPEKHPEAEKDEMEKPAKRTCKQKPVSKVVAKVQDLSSQVQRVVKTHSKGKETIAIRPAAHAEFVPKADLLTLPGAEAGAHGSRRQGKERQGDRSSQSPAGETASISSVSASAEGAVNKVPLKVIESEKLDEAPEGKRLGFPVHTSVPHTRPETRNKRRAGLPLGGHKSLFLDLPHKVGPDSSQPRGDKKKPSPPAPAALGKVFNNSASQSSTHKQTSPVPSPLSPRLPSPQQHHRILRLPALPGEREAALNDSPCRKSRVFSGCVSADTLEPPSSAKVTETKGASPAFLRAGQPRLVPGETLEKSLGPGKTTAEPQHQSPPAFHWDLQQHFQEPVIRTVSISCASNLIKEEAGKGKESRSGNQRKKAIQRGPWITHSPERKQIPARLKAQGKACVVTGAQTGEINGGDPLSGTVVSGRDTQRRGSCGDKYPGLTLLWTTSCKPPLTEPTRKQSVKEPSQGLWSTGSAFHGQEQVEKNGEWIWRSQWESG

SEQ ID NO: 917503 - protein, 234 aa, Homo sapiens
MSCPGCAEPRGFPILLLADQGLCIMTLTVPHIWLPPPRYYLMSSSAGSQTGVLRSGDAACSLQRRSLANTRSCPPEQNIVSLNISIGVPSLHRGPPLSGGVHSKTPSGSLKLGKGAYSVETLDKGGRVSRVGSVTLLRVPSAHPPPASGPVAGSQGNLSKVVASETTAPYQAPSLDPSCHLPAVCPGTHGSSPAAPQHPGLGHVSAASRNPVLLLTIKLCRAPSGNRSPKERGL

SEQ ID NO: 917504 - protein, 342 aa, Homo sapiens
MLGAMFRAGTPMPPNLNSQGGGHYFIDRDGKAFRHILNFLRLGRLDLPRGYGETALLRAEADFYQIRPLLDALRELEASQGTPAPTAALLHADVDVSPRLVHFSARRGPHHYELSSVQVDTFRANLFCTDSECLGALRARFGVASGDRAEGSPHFHLEWAPRPVELPEVEYGRLGLQPLWTGGPGERREVVGTPSFLEEVLRVALEHGFRLDSVFPDPEDLLNSRSLRFVPGILVHICVADYSVCDVRMSRPVWDEVSMNKVTEKTHRVLRVMEIKEAVSSLPSYWSWLRKTKLPEYTREGGSTTLYNCSTCKGTEVSCWPRKRCFPGPHAHLGPAPPCPDP

SEQ ID NO: 917505 - protein, 342 aa, Homo sapiens; identical to SEQ ID NO: 917504

SEQ ID NO: 917506 - protein, 272 aa, Homo sapiens
MEEESGEELGLDRSTPKDFHFYHMDLYDSEDRLHLFPEENTRMRKVVQAEMANESRGAGDGKAQRDLQEEVDELVHLYGLEDDHELGDEFVDENIPRTGVSEYPPYMMKRRDPAREQRDWRLSGEAAEAEDLGFGGWGSAGQCQDLREAYRYTHGRASEEYECYVIPEEEDEEEAADVFCVTCKTPIRAFQKVFDEHKEHEVIPLNEALESAKDEIHKNMYKLEKQIIEMENFANHLEEVFITVEVRAHLKTSSDSHFFHQWLCQAAVSGMS

SEQ ID NO: 917507 - protein, 376 aa, Homo sapiens
LVFWSLFIMSLQLLSLKEFLRGNGLAAGKMNISIDLDTNYAELVLNVGRVTLGENNRKKMKDCQLRKQQNENVSRAVCALLNSGGGVIKAEVENKGYSYKKDGIGLDLENSFSNMLPFVPNFLDFMQNGNYFHIFVKSWSLETSGPQIATLSSSLYKRDVTSAKVMNASAALEFLKDMEKTGGRAYLRPEFPAKRACVDVQEESNMEALAADFFNRTELGYKEKLTFTESTHVEIKNFSTEKLLQRITEILPQYVSAFANTDGGYLFVGLNEDKEVIGFKAEKSYLTKLEEVTKNSIGKLPVHHFCVEKGTINYLCKFLGVYDKGRLCGYVYALRVERFCCAVFAKKPDSWHVKDNRVKQLTEKEWIQFMVDSEPG

SEQ ID NO: 917508 - protein, 376 aa, Homo sapiens; identical to SEQ ID NO: 917507

SEQ ID NO: 917509 - protein, 376 aa, Homo sapiens; identical to SEQ ID NO: 917507

SEQ ID NO: 917510 - protein, 126 aa, Homo sapiens
RRPSAGGMSLYDRNAFRHVWGGHGDWGEEEKKTRVEKQTGSEDWEKNASIYWSFTTEQVNGLGTLEWVWPWGITQPLFRAFYFPSSIKSRNNDKNGGRFVSHHYPAPPLLFVHVERPLGLRCPPPV

SEQ ID NO: 917511 - protein, 471 aa, Homo sapiens
MPLEVLDVTKIIKYVSNFAEMEQEPQNGEPAEIKIIREAYKKAFLFVNKGLNTDELGQKEEAKNYYKQGIGHLLRGISISSKESEHTGPGWESARQMQQKMKETLQNVRTRLEILEKGLATSLQNDLQEVPKLYPEFPPKDMCEKLPEPQSFSSAPQHAEVNGNTSTPSAGAVAAPASLSLPSQSCPAEAPPAYTPQAAEGHYTVSYGTDSGEFSSVGEEFYRNHSQPPPLETLGLDADELILIPNGVQIFFVNPAGEVSAPSYPGYLRIVRFLDNSLDTVLNRPPGFLQVCDWLYPLVPDRSPVLKCTAGAYMFPDTMLQAAGCFVGVVLSSELPEDDRELFEDLLRQMSDLRLQANWNRAEEENEFQIPGRTRPSSDQLKEASGTDVKQLDQGNKDAKDTSSEEVNLSHIVPCEPVPEEKPKELPEWSEKVAHNILSGEFIGFKRPCCSRRVITGFNLFKACCGMGYWR

SEQ ID NO: 917512 - protein, 125 aa, Homo sapiens
MVKGFAAFLPLPFPWVHTALSGHRVLLITVLVVEGIAVAQKTQDGQNIGIKHIPATQCGIWVRTSNGGHFASPNYPDSYPPNKECIYILEAAPRQRIELTFDEHYYIEPSFECRSLLWREKPSIN

SEQ ID NO: 917513 - protein, 237 aa, Homo sapiens
MGAPRPPLQWIPRRGRGRSCLPVPRRASALLGPRAVDGTGRRGAGGGARRGARAAREPTVGLGHGGPQDLSSPQGSGEAAAGRRWGRSGAVAAAPSRERRATAAATSALRRSAGQLGNMALERLLLVLKVLLITVLVVEGIAVAQKTQDGQNIGIKHIPATQCGIWVRTSNGGHFASPNYPDSYPPNKECIYILEDPDFTLPRRDQQQISAERGKTGRKNGTTPEDAGLLNGSRCIQ

SEQ ID NO: 917514 - protein, 146 aa, Homo sapiens
QRPAYNNGMLFIFKVLQQLLLRYREALWFSKKHTQTLESERPDSPVYDINICGLEGHCLISPPESNFSWAVEIGHTIANSDTALPLSCLSLPPVISLNGSGSLTVPGVLGVKAAHARSCFPPGNVEPRRPRKSDQLQIPKLVFLHP

SEQ ID NO: 917515 - protein, 261 aa, Homo sapiens
MGQPELPPDPCCAPRALIPGHSLLSPSPRPSDLDSFKGSEKAQVTVGPLFPGAKLLASCLFKPSVLETGQHPPRRHRPSLSCSAANVKKWEIELQTLRESNARLTTALQESAASVEQWKRQFSICRDENDRLRNKIDELEEQCSEINREKEKNTQLKRRIEELEAELREKETELKDLRKQSEIIPQLMSECEYVSEKLEAAERDNQNLEDKVRSLKTDIEESKYRQRHLKVELKSFLEVLDGKIDDLHDFRRGLSKLGTDN

SEQ ID NO: 917516 - protein, 168 aa, Homo sapiens
MPPAPLALEPTECSTGQHLSVIKTLRFHPGAVKQTGLTTRHVAEPQRKPRLLLLRKIQAPRPLWAVAAQAIFDFSLSFIPRILYVKEYLALPSKYPESNHFSPPPMLPPWSKPPSSNGAISMVFPLDHCSGLLTAIASYFHLVPPTIYSQHIGRIILPTYLDLPVLST

SEQ ID NO: 917517 - protein, 140 aa, Homo sapiens
LSKLMQERKTKYRMFLLIAPLHSSLGDRAIDSSSKKKKKGKETVFTIHQAGVDHHKGLAEVEENSRRSGPTNFNPVLFKSQLYCFMYFEDIERMYNMYIMHVHELYWNQVVPYPLDTTKPASHCPWWGILFRSAISMWPM

SEQ ID NO: 917518 - protein, 305 aa, Homo sapiens
MLLLLTVGSQPSLKAITLTVKVCGFTPEIKRVYEPTGRKKLQTPKEQTLDTPNVRIVTLTATVRGVHPRSFFLEVAETKSAPKGTNCGHIRFSGIIVLGSLDNREIAFSEAHDKHPTVNISMLLCPSHGAWGLRDCAVRQQLTSPAVGLVLPATTSPSCHHVKKDVFASPSTVIVNFPWKSIDDQVMLAATVLKALTLLKGASSHLCRIVVGTGKQSGTELCLFSRNVTSEIGSFNLHMGRGHTDMQTDADTWRPTIKRRNPDNDHIKGDQYGLKTRGSFSESSGQQKTVKIPMQCGEGEGPPKT

SEQ ID NO: 917519 - protein, 149 aa, Homo sapiens
HIFIIMEHIEVVYTYLNGNKNAQIRRNKLASHSSHVEAWCNGVHGIAPTTESYPAQYQQRWSILLRTLVYCARKKMPPASLWHHCIRAQTCRPAVMLGRPRHKAQRTLVKWAVRRRQTQPWAGGAALLCCCSLWWEDCLSSEGQGCSEL

SEQ ID NO: 917520 - protein, 506 aa, Homo sapiens
AGRQEGWGEHWGAMERAEEPVVYQKLLPWEPSLESEEEVEEEETSEALVLNPRRHQDSSRNKAGGLPGTWARVVAALLLLAVGCSLAVRQLQNQGRSTGSLGSVAPPPGGHSHGPGVYHHGAIISPAGRELLVAGGNVVDAGVGAALCLAVVHPHATGLGAMFWGLFHDSSSGNSTALTSGPAQTLAPGLGLPAALPTLHLLHARFGRLPWPRLLVGPTTLAQEGFLVDTPLARALVARGTEGLCPLLCHADGTPLGAGARATNPQLAAVLRSAALAPTSDLAGDALLSLLAGDLGVEVPSAVPRPTLEPAEQLPVPQGILFTTPSPSAGPELLALLEAALRSGAPIPDPCPPFLQTAVSPESSALAAVDSSGSVLLLTSSLNCSFGSAHLSPSTGVLLSNLVAKSTTSAWACPLILRGSLDDTEADVLGLVASGTPDVARAMTHTLLRHLAARPPTQAQHQHQGQQEPTEHPSTCGQGTLLQVAAHTEHAHVSSVPHACCPFQGF

SEQ ID NO: 917521 - protein, 489 aa, Homo sapiens
AGRQEGWGEHWGAMERAEEPVVYQKLLPWEPSLESEEEVEEEETSEALVLNPRRHQDSSRNKAGGLPGTWARVVAALLLLAVGCSLAVRQLQNQGRSTGSLGSVAPPPGGHSHGPGVYHHGAIISPAGRELLVAGGNVVDAGVGAALCLAVVHPHATGLGAMFWGLFHDSSSGNSTALTSGPAQTLAPGLGLPAALPTLHLLHARFGRLPWPRLLVGPTTLAQEGFLVDTPLARALVARGTEGLCPLLCHADGTPLGAGARATNPQLAAVLRSAALAPTSDLAGDALLSLLAGDLGVEVPSAVPRPTLEPAEQLPVPQGILFTTPSPSAGPELLALLEAALRSGAPIPDPCPPFLQTAVSPESSALAAVDSSGSVLLLTSSLNCSFGSAHLSPSTGVLLSNLVAKSTTSAWACPLILRGSLDDTEADVLGLVASGTPDVARAMTHTLLRHLAARPPTQAQHQHQVSPMPAAPSRGSNRMGVGLAEGRVI

SEQ ID NO: 917522 - protein, 699 aa, Homo sapiens
MNLRKSGPSWINDKTCWHMNLGEWMIRVWNSEVQHKRKVIFFHALSFYYCNRINKKVNQDKIDEALSKYRNMWQGKKYYYYDVENMKFNEKLMLTNLVIFHKAPQQGIWKAPFLLLTVTPNGMFPNPQNIWAAELRALLLAQPTGCSLLSLAQWLSEPQMEEPAGSPRPTWLYGTLTRHREKTQGDEQSISKSYQRDTVNASPPRFLPVAPAWSQASSSLSGPIGCPLLACLVSDCILWVTCMHTRTSVEDSEIKYLALVLAHNECSIMFLDIIYPEKIIDFSGDLKTYSHRIINQYFYTRILMYFYDYFTFVILNFVCAYFISFSLDDLEEYLFERFLKESVLGITCQFNWFLCACVQIEIISVFIDFFLLLSLSLFYGFVHDMPYCYSSLIMKIFHGMNLLLFTILTAFSCVLICGLQNIKIFVKGFLFLLVIGRNDYLSEMFKTRADFKKLISNFLKLEVVYTFNSIVVIFYCGLRMWTHTFYFGEFIDAFFVHNIIDFVNDFCGHLKVGCTCLYGMDFDVKTFSFISFLVFIWIFLVKNYIIYKQPYFESQSKSLLDVPGFCLFHYIGWNFLDGDLNVDEMKGLLSCFSHVLLSLLLLLDLRYVHHCLLTYLIFLGLEEFWIRCFYSFSLFWCYFISNANVHECYVIVVDYTFPLREVFNDLKSQKHICFLFICVPKLGSLTFSCNCFCKVLFES

SEQ ID NO: 917523 - protein, 156 aa, Homo sapiens
MHAFLCLFLFSLPASSACVWPGTSWQNGGPPGPDSGPGLEPLLDNIDDFLIDFVVPPPLHFGFIYAQCFTCPCEDTDAQHAAVLPVVVVIPVLCVLPLYKLSRGSPVGPLGGRRPSSGRRRGWAAKNFIISPFLFSQNRSCVNNKWKSLSSKIQLP

SEQ ID NO: 917524 - protein, 215 aa, Homo sapiens [sequence omitted]

SEQ ID NO: 917525 - protein, 223 aa, Homo sapiens
MIQEDHEGSQDGGVHSSPVSSPSVSGPRRLVSCLSSQSSALSQSGGGSTSAAGIEARSRALRRRWCPAGIMLLALVCLLSCLLPSSEAKLYGRCELARVLHDFGLDGYRGYSLADSYALPYAGVCLAYFTSGFNAAALDYEADGSTNNGIFQINSRRWCSNLTPNVPNVCRMYCSDLLNPNLKDTVICAMKITQEPQGLGYWEAWRHHCQGKDLTEWVDGCDF

SEQ ID NO: 917526 - protein, 158 aa, Homo sapiens
VPNMVLFLPVCGPGVGDPCISGRSLFVSSSMLTSKSMPFDTTQVFSPTCSPRKLLLGLQNVIQIVTSFPNTSIPLIPKQQAKGNSHEASASTTGPQKQETLRTNRGIGLSPAASRQFSSCPDGFQKRNAWEHHDLCRLPSIITGRSHDHEHIAFSIQH

SEQ ID NO: 917527 - protein, 158 aa, Homo sapiens; identical to SEQ ID NO: 917526

SEQ ID NO: 917528 - protein, 158 aa, Homo sapiens; identical to SEQ ID NO: 917526

SEQ ID NO: 917529 - protein, 158 aa, Homo sapiens
MDSSSEIWSHWGSLSRGRRSNKELSHFLWECKLVAYPELFVPPDGFVVPLTSGVKHRPTYPITSFLECRSHTTETTVASILKSLLQGQGPIYIFKLMVSKAVVFPRSHGVSTIEPNQEEFQSPSHPTACMQDSRWARCISRAHSAAGDGGVADCVEVA

SEQ ID NO: 917530 - protein, 136 aa, Homo sapiens
MRPSRLYHISSPSLGRFYPRDPGSPQSPPPLPASGASETSGGGGGNLQVAPTPSAGSRRRPLRGRTARSQRRGPRAVGIEARRVAQARPGPEAPCPAQPPADPRAPPAAASTARRWASGGGARKVTAVAFLSALFT

SEQ ID NO: 917531 - protein, 136 aa, Homo sapiens; identical to SEQ ID NO: 917530

SEQ ID NO: 917532 - protein, 136 aa, Homo sapiens; identical to SEQ ID NO: 917530

SEQ ID NO: 917533 - protein, 136 aa, Homo sapiens; identical to SEQ ID NO: 917530

SEQ ID NO: 917534 - protein, 136 aa, Homo sapiens; identical to SEQ ID NO: 917530

SEQ ID NO: 917535 - protein, 193 aa, Homo sapiens [sequence omitted]

SEQ ID NO: 917536 - protein, 264 aa, Homo sapiens; identical to SEQ ID NO: 915526

SEQ ID NO: 917537 - protein, 103 aa, Homo sapiens
MLPGLVSNSWAKVILPPQPPKALGLLQRLKCSGTISAHCNLCLLGSSDSSASASQVAGITEMRSCSVARRGVQWYDDRSLQPQTPELKQSSCLSLPSCWNYRY

SEQ ID NO: 917538 - protein, 262 aa, Homo sapiens
MLPGLVSNSWAKVILPPQPPKALGLLQSWDLYPLLPLDIHAPGSQAFELGLGLIPLAPLVFRPLGLYWGYTTGFPGPPACRWQTVGLLSLHNPMRQYLTDRQKDIVQALKKVQPQTSFYLWRSPPTPLAALPKDPCGARQECPAWGPSELPGHFPLLPVPLYFSRLSKWTQPQRVCGSSWDSWFVLAVVLELKFTMQASACCSVHLSWSCNLVLPSICHDDCRNRHCFKGNGLAAHWPKQNSSKGSLTSKDTFSLHQRQERD

SEQ ID NO: 917539 - protein, 148 aa, Homo sapiens
MGQFYHHKNQEMSCFCPSVRISLEFKVSENRKHILGLQSTGPGSASTGWTLLGQPHGLLLTVVSCHQPVLSPACRVGLAAPGTASHAFLVLLKSPLWMVTLFMWPFLKQKVGSQAKSCLAVPRGMCCPPSLVMAGRGKTPLWSYEKCL

SEQ ID NO: 917540 - protein, 392 aa, Homo sapiens
PVHLPRVVVQWAVEHMCLALRGSIWVGEIPVWTTCGDEKNQSIIVSGESGAGKTVSAKYAMRYFATVGGSASETNIEEKVLASSPIMEAIGNAKTTRNDNSSRFGKYIQIGFDKRYHIIGANMRTYLLEKSRVVFQADDERNYHIFYQLCAAAGLPEFKELALTSAEDFFYTSQGGDTSIEGVDDAEDFEKTRQAFTLLGVKESHQMSIFKIIASILHLGSVAIQAERDGDSCSISPQDVYLSNFCRLLGVEHSQMEHWLCHRKLVTTSETYVKTMSLQQVINARNALAKHIYAQLFGWIVEHINKALHTSLKQHSFIGVLDIYGKSGKSGVQREQKEYWDEFLNTASHIREVEKNETLPPSQPSRCQGSRGLWLWPAHSCGGQLAWEQHRL

SEQ ID NO: 917541 - protein, 391 aa, Homo sapiens
PVHLPRVVVQWAVEHMCLALRGSIWVGEIPVWTTCGDEKNQSIIVSGESGAGKTVSAKYAMRYFATVGGSASETNIEEKVLASSPIMEAIGNAKTTRNDNSSRFGKYIQIGFDKRYHIIGANMRTYLLEKSRVVFQADDERNYHIFYQLCAAAGLPEFKELALTSAEDFFYTSQGGDTSIEGVDDAEDFEKTRQAFTLLGVKESHQMSIFKIIASILHLGSVAIQAERDGDSCSISPQDVYLSNFCRLLGVEHSQMEHWLCHRKLVTTSETYVKTMSLQQVINARNALAKHIYAQLFGWIVEHINKAPHPDVQHTFPSGKFSSELGRHTGWIISLNVSGPASFIRAMSLPSLCGLYLLWQTIFSTKWDGAGLSNRETRPTWMVHDLGRYKS

SEQ ID NO: 917542 - protein, 152 aa, Homo sapiens
MLSSLDLILKAVEPNRQRTHIVNFLTKFFVEAEFYYVAQDGLELLDSDLPTLASQSVGIMGVNHHAWPGFPNFLYQFTILPVAFESSHYFMCLPVLSFISLFNFSHSGDEHRKAVLTDQYEFARQKETWDVVAEDDDVKNKKGSKIVEQEWI

SEQ ID NO: 917543 - protein, 410 aa, Homo sapiens
MGPSAWCSHPGGTTPGRSRSVAEDGGKSLGCGWGGRWAEEGPALSFSGFGALSVDQSPPAQGVSAPSPSQPPSASPLPLTFPTPKDNLSLASDAHGFFQPLGLSFLLYLFCLFVHLMFLWARPWICFSLAFYILIFSYSLSLSLSLSPSLPPSLSPSLSPSLPLSLSLSSLSLSLLSLFSLSLLSPAIWALLLRASGLPAARQAHLLTSRSGIRRRRGWGQVRRPSPARAEAGSALAYPPPGPCPRPPLTGARGTQEREPLRAPSAVGVAAPDTDTASKRPHRGGGRRRRPRAATSPALGAVTVPRRPGLLQSTKTRGGRRGSERGRQRRRAGRQLQAEPRAPAGTGPFTRRGTQSCERILFSADSTPGRRLEVGLCLGLTRRETTELLPQPPAARNWKKKKKKKNPAGV

SEQ ID NO: 917544 - protein, 208 aa, Homo sapiens
MIHRTRVQAQELLSPWNQGAPPSEYIHVFTNQDAVEPYYVRCIKPNDKKSPQIFDDERCRHQVEYLGLLENVRVRRAGFAFRQTYEKFLHRLVGQKRVSKELTMTGSSQPYKDQSKEKMGQREQPGKRLYCGSKYKMISEEFTWPNHDLPSDKEAVKKLIERCGFQDDVAYGKTKIFIRTPRTLFTLEELRAQMLIRIVLFLQKETVR

SEQ ID NO: 917545 - protein, 127 aa, Homo sapiens
MHIKYIKYLHQCLMKGQFKCQVKRKELWPFRDPRPGSSPTLGCDSLFGALQFLESPSFWATPHSLVAAVEAACRVPGPAAALQRVGACASTCSCPALQQQPVKSIGLGDEFCFDDDVDDSQASDLGH

SEQ ID NO: 917546 - protein, 359 aa, Homo sapiens
MCSCRGVGLGEEPPECSCIFHDKDHTVGLIPAQWENVWRCPATREEVYVSTITSIQATYKRRQGDSSDTPGEVSSMAGSLYNAFSAANATQHHLFPGYNSKELLKEALVSAPREILVRMTHGRACVFIGLEGRQTLVKTWAVTVSLRYLKSGYPCCVRLIYDESYRDIQFFSIKYCFGRLPGQRPAFRQGVLASPPTQVPNATSKDFLDTMAASGKIVFVSTMWKSQEWMAGHGQCADLAGPIHPQRPLPSCPGCAEDAGMLRAVPPHGTRREVVRGEFALFNDAQYTVDLFSVSDLTRCLLGPDADLGDTILIVTFHPGRMPYGNATSEMVVGVSTTGQGDFLEEANFGEQALTLGLR

SEQ ID NO: 917547 - protein, 494 aa, Homo sapiens
MASALSYVSKFKSFVILFVTPLLLLPLVILMPAKVCVQYMKDTNMLFLGGLIVAVAVERWNLHKRIALRTLLWVGAKPARLMLGFMGVTALLSMWISNTATTAMMVPIVEAILQQMEATSAATEAGLELVDKGKAKELPGSQVIFEGPTLGQQEDQERKRLCKAMTLCICYAASIGGTATLTGTGPNVVLLGQMNELFPDSKDLVNFASWFAFAFPNMLVMLLFAWLWLQFVYMRFNFKKSWGCGLESKKNEKAALKVLQEEYRKLGPLSFAEINVLICFFLLVILWFSRDPGFMPGWLTVAWVEGETKYVSDATVAIFVATLLFIVPSQKPKFNFRSQTEEERKTPFYPPPLLDWKVTQEKVPWGIVLLLGGGFALAKGSEASGLSVWMGKQMEPLHAVPPAAITLILSLLVAVFTECTSNVATTTLFLPIFASMSRSIGLNPLYIMLPCTLSASFAFMLPVATPPNAIVFTYGHLKVADMVTQLFLFTPVGL

SEQ ID NO: 917548 - protein, 109 aa, Homo sapiens [sequence omitted]

SEQ ID NO: 917549 - protein, 109 aa, Homo sapiens [sequence omitted]

SEQ ID NO: 917550 - protein, 109 aa, Homo sapiens [sequence omitted]

SEQ ID NO: 917551 - protein, 104 aa, Homo sapiens [sequence omitted]

SEQ ID NO: 917552 - protein, 168 aa, Homo sapiens
MTVKGGVRGKVDRPRVATVLKVHNARDKLVAQIAGLQASKDQQLFDGIIVGSPGRSISPFGTKTFRQAEHKVTGTGGQVLQDGEEHDKTNEVHEHKPIATLLCYEKQMNILSVRSKTWGKWIYESWVIGTPRSRGGVTVLQNSFSPMLTYKTVLGDLSIKLQHALQKN

SEQ ID NO: 917553 - protein, 149 aa, Homo sapiens
SSGSWDRGSVTNMQLFVRAQELHTLEVTGQEMVAQIKAHVASLEGIAPEDQVVLLAGAPLEDEATLGQCGVEALTALEVAGRMLGGKVHGSLARAGKVRGQTPKVAKQEKKKKKRKKKTGQATRRMQYNRRFVNVVPTFSKKKGPNANS

SEQ ID NO: 917554 - protein, 137 aa, Homo sapiens
MKDVYLKTMRAVLSAISRGLYSACFPPLLPITEAGTERELSELWVDEKRPRTFSDRAQVQTSPTLFIRSTHSYRTQRGFVTGLPLMLTENNRGKSFDEEGIVPRAKCYGKVREIGGREEAIGLGRGNSTKLHWEGQI

SEQ ID NO: 917555 - protein, 153 aa, Homo sapiens
MFFPACEDRASRKGAHTRTQTYWHPDFRLPASRAVGSKCLVFKPSNLWFFIMVAQADRQYPNLGFQYFRHIIWISYSEIVNYAFQLDVSKNLVQWRKMMKDFPMGKASQTGSGAGDLQELGECILPCSLKRKETMSSIQSRPQRTQRLSAPWH

SEQ ID NO: 917556 - protein, 204 aa, Homo sapiens
MELSALHILASRLWRIPPASGDQRNTKALNPHSTWVAVFTPLCNYETHCLNKNLASLGCKTKAAGEVQGLRILQRPSVGFWEFCLETDDMAELLLGESKLEQYLKEHPLRQGASPRGPKPQLTEVRKHLTAALDRGNLKSEFLQESNLIMAKLNYVEGDYKEALNIYARVGLDDLPLTAVPPYRLRVIAEAYATKGSRSVARLV

SEQ ID NO: 917557 - protein, 845 aa, Homo sapiens
MELSALHILASRLWRIPPASGDQRNTKALNPHSTWVAVFTPLCNYETHCLNKNLASLGCKTKAAGEVQGLRILQRPSVGFWEFCLETDDMAELLLGESKLEQYLKEHPLRQGASPRGPKPQLTEVRKHLTAALDRGNLKSEFLQESNLIMAKLNYVEGDYKEALNIYARVGLDDLPLTAVPPYRLRVIAEAYATKGLCLEKLPISSSTSNLHVDREQDVITCYEKAGDIALLYLQEIERVILSNIQNRSPKPGPAPHDQELGFFLETGLQRAHVLYFKNGGTDGNIKEPRMWFRVIEQDETRNLTRGVGRFRELLRAVETRTTQNLRMTIARQLAEILLRGMCEQSYWNPLEDPPCQSPLDDPLRKGANTKTYTLTRRARVYSGENIFCPQENTEEALLLLLISESMANRDAVLSRIPEHKSDRLISLQSASVVYDLLTIALGRRGQYEMLSECLERAMKFAFEEFHLWYQFALSLMAAGKSARAVKVLKECIRLKPDDATIPLLAAKLCMGSLHWLEEAEKFAKTVVDVGEKTSEFKAKGYLALGLTYSLQATDASLRGMQEVLQRKALLAFQRAHSLSPTDHQAAFYLALQLAISRQIPEALGYVRQALQLQGDDANSLHLLALLLSAQKHYHDALNIIDMALSEYPENFILLFSKVKLQSLCRGPDEALLTCKHMLQIWKSCYNLTNPSDSGRGSSLLDRTIADRRQLNTITLPDFSDPETGNSPEAYFHGFPSLFSVSSVHATSVAASRVEQALSEVASSLQSSAPKQGPLHPWMTLAQIWLHAAEVYIGIGKPAEATACTQEAANLFPMSHNVLYMRGQIAELRGSMDEARRWYEEALAI

SEQ ID NO: 917558 - protein, 828 aa, Homo sapiens
MELSALHILASRLWRIPPASGDQRNTKALNPHSTWVAVFTPLCNYETHCLNKNLASLGCKTKAAGEVQGLRILQRPSVGFWEFCLETDDMAELLLGESKLEQYLKEHPLRQGASPRGPKPQLTEVRKHLTAALDRGNLKSEFLQESNLIMAKLNYVEGDYKEALNIYARVGLDDLPLTAVPPYRLRVIAEAYATKGLCLEKLPISSSTSNLHVDREQDVITCYEKAGDIALLYLQEIERVILSNIQNRSPKPGPAPHDQELGFFLETGLQRAHVLYFKNGGTDGNIKEPRMWFRVIEQDETRNLTRGVGRFRELLRAVETRTTQNLRMTIARQLAEILLRGMCEQSYWNPLEDPPCQSPLDDPLRKGANTKTYTLTRRARVYSGENIFCPQENTEEALLLLLISESMANRDAVLSRIPEHKSDRLISLQSASVVYDLLTIALGRRGQYEMLSECLERAMKFAFEEFHLWYQFALSLMAAGKSARAVKVLKECIRLKPDDATIPLLAAKLCMGSLHWLEEAEKFAKTVVDVGEKTSEFKAKGYLALGLTYSLQATDASLRGMQEVLQRKALLAFQRAHSLSPTDHQAAFYLALQLAISRQIPEALGYVRQALQLQGDDANSLHLLALLLSAQKHYHDALNIIDMALSEYPENFILLFSKVKLQSLCRGPDEALLTCKHMLQIWKSCYNLTNPSDSGRGSSLLDRTIADRRQLNTITLPDFSDPETGSVHATSVAASRVEQALSEVASSLQSSAPKQGPLHPWMTLAQIWLHAAEVYIGIGKPAEATACTQEAANLFPMSHNVLYMRGQIAELRGSMDEARRWYEEALAI

SEQ ID NO: 917559 - protein, 590 aa, Homo sapiens
MELSALHILASRLWRIPPASGDQRNTKALNPHSTWVAVFTPLCNYETHCLNKNLASLGCKTKAAGEVQGLRILQRPSVGFWEFCLETDDMAELLLGESKLEQYLKEHPLRQGASPRGPKPQLTEVRKHLTAALDRGNLKSEFLQESNLIMAKLNYVEGDYKEALNIYARVGLDDLPLTAVPPYRLRVIAEAYATKGLCLEKLPISSSTSNLHVDREQDVITCYEKAGDIALLYLQEIERVILSNIQNRSPKPGPAPHDQELGFFLETGLQRAHVLYFKNGGTDGNIKEPRMWFRVIEQDETRNLTRGVGRFRELLRAVETRTTQNLRMTIARQLAEILLRGMCEQSYWNPLEDPPCQSPLDDPLRKGANTKTYTLTRRARVYSGENIFCPQENTEEALLLLLISESMANRDAVLSRIPEHKSDRLISLQSASVVYDLLTIALGRRGQYEMLSECLERAMKFAFEEFHLWYQFALSLMAAGKSARAVKVLKECIRLKPDDATIPLLAAKLCMGSLHWLEEAEKFAKTVVDVGEKTSEFKAKGYLALGLTYSLQATDASLRGMQEVLQRKALLAFQRYNHKNEIIWKHSPMM

SEQ ID NO: 917560 - protein, 231 aa, Homo sapiens
MTSTRFSAVARASWLVSPPPQYVSQDAYPQIPPNPGELKEAGWGDQRLGSLWWAGVKGAWLVGLEGPRAQIPQLAQQLPSPERVRDSWKEDALFGYQFLNGANPVVLRRSAHLPARLVFPPGMEELQAQLEKELEQPLTSSCTQGGTLFEADFSLLDGIKANVSLCSQQHLAAPLVMLKLQPDGKLLPMVIQEEGSSDMGSDRRDGEDRWMRVQREMKERGKGSQARCLQK

SEQ ID NO: 917561 - protein, 608 aa, Homo sapiens
MEMESAAASTRFHQPHMERKMSAMACEIFNELRLEGKLCDVVIKVNGFEFSAHKNILCSCSSYFRALFTSGWNNTEKKVYNIPGISPDMMKLIIEYAYTRTVPITPDNVEKLLAAADQFNIMGIVRGCCEFLKSELCLDNCIGICKFTDYYYCPELRQKAYMFILHNFEEMVKVSAEFLELSVTELKDIIEKDELNVKQEDAVFEAILKWISHDPQNRKQHISILLPKVRLALMHAEYFMNNVKMNDYVKDSEECKPVIINALKAMYDLNMNGPSNSDFTNPLTRPRLPYAILFAIGGWSGGSPTNAIEAYDARADRWVNVTCEEESPRAYHGAAYLKGYVYIIGGFDSVDYFNSVKRFDPVKKTWHQVAPMHSRRCYVSVTVLGNFIYAMGGFDGYVRLNTAERYEPETNQWTLIAPMHEQRSDASATTLYGKVYICGGFNGNECLFTAEVYNTESNQWTVIAPMRSRRSGIGVIAYGEHVYAVGGFDGANRLRSAEAYSPVANTWRTIPTMFNPRSNFGIEVVDDLLFVVGGFNGFTTTFNVECYDEKTDEWYDAHDMSIYRSALSCCVVPGLANVEEYAARRDNFPGLALRDEVKYSASTSTLPV

SEQ ID NO: 917562 - protein, 72 aa, Homo sapiens
KGQGAEHHLERIRRSHQKHNAILASIKSSERDRLKAEWDQHNDCKILDSLVRARIKDAVQGFIINIEERRNK

SEQ ID NO: 917563 - protein, 472 aa, Homo sapiens
MYSQRFGTVQREVKGPTPKVVIVRSKPPKGQGAEHHLERIRRSHQKHNAILASIKSSERDRLKAEWDQHNDCKILDSLVRARIKDAVQGFIINIEERRNKLRELLALEENEYFTEMQLKKETIEEKKDRMREKTKLLKEKNEKERQDFVAEKLDQQFRERCEELRVELLSIHQKKVCEERKAQIAFNEELSRQKLVEEQMFSKLWEEDRLAKEKREAQEARRQKELMENTRLGLNAQITSIKAQRQATQLLKEEEARLVESNNAQIKHENEQDMLKKQKAKQETRTILQKALQERIEHIQQEYRDEQDLNMKLVQRALQDLQEEADKKKQKREDMIREQKIYHKYLAQRREEEKAQEKEFDRILEEDKAKKLAEKDKELRLEKEARRQLVDEVMCTRKLQVQEKLQREAKEQEERAMEQKHINESLKELNCEEKENFASQLNFVFLVETEFLHVGQAGLELLTSGDPPNLSL

SEQ ID NO: 917564 - protein, 203 aa, Homo sapiens
CEVIQRIPVRGDSLGRTILQKALQERIEHIQQEYRDEQDLNMKLVQRALQDLQEEADKKKQKREDMIREQKIYHKYLAQRREEEKAQEKEFDRILEEDKAKKLAEKDKELRLEKEARRQLVDEVMCTRKLQVQEKLQREAKEQEERAMEQKHINESLKELNCEEKENFASQLNFVFLVETEFLHVGQAGLELLTSGDPPNLSL

SEQ ID NO: 917565 - protein, 60 aa, Homo sapiens
MEEQMFSKLWEEDRLAKEKREAQEARRQKELMENTRLGLNAQITSIKAQRQATQLLKEEE

SEQ ID NO: 917566 - protein, 484 aa, Homo sapiens
MYSQRFGTVQREVKGPTPKVVIVRSKPPKGQGAEHHLERIRRSHQKHNAILASIKSSERDRLKAEWDQHNDCKILDSLVRARIKDAVQGFIINIEERRNKLRELLALEENEYFTEMQLKKETIEEKKDRMREKTKLLKEKNEKERQDFVAEKLDQQFRERCEELRVELLSIHQKKVCEERKAQIAFNEELSRQKLVEEQMFSKLWEEDRLAKEKREAQEARRQKELMENTRLGLNAQITSIKAQRQATQLLKEEEARLVESNNAQIKHENEQDMLKKQKAKQETRTILQKALQERIEHIQQEYRDEQDLNMKLVQRALQDLQEEADKKKQKREDMIREQKIYHKYLAQRREEEKAQEKEFDRILEEDKAKKLAEKDKELRLEKEARRQLVDEVMCTRKLQVQEKLQREAKEQEERAMEQKHINESLKELNCEEKENFARRQRLAQEYRKQLQMQIAYQQQSQEAEKEEKRREFEAGVAANKMFP

SEQ ID NO: 917567 - protein, 352 aa, Homo sapiens
MALKKSSPSLDSGDSDSEELPTFAFLKKEPSSTKRRQPEREEKIVVVDISDCEASCPPAPELFSPPVPEIAETVTQTQPVRLLSSESEDEEEFIPLAQRLTCKFLTHKQLSPEDSSSPVKSVLDHQNNEGASCDWKKQPFPKIPEVPLHDTPERSAADNKDLILDPCCQLPAYLSTCPGQSSSLAVTKTNSDILPPQKKTKPSQKVQGRGSHGCRQQRQARQKESTLRRQERKNAALVTRMKAQRPEECLKHIIVVLDPVLLQMEGGGQLLGALQTMECRCVIEAQAVPCSVTWRRRAGPSEGSLDSTMKGKETLQGFVTDITAKTAGKALSLVIVDQEKCFRFGFALVISC

SEQ ID NO: 917568 - protein, 197 aa, Homo sapiens
MKKNLFLWLKGLHKKTKPSQKVQGRGSHGCRQQRQARQKESTLRRQERKNAALVTRMKAQRPEECLKHIIVVLDPVLLQMEGGGQLLGALQTMECRCVIEAQAVPCSVTWRRRAGPSEDREDWVEEPTVLVLLRAEAFVSMIDNGKQGSLDSTMKGKETLQGFVTDITAKTAGKALSLVIVDQEKCFRFGFALVISC

SEQ ID NO: 917569 - protein, 542 aa, Homo sapiens
MALKKSSPSLDSGDSDSEELPTFAFLKKEPSSTKRRQPEREEKIVVVDISDCEASCPPAPELFSPPVPEIAETVTQTQPVRLLSSESEDEEEFIPLAQRLTCKFLTHKQLSPEDSSSPVKSVLDHQNNEGASCDWKKQPFPKIPEVPLHDTPERSAADNKDLILDPCCQLPAYLSTCPGQSSSLAVTKTNSDILPPQKKTKPSQKVQGRGSHGCRQQRQARQKESTLRRQERKNAALVTRMKAQRPEECLKHIIVVLDPVLLQMEGGGQLLGALQTMECRCVIEAQAVPCSVTWRRRAGPSEGSLDSTMKGKETLQGFVTDITAKTAGKALSLVIVDQEKCFSAQNPPRRGKQGANKQTKKQQQRQPEASIGSMVSRVDAEEALVDLQLHTEAQAQIVQSWKELADFTCAFTKAVAEAPFKKLRDETTFSFCLESDWAGGVKVDLAGRGLALVWRRQIQQLNRVSLEMASAVVNAYPSPQLLVQAYQQCFSDKERQNLLADIQVRRGEGVTSTSRRIGPELSRRIYLQMTTLQPHLSLDSAD

SEQ ID NO: 917570 - protein, 449 aa, Homo sapiens
MALKKSSPSLDSGDSDSEELPTFAFLKKEPSSTKRRQPEREEKIVVVDISDCEASCPPAPELFSPPVPEIAETVTQTQPVRLLSSESEDEEEFIPLAQRLTCKFLTHKQLSPEDSSSPVKSVLDHQNNEGASCDWKKQPFPKIPEVPLHDTPERSAADNKDLILDPCCQLPAYLSTCPGQSSSLAVTKTNSDILPPQKKTKPSQKVQGRGSHGCRQQRQARQKESTLRRQERKNAALVTRMKAQRPEECLKHIIVVLDPGPHMCLCPVLSYLRSGPPTDSPFSICCSALTDGRCSIPADLPPCAVFWVLWQDREDWVEEPTVLVLLRAEAFVSMIDNGKQGSLDSTMKGKETLQGFVTDITAKTAGKALSLVIVDQEKCFSLELLFFDFLPCTSAQNPPRRGKQGANKQTKKQQQRQPEASIGSMVSRVDAEEVRTSCCLNRAGYSLVT

SEQ ID NO: 917571 - protein, 571 aa, Homo sapiens [sequence omitted]

SEQ ID NO: 917572 - protein, 144 aa, Homo sapiens
MVSKEKYPVHESNPVIFKKTRHTDIQRSQGTITLEKSPHTEWLRRLSKEPVCLSTQNNPKQKQQSLRHPATRLQTILQGYKKEEGEGEGEEEEEEEEEEEEEEEEEEEGDLYVVNKHKKEKSSSSLETREMQIKTTMGYLLTPC

SEQ ID NO: 917573 - protein, 144 aa, Homo sapiens; identical to SEQ ID NO: 917572

SEQ ID NO: 917574 - protein, 144 aa, Homo sapiens; identical to SEQ ID NO: 917572

SEQ ID NO: 917575 - protein, 144 aa, Homo sapiens; identical to SEQ ID NO: 917572

SEQ ID NO: 917576 - protein, 144 aa, Homo sapiens; identical to SEQ ID NO: 917572

SEQ ID NO: 917577 - protein, 144 aa, Homo sapiens; identical to SEQ ID NO: 917572

SEQ ID NO: 917578 - protein, 144 aa, Homo sapiens; identical to SEQ ID NO: 917572

SEQ ID NO: 917579 - protein, 159 aa, Homo sapiens
MQLSSLPQFRPTCILFTWHQLKAKTPLCLSLFHAFLMKSQEKVSHPFIQHISIVQGIVEDVWAANSEPKVYEVETLSEKEEEEGKEEEEEEEEEEEEEEEEEEEEEEEEGEGEGEGEEEEEEEEEEEEEGEEGEGEEEEEEEEEEEEEEEEEEAEAATT

SEQ ID NO: 917580 - protein, 81 aa, Homo sapiens
  misc_feature (21)..(21): Xaa can be any naturally occurring amino acid
RTHSTVPGACPPQKPADDFMXGRSGVSPCCPSWSRILGLKPSAHTGLPRCCSISSSKMSQPSFEEEEKLDWGRIWGKMKPN

SEQ ID NO: 917581 - protein, 81 aa, Homo sapiens; identical to SEQ ID NO: 917580
  misc_feature (21)..(21): Xaa can be any naturally occurring amino acid

SEQ ID NO: 917582 - protein, 159 aa, Homo sapiens; identical to SEQ ID NO: 917579

SEQ ID NO: 917583 - protein, 159 aa, Homo sapiens; identical to SEQ ID NO: 917579

SEQ ID NO: 917584 - protein, 159 aa, Homo sapiens; identical to SEQ ID NO: 917579

SEQ ID NO: 917585 - protein, 177 aa, Homo sapiens
MAPEKRPPHSDILESRPSLKASLLSSDLVGDGSFIYKPLTGAAAFLSVMPCPERRKLERQSGYSGFVALWRALPSPNFLVALFTLVSLKCSAPSWKTALADQFQEFPEMPGSFKQPAQLSRDVIEQELTNYQREGTKPLRRDLSSLPKHFPPGLTLNAGDQILTWYLVGTNPISSCF

SEQ ID NO: 917586 - protein, 157 aa, Homo sapiens
MNLSVLICKMGLFIPASACDTKKSRHREGKRLALGPTASSSTGANTEAPRFHGQGSLRYTLNADPGQRPRPPEATAEDFAANSFALSTTARGLLQGRITLRREEDTVSHERVSRQFRCSGSSPRPRPRTEAASSEKERTAAIALSAATTPKRIHLTG

SEQ ID NO: 917587 - protein, 489 aa, Homo sapiens
MNKSRWQSRRRHGRRSHQQNPWFRLRDSEDRSDSRAAQPAHDSGHGDDESPSTSSGTAGTSSVPELPGFYFDPEKKRYFRLLPGHNNCNPLTKESIRQKEMESKRLRLLQEEDRRKKIARMGFNASSMLRKSQLGFLNVTNYCHLAHELRLSCMERKKVQIRSMDPSALASDRFNLILADTNSDRLFTVNDVKVGGSKYGIINLQSLKTPTLKVFMHENLYFTNRKVNSVCWASLNHLDSHILLCLMGLAETPGCATLLPASLFVNSHPAGIDRPGMLCSFRIPGAWSCAWSLNIQANNCFSTGLSRRVLLTNVVTGHRQSFGTNSDVLAPLLFNGCRSGEIFAIDLRCGNQGKGWKATRLFHDSAVTSVRILQDEQYLMASDMAGKIKLWDLRTTKCVRQYEGHVNEYAYLPLHVHEEEGILVAVGQDCYTRIWSLHDARLLRTIPSPYPASKADIPSVAFSSRLGGSRGAPGLLMAVGQDLYCYSYS

SEQ ID NO: 917588 - protein, 496 aa, Homo sapiens
MNKSRWQSRRRHGRRSHQQNPWFRLRDSEDRSDSRAAQPAHDSGHGDDESPSTSSGTAGTSSVPELPGFYFDPEKKRYFRLLPGHNNCNPLTKESIRQKEMESKRLRLLQEEDRRKKIARMGFNASSMLRKSQLGFLNVTNYCHLAHELRLSCMERKKVQIRSMDPSALASDRFNLILADTNSDRLFTVNDVKVGGSKYGIINLQSLKTPTLKVFMHENLYFTNRKVNSVCWASLNHLDSHILLCLMGLAETPGCATLLPASLFVNSHPAGIDRPGMLCSFRIPGAWSCAWSLNIQANNCFSTGLSRRVLLTNVVTGHRQSFGTNSDVLAQQFALMAPLLFNGCRSGEIFAIDLRCGNQGKGWKATRLFHDSAVTSVRILQDEQYLMASDMAGKIKLWDLRTTKCVRQYEGHVNEYAYLPLHVHEEEGILVAVGQDCYTRIWSLHDARLLRTIPSPYPASKADIPSVAFSSRLGGSRGAPGLLMAVGQDLYCYSYS

SEQ ID NO: 917589 - protein, 434 aa, Homo sapiens
MNKSRWQSRRRHGRRSHQQNPWFRLRDSEDRSDSRAAQPAHDSGHGDDESPSTSSGTAGTSSVPELPGFYFDPEKKRYFRLLPGHNNCNPLTKESIRQKEMESKRLRLLQEEDRRKKIARMGFNASSMLRKSQLGFLNVTNYCHLAHELRLSCMERKKVQIRSMDPSALASDRFNLILADTNSDRLFTVNDVKVGGSKYGIINLQSLKTPTLKVFMHENLYFTNRKVNSVCWASLNHLDSHILLCLMGLAETPGCATLLPASLFVNSHPAGIDRPGMLCSFRIPGAWSCAWSLNIQANNCFSTGLSRRVLLTNVVTGHRQSFGTNSDVLAQQFALMAPLLFNGCRSGEIFAIDLRCGNQGKGWKATRLFHDSAVTSVRILQDEQYLMASDMAGKIKLWDLRTTKCVRQYEGHVNEYAYLPLHVHEEEGILVAGT

SEQ ID NO: 917590 - protein, 325 aa, Homo sapiens
MNKSRWQSRRRHGRRSHQQNPWFRLRDSEDRSDSRAAQPAHDSGHGDDESPSTSSGTAGTSSVPELPGFYFDPEKKRYFRLLPGHNNCNPLTKESIRQKEMESKRLRLLQEEDRRKKADTNSDRLFTVNDVKVGGSKYGIINLQSLKTPTLKVFMHENLYFTNRKAPLLFNGCRSGEIFAIDLRCGNQGKGWKATRLFHDSAVTSVRILQDEQYLMASDMAGKIKLWDLRTTKCVRQYEGHVNEYAYLPLHVHEEEGILVAVGQDCYTRIWSLHDARLLRTIPSPYPASKADIPSVAFSSRLGGSRGAPGLLMAVGQDLYCYSYS

SEQ ID NO: 917591 - protein, 115 aa, Homo sapiens
AFTCMWWRQNGNSGSLTPRPAHSATVACDGRLWVHYTDPVFLPEGWCGSRGTRRKGAAQPWGGSPAPPEAREENSGQESRVLLGEAEGKVREGVPLAVDMGLWALGLRSLLATAF

SEQ ID NO: 917592 - protein, 489 aa, Homo sapiens; identical to SEQ ID NO: 917587

SEQ ID NO: 917593 - protein, 396 aa, Homo sapiens [sequence omitted]

SEQ ID NO: 917594 - protein, 244 aa, Homo sapiens
MNKSRWQSRRRHGRRSHQQNPWFRLRDSEDRSDSRAAQPAHDSGHGDDESPSTSSGTAGTSSVPELPGFYFDPEKKRYFRLLPGHNNCNPLTKESIRQKEMESKRLRLLQEEDRRKKIARMGFNASSMLRKSQLGFLNVTNYCHLAHELRLSCMERKKVQIRSMDPSALASDRFNLILADTNSDRLFTVNDVKVGGSKYGIINLQSLKTPTLKVFMHENLYFTNRKVNSVCWASLNHLDSHILC

SEQ ID NO: 917595 - protein, 225 aa, Homo sapiens
MLNLEVFLYLEYCSLQILYYHFLQNITQDSPPGKSRFFFFFFFLRQSLALLPRLERSGASRLTASSASRVHAILLPQPPQQLGLQGCHRTALGHSQTYPLSFHLVVVEPHEFCKPLLIEVKQQHQLLLTNKALVLICLPHPRLPPAKAASGSLTSALCQPAFMLETPGCMMTNQSARKWFGTIRKAFSGSESKSESHSCSRSGLHGPCFDLHLQELLASVFAAGR

SEQ ID NO: 917596 - protein, 254 aa, Homo sapiens [sequence omitted]

SEQ ID NO: 917597 - protein, 178 aa, Homo sapiens [sequence omitted]

SEQ ID NO: 917598 - protein, 281 aa, Homo sapiens
WLHALPVMGPELGWGHPRGGDVCSSDSFNEDNTAFAKQVRSERPFFSSNPELDNLMIQAIQVLRFHLLELEKGKMPIDLVIEDRDGGCREDFEDYPASCPSLPDQNNIWIRDHEDSGSVHLGTPGPSSGGLASQSGDNSSDQGVGLDTSVASPSSGGEDEDLDQEPRRNKKRGIFPKVATNIMRAWLFQHLSHPYPSEEQKKQLAQDTGLTILQVNNWFINARRRIVQPMIDQSNRTGQGAAFSPEGQPIGGYTETEPHVAFRAPASVGMSLNSEGEWHYL

SEQ ID NO: 917599 - protein, 307 aa, Homo sapiens
MEDGGQREERKRNAKCGQPPRVKIEGSVMQVLDRRRQVGRAPQPPPQKRPPPGLSDPWGAGSASPRPHVAPAPMVPVPWMETASSGGQMWCSGIQSHFLPGHAWRTQQEEAQELGPAAQELGPATQAGLGTWQGLGILALDLGDLGGTGRGEMGGPAPAQCRPHPCTEAPPCHTPRRLPELKPRPQQREHPTPPPLQPVLLVKLPPSLQVGATPVRGCATCPQGTPLGIPGGGFWGRGGQSLVPVCVRDALHLQPGVVHGRGHGNSGPVDVTDDAERLLQRVVHVQHLVVLLCLLCQLLHQCVLVPT

SEQ ID NO: 917600 - protein, 419 aa, Homo sapiens [sequence omitted]

SEQ ID NO: 917601 - protein, 120 aa, Homo sapiens
MAFFEPKMREILEQNCTGDEDCNFFDCFSRCDLRVNKCGAQRVNNNLQVICDKIFRHWFSAPLKSSAVSFQLQLQLQEAVQECADPGVPSGNTRRAASSVFWKLRQLLQATLRELQEAEK

SEQ ID NO: 917602 - protein, 419 aa, Homo sapiens [sequence omitted]

SEQ ID NO: 917603 - protein, 419 aa, Homo sapiens [sequence omitted]

SEQ ID NO: 917604 - protein, 233 aa, Homo sapiens
MARAAGARGPAGWCRRRGRCGRGTLLAFAAWTAGWVLAAALLLRAHPGVLSERCTDEKSRRILAALVGPAAALPRAARPGRGDHTRSRSPAFPGTWVAVAPAGDMGSRHLRGVPEAHAPVPRMGTQPAVLCGRAGGVSPLFARIRPLSPDSLSVLPSPPLSPSSGRKFAGLIRVSREVPRPVSGRRARGASQCGVRDPGCHASVSRVRSAPAQPAFCDSTLSCQVTPYLTEPM

SEQ ID NO: 917605 - protein, 279 aa, Homo sapiens
MSNVYTAQSMQEIHEKVLNEVVGAMMYHTFSLTREDLENFKALRVIVQVGSGYDNVAIKAAGELEIAVCSIPSAAVEETADSTTGHILNLYWGNRSLYQALREGTRVQSVEQIGEVASVKARIRGEILGLIGFGRTQQEVAVRAKAFAGWDRAVPGIRGAALDVNESEPFSFARGLLKDAWNLICTPLTACYSQQVSLEMSEAVATEIRQAIISRIPGSLRNCVNKEFFVTSALWSVINQQEIHPELSGATYRYLPGMVGVAPGGLLQPGKTSSLETSQ

SEQ ID NO: 917606 - protein, 137 aa, Homo sapiens [sequence omitted]

SEQ ID NO: 917607 - protein, 602 aa, Homo sapiens
QEVLAPDSLSACSSPTDTASLATSCPSRPSRVSTTQMRPLKGTGCPGITTWYQKRCQPAGPMPKHLVRNTGLPSFIRWHSNCRVARAPWDPNLSLAKANWLPSGCGDRKEGPTSCWRSRCFSSGLSHSTATCSPQRCGCPSSRAFLAMAAVQCELNLSRAICPGAGPGLGSSRASCRPGPSGCSAGSSAGSSAVRVRFGGRQSTLSSHFPVLRHTSSGQDGRSGWLCSGRWRPARRAASCSGHMEAAVQAAEGHHQAELVEAAHALEQQDSWCSYTSWGSRPMNTSDPAGGGLPTQPGGGPPYFLCPPSVPKHPYSPHLSPHPLLPPPQRANAHEFESLGCDAILARRSQDRHSRGQLCEAMCSSPLGRKREKSLRLGFVPMVCSASDSHRCSAEPWERSGDLGRGRPGLSRRPTTGPPSVRPHTLPQARAWRKPRTARRRAAGPRRRKPRDARAHGPYASPPPGRARAPPRAPPALPTPTGRAPLCRPPARRPRRRRASASDSASVSRAGTRSPAPSSALALAGRAWTGERRSASAKSVSPAAAPPPREPFRVPENPAREIPGRPTHAGRFAVAKNQRPGTGRGTGVPKLFFGSSDERDSA

SEQ ID NO: 917608 - protein, 146 aa, Homo sapiens
MPVLVNENLSTEFGVSADEGRWLSGILDMKFHKNNEDDDLFKVKEILIQCFHFTVEDTGTHRGEVTCPQSCCSHQHSVVRSCPWRLGDAPALTLLLHWSSCHRFFWLNCVLTTKLRMLWLTNVLFSDSIGHGSPVLLGSNYGGMCL

SEQ ID NO: 917609 - protein, 120 aa, Homo sapiens
MWRSRMITGGAGPQPVSPPAPATPVKSSWHKKHGVCRHLEISTSTEVPGGSITKQAQNAVSASLYQESLSKSLSREISYPGHPAAGISTLFIKNIVSFFRVTECSTAYLLVSTKEEISCI

SEQ ID NO: 917610 - protein, 195 aa, Homo sapiens
YSSNIQMQAANNLNQENSRPLQEKNTESSENMTKFPSSRGKSTVSLNKNKQLSNSAVFVVSNNNLGVVKSAVDFQMKGKENLTGKGITQILGKSHGSLKLKRQPHIFESDGETEDPRLLQQQSENQAKEVGTSDHRLIVSKIAHRSKRKLCPESSKTSKKHHSDTVHYGQSSSSKKQILDSDKSKLKKSLIIHNA

SEQ ID NO: 917611 - protein, 94 aa, Homo sapiens
AAASPRDSHEHVHPQRGAGHCYGARQKAKPQTANREAAGTQGGRGGRIAGAQEFETCLGNILPPACQMLLMDSRSCRSDVARPPQHSAQGSQEE

SEQ ID NO: 917612 - protein, 138 aa, Homo sapiens
MRTNATADLTGGRAQAVMLTHPPAAPLLLCGPVTNSPWTGTDENVNTQRQSGPYEVTVREGAVESERTAGTQPLGSVSEPQRPAGLISWSPRDEGGNPWELAHGPKSNLSLPSLSISTRHSHQHHDSLQMLWKLLPFP

SEQ ID NO: 917613 - protein, 279 aa, Homo sapiens
DAQESKMFSCCFPTSRGCCFRNGGSESLFRQCRRRLIPHPRRLWPFVRRRTQVPQDSPGQALAGQATPEIPSGLPLYIVLVQEEIREPMEAQTHAPGPYADIAALAAPAVEPKPAWEEPPPERALEVEGAPAKDQPSQELPEIMAPTVATGLNAGAENVAGERSGREGVTSTAPASRSHAAPSPGHGGKHGGGDQGIQTGLLYLAGERLLSFARTTALLLQGLFIVLMLVGYISVQVVLKSIKTRLGRRVPAAPPALRRNLLLQAWMCVCNWASRLFAP

SEQ ID NO: 917614 - protein, 280 aa, Homo sapiens
MTQSFLRPPQKQQLPCFLYSLRNLRGVPKPQKSGSRQRSLQSVAKGPRAPGKPLLMPKPITNPGNKAHRSRMDAMHVDVASRKQAVLLPELVVLGRQHTYATGRPPGDTVGERDISPCCRLPLFLKPRFPPPLSGRSHPTHSQLIRQLGCLSPSCLTHCPTCSSCAGEPAFLMRRAPLVGVLCTEVPLCRRKGIKAPVNKWPQRGILNCKISGLNVSGSQSVGREAEEPWNSSRAVVEGRTRGAVGMSVEVQRLTSLEDRTWPLSSSVIMFQRNDRPPDH

SEQ ID NO: 917615 - protein, 272 aa, Homo sapiens
SLPGEWHETPSMALTSAALTHFLSRTHVASAHHPSRTHVASAYNSSHTRMASATCPGRTHVASAHHPGCTHVASAHRPGRTRVASAHRPGRTRVASAHRPGCTRVASAYRPGCTPWPLLNILAIPTWPTCVASAHRPSHTHVASAYRPSRTHVASAYRPSRTRVASAHHPSQTHVASAPSSQPLLFSKVKLQSLCRGPDEALLTCKHMLQIWKSCYNLTNPRARVGRTLAPGSVWWGLADGVGGRGPSGHSEFPLRLPAKPGGRSGELSSPY

SEQ ID NO: 917616 - protein, 188 aa, Homo sapiens
MMMMMMVMKVTVDDSDDDGDDEGDGNGDDGDEGDNDEDDDKGNEIDDGEGDGNGDDGEGDDEDDDNEGDDSDDDGEGDDDEVDDNGTDDGDDEGDGNGDDGDSHDGDGDDGDGDDEDDEGDDGEGDDYKGDGDDSDDDKGDNEGYGNGDDGDGDDSKDDEGVIKPYLAIKETVYHKEQHSLKGVDDGE

SEQ ID NO: 917617 - protein, 289 aa, Homo sapiens
TARFAVISFIAPSVPHLVLKCLLWMLQYVYCNIVVYWYQYLPLQKELYGDFEDLETGDMHKGKSGPDTQRNKEEIDPDEEESAKKKHLDKKRKLKEMFDAEYDEGESTYFDDLKGEMQKEAQENGSRGTGGCNCGKLLWGFAAERSREMKQFLVEEVESKGFELNHVEFEDQDDEARVQYDGFRPGMYIRVEIENVPCEFVQNFDPHYPIILGGLGNSEGNVGHVQMRLKKHRWYKKILKSQDPIIFSVGWRRFQTILLYYIEDHNGRQRLLKYTPQHMHCGAAFWGKI

SEQ ID NO: 917618 - protein, 170 aa, Homo sapiens
MPNIGTRLVSASVETSHVMARGHDGRSSQRISCIVAPEKNVTIRVRSLILVSAGRRKSSQEHCQDRDENRAHFSVSCDVRQAFQLCLLSPHGIVEAGNDPKFTTRKKLRIYNHKELNSANNPDALLEPSERNAACQHLDVISLYHFYIARAPTVAFLSVSFIQHLFLSFI

SEQ ID NO: 917619 - protein, 794 aa, Homo sapiens
MEMMLDKKQIQVIFLFKFKMGHKAAETTRSINNAFGPEIANKGTVQWWFKNFCKGDESREDEECCARPSKVGNDQLRAIIEADPLTTLEARPDRDYARGWWTAGCTDQAHPGPTGKKALFSPGLAAYTALKKDLAWRENLGIVSLVFKGMRLGEIKVNRLNRDKEVQKTGALRYGLNMRCLAARVNYKTLIIICALFTLVTVLLWNKCSSDKAIQFPRRSSSGFRVDGFEKRAAASESNNYMNHVAKQQSEEAFPQEQQKAPPVVGGFNSNVGSKVLGLKYEEIDCLINDEHTIKGRREGNEVFLPFTWVEKYFDVYGKVVQYDGYDRFEFSHSYSKVYAQRAPYHPDGVFMSFEGYNVEVRDRVKCISGVEGVPLSTQWGPQGYFYPIQIAQYGLSHYSKNLTEKPPHIEVYETAEDRDKNKPNDWTVPKGCFMANVADKSRFTNVKQFIAPETSEGVSLQLGNTKDFIISFDLKFLTNGSVSVVLETTEKNQLFTIHYVSNAQLIAFKERDIYYGIGPRTSWSTVTRDLVTDLRKGVGLSNTKAVKPTKIMPKKVVRLIAKGKGFLDNITISTTAHMAAFFAASDWLVRNQDEKGGWPIMVTRKLGEGFKSLEPGWYSAMAQGQAISTLVRAYLLTKDHIFLNSALRATAPYKFLSEQHGVKAVFMNKHDWYEEYPTTPSSFVLNGFMYSLIGLYDLKETAGEKLGKEARSLYERGMESLKAMLPLYDTGSGTIYDLRHFMLGIAPNLARWDYHTTHINQLQLLSTIDESPIFKEFVKRWKSYLKGSRAKHN

SEQ ID NO: 917620 - protein, 794 aa, Homo sapiens; identical to SEQ ID NO: 917619

SEQ ID NO: 917621 - protein, 454 aa, Homo sapiens
MEMMLDKKQIQVIFLFKFKMGHKAAETTRSINNAFGPEIANKGTVQWWFKNFCKGDESREDEECCARPSKVGNDQLRAIIEADPLTTLEARPDRDYARGWWTAGCTDQAHPGPTGKKALFSPGLAAYTALKKDLAWRENLGIVSLVFKGMRLGEIKVNRLNRDKEVQKTGALRYGLNMRCLAARVNYKTLIIICALFTLVTVLLWNKCSSDKAIQFPRRSSSGFRVDGFEKRAAASESNNYMNHVAKQQSEEAFPQEQQKAPPVVGGFNSNVGSKVLGLKYEEIDCLINDEHTIKGRREGNEVFLPFTWVEKYFDVYGKVVQYDGYDRFEFSHSYSKVYAQRAPYHPDGVFMSFEGYNVEVRDRVKCISGVEGVPLSTQWGPQGYFYPIQIAQYGLSHYSKNLTEKPPHIEVYETAEDRDKNKPNDWTVPKGCFMANVADKSRFTNVKQFIAPV

SEQ ID NO: 917622 - protein, 794 aa, Homo sapiens; identical to SEQ ID NO: 917619

SEQ ID NO: 917623 - protein, 371 aa, Homo sapiens
VRVFKDELQFNFKYKSAFILTIFVGIFSPTETSEGVSLQLGNTKDFIISFDLKFLTNGSVSVVLETTEKNQLFTIHYVSNAQLIAFKERDIYYGIGPRTSWSTVTRDLVTDLRKGVGLSNTKAVKPTKIMPKKVVRLIAKGKGFLDNITISTTAHMAAFFAASDWLVRNQDEKGGWPIMVTRKLGEGFKSLEPGWYSAMAQGQAISTLVRAYLLTKDHIFLNSALRATAPYKFLSEQHGVKAVFMNKHDWYEEYPTTPSSFVLNGFMYSLIGLYDLKETAGEKLGKEARSLYERGMESLKAMLPLYDTGSGTIYDLRHFMLGIAPNLARWDYHTTHINQLQLLSTIDESPIFKEFVKRWKSYLKGSRAKHN

SEQ ID NO: 917624 - protein, 812 aa, Homo sapiens
MEAFQELRKPSARLECDHCSFRGTDYENVQIHMGTIHPEFCDEMDAGGLGKMIFYQKSAKLFHCHKCFFTSKMYSNVYYHITSKHASPDKWNDKPKNQLNKETDPVKSPPLPEHQKIPCNSAEPKSIPALSMETQKLGSVLSPESPKPTPLTPLEPQKPGSVVSPELQTPLPSPEPSKPASVSSPEPPKSVPVCESQKLAPVPSPEPQKPAPVSPESVKATLSNPKPQKQSHFPETLGPPSASSPESPVLAASPEPWGPSPAASPESRKSARTTSPEPRKPSPSESPEPWKPFPAVSPEPRRPAPAVSPGSWKPGPPGSPRPWKSNPSASSGPWKPAKPAPSVSPGPWKPIPSVSPGPWKPTPSVSSASWKSSSVSPSSWKSPPASPESWKSGPPELRKTAPTLSPEHWKAVPPVSPELRKPGPPLSPEIRSPAGSPELRKPSGSPDLWKLSPDQRKTSPASLDFPESQKSSRGGSPDLWKSSFFIEPQKPVFPETRKPGPSGPSESPKAASDIWKPVLSIDTEPRKPALFPEPAKTAPPASPEARKRALFPEPRKHALFPELPKSALFSESQKAVELGDELQIDAIDDQKCDILVQEELLASPKKLLEDTLFPSSKKLKKDNQESSDAELSSSEYIKTDLDAMDIKGQESSSDQEQVDVESIDFSKENKMDMTSPEQSRNVLQFTEEKEAFISEEEIAKYMKRGKGKYYCKICCCRAMKKGAVLHHLVNKHNVHSPYKCTICGKAFLLESLLKNHVAAHGQSLLKCPRCNFESNFPRGFKKHLTHCQSRHNEEANKKLMEALEPPLEEQQI

SEQ ID NO: 917625 - protein, 278 aa, Homo sapiens
  misc_feature (1)..(2): Xaa can be any naturally occurring amino acid
XXKLGTRPAEARKRALFPEPRKHALFPELPKSALFSESQKAVELGDELQIDAIDDQKCDILVQEELLASPKKLLEDTLFPSSKKLKKDNQESSDAELSSSEYIKTDLDAMDIKGQESSSDQEQVDVESIDFSKENKMDMTSPEQSRNVLQFTEEKEAFISEEEIAKYMKRGKGKYYCKICCCRAMKKGAVLHHLVNKHNVHSPYKCTICGKAFLLESLLKNHVAAHGQSLLKCPRCNFESNFPRGFKKHLTHCQSRHNEEANKKLMEALEPPLEEQQI

SEQ ID NO: 917626 - protein, 552 aa, Homo sapiens
MEAFQELRKPSARLECDHCSFRGTDYENVQIHMGTIHPEFCDEMDAGGLGKMIFYQKSAKLFHCHKCFFTSKMYSNVYYHITSKHASPDKWNDKPKNQLNKETDPVKSPPLPEHQKIPCNSAEPKSIPALSMETQKLGSVLSPESPKPTPLTPLEPQKPGSVVSPELQTPLPSPEPSKPASVSSPEPPKSVPVCESQKLAPVPSPEPQKPAPVSPESVKATLSNPKPQKQSHFPETLGPPSASSPESPVLAASPEPWGPSPAASPESRKSARTTSPEPRKPSPSESPEPWKPFPAVSPEPRRPAPAVSPGSWKPGPPGSPRPWKSNPSASSGPWKPAKPAPSVSPGPWKPIPSVSPGPWKPTPSVSSASWKSSSVSPSSWKSPPASPESWKSGPPELRKTAPTLSPEHWKAVPPVSPELRKPGPPLSPEIRSPAGSPELRKPSGSPDLWKLSPDQRKTSPASLDFPESQKSSRGGSPDLWKSSFFIEPQKPVFPETRKPGPSGPSESPKAASDIWKPVLSIDTEPRKPALFPEPAKTAPPASHLEEISRSES

SEQ ID NO: 917627 - protein, 812 aa, Homo sapiens; identical to SEQ ID NO: 917624

SEQ ID NO: 917628 - protein, 223 aa, Homo sapiens
MHAWLTEQPLGVLFPEELYGDFEDLETGDMHKGKSGPDTQNEDIENKEEIDPDEEESAKKKHLDKKRKLKEMFDAEYDEGESTYFDDLKGEMQKEAQLNHVEFEDQDDEARVQYDGFRPGMYVRVEIENVPCEFVQNFDPHYPIILGGLGNSEGNVGHVQMRLKKHRWYKKILKSQDPIIFSVGWRRFQTILLYYIEDHNGRQRLLKYTPQHMHCGAAFWGKI

SEQ ID NO: 917629 - protein, 161 aa, Homo sapiens
MNIQGQVWSVLLNIQEIKMKNPRKYQVMKEKGKRSSEHIHQVYLDMSWTLGNHIFFRDRYGVKSPGLTPRAQVRHLSSSSAEGISSSPRPPSAQAPASLGTHKWANQAQMAASPHPVSPGPAPLPGDDHEAQHPPYSGHPLSPNGGTVQGLQDHQEHVVPM

SEQ ID NO: 917630 - protein, 325 aa, Homo sapiens
MSGAVLWAHCRSENPCETGFKAIRSFLSKSESKTWRLALGQALHQAFQTQPFRSLLSSPTLCPAGSRPSARLFSSLALCFLLCKSVGSAGGFWDFLREQCQICGVRANSLRGSHTAHWAQLGAGHLLPGGARIPQETIMLMLSSIPQEPLLYQAHSRCRTCKDKSWWSLLLKREMEVKSQPTTGITEGPPLLSEPLTYTLSPQCAICGQHNCSSGHSQLSSTVIFPKGDKGCCSGPLPRNLPSLIVTLERSRALILHQLGRYSLAEKILRDAVQVNSTAHEVWNGLGEVLQAQGNDAAATECFLTALELEASSPAVPFTIIPRVL

SEQ ID NO: 917631 - protein, 425 aa, Homo sapiens
LSHRLSQSGLCQFFNVLTLISKSPCITCFVIMELDTLSISPLWGMSGISMAIGISGISSSEAPGGMKGSSLGSKAQGNLRHDALTGFGEEGGDEDKEDIKGQQGQQEGGAVLESGQPHTVQDEQAVGNAQCVLQEPRPAVLIAVGHPEDDHGCAQARQQQQRQRQRGPEAVRRPLAGPVAACSHCAHSQDEDDQHVVVDDGLWGCVHGHADDGLPTSVAEDVQHVSIVEHSHRDALLVTDPAHDEQPVGTLALSQPAFRVEAAVTPHDHGSGLAEGPLAGGAELGLVGGILTRAPGCLGAIIQGQEWGVVQVPGEGDVVGAEQDTVVLAPILRHHVGHAVLSPGHGADEEEEAHGEEEAQARHLLQFLLQHLRAAAQYPSQGQAWPFVTEQSGHLSWKPGPHLPSHKAVWSPAEGAAVGHRVPLE

SEQ ID NO: 917632 - protein, 95 aa, Homo sapiens
SPSLRRGRARGGGAGVHRGGRRGRFRSRGAYLIVDRGEDGRGQRRRRRWLWWRRQKESEQGRACDVSVYDEEDNVLRNGEEESEGNQVPGFHVEQ

SEQ ID NO: 917633 - protein, 174 aa, Homo sapiens
CPNEGMVSQLFPPHIRLFYRYQDLAPQLVPLDYTTCPDVKVPYELIGSMPELKDNPFRQRIAQVFSEDGDGHMTLDNFLDMFSVMSEMAPRDLKAYYAFKIYDFNNDDYICAWDLEQTVTKLTRGELSAEEVSLVCEKVLDEADGDHDGRLSLEDFQNMILRAPDFLSTFHIRI

SEQ ID NO: 917634 - protein, 138 aa, Homo sapiens
LIPRMASMKLANPATLLSLKNFCLGTKEVPRLKLQESRDPGSSGPSSPETSLSRSGTAPPPQQDLVGHRATALTPDSCPLPGPGEPTLRSRQDRHFLQHLLGMGMNYCVRALGIHEQNESVLSISKQKRPGLNHCEIF

SEQ ID NO: 917635 - protein, 164 aa, Homo sapiens
VTSPDPSALMSHTTAFPHVAATLSIMDSTFKAPSAVSPIPAVIPSPSHKPSKTKTSKSSKVKDLSTRSDESPSNKKRKPQSSTSSSSSSSSSSLQTSLSSPLSGPHKKNCVLNASSALNSYQAAPPYNSLSVHNSNNGVSPLSAKLEPSGRTSLPGGPADIVRQ

SEQ ID NO: 917636 - protein, 1446 aa, Homo sapiens
MAEAVKPQRRAKAKASRTKTKEKKKYETPQREESSEVSLPKTSREQEIPSLACEFKGDHLKVVTDSQLQDDASGQNESEMFDVPLTSLTISNEESLTCNTEPPKEGGEARPCVGDSAVTPKVHPGDNVGTKVETPKNFTEVEENMSVQGGLSESAPQSNFSYTQPAMENIQVRETQNSKEDKQGLVCSSEVPQNVGLQSSCPAKHGFQTPRVKKLYPQLPAEIAGEAPALVAVKPLLRSERLYPELPSQLELVPFTKEQLKILEPGSWLENVESYLEEFDSMAHQDRHEFYELLLNYSRCRKQLLLAEAELLTLTSDCQNAKSRLWQFKEEQMSVQGICADQVKVFSYHRYQRVEMNENALVELKKLFDAKSEHLHQTLALHSYTSVLSRLQVESYIYALLSSSAVLRSSAIHQQGRASKQTESIPSDLCQLKECISVLFMFTRRVNEDTQFHDDILLWLQKLVSVLQRVGCPGDHLFLLNHILRCPAGVSKWAVPFIQIKVLHNPSGVFHFMQSLALLMSPVKNRAEFMCHMKPSERKPSSSGPGSGTWTLVDEGGEEDEDPETSWILLNEDDLVTILAQFPFHELFQHLLGFKAKGDYLPETTRPQEMMKIFAFANSLVELLAVGLETFNRARYRQFVKRIGYMIRMTLGYVSDHWAQYVSHNQGSGLAQQPYSMEKLQVEFDELFLRAVLHVLKAKRLGIWLFMSEMPFGTLSVQMLWKLFYLMHQVESENLQQLSSSLQPAQCKQQLQDPEHFTNFEKCLSSMNSSEEICLLTTFAQMAQARRTNVDEDFIKIIVLEIYEVSYVTLSTRETFSKVGRELLGTITAVHPEIISVLLDRVQETIDQVGMVSLYLFKELPLYLWQPSASEIAVIRDWLLNYNLTVVKNKLACVILEGLNWGFAKQATLHLDQAVHAEVALMVLEAYQKYLAQKPYAGILSESMKQVSYLASIVRYGETPETSFNQWAWNLILRLKLHKNDYGIQPNCPAVPFSVTVPDMTESPTFHPLLKAVKAGMPIGCYLALSMTAVGHSIEKFCAEGIPLLGILVQSRHLRTVVHVLDKILPLFYPCQYYLLKNEQFLSHLLLFLHLDSGVPQGVTQQVTHKVAQHLTGASHGDNVKLLNSMIQAHISVSTQPNEVGPVAVLEFWVQALISQHLWYREQPILFLMDHLCKAAFQLMQEDCIQKLLYQQHKNALGYHCDRSLLSSLVSWIVAGNITPSFVEGLATPTQVWFAWTVLNMESIFEEDSQLRRVIEGELVINSAFTPDQALKKAQTQLKLPIVPSLQRLLIYRWAHQALVTPSDHPLLPLIWQKFFLLYLHRPGPQYGLPIDGCIGRRFFQSPAHINLLKEMKRRLTEVADFHHAASKALRVPAEGSEGLPESHSGTPGYLTSPELHKELVRLFNVYILWLEDENFQKGDTYIPSLPKHYDIHRLAKVMQNQQVKL

SEQ ID NO: 917637 - protein, 2579 aa, Homo sapiens
MAEAVKPQRRAKAKASRTKTKEKKKYETPQREESSEVSLPKTSREQEIPSLACEFKGDHLKVVTDSQLQDDASGQNESEMFDVPLTSLTISNEESLTCNTEPPKEGGEARPCVGDSAVTPKVHPGDNVGTKVETPKNFTEVEENMSVQGGLSESAPQSNFSYTQPAMENIQVRETQNSKEDKQGLVCSSEVPQNVGLQSSCPAKHGFQTPRVKKLYPQLPAEIAGEAPALVAVKPLLRSERLYPELPSQLELVPFTKEQLKILEPGSWLENVESYLEEFDSMAHQDRHEFYELLLNYSRCRKQLLLAEAELLTLTSDCQNAKSRLWQFKEEQMSVQGICADQVKVFSYHRYQRVEMNENALVELKKLFDAKSEHLHQTLALHSYTSVLSRLQVESYIYALLSSSAVLRSSAIHQQGRASKQTESIPSDLCQLKECISVLFMFTRRVNEDTQFHDDILLWLQKLVSVLQRVGCPGDHLFLLNHILRCPAGVSKWAVPFIQIKVLHNPSGVFHFMQSLALLMSPVKNRAEFMCHMKPSERKPSSSGPGSGTWTLVDEGGEEDEDPETSWILLNEDDLVTILAQFPFHELFQHLLGFKAKGDYLPETTRPQEMMKIFAFANSLVELLAVGLETFNRARYRQFVKRIGYMIRMTLGYVSDHWAQYVSHNQGSGLAQQPYSMEKLQVEFDELFLRAVLHVLKAKRLGIWLFMSEMPFGTLSVQMLWKLFYLMHQVESENLQQLSSSLQPAQCKQQLQDPEHFTNFEKCLSSMNSSEEICLLTTFAQMAQARRTNVDEDFIKIIVLEIYEVSYVTLSTRETFSKVGRELLGTITAVHPEIISVLLDRVQETIDQVGMVSLYLFKELPLYLWQPSASEIAVIRDWLLNYNLTVVKNKLACVILEGLNWGFAKQATLHLDQAVHAEVALMVLEAYQKYLAQKPYAGILSESMKQVSYLASIVRYGETPETSFNQWAWNLILRLKLHKNDYGIQPNCPAVPFSVTVPDMTESPTFHPLLKAVKAGMPIGCYLALSMTAVGHSIEKFCAEGIPLLGILVQSRHLRTVVHVLDKILPLFYPCQYYLLKNEQFLSHLLLFLHLDSGVPQGVTQQVTHKVAQHLTGASHGDNVKLLNSMIQAHISVSTQPNEVGPVAVLEFWVQALISQHLWYREQPILFLMDHLCKAAFQLMQEDCIQKLLYQQHKNALGYHCDRSLLSSLVSWIVAGNITPSFVEGLATPTQVWFAWTVLNMESIFEEDSQLRRVIEGELVINSAFTPDQALKKAQTQLKLPIVPSLQRLLIYRWAHQALVTPSDHPLLPLIWQKFFLLYLHRPGPQYGLPIDGCIGRRFFQSPAHINLLKEMKRRLTEVADFHHAASKALRVPAEGSEGLPESHSGTPGYLTSPELHKELVRLFNVYILWLEDENFQKGDTYIPSLPKHYDIHRLAKVMQNQQDLWMEYLNMERIYHEFQETVGLWTQAKLESHSTPCSLSVQLDFTDPLLAKERVLSNLRKHEAPQPPLALHPTKPPVPVISSAVLLSQKDATQLVCTDLNLLQQQARTAALRESQQVALDGELLDTMPKQYVNREEQTTLHLECRGSSGKKCQGAAVVTVQFEGMHKNEAISQQLHVLRKEVKQLQAEAAKPPSLNIVEAAVHAENLITALVNAYKLQPTPGIQKVGISLFFTIVDYVSDETQRHPPTRQFFTSCIEILGQVFISGIKSECRKVLETILKNSRLCSLLSPFFTPNAAPAEFIQLYEQVVKFLSEDNSDMIFMLLTKFDLKQWLSATKPPLSDRTRLLESIHLALTAWGLEPDEDILMPFNLFCKHWTYLLLYQFPDQYSDILRLLMQSSAEQLLSPECWKATLRALGCCAPSCQQGAASTEGAVLPSSSDALLSDKQVMETIQWLSDFFYKLRLSKMDFKSFGLFSKWSPYMADVKTFLGYLVKRLIDLEMTCLAQDPTASRKTVLKSLHSVIIQLFKPWILVLEDNESSQQRHYPWLESDTVVASSIVQLFTDCIDSLHESFKDKLLPGDAGALWLHLMHYCEACTAPKMPEFILYAFHSTYRKLPWKDLHPDQMLMEAFFKVERGSPKSCFLFLGSVLCEVNWVSVLSDAWNSSPHPETRSMIVCLLFMMILLAKEVQLVDQTDSPLLSLLGQTSSLSWHLVDIVSYQSVLSYFSSHYPPSIILAKESYAELIMKLLKVSAGLSIPTDSQKHLDAVPKCQAFTHQMVQFLSTLEQNGKITLAVLEQEMSKLLDDIIVFNPPDMDSQTRHMALSSLFMEVLMMMNNATIPTAEFLRGSIRTWIGQKMHGLVVLPLLTAACQSLASVRHMAETTEACITAYFKESPLNQNSGWGPILVSLQVPELTMEEFLQECLTLGSYLTLYVYLLQCLNSEQTLRNEMKVLLILSKWLEQVYPSSVEEEAKLFLWWHQVLQLSLIQTEQNDSVLTESVIRILLLVQSRQNLVAEERLSSGILGAIGFGRKSPLSNRFRVVARSMAAFLSVQVPMEDQIRLRPGSELHLTPKAQQALNALESMASSKQYVEYQDQILQATQFIRHPGHCLQDGKSFLALLVNCLYPEVHYLDHIR

SEQ ID NO: 917638 - protein, 2579 aa, Homo sapiens; identical to SEQ ID NO: 917637

SEQ ID NO: 917639 - protein, 2481 aa, Homo sapiens
MAEAVKPQRRAKAKASRTKTKEKKKYETPQREESSEVSLPKTSREQEIPSLACEFKGDHLKVVTDSQLQDDASGQNESEMFDVPLTSLTISNEESLTCNTEPPKEGGEARPCVGDSAVTPKVHPGDNVGTKVETPKNFTEVEENMSVQGGLSESAPQSNFSYTQPAMENIQVRETQNSKEDKQGLVCSSEVPQNVGLQSSCPAKHGFQTPRVKKLYPQLPAEIAGEAPALVAVKPLLRSERLYPELPSQLELVPFTKEQLKILEPGSWLENVESYLEEFDSMAHQDRHEFYELLLNYSRCRKQLLLAEAELLTLTSDCQNAKSRLWQFKEEQMSVQGICADQVKVFSYHRYQRVEMNENALVELKKLFDAKSEHLHQTLALHSYTSVLSRLQVESYIYALLSSSAVLRSSAIHQQGRASKQTESIPSDLCQLKECISVLFMFTRRVNEDTQFHDDILLWLQKLVSVLQRVGCPGDHLFLLNHILRCPAGVSKWAVPFIQIKVLHNPSGVFHFMQSLALLMSPVKNRAEFMCHMKPSERKPSSSGPGSGTWTLVDEGGEEDEDPETSWILLNEDDLVTILAQFPFHELFQHLLGFKAKGDYLPETTRPQEMMKIFAFANSLVELLAVGLETFNRARYRQFVKRIGYMIRMTLGYVSDHWAQYVSHNQGSGLAQQPYSMEKLQVEFDELFLRAVLHVLKAKRLGIWLFMSEMPFGTLSVQMLWKLFYLMHQVESENLQQLSSSLQPAQCKQQLQDPEHFTNFEKCLSSMNSSEEICLLTTFAQMAQARRTNVDEDFIKIIVLEIYEVSYVTLSTRETFSKVGRELLGTITAVHPEIISVLLDRVQETIDQVGMVSLYLFKELPLYLWQPSASEIAVIRDWLLNYNLTVVKNKLACVILEGLNWGFAKQATLHLDQAVHAEVALMVLEAYQKYLAQKPYAGILSESMKQVSYLASIVRYGETPETSFNQWAWNLILRLKLHKNDYGIQPNCPAVPFSVTVPDMTESPTFHPLLKAVKAGMPIGCYLALSMTAVGHSIEKFCAEGIPLLGILVQSRHLRTVVHVLDKILPLFYPCQYYLLKNEQFLSHLLLFLHLDSGVPQGVTQQVTHKVAQHLTGASHGDNVKLLNSMIQAHISVSTQPNEVGPVAVLEFWVQALISQHLWYREQPILFLMDHLCKAAFQLMQEDCIQKLLYQQHKNALGYHCDRSLLSSLVSWIVAGNITPSFVEGLATPTQVWFAWTVLNMESIFEEDSQLRRVIEGELVINSAFTPDQALKKAQTQLKLPIVPSLQRLLIYRWAHQALVTPSDHPLLPLIWQKFFLLYLHRPGPQYGLPIDGCIGRRFFQSPAHINLLKEMKRRLTEVADFHHAASKALRVPAEGSEGLPESHSGTPGYLTSPELHKELVRLFNVYILWLEDENFQKGDTYIPSLPKHYDIHRLAKVMQNQQDLWMEYLNMERIYHEFQETVGLWTQAKLESHSTPCSLSVQLDFTDPLLAKERVLSNLRKHEAPQPPLALHPTKPPVPVISSAVLLSQKDATQLVCTDLNLLQQQARTAALRESQQVALDGELLDTMPKQYVNREEQTTLHLECRGSSGKKCQGAAVVTVQFEGMHKNEAISQQLHVLRKEVKQLQAEAAKPPSLNIVEAAVHAENLITALVNAYKLQPTPGIQKVGISLFFTIVDYVSDETQRHPPTRQFFTSCIEILGQVFISGIKSECRKVLETILKNSRLCSLLSPFFTPNAAPAEFIQLYEQVVKFLSEDNSDMIFMLLTKFDLKQWLSATKPPLSDRTRLLESIHLALTAWGLEPDEDILMPFNLFCKHWTYLLLYQFPDQYSDILRLLMQSSAEQLLSPECWKATLRALGCCAPSCQQGAASTEGAVLPSSSDALLSDKQVMETIQWLSDFFYKLRLSKMDFKSFGLFSKWSPYMADVKTFLGYLVKRLIDLEMTCLAQDPTASRKTVLKSLHSVIIQLFKPWILVLEDNESSQQRHYPWLESDTVVASSIVQLFTDCIDSLHESFKDKLLPGDAGALWLHLMHYCEACTAPKMPEFILYAFHSTYRKLPWKDLHPDQMLMEAFFKVERGSPKSCFLFLGSVLCEVNWVSVLSDAWNSSPHPETRSMIVCLLFMMILLAKEVQLVDQTDSPLLSLLGQTSSLSWHLVDIVSYQSVLSYFSSHYPPSIILAKESYAELIMKLLKVSAGLSIPTDSQKHLDAVPKCQAFTHQMVQFLSTLEQNGKITLAVLEQEMSKLLDDIIVFNPPDMDSQTRHMALSSLFMEVLMMMNNATIPTAEFLRGSIRTWIGQKMHGLVVLPLLTAACQSLASVRHMAETTEACITAYFKESPLNQNSGWGPILVSLQVPELTMEEFLQECLTLGSYLTLYVYLLQCLNSEQTLRNEMKVLLILSKWLEQVYPSSVEEEAKLFLWWHQVLQLSLIQTEQNDSVLTESVIRILLLVQSRQNLVAEERLSSGILGAIGFGRKSPLSNR

SEQ ID NO: 917640 - protein, 2160 aa, Homo sapiens
MAEAVKPQRRAKAKASRTKTKEKKKYETPQREESSEVSLPKTSREQEIPSLACEFKGDHLKVVTDSQLQDDASGQNESEMFDVPLTSLTISNEESLTCNTEPPKEGGEARPCVGDSAVTPKVHPGDNVGTKVETPKNFTEVEENMSVQGGLSESAPQSNFSYTQPAMENIQVRETQNSKEDKQGLVCSSEVPQNVGLQSSCPAKHGFQTPRVKKLYPQLPAEIAGEAPALVAVKPLLRSERLYPELPSQLELVPFTKEQLKILEPGSWLENVESYLEEFDSMAHQDRHEFYELLLNYSRCRKQLLLAEAELLTLTSDCQNAKSRLWQFKEEQMSVQGICADQVKVFSYHRYQRVEMNENALVELKKLFDAKSEHLHQTLALHSYTSVLSRLQVESYIYALLSSSAVLRSSAIHQQGRASKQTESIPSDLCQLKECISVLFMFTRRVNEDTQFHDDILLWLQKLVSVLQRVGCPGDHLFLLNHILRCPAGVSKWAVPFIQIKVLHNPSGVFHFMQSLALLMSPVKNRAEFMCHMKPSERKPSSSGPGSGTWTLVDEGGEEDEDPETSWILLNEDDLVTILAQFPFHELFQHLLGFKAKGDYLPETTRPQEMMKIFAFANSLVELLAVGLETFNRARYRQFVKRIGYMIRMTLGYVSDHWAQYVSHNQGSGLAQQPYSMEKLQVEFDELFLRAVLHVLKAKRLGIWLFMSEMPFGTLSVQMLWKLFYLMHQVESENLQQLSSSLQPAQCKQQLQDPEHFTNFEKCLSSMNSSEEICLLTTFAQMAQARRTNVDEDFIKIIVLEIYEVSYVTLSTRETFSKVGRELLGTITAVHPEIISVLLDRVQETIDQVGMVSLYLFKELPLYLWQPSASEIAVIRDWLLNYNLTVVKNKLACVILEGLNWGFAKQATLHLDQAVHAEVALMVLEAYQKYLAQKPYAGILSESMKQVSYLASIVRYGETPETSFNQWAWNLILRLKLHKNDYGIQPNCPAVPFSVTVPDMTESPTFHPLLKAVKAGMPIGCYLALSMTAVGHSIEKFCAEGIPLLGILVQSRHLRTVVHVLDKILPLFYPCQYYLLKNEQFLSHLLLFLHLDSGVPQGVTQQVTHKVAQHLTGASHGDNVKLLNSMIQAHISVSTQPNEVGPVAVLEFWVQALISQHLWYREQPILFLMDHLCKAAFQLMQEDCIQKLLYQQHKNALGYHCDRSLLSSLVSWIVAGNITPSFVEGLATPTQVWFAWTVLNMESIFEEDSQLRRVIEGELVINSAFTPDQALKKAQTQLKLPIVPSLQRLLIYRWAHQALVTPSDHPLLPLIWQKFFLLYLHRPGPQYGLPIDGCIGRRFFQSPAHINLLKEMKRRLTEVADFHHAASKALRVPAEGSEGLPESHSGTPGYLTSPELHKELVRLFNVYILWLEDENFQKGDTYIPSLPKHYDIHRLAKVMQNQQDLWMEYLNMERIYHEFQETVGLWTQAKLESHSTPCSLSVQLDFTDPLLAKERVLSNLRKHEAPQPPLALHPTKPPVPVISSAVLLSQKDATQLVCTDLNLLQQQARTAALRESQQVALDGELLDTMPKQYVNREEQTTLHLECRGSSGKKCQGAAVVTVQFEGMHKNEAISQQLHVLRKEVKQLQAEAAKPPSLNIVEAAVHAENLITALVNAYKLQPTPGIQKVGISLFFTIVDYVSDETQRHPPTRQFFTSCIEILGQVFISGIKSECRKVLETILKNSRLCSLLSPFFTPNAAPAEFIQLYEQVVKFLSEDNSDMIFMLLTKFDLKQWLSATKPPLSDRTRLLESIHLALTAWGLEPDEDILMPFNLFCKHWTYLLLYQFPDQYSDILRLLMQSSAEQLLSPECWKATLRALGCCAPSCQQGAASTEGAVLPSSSDALLSDKQVMETIQWLSDFFYKLRLSKMDFKSFGLFSKWSPYMADVKTFLGYLVKRLIDLEMTCLAQDPTASRKTVLKSLHSVIIQLFKPWILVLEDNESSQQRHYPWLESDTVVASSIVQLFTDCIDSLHESFKDKLLPGDAGALWLHLMHYCEACTAPKMPEFILYAFHSTYRKLPWKDLHPDQMLMEAFFKVERGSPKSCFLFLGSVLCEVNWVSVLSDAWNSSPHPETRSMIVCLLFMMILLAKEVQLVDQTVSLGKLMAKIRQGCLDLCFLLGR

SEQ ID NO: 917641 - protein, 1454 aa, Homo sapiens [sequence omitted]

SEQ ID NO: 917642 - protein, 510 aa, Homo sapiens
MATKRPVERGSPKSCFLFLGSVLCEVNWVSVLSDAWNSSPHPETRSMIVCLLFMMILLAKEVQLVDQTDSPLLSLLGQTSSLSWHLVDIVSYQSVLSYFSSHYPPSIILAKESYAELIMKLLKVSAGLSIPTDSQKHLDAVPKCQAFTHQMVQFLSTLEQNGKITLAVLEQEMSKLLDDIIVFNPPDMDSQTRHMALSSLFMEVLMMMNNATIPTAEFLRGSIRTWIGQKMHGLVVLPLLTAACQSLASVRHMAETTEACITAYFKESPLNQNSGWGPILVSLQVPELTMEEFLQECLTLGSYLTLYVYLLQCLNSEQTLRNEMKVLLILSKWLEQVYPSSVEEEAKLFLWWHQVLQLSLIQTEQNDSVLTESVIRILLLVQSRQNLVAEERLSSGILGAIGFGRKSPLSNRFRVVARSMAAFLSVQVPMEDQIRLRPGSELHLTPKAQQALNALESMASSKQYVEYQDQILQATQFIRHPGHCLQDGKSFLALLVNCLYPEVHYLDHIR

SEQ ID NO: 917643 - protein, 1446 aa, Homo sapiens; identical to SEQ ID NO: 917636

SEQ ID NO: 917644 - protein, 202 aa, Homo sapiens
AAVRNTRPIMFPHRGAVRNTRPITFPHRAAVGNIRPITFPHRGAVRNTHPITFPHRAAVRNTHPITFPHRAACRKKHSGSVVPSEEETEAERSPSTCTGPHCQRVTERGFEPKARALKLCVVTWKQHFPPSLGISKLEIQTAQHGIGSNRVRTCHQPQLKRLGRQGRKPTSRSHTSARSLPSSGTYQLCDLSPFYGNLSKMY

SEQ ID NO: 917645 - protein, 191 aa, Homo sapiens
KKKKKKKKKEEEEEEEEEEGQTCNFSVFNIFVKFCPQPPDRPQRVMFPSLFPCVLIVQLPLMSENMRYFIAARQVLPALVCSLLPIKDVLLNPFPVCPKNTCQQHLLLQYLPQDNFATNSRFYYYFLVVFPFTKYNNSRSLKMSNPRKCSIPTRDVNIILEQFLDRDLFNEFDFSEIDDFDDSDASDTRSV

SEQ ID NO: 917646 - protein, 305 aa, Homo sapiens
MLSLLNRRQEERLREQEERLREQEERQREQEDRLHEQEERLREQEERLCEQEERLCEQEERLREHEERLCEQEERLCEQEERLREQEERLHEQEERLREQEERLCEQEERLREHEERLCEQEERLREQEERLCEQEERLREQEERLCEQEERLREQEERLCEQEKLPGQERLLEEVEKLLEQERRQEEQERLLERERLLEEVEKLLEQERQQEEQERLLERERLLEEVEKLLEQERRQEEQERLLERERLLDEVEELLDEELERLRELERLRELERMLELGWEALYEQRAEPRSGFEELKATLEG

SEQ ID NO: 917647 - protein, 129 aa, Homo sapiens [sequence omitted]

SEQ ID NO: 917648 - protein, 127 aa, Homo sapiens
MTMPVNGAHKDADLWSSHDKMLAQPLKDSDVEVYNIIKKESNRQRVGLELIASENFASRAVLEALGSCLNNKYSEGYPGQRYYGGTEFNGLNLENPFVKKPKPLQGPFKLWDPHKLAWGGVKNRSQT

SEQ ID NO: 917649 - protein, 177 aa, Homo sapiens
MPFVSFSCLIILGIEVVLAGILVLFLKVTILVSIVWSRHICFILQVLFGSFSAGSAPAAGLTTTLGLLRDSWVCEPYLVEQAEHTSIHPVSPSSPHLGHHSSCHGGWSQFKWEDRRQVWLEEAAWTCLPDIPQVNPDTGYINYDQLEENARLFHPKLIIAGTSLYSRNLVSPVRDCP

SEQ ID NO: 917650 - protein, 313 aa, Homo sapiens
MTMPVNGAHKDADLWSSHDKMLAQPLKDSDVEVYNIIKKESNRQRVGLELIASENFASRAVLEALGSCLNNKYSEGYPGQRYYGGTEFIDELETLCQKRALQAYKLDPQCWGVNVQPYSGSPANFAVYTALVEPHGRIMGLDLPDGGHLTHGFMTDKKKISATSIFFESMPYKVNPDTGYINYDQLEENARLFHPKLIIAGTSCYSRNLEYARLRKIADENGAYLMADMAHISGLVAAGVVPSPFEHCHVVTTTTHKTLRGCRAGMIFYRKGVAVALKQAMTLEFKVYQHQVVANCRALSEALTELGYKIVTG

SEQ ID NO: 917651 - protein, 356 aa, Homo sapiens
MTMPVNGAHKDADLWSSHDKMLAQPLKDSDVEVYNIIKKESNRQRVGLELIASENFASRAVLEALGSCLNNKYSEGYPGQRYYGGTEFIDELETLCQKRALQAYKLDPQCWGVNVQPYSGSPANFAVYTALVEPHGRIMGLDLPDGGHLTHGFMTDKKKISATSIFFESMPYKVNPDTGYINYDQLEENARLFHPKLIIAGTSCYSRNLEYARLRKIADENGAYLMADMAHISGLVAAGVVPSPFEHCHVVTTTTHKTLRGCRAGMIFYRKGVKSVDPKTGKEILYNLESLINSAVFPGLQGGPHNHAIAGKTSSASAHPVAPNSHPTCPPKSCARTSTLGKKLEGCLCAGDANTE

SEQ ID NO: 917652 - protein, 352 aa, Homo sapiens
MTMPVNGAHKDADLWSSHDKMLAQPLKDSDVEVYNIIKKESNRQRVGLELIASENFASRAVLEALGSCLNNKYSEGYPGQRYYGGTEFIDELETLCQKRALQAYKLDPQCWGVNVQPYSGSPANFAVYTALVEPHGRIMGLDLPDGGHLTHGFMTDKKKISATSIFFESMPYKVNPDTGYINYDQLEENARLFHPKLIIAGTSCYSRNLEYARLRKIADENGAYLMADMAHISGLVAAGVVPSPFEHCHVVTTTTHKTLRGCRAGMIFYRKGVKSVDPKTGKEILYNLESLINSAVFPGLQGGPHNHAIAGVAVALKQAMTLEFKVYQHQVVANCRALSEALTELGYKIVTG

SEQ ID NO: 917653 - protein, 352 aa, Homo sapiens; identical to SEQ ID NO: 917652

SEQ ID NO: 917654 - protein, 818 aa, Homo sapiens
MALSQGRLTFRDVAIEFSQEEWKCLDPAQRALYRDVMLENYRNLVSLGISLSEMSITSMLGQGKEPWTVESEVKITKTSSGWECIKGVNTVVYPFTLPWRYSSNSDKGKVFIMMDNTLSCGFCDLFDVSPTHMIKELPPKENNSTGKVFQAVMLERHEIHDIQDFYFREMQQNIHDFECQCHNDERNYREIPAIKIKNITGRRDQGDGRNAGNKPVENQLELSFWLHLAELQGFQIERKIYECNQIEKSVTRGSSVSLLQTNLPCVNTSISNIYRNDFMHPSLLTQDQKAYIREKPYKCSDCGKAFNQRSNLTTHQRIHTGQKPHKCDICGKGFRRIANLASHHRIHTGEKPYRCNECGKTFNQTFNLTTHQRIHTGQKPYKCDRCGKGFRQIGNLASHHRIHTGEKPYRCNECGKTFNRMFHLTRHQRIHTGQKPYKCDICGKGFRQIANLASHHRIHTGEKPYKCSDCGKTFNYRSHLTRHQRIHTGQKPYKCDTCGKDFSQNSYLENHQRIHTREKSYRCNECGKTFNKMTNLTTHQRIHTGQKTYKCDICGKGFRQIGNLASHHRIHTGEKPYRCNECGKTFNRMFHLTRHQRIHTGQKPYKCDICGKSFSQNSYLENHQRIHTGEKTYKFLVDHQRTHTGEKPYKCNECGKTFIGHSSLTNHQVIHTGEKPYKCNECGKAYVKWSHLRHHESIQTGEKPYKCTKCSKAFRQWADIRIHQKIYAGEKPHKYDECGKTFTQASHLTIHQIIHTGEKPYEYDIYGKVFSQNSHFKSYHRICTEEKPYKCVWQGPQSKFTPCKSSENSYWREILQMS

SEQ ID NO: 917655 - protein, 139 aa, Homo sapiens
MSGQLWNLILAHCSLLFLACDLASPNLHQERVATDTLTPREAARPTLYPPPGFSGVETCALQFWAVGVMSQWDQEDNGERVNSEVWSCGRGSWLVQCGTGSLPKVPSDPPMITNIIKRYMAGYDVPSDGRPQHLLKNQI

SEQ ID NO: 917656 - protein, 190 aa, Homo sapiens
MRKFLSDPQVHTVLVERSTLKGAGPRRAGSPEPGLAECRACQVLRGRRCPRDGRSPAAADDPWMGRARRPQTSRRPGPQGRRRPAEAGAAPGARPRHTHCPARSPQGAPLLVAGRGKGSPSAVTQNNGVALSARASQDGRVGWRQRLPGLRAGEAASLPPVSHELFGFDLCPSQVAFGRDVSGADPRSWG

SEQ ID NO: 917657 - protein, 3558 aa, Homo sapiens
MSEPGGGGGEDGSAGLEVSAVQNVADVSVLQKHLRKLVPLLLEDGGEAPAALEAALEEKSALEQMRKFLSDPQVHTVLVERSTLKEDVGDEGEEEKEFISYNINIDIHYGVKSNSLAFIKRTPVIDADKPVSSQLRVLTLSEDSPYETLHSFISNAVAPFFKSYIRESGKADRDGDKMAPSVEKKIAELEMGLLHLQQNIEIPEISLPIHPMITNVAKQCYERGEKPKVTDFGDKVEDPTFLNQLQSGVNRWIREIQKVTKLDRDPASGTALQEISFWLNLERALYRIQEKRESPEVLLTLDILKHGKRFHATVSFDTDTGLKQALETVNDYNPLMKDFPLNDLLSATELDKIRQALVAIFTHLRKIRNTKYPIQRALRLVEAISRDLSSQLLKVLGTRKLMHVAYEEFEKVMVACFEVFQTWDDEYEKLQVLLRDIVKRKREENLKMVWRINPAHRKLQARLDQMRKFRRQHEQLRAVIVRVLRPQVTAVAQQNQGEVPEPQDMKVAEVLFDAADANAIEEVNLAYENVKEVDGLDVSKEGTEAWEAAMKRYDERIDRVETRITARLRDQLGTAKNANEMFRIFSRFNALFVRPHIRGAIRDYQTQLIQRVKDDIESLHDKFKVQYPQSQACKMSHVRDLPPVSGSIIWAKQIDRQLTAYMKRVEDVLGKGWENHVEGQKLKQDGDSFRMKLNTQEIFDDWARKVQQRNLGVSGRIFTIESTRVRGRTGNVLKLKVNFLPEIITLSKEVRNLKWLGFRVPLAIVNKAHQANQLYPFAISLIESVRTYERTCEKVEERNTISLLVAGLKKEVQALIAEGIALVWESYKLDPYVQRLAETVFNFQEKVDDLLIIEEKIDLEVRSLETCMYDHKTFSEILNRVQKAVDDLNLHSYSNLPIWVNKLDMEIERILGVRLQAGLRAWTQVLLGQAEDKAEVDMDTDAPQVSHKPGGEPKIKNVVHELRITNQVIYLNPPIEECRYKLYQEMFAWKMVVLSLPRIQSQRYQVGVHYELTEEEKFYRNALTRMPDGPVALEESYSAVMGIVSEVEQYVKVWLQYQCLWDMQAENIYNRLGEDLNKWQALLVQIRKARGTFDNAETKKEFGPVVIDYGKVQSKVNLKYDSWHKEVLSKFGQMLGSNMTEFHSQISKSRQELEQHSVDTASTSDAVTFITYVQSLKRKIKQFEKQVELYRNGQRLLEKQRFQFPPSWLYIDNIEGEWGAFNDIMRRKDSAIQQQVANLQMKIVQEDRAVESRTTDLLTDWEKTKPVTGNLRPEEALQALTIYEGKFGRLKDDREKCAKAKEALELTDTGLLSGSEERVQVALEELQDLKGVWSELSKVWEQIDQMKEQPWVSVQPRKLRQNLDALLNQLKSFPARLRQYASYEFVQRLLKGYMKINMLVIELKSEALKDRHWKQLMKRLHVNWVVSELTLGQIWDVDLQKNEAIVKDVLLVAQGEMALEEFLKQIREVWNTYELDLVNYQNKCRLIRGWDDLFNKVKEHINSVSAMKLSPYYKVFEEDALSWEDKLNRIMALFDVWIDVQRRWVYLEGIFTGSADIKHLLPVETQRFQSISTEFLALMKKVSKSPLVMDVLNIQGVQRSLERLADLLGKIQKALGEYLERERSSFPRFYFVGDEDLLEIIGNSKNVAKLQKHFKKMFAGVSSIILNEDNSVVLGISSREGEEVMFKTPVSITEHPKINEWLTLVEKEMRVTLAKLLAESVTEVEIFGKATSIDPNTYITWIDKYQAQLVVLSAQIAWSENVETALSSMGGGGDAAPLHSVLSNVEVTLNVLADSVLMEQPPLRRRKLEHLITELVHQRDVTRSLIKSKIDNAKSFEWLSQMRFYFDPKQTDVLQQLSIQMANAKFNYGFEYLGVQDKLVQTPLTDRCYLTMTQALEARLGGSPFGPAGTGKTESVKALGHQLGRFVLVFNCDETFDFQAMGRIFVGLCQVGAWGCFDEFNRLEERMLSAVSQQVQCIQEALREHSNPNYDKTSAPITCELLNKQVKVSPDMAIFITMNPGYAGRSNLPDNLKKLFRSLAMTKPDRQLIAQVMLYSQGFRTAEVLANKIVPFFKLCDEQLSSQSHYDFGLRALKSVLVSAGNVKRERIQKIKREKEERGEAVDEGEIAENLPEQEILIQSVCETMVPKLVAEDIPLLFSLLSDVFPGVQYHRGEMTALREELKKVCQEMYLTYGDGEEVGGMWVEKVLQLYQITQINHGLMMVGPSGSGKSMAWRVLLKALERLEGVEGVAHIIDPKAISKDHLYGTLDPNTREWTDGLFTHVLRKIIDSVRGELQKRQWIVFDGDVDPEWVENLNSVLDDNKLLTLPNGERLSLPPNVRIMFEVQDLKYATLATVSRCGMVWFSEDVLSTDMIFNNFLARLRSIPLDEGEDEAQRRRKGKEDEGEEAASPMLQIQRDAATIMQPYFTSNGLVTKALEHAFQLEHIMDLTRLRCLGSLFSMLHQACRNVAQYNANHPDFPMQIEQLERYIQVRGHQGLHRAHQLRQTTGLRTSEMLHLWGCALSPRRGRAFVEGLGKVQWVSVMQEDWEPLSLVNFAVSVFLLLLKFYKNQSLIPFLIAISGLCHTLVPAGDSRLKMRAELGEYIRRITTVPLPTAPNIPIIDYEVSISGEWSPWQAKVPQIEVETHKVAAPDVVVPTLDTVRHEALLYTWLAEHKPLVLCGPPGSGKTMTLFSALRALPDMEVVGLNFSSATTPELLLKTFDHYCEYRRTPNGVVLAPVQLGKWLVLFCDEINLPDMDKYGTQRVISFIRQMVEHGGFYRTSDQTWVKLERIQFVGACNPPTDPGRKPLSHRFLRHVPVVYVDYPGPASLTQIYGTFNRAMLRLIPSLRTYAEPLTAAMVEFYTMSQERFTQDTQPHYIYSPREMTRWVRGIFEALRPLETLPVEGLIRIWAHEALRLFQDRLVEDEERRWTDENIDTVALKHFPNIDREKAMSRPILYSNWLSKDYIPVDQEELRDYVKARLKVFYEEELDVPLVLFNEVLDHVLRIDRIFRQPQGHLLLIGVSGAGKTTLSRFVAWMNGLSVYQIKVHRKYTGEDFDEDLRTVLRRSGCKNEKIAFIMDESNVLDSGFLERMNTLLANGEVPGLFEGDEYATLMTQCKEGAQKEGLMLDSHEELYKWFTSQVIRNLHVVFTMNPSSEGLKDRAATSPALFNRCVLNWFGDWSTEALYQVGKEFTSKMDLEKPNYIVPDYMPVVYDKLPQPPSHREAIVNSCVFVHQTLHQANARLAKRGGRTMAITPRHYLDFINHYANLFHEKRSELEEQQMHLNVGLRKIKETVDQVEELRRDLRIKSQELEVKNAAANDKLKKMVKDQQEAEKKKVMSQEIQEQLHKQQEVIADKQMSVKEDLDKVEPAVIEAQNAVKSIKKQHLVEVRSMANPPAAVKLALESICLLLGESTTDWKQIRSIIMRENFIPTIVNFSAEEISDAIREKMKKNYMSNPSYNYEIVNRASLACGPMVKWAIAQLNYADMLKRVEPLRNELQKLEDDAKDNQQKANEVEQMIRDLEASIARYKEEYAVLISEAQASRQTWQLSRQK

SEQ ID NO: 917658 - protein, 3788 aa, Homo sapiens
MSEPGGGGGEDGSAGLEVSAVQNVADVSVLQKHLRKLVPLLLEDGGEAPAALEAALEEKSALEQMRKFLSDPQVHTVLVERSTLKEDVGDEGEEEKEFISYNINIDIHYGVKSNSLAFIKRTPVIDADKPVSSQLRVLTLSEDSPYETLHSFISNAVAPFFKSYIRESGKADRDGDKMAPSVEKKIAELEMGLLHLQQNIEIPEISLPIHPMITNVAKQCYERGEKPKVTDFGDKVEDPTFLNQLQSGVNRWIREIQKVTKLDRDPASGTALQEISFWLNLERALYRIQEKRESPEVLLTLDILKHGKRFHATVSFDTDTGLKQALETVNDYNPLMKDFPLNDLLSATELDKIRQALVAIFTHLRKIRNTKYPIQRALRLVEAISRDLSSQLLKVLGTRKLMHVAYEEFEKVMVACFEVFQTWDDEYEKLQVLLRDIVKRKREENLKMVWRINPAHRKLQARLDQMRKFRRQHEQLRAVIVRVLRPQVTAVAQQNQGEVPEPQDMKVAEVLFDAADANAIEEVNLAYENVKEVDGLDVSKEGTEAWEAAMKRYDERIDRVETRITARLRDQLGTAKNANEMFRIFSRFNALFVRPHIRGAIRDYQTQLIQRVKDDIESLHDKFKVQYPQSQACKMSHVRDLPPVSGSIIWAKQIDRQLTAYMKRVEDVLGKGWENHVEGQKLKQDGDSFRMKLNTQEIFDDWARKVQQRNLGVSGRIFTIESTRVRGRTGNVLKLKVNFLPEIITLSKEVRNLKWLGFRVPLAIVNKAHQANQLYPFAISLIESVRTYERTCEKVEERNTISLLVAGLKKEVQALIAEGIALVWESYKLDPYVQRLAETVFNFQEKVCSHVILRCPGNEGSTVIASSVKTLVLPKKACMVDAAYGHVSCKGGGPFVLTGLFNGAGVLGRPLSNNLSLETGGELKDKESNREQNAVLLLLQLKAEQALGLSHEGLTQSLRLPADQMHTTARLAPQAQEELNRARLLPSPRFTHQRPPLPLSGSKGREAGEAPCIFLSSARTCEWGLVFSPQQLGLATYGRTVPGAFVNVEYLRRMLCENKGTECELGVLNIKYFFLQVDDLLIIEEKIDLEVRSLETCMYDHKTFSEILNRVQKAVDDLNLHSYSNLPIWVNKLDMEIERILGVRLQAGLRAWTQVLLGQAEDKAEVDMDTDAPQVSHKPGGEPKIKNVVHELRITNQVIYLNPPIEECRYKLYQEMFAWKMVVLSLPRIQSQRYQVGVHYELTEEEKFYRNALTRMPDGPVALEESYSAVMGIVSEVEQYVKVWLQYQCLWDMQAENIYNRLGEDLNKWQALLVQIRKARGTFDNAETKKEFGPVVIDYGKVQSKVNLKYDSWHKEVLSKFGQMLGSNMTEFHSQISKSRQELEQHSVDTASTSDAVTFITYVQSLKRKIKQFEKQVELYRNGQRLLEKQRFQFPPSWLYIDNIEGEWGAFNDIMRRKDSAIQQQVANLQMKIVQEDRAVESRTTDLLTDWEKTKPVTGNLRPEEALQALTIYEGKFGRLKDDREKCAKAKEALELTDTGLLSGSEERVQVALEELQDLKGVWSELSKVWEQIDQMKEQPWVSVQPRKLRQNLDALLNQLKSFPARLRQYASYEFVQRLLKGYMKINMLVIELKSEALKDRHWKQLMKRLHVNWVVSELTLGQIWDVDLQKNEAIVKDVLLVAQGEMALEEFLKQIREVWNTYELDLVNYQNKCRLIRGWDDLFNKVKEHINSVSAMKLSPYYKVFEEDALSWEDKLNRIMALFDVWIDVQRRWVYLEGIFTGSADIKHLLPVETQRFQSISTEFLALMKKVSKSPLVMDVLNIQGVQRSLERLADLLGKIQKALGEYLERERSSFPRFYFVGDEDLLEIIGNSKNVAKLQKHFKKMFAGVSSIILNEDNSVVLGISSREGEEVMFKTPVSITEHPKINEWLTLVEKEMRVTLAKLLAESVTEVEIFGKATSIDPNTYITWIDKYQAQLVVLSAQIAWSENVETALSSMGGGGDAAPLHSVLSNVEVTLNVLADSVLMEQPPLRRRKLEHLITELVHQRDVTRSLIKSKIDNAKSFEWLSQMRFYFDPKQTDVLQQLSIQMANAKFNYGFEYLGVQDKLVQTPLTDRCYLTMTQALEARLGGSPFGPAGTGKTESVKALGHQLGRFVLVFNCDETFDFQAMGRIFVGLCQVGAWGCFDEFNRLEERMLSAVSQQVQCIQEALREHSNPNYDKTSAPITCELLNKQVKVSPDMAIFITMNPGYAGRSNLPDNLKKLFRSLAMTKPDRQLIAQVMLYSQGFRTAEVLANKIVPFFKLCDEQLSSQSHYDFGLRALKSVLVSAGNVKRERIQKIKREKEERGEAVDEGEIAENLPEQEILIQSVCETMVPKLVAEDIPLLFSLLSDVFPGVQYHRGEMTALREELKKVCQEMYLTYGDGEEVGGMWVEKVLQLYQITQINHGLMMVGPSGSGKSMAWRVLLKALERLEGVEGVAHIIDPKAISKDHLYGTLDPNTREWTDGLFTHVLRKIIDSVRGELQKRQWIVFDGDVDPEWVENLNSVLDDNKLLTLPNGERLSLPPNVRIMFEVQDLKYATLATVSRCGMVWFSEDVLSTDMIFNNFLARLRSIPLDEGEDEAQRRRKGKEDEGEEAASPMLQIQRDAATIMQPYFTSNGLVTKALEHAFQLEHIMDLTRLRCLGSLFSMLHQACRNVAQYNANHPDFPMQIEQLERYIQVRGHQGLHRAHQLRQTTGLRTSEMLHLWGCALSPRRGRAFVEGLGKVQWVSVMQEDWEPLSLVNFAVSVFLLLLKFYKNQSLIPFLIAISGLCHTLVPAGDSRLKMRAELGEYIRRITTVPLPTAPNIPIIDYEVSISGEWSPWQAKVPQIEVETHKVAAPDVVVPTLDTVRHEALLYTWLAEHKPLVLCGPPGSGKTMTLFSALRALPDMEVVGLNFSSATTPELLLKTFDHYCEYRRTPNGVVLAPVQLGKWLVLFCDEINLPDMDKYGTQRVISFIRQMVEHGGFYRTSDQTWVKLERIQFVGACNPPTDPGRKPLSHRFLRHVPVVYVDYPGPASLTQIYGTFNRAMLRLIPSLRTYAEPLTAAMVEFYTMSQERFTQDTQPHYIYSPREMTRWVRGIFEALRPLETLPVEGLIRIWAHEALRLFQDRLVEDEERRWTDENIDTVALKHFPNIDREKAMSRPILYSNWLSKDYIPVDQEELRDYVKARLKVFYEEELDVPLVLFNEVLDHVLRIDRIFRQPQGHLLLIGVSGAGKTTLSRFVAWMNGLSVYQIKVHRKYTGEDFDEDLRTVLRRSGCKNEKIAFIMDESNVLDSGFLERMNTLLANGEVPGLFEGDEYATLMTQCKEGAQKEGLMLDSHEELYKWFTSQVIRNLHVVFTMNPSSEGLKDRAATSPALFNRCVLNWFGDWSTEALYQVGKEFTSKMDLEKPNYIVPDYMPVVYDKLPQPPSHREAIVNSCVFVHQTLHQANARLAKRGGRTMAITPRHYLDFINHYANLFHEKRSELEEQQMHLNVGLRKIKETVDQVEELRRDLRIKSQELEVKNAAANDKLKKMVKDQQEAEKKKVMSQEIQEQLHKQQEVIADKQMSVKEDLDKVEPAVIEAQNAVKSIKKQHLVEVRSMANPPAAVKLALESICLLLGESTTDWKQIRSIIMRENFIPTIVNFSAEEISDAIREKMKKNYMSNPSYNYEIVNRASLACGPMVKWAIAQLNYADMLKRVEPLRNELQKLEDDAKDNQQKANEVEQMIRDLEASIARYKEEYAVLISEAQASRQTWQLSRQK

SEQ ID NO: 917659 - protein, 3575 aa, Homo sapiens
MSEPGGGGGEDGSAGLEVSAVQNVADVSVLQKHLRKLVPLLLEDGGEAPAALEAALEEKSALEQMRKFLSDPQVHTVLVERSTLKEDVGDEGEEEKEFISYNINIDIHYGVKSNSLAFIKRTPVIDADKPVSSQLRVLTLSEDSPYETLHSFISNAVAPFFKSYIRESGKADRDGDKMAPSVEKKIAELEMGLLHLQQNIEIPEISLPIHPMITNVAKQCYERGEKPKVTDFGDKVEDPTFLNQLQSGVNRWIREIQKVTKLDRDPASGTALQEISFWLNLERALYRIQEKRESPEVLLTLDILKHGKRFHATVSFDTDTGLKQALETVNDYNPLMKDFPLNDLLSATELDKIRQALVAIFTHLRKIRNTKYPIQRALRLVEAISRDLSSQLLKVLGTRKLMHVAYEEFEKVMVACFEVFQTWDDEYEKLQVLLRDIVKRKREENLKMVWRINPAHRKLQARLDQMRKFRRQHEQLRAVIVRVLRPQVTAVAQQNQGEVPEPQDMKVAEVLFDAADANAIEEVNLAYENVKEVDGLDVSKEGTEAWEAAMKRYDERIDRVETRITARLRDQLGTAKNANEMFRIFSRFNALFVRPHIRGAIRDYQTQLIQRVKDDIESLHDKFKVQYPQSQACKMSHVRDLPPVSGSIIWAKQIDRQLTAYMKRVEDVLGKGWENHVEGQKLKQDGDSFRMKLNTQEIFDDWARKVQQRNLGVSGRIFTIESTRVRGRTGNVLKLKVNFLPEIITLSKEVRNLKWLGFRVPLAIVNKAHQANQLYPFAISLIESVRTYERTCEKVEERNTISLLVAGLKKEVQALIAEGIALVWESYKLDPYVQRLAETVFNFQEKVDDLLIIEEKIDLEVRSLETCMYDHKTFSEILNRVQKAVDDLNLHSYSNLPIWVNKLDMEIERILGVRLQAGLRAWTQVLLGQAEDKAEVDMDTDAPQVSHKPGGEPKIKNVVHELRITNQVIYLNPPIEECRYKLYQEMFAWKMVVLSLPRIQSQRYQVGVHYELTEEEKFYRNALTRMPDGPVALEESYSAVMGIVSEVEQYVKVWLQYQCLWDMQAENIYNRLGEDLNKWQALLVQIRKARGTFDNAETKKEFGPVVIDYGKVQSKVNLKYDSWHKEVLSKFGQMLGSNMTEFHSQISKSRQELEQHSVDTASTSDAVTFITYVQSLKRKIKQFEKQVELYRNGQRLLEKQRFQFPPSWLYIDNIEGEWGAFNDIMRRKDSAIQQQVANLQMKIVQEDRAVESRTTDLLTDWEKTKPVTGNLRPEEALQALTIYEGKFGRLKDDREKCAKAKEALELTDTGLLSGSEERVQVALEELQDLKGVWSELSKVWEQIDQMKEQPWVSVQPRKLRQNLDALLNQLKSFPARLRQYASYEFVQRLLKGYMKINMLVIELKSEALKDRHWKQLMKRLHVNWVVSELTLGQIWDVDLQKNEAIVKDVLLVAQGEMALEEFLKQIREVWNTYELDLVNYQNKCRLIRGWDDLFNKVKEHINSVSAMKLSPYYKVFEEDALSWEDKLNRIMALFDVWIDVQRRWVYLEGIFTGSADIKHLLPVETQRFQSISTEFLALMKKVSKSPLVMDVLNIQGVQRSLERLADLLGKIQKALGEYLERERSSFPRFYFVGDEDLLEIIGNSKNVAKLQKHFKKMFAGVSSIILNEDNSVVLGISSREGEEVMFKTPVSITEHPKINEWLTLVEKEMRVTLAKLLAESVTEVEIFGKATSIDPNTYITWIDKYQAQLVVLSAQIAWSENVETALSSMGGGGDAAPLHSVLSNVEVTLNVLADSVLMEQPPLRRRKLEHLITELVHQRDVTRSLIKSKIDNAKSFEWLSQMRFYFDPKQTDVLQQLSIQMANAKFNYGFEYLGVQDKLVQTPLTDRCYLTMTQALEARLGGSPFGPAGTGKTESVKALGHQLGRFVLVFNCDETFDFQAMGRIFVGLCQVGAWGCFDEFNRLEERMLSAVSQQVQCIQEALREHSNPNYDKTSAPITCELLNKQVKVSPDMAIFITMNPGYAGRSNLPDNLKKLFRSLAMTKPDRQLIAQVMLYSQGFRTAEVLANKIVPFFKLCDEQLSSQSHYDFGLRALKSVLVSAGNVKRERIQKIKREKEERGEAVDEGEIAENLPEQEILIQSVCETMVPKLVAEDIPLLFSLLSDVFPGVQYHRGEMTALREELKKVCQEMYLTYGDGEEVGGMWVEKVLQLYQITQINHGLMMVGPSGSGKSMAWRVLLKALERLEGVEGVAHIIDPKAISKDHLYGTLDPNTREWTDGLFTHVLRKIIDSVRGELQKRQWIVFDGDVDPEWVENLNSVLDDNKLLTLPNGERLSLPPNVRIMFEVQDLKYATLATVSRCGMVWFSEDVLSTDMIFNNFLARLRSIPLDEGEDEAQRRRKGKEDEGEEAASPMLQIQRDAATIMQPYFTSNGLVTKALEHAFQLEHIMDLTRLRCLGSLFSMLHQACRNVAQYNANHPDFPMQIEQLERYIQVRGHQGLHRAHQLRQTTGLRTSEMLHLWGCALSPRRGRAFVEGLGKVQWVSVMQEDWEPLSLVNFAVSVFLLLLKFYKNQSLIPFLIAISGLCHTLVPAGDSRLKMRAELGEYIRRITTVPLPTAPNIPIIDYEVSISGEWSPWQAKVPQIEVETHKVAAPDVVVPTLDTVRHEALLYTWLAEHKPLVLCGPPGSGKTMTLFSALRALPDMEVVGLNFSSATTPELLLKTFDHYCEYRRTPNGVVLAPVQLGKWLVLFCDEINLPDMDKYGTQRVISFIRQMVEHGGFYRTSDQTWVKLERIQFVGACNPPTDPGRKPLSHRFLRHVPVVYVDYPGPASLTQIYGTFNRAMLRLIPSLRTYAEPLTAAMVEFYTMSQERFTQDTQPHYIYSPREMTRWVRGIFEALRPLETLPVEGLIRIWAHEALRLFQDRLVEDEERRWTDENIDTVALKHFPNIDREKAMSRPILYSNWLSKDYIPVDQEELRDYVKARLKVFYEEELDVPLVLFNEVLDHVLRIDRIFRQPQGHLLLIGVSGAGKTTLSRFVAWMNGLSVYQIKVHRKYTGEDFDEDLRTVLRRSGCKNEKIAFIMDESNVLDSGFLERMNTLLANGEVPGLFEGDEYATLMTQCKEGAQKEGLMLDSHEELYKWFTSQVIRNLHVVFTMNPSSEGLKDRAATSPALFNRCVLNWFGDWSTEALYQVGKEFTSKMDLEKPNYIVPDYMPVVYDKLPQPPSHREAIVNSCVFVHQTLHQANARLAKRGGRTMAITPRHYLDFINHYANLFHEKRSELEEQQMHLNVGLRKIKETVDQVEELRRDLRIKSQELEVKNAAANDKLKKMVKDQQEAEKKKVMSQEIQEQLHKQQEVIADKQMSVKEDLDKVEPAVIEAQNAVKSIKKQHLVEVRSMANPPAAVKLALESICLLLGESTTDWKQIRSIIMRENFIPTIVNFSAEEISDAIREKMKKNYMSNPSYNYEIVNRASLACGPMVKWAIAQLNYADMLKRVEPLRNELQKLEDDAKDNQQKANEVEQMIRDLEASIARYKEEYAVLISEAQAIKADLAAVEAKVRLSSLILSLSCCGSRD

SEQ ID NO: 917660 - protein, 3558 aa, Homo sapiens; identical to SEQ ID NO: 917657

SEQ ID NO: 917661 - protein, 3521 aa, Homo sapiens
LEDPKRREDSKQEFLVQRENLSAVNLSLGKIVQEDRAVESRTTDLLTDWEKTKPVTGNLRPEEALQALTIYEGKFGRLKDDREKCAKAKEALELTDTGLLSGSEERVQVALEELQDLKGVWSELSKVWEQIDQMKEQPWVSVQPRKLRQNLDALLNQLKSFPARLRQYASYEFVQRLLKGYMKINMLVIELKSEALKDRHWKQLMKRLHVNWVVSELTLGQIWDVDLQKNEAIVKDVLLVAQGEMALEEFLKQIREVWNTYELDLVNYQNKCRLIRGWDDLFNKVKEHINSVSAMKLSPYYKVFEEDALSWEDKLNRIMALFDVWIDVQRRWVYLEGIFTGSADIKHLLPVETQRFQSISTEFLALMKKVSKSPLVMDVLNIQGVQRSLERLADLLGKIQKALGEYLERERSSFPRFYFVGDEDLLEIIGNSKNVAKLQKHFKKMFAGVSSIILNEDNSVVLGISSREGEEVMFKTPVSITEHPKINEWLTLVEKEMRVTLAKLLAESVTEVEIFGKATSIDPNTYITWIDKYQAQLVVLSAQIAWSENVETALSSMGGGGDAAPLHSVLSNVEVTLNVLADSVLMEQPPLRRRKLEHLITELVHQRDVTRSLIKSKIDNAKSFEWLSQMRFYFDPKQTDVLQQLSIQMANAKFNYGFEYLGVQDKLVQTPLTDRCYLTMTQALEARLGGSPFGPAGTGKTESVKALGHQLGRFVLVFNCDETFDFQAMGRIFVGLCQVGAWGCFDEFNRLEERMLSAVSQQVQCIQEALREHSNPNYDKTSAPITCELLNKQVKVSPDMAIFITMNPGYAGRSNLPDNLKKLFRSLAMTKPDRQLIAQVMLYSQGFRTAEVLANKIVPFFKLCDEQLSSQSHYDFGLRALKSVLVSAGNVKRERIQKIKREKEERGEAVDEGEIAENLPEQEILIQSVCETMVPKLVAEDIPLLFSLLSDVFPGVQYHRGEMTALREELKKVCQEMYLTYGDGEEVGGMWVEKVLQLYQITQINHGLMMVGPSGSGKSMAWRVLLKALERLEGVEGVAHIIDPKAISKDHLYGTLDPNTREWTDGLFTHVLRKIIDSVRGELQKRQWIVFDGDVDPEWVENLNSVLDDNKLLTLPNGERLSLPPNVRIMFEVQDLKYATLATVSRCGMVWFSEDVLSTDMIFNNFLARLRSIPLDEGEDEAQRRRKGKEDEGEEAASPMLQIQRDAATIMQPYFTSNGLVTKALEHAFQLEHIMDLTRLRCLGSLFSMLHQACRNVAQYNANHPDFPMQIEQLERYIQVRGHQGLHRAHQLRQTTGLRTSEMLHLWGCALSPRRGRAFVEGLGKVQWVSVMQEDWEPLSLVNFAVSVFLLLLKFYKNQSLIPFLIAISGLCHTLVPAGDSRLKMRAELGEYIRRITTVPLPTAPNIPIIDYEVSISGEWSPWQAKVPQIEVETHKVAAPDVVVPTLDTVRHEALLYTWLAEHKPLVLCGPPGSGKTMTLFSALRALPDMEVVGLNFSSATTPELLLKTFDHYCEYRRTPNGVVLAPVQLGKWLVLFCDEINLPDMDKYGTQRVISFIRQMVEHGGFYRTSDQTWVKLERIQFVGACNPPTDPGRKPLSHRFLRHVPVVYVDYPGPASLTQIYGTFNRAMLRLIPSLRTYAEPLTAAMVEFYTMSQERFTQDTQPHYIYSPREMTRWVRGIFEALRPLETLPVEGLIRIWAHEALRLFQDRLVEDEERRWTDENIDTVALKHFPNIDREKAMSRPILYSNWLSKDYIPVDQEELRDYVKARLKVFYEEELDVPLVLFNEVLDHVLRIDRIFRQPQGHLLLIGVSGAGKTTLSRFVAWMNGLSVYQIKVHRKYTGEDFDEDLRTVLRRSGCKNEKIAFIMDESNVLDSGFLERMNTLLANGEVPGLFEGDEYATLMTQCKEGAQKEGLMLDSHEELYKWFTSQVIRNLHVVFTMNPSSEGLKDRAATSPALFNRCVLNWFGDWSTEALYQVGKEFTSKMDLEKPNYIVPDYMPVVYDKLPQPPSHREAIVNSCVFVHQTLHQANARLAKRGGRTMAITPRHYLDFINHYANLFHEKRSELEEQQMHLNVGLRKIKETVDQVEELRRDLRIKSQELEVKNAAANDKLKKMVKDQQEAEKKKVMSQEIQEQLHKQQEVIADKQMSVKEDLDKVEPAVIEAQNAVKSIKKQHLVEVRSMANPPAAVKLALESICLLLGESTTDWKQIRSIIMRENFIPTIVNFSAEEISDAIREKMKKNYMSNPSYNYEIVNRASLACGPMVKWAIAQLNYADMLKRVEPLRNELQKLEDDAKDNQQKANEVEQMIRDLEASIARYKEEYAVLISEAQAIKADLAAVEAKVNRSTALLKSLSAERERWEKTSETFKNQMSTIAGDCLLSAAFIAYAGYFDQQMRQNLFTTWSHHLQQANIQFRTDIARTEYLSNADERLRWQASSLPADDLCTENAIMLKRFNRYPLIIDPSGQATEFIMNEYKDRKITRTSFLDDAFRKNLESALRFGNPLLVQDVESYDPVLNPVLNREVRRTGGRVLITLGDQDIDLSPSFVIFLSTRDPTVEFPPDLCSRVTFVNFTVTRSSLQSQCLNEVLKAERPDVDEKRSDLLKLQGEFQLRLRQLEKSLLQALNEVKGRILDDDTIITTLENLKREAAEVTRKVEETDIVMQEVETVSQQYLPLSTACSSIYFTMESLKQIHFLYQYSLQFFLDIYHNVLYENPNLKGVTDHTQRLSIITKDLFQVAFNRVARGMLHQDHITFAMLLARIKLKGTVGEPTYDAEFQHFLRGNEIVLSAGSTPRIQGLTVEQAEAVVRLSCLPAFKDLIAKVQADEQFGIWLDSSSPEQTVPYLWSEETPATPIGQAIHRLLLIQAFRPDRLLAMAHMFVSTNLGESFMSIMEQPLDLTHIVGTEVKPNTPVLMCSVPGYDASGHVEDLAAEQNTQITSIAIGSAEGFNQADKAINTAVKSGRWVMLKNVHLAPGWLMQLEKKLHSLQPHACFRLFLTMEINPKVPVNLLRAGRIFVFEPPPGVKANMLRTFSSIPVSRICKSPNERARLYFLLAWFHAIIQERLRYAPLGWSKKYEFGESDLRSACDTVDTWLDDTAKGRQNISPDKIPWSALKTLMAQSIYGGRVDNEFDQRLLNTFLERLFTTRSFDSEFKLACKVDGHKDIQMPDGIRREEFVQWVELLPDTQTPSWLGLPNNAERVLLTTQGVDMISKMLKMQMLEDEDDLAYAETEKKTRTDSTSDGRPAWMRTLHTTASNWLHLIPQTLSHLKRTVENIKDPLFRFFEREVKMGAKLLQDVRQDLADVVQVCEGKKKQTNYLRTLINELVKGILPRSWSHYTVPAGMTVIQWVSDFSERIKQLQNISLAAASGGAKELKNIHVCLGGLFVPEAYITATRQYVAQANSWSLEELCLEVNVTTSQGATLDACSFGVTGLKLQGATCNNNKLSLSNAISTALPLTQLRWVKQTNTEKKASVVTLPVYLNFTRADLIFTVDFEIATKEDPRSFYERGVAVLCTE

SEQ ID NO: 917662 - protein, 3558 aa, Homo sapiens; identical to SEQ ID NO: 917657

SEQ ID NO: 917663 - protein, 3558 aa, Homo sapiens; identical to SEQ ID NO: 917657

SEQ ID NO: 917664 - protein, 3558 aa, Homo sapiens; identical to SEQ ID NO: 917657

SEQ ID NO: 917665 - protein, 4177 aa, Homo sapiens
MSEPGGGGGEDGSAGLEVSAVQNVADVSVLQKHLRKLVPLLLEDGGEAPAALEAALEEKSALEQMRKFLSDPQVHTVLVERSTLKEDVGDEGEEEKEFISYNINIDIHYGVKSNSLAFIKRTPVIDADKPVSSQLRVLTLSEDSPYETLHSFISNAVAPFFKSYIRESGKADRDGDKMAPSVEKKIAELEMGLLHLQQNIEIPEISLPIHPMITNVAKQCYERGEKPKVTDFGDKVEDPTFLNQLQSGVNRWIREIQKVTKLDRDPASGTALQEISFWLNLERALYRIQEKRESPEVLLTLDILKHGKRFHATVSFDTDTGLKQALETVNDYNPLMKDFPLNDLLSATELDKIRQALVAIFTHLRKIRNTKYPIQRALRLVEAISRDLSSQLLKVLGTRKLMHVAYEEFEKVMVACFEVFQTWDDEYEKLQVLLRDIVKRKREENLKMVWRINPAHRKLQARLDQMRKFRRQHEQLRAVIVRVLRPQVTAVAQQNQGEVPEPQDMKVAEVLFDAADANAIEEVNLAYENVKEVDGLDVSKEGTEAWEAAMKRYDERIDRVETRITARLRDQLGTAKNANEMFRIFSRFNALFVRPHIRGAIRDYQTQLIQRVKDDIESLHDKFKVQYPQSQACKMSHVRDLPPVSGSIIWAKQIDRQLTAYMKRVEDVLGKGWENHVEGQKLKQDGDSFRMKLNTQEIFDDWARKVQQRNLGVSGRIFTIESTRVRGRTGNVLKLKVNFLPEIITLSKEVRNLKWLGFRVPLAIVNKAHQANQLYPFAISLIESVRTYERTCEKVEERNTISLLVAGLKKEVQALIAEGIALVWESYKLDPYVQRLAETVFNFQEKVDDLLIIEEKIDLEVRSLETCMYDHKTFSEILNRVQKAVDDLNLHSYSNLPIWVNKLDMEIERILGVRLQAGLRAWTQVLLGQAEDKAEVDMDTDAPQVSHKPGGEPKIKNVVHELRITNQVIYLNPPIEECRYKLYQEMFAWKMVVLSLPRIQSQRYQVGVHYELTEEEKFYRNALTRMPDGPVALEESYSAVMGIVSEVEQYVKVWLQYQCLWDMQAENIYNRLGEDLNKWQALLVQIRKARGTFDNAETKKEFGPVVIDYGKVQSKVNLKYDSWHKEVLSKFGQMLGSNMTEFHSQISKSRQELEQHSVDTASTSDAVTFITYVQSLKRKIKQFEKQVELYRNGQRLLEKQRFQFPPSWLYIDNIEGEWGAFNDIMRRKDSAIQQQVANLQMKIVQEDRAVESRTTDLLTDWEKTKPVTGNLRPEEALQALTIYEGKFGRLKDDREKCAKAKEALELTDTGLLSGSEERVQVALEELQDLKGVWSELSKVWEQIDQMKEQPWVSVQPRKLRQNLDALLNQLKSFPARLRQYASYEFVQRLLKGYMKINMLVIELKSEALKDRHWKQLMKRLHVNWVVSELTLGQIWDVDLQKNEAIVKDVLLVAQGEMALEEFLKQIREVWNTYELDLVNYQNKCRLIRGWDDLFNKVKEHINSVSAMKLSPYYKVFEEDALSWEDKLNRIMALFDVWIDVQRRWVYLEGIFTGSADIKHLLPVETQRFQSISTEFLALMKKVSKSPLVMDVLNIQGVQRSLERLADLLGKIQKALGEYLERERSSFPRFYFVGDEDLLEIIGNSKNVAKLQKHFKKMFAGVSSIILNEDNSVVLGISSREGEEVMFKTPVSITEHPKINEWLTLVEKEMRVTLAKLLAESVTEVEIFGKATSIDPNTYITWIDKYQAQLVVLSAQIAWSENVETALSSMGGGGDAAPLHSVLSNVEVTLNVLADSVLMEQPPLRRRKLEHLITELVHQRDVTRSLIKSKIDNAKSFEWLSQMRFYFDPKQTDVLQQLSIQMANAKFNYGFEYLGVQDKLVQTPLTDRCYLTMTQALEARLGGSPFGPAGTGKTESVKALGHQLGRFVLVFNCDETFDFQAMGRIFVGLCQVGAWGCFDEFNRLEERMLSAVSQQVQCIQEALREHSNPNYDKTSAPITCELLNKQVKVSPDMAIFITMNPGYAGRSNLPDNLKKLFRSLAMTKPDRQLIAQVMLYSQGFRTAEVLANKIVPFFKLCDEQLSSQSHYDFGLRALKSVLVSAGNVKRERIQKIKREKEERGEAVDEGEIAENLPEQEILIQSVCETMVPKLVAEDIPLLFSLLSDVFPGVQYHRGEMTALREELKKVCQEMYLTYGDGEEVGGMWVEKVLQLYQITQINHGLMMVGPSGSGKSMAWRVLLKALERLEGVEGVAHIIDPKAISKDHLYGTLDPNTREWTDGLFTHVLRKIIDSVRGELQKRQWIVFDGDVDPEWVENLNSVLDDNKLLTLPNGERLSLPPNVRIMFEVQDLKYATLATVSRCGMVWFSEDVLSTDMIFNNFLARLRSIPLDEGEDEAQRRRKGKEDEGEEAASPMLQIQRDAATIMQPYFTSNGLVTKALEHAFQLEHIMDLTRLRCLGSLFSMLHQACRNVAQYNANHPDFPMQIEQLERYIQVRGHQGLHRAHQLRQTTGLRTSEMLHLWGCALSPRRGRAFVEGLGKVQWVSVMQEDWEPLSLVNFAVSVFLLLLKFYKNQSLIPFLIAISGLCHTLVPAGDSRLKMRAELGEYIRRITTVPLPTAPNIPIIDYEVSISGEWSPWQAKVPQIEVETHKVAAPDVVVPTLDTVRHEALLYTWLAEHKPLVLCGPPGSGKTMTLFSALRALPDMEVVGLNFSSATTPELLLKTFDHYCEYRRTPNGVVLAPVQLGKWLVLFCDEINLPDMDKYGTQRVISFIRQMVEHGGFYRTSDQTWVKLERIQFVGACNPPTDPGRKPLSHRFLRHVPVVYVDYPGPASLTQIYGTFNRAMLRLIPSLRTYAEPLTAAMVEFYTMSQERFTQDTQPHYIYSPREMTRWVRGIFEALRPLETLPVEGLIRIWAHEALRLFQDRLVEDEERRWTDENIDTVALKHFPNIDREKAMSRPILYSNWLSKDYIPVDQEELRDYVKARLKVFYEEELDVPLVLFNEVLDHVLRIDRIFRQPQGHLLLIGVSGAGKTTLSRFVAWMNGLSVYQIKVHRKYTGEDFDEDLRTVLRRSGCKNEKIAFIMDESNVLDSGFLERMNTLLANGEVPGLFEGDEYATLMTQCKEGAQKEGLMLDSHEELYKWFTSQVIRNLHVVFTMNPSSEGLKDRAATSPALFNRCVLNWFGDWSTEALYQVGKEFTSKMDLEKPNYIVPDYMPVVYDKLPQPPSHREAIVNSCVFVHQTLHQANARLAKRGGRTMAITPRHYLDFINHYANLFHEKRSELEEQQMHLNVGLRKIKETVDQVEELRRDLRIKSQELEVKNAAANDKLKKMVKDQQEAEKKKVMSQEIQEQLHKQQEVIADKQMSVKEDLDKVEPAVIEAQNAVKSIKKQHLVEVRSMANPPAAVKLALESICLLLGESTTDWKQIRSIIMRENFIPTIVNFSAEEISDAIREKMKKNYMSNPSYNYEIVNRASLACGPMVKWAIAQLNYADMLKRVEPLRNELQKLEDDAKDNQQKANEVEQMIRDLEASIARYKEEYAVLISEAQAIKADLAAVEAKVNRSTALLKSLSAERERWEKTSETFKNQMSTIAGDCLLSAAFIAYAGYFDQQMRQNLFTTWSHHLQQANIQFRTDIARTEYLSNADERLRWQASSLPADDLCTENAIMLKRFNRYPLIIDPSGQATEFIMNEYKDRKITRTSFLDDAFRKNLESALRFGNPLLVQVGVGLGILETLHSRVNSFLGAAFSFQLCKTSFCIRRIKLCGGSDKIPWSALKTLMAQSIYGGRVDNEFDQRLLNTFLERLFTTRSFDSEFKLACKVDGHKDIQMPDGIRREEFVQWVELLPDTQTPSWLGLPNNAERVLLTTQGVDMISKMLKMQMLEDEDDLAYAETEKKTRTDSTSDGRPAWMRTLHTTASNWLHLIPQTLSHLKRTVENIKDPLFRFFEREVKMGAKLLQDVRQDLADVVQVCEGKKKQTNYLRTLINELVKGILPRSWSHYTVPAGMTVIQWVSDFSERIKQLQNISLAAASGGAKELKNIHVCLGGLFVPEAYITATRQYVAQANSWSLEELCLEVNVTTSQGATLDACSFGVTGLKLQGATCNNNKLSLSNAISTALPLTQLRWVKQTNTEKKASVVTLPVYLNFTRADLIFTVDFEIATKEDPRSFYERGVAVLCTE

SEQ ID NO: 917666 - protein, 1667 aa, Homo sapiens
TDAAGYLEDPVSFIMDESNVLDSGFLERMNTLLANGEVPGLFEGDEYATLMTQCKEGAQKEGLMLDSHEELYKWFTSQVIRNLHVVFTMNPSSEGLKDRAATSPALFNRCVLNWFGDWSTEALYQVGKEFTSKMDLEKPNYIVPDYMPVVYDKLPQPPSHREAIVNSCVFVHQTLHQANARLAKRGGRTMAITPRHYLDFINHYANLFHEKRSELEEQQMHLNVGLRKIKETVDQVEELRRDLRIKSQELEVKNAAANDKLKKMVKDQQEAEKKKVMSQEIQEQLHKQQEVIADKQMSVKEDLDKVEPAVIEAQNAVKSIKKQHLVEVRSMANPPAAVKLALESICLLLGESTTDWKQIRSIIMRENFIPTIVNFSAEEISDAIREKMKKNYMSNPSYNYEIVNRASLACGPMVKWAIAQLNYADMLKRVEPLRNELQKLEDDAKDNQQKANEVEQMIRDLEASIARYKEEYAVLISEAQAIKADLAAVEAKVNRSTALLKSLSAERERWEKTSETFKNQMSTIAGDCLLSAAFIAYAGYFDQQMRQNLFTTWSHHLQQANIQFRTDIARTEYLSNADERLRWQASSLPADDLCTENAIMLKRFNRYPLIIDPSGQATEFIMNEYKDRKITRTSFLDDAFRKNLESALRFGNPLLVQDVESYDPVLNPVLNREVRRTGGRVLITLGDQDIDLSPSFVIFLSTRDPTVEFPPDLCSRVTFVNFTVTRSSLQSQCLNEVLKAERPDVDEKRSDLLKLQGEFQLRLRQLEKSLLQALNEVKGRILDDDTIITTLENLKREAAEVTRKVEETDIVMQEVETVSQQYLPLSTACSSIYFTMESLKQIHFLYQYSLQFFLDIYHNVLYENPNLKGVTDHTQRLSIITKDLFQVAFNRVARGMLHQDHITFAMLLARIKLKGTVGEPTYDAEFQHFLRGNEIVLSAGSTPRIQGLTVEQAEAVVRLSCLPAFKDLIAKVQADEQFGIWLDSSSPEQTVPYLWSEETPATPIGQAIHRLLLIQAFRPDRLLAMAHMFVSTNLGESFMSIMEQPLDLTHIVGTEVKPNTPVLMCSVPGYDASGHVEDLAAEQNTQITSIAIGSAEGFNQADKAINTAVKSGRWVMLKNVHLAPGWLMQLEKKLHSLQPHACFRLFLTMEINPKVPVNLLRAGRIFVFEPPPGVKANMLRTFSSIPVSRICKSPNERARLYFLLAWFHAIIQERLRYAPLGWSKKYEFGESDLRSACDTVDTWLDDTAKGRQNISPDKIPWSALKTLMAQSIYGGRVDNEFDQRLLNTFLERLFTTRSFDSEFKLACKVDGHKDIQMPDGIRREEFVQWVELLPDTQTPSWLGLPNNAERVLLTTQGVDMISKMLKMQMLEDEDDLAYAETEKKTRTDSTSDGRPAWMRTLHTTASNWLHLIPQTLSHLKRTVENIKDPLFRFFEREVKMGAKLLQDVRQDLADVVQVCEGKKKQTNYLRTLINELVKGILPRSWSHYTVPAGMTVIQWVSDFSERIKQLQNISLAAASGGAKELKNIHVCLGGLFVPEAYITATRQYVAQANSWSLEELCLEVNVTTSQGATLDACSFGVTGLKLQGATCNNNKLSLSNAISTALPLTQLRWVKQTNTEKKASVVTLPVYLNFTRADLIFTVDFEIATKEDPRSFYERGVAVLCTE

SEQ ID NO: 917667 - protein, 1012 aa, Homo sapiens
MQDVESYDPVLNPVLNREVRRTGGRVLITLGDQDIDLSPSFVIFLSTRDPTVEFPPDLCSRVTFVNFTVTRSSLQSQCLNEVLKAERPDVDEKRSDLLKLQGEFQLRLRQLEKSLLQALNEVKGRILDDDTIITTLENLKREAAEVTRKVEETDIVMQEVETVSQQYLPLSTACSSIYFTMESLKQIHFLYQYSLQFFLDIYHNVLYENPNLKGVTDHTQRLSIITKDLFQVAFNRVARGMLHQDHITFAMLLARIKLKGTVGEPTYDAEFQHFLRGNEIVLSAGSTPRIQGLTVEQAEAVVRLSCLPAFKDLIAKVQADEQFGIWLDSSSPEQTVPYLWSEETPATPIGQAIHRLLLIQAFRPDRLLAMAHMFVSTNLGESFMSIMEQPLDLTHIVGTEVKPNTPVLMCSVPGYDASGHVEDLAAEQNTQITSIAIGSAEGFNQADKAINTAVKSGRWVMLKNVHLAPGWLMQLEKKLHSLQPHACFRLFLTMEINPKVPVNLLRAGRIFVFEPPPGVKANMLRTFSSIPVSRICKSPNERARLYFLLAWFHAIIQERLRYAPLGWSKKYEFGESDLRSACDTVDTWLDDTAKGRQNISPDKIPWSALKTLMAQSIYGGRVDNEFDQRLLNTFLERLFTTRSFDSEFKLACKVDGHKDIQMPDGIRREEFVQWVELLPDTQTPSWLGLPNNAERVLLTTQGVDMISKMLKMQMLEDEDDLAYAETEKKTRTDSTSDGRPAWMRTLHTTASNWLHLIPQTLSHLKRTVENIKDPLFRFFEREVKMGAKLLQDVRQDLADVVQVCEGKKKQTNYLRTLINELVKGILPRSWSHYTVPAGMTVIQWVSDFSERIKQLQNISLAAASGGAKELKNIHVCLGGLFVPEAYITATRQYVAQANSWSLEELCLEVNVTTSQGATLDACSFGVTGLKLQGATCNNNKLSLSNAISTALPLTQLRWVKQTNTEKKASVVTLPVYLNFTRADLIFTVDFEIATKEDPRSFYERGVAVLCTE

SEQ ID NO: 917668 - protein, 3558 aa, Homo sapiens; identical to SEQ ID NO: 917657

SEQ ID NO: 917669 - protein, 4350 aa, Homo sapiens
MSEPGGGGGEDGSAGLEVSAVQNVADVSVLQKHLRKLVPLLLEDGGEAPAALEAALEEKSALEQMRKFLSDPQVHTVLVERSTLKEDVGDEGEEEKEFISYNINIDIHYGVKSNSLAFIKRTPVIDADKPVSSQLRVLTLSEDSPYETLHSFISNAVAPFFKSYIRESGKADRDGDKMAPSVEKKIAELEMGLLHLQQNIEIPEISLPIHPMITNVAKQCYERGEKPKVTDFGDKVEDPTFLNQLQSGVNRWIREIQKVTKLDRDPASGTALQEISFWLNLERALYRIQEKRESPEVLLTLDILKHGKRFHATVSFDTDTGLKQALETVNDYNPLMKDFPLNDLLSATELDKIRQALVAIFTHLRKIRNTKYPIQRALRLVEAISRDLSSQLLKVLGTRKLMHVAYEEFEKVMVACFEVFQTWDDEYEKLQVLLRDIVKRKREENLKMVWRINPAHRKLQARLDQMRKFRRQHEQLRAVIVRVLRPQVTAVAQQNQGEVPEPQDMKVAEVLFDAADANAIEEVNLAYENVKEVDGLDVSKEGTEAWEAAMKRYDERIDRVETRITARLRDQLGTAKNANEMFRIFSRFNALFVRPHIRGAIRDYQTQLIQRVKDDIESLHDKFKVQYPQSQACKMSHVRDLPPVSGSIIWAKQIDRQLTAYMKRVEDVLGKGWENHVEGQKLKQDGDSFRMKLNTQEIFDDWARKVQQRNLGVSGRIFTIESTRVRGRTGNVLKLKVNFLPEIITLSKEVRNLKWLGFRVPLAIVNKAHQANQLYPFAISLIESVRTYERTCEKVEERNTISLLVAGLKKEVQALIAEGIALVWESYKLDPYVQRLAETVFNFQEKVDDLLIIEEKIDLEVRSLETCMYDHKTFSEILNRVQKAVDDLNLHSYSNLPIWVNKLDMEIERILGVRLQAGLRAWTQVLLGQAEDKAEVDMDTDAPQVSHKPGGEPKIKNVVHELRITNQVIYLNPPIEECRYKLYQEMFAWKMVVLSLPRIQSQRYQVGVHYELTEEEKFYRNALTRMPDGPVALEESYSAVMGIVSEVEQYVKVWLQYQCLWDMQAENIYNRLGEDLNKWQALLVQIRKARGTFDNAETKKEFGPVVIDYGKVQSKVNLKYDSWHKEVLSKFGQMLGSNMTEFHSQISKSRQELEQHSVDTASTSDAVTFITYVQSLKRKIKQFEKQVELYRNGQRLLEKQRFQFPPSWLYIDNIEGEWGAFNDIMRRKDSAIQQQVANLQMKIVQEDRAVESRTTDLLTDWEKTKPVTGNLRPEEALQALTIYEGKFGRLKDDREKCAKAKEALELTDTGLLSGSEERVQVALEELQDLKGVWSELSKVWEQIDQMKEQPWVSVQPRKLRQNLDALLNQLKSFPARLRQYASYEFVQRLLKGYMKINMLVIELKSEALKDRHWKQLMKRLHVNWVVSELTLGQIWDVDLQKNEAIVKDVLLVAQGEMALEEFLKQIREVWNTYELDLVNYQNKCRLIRGWDDLFNKVKEHINSVSAMKLSPYYKVFEEDALSWEDKLNRIMALFDVWIDVQRRWVYLEGIFTGSADIKHLLPVETQRFQSISTEFLALMKKVSKSPLVMDVLNIQGVQRSLERLADLLGKIQKALGEYLERERSSFPRFYFVGDEDLLEIIGNSKNVAKLQKHFKKMFAGVSSIILNEDNSVVLGISSREGEEVMFKTPVSITEHPKINEWLTLVEKEMRVTLAKLLAESVTEVEIFGKATSIDPNTYITWIDKYQAQLVVLSAQIAWSENVETALSSMGGGGDAAPLHSVLSNVEVTLNVLADSVLMEQPPLRRRKLEHLITELVHQRDVTRSLIKSKIDNAKSFEWLSQMRFYFDPKQTDVLQQLSIQMANAKFNYGFEYLGVQDKLVQTPLTDRCYLTMTQALEARLGGSPFGPAGTGKTESVKALGHQLGRFVLVFNCDETFDFQAMGRIFVGLCQVGAWGCFDEFNRLEERMLSAVSQQVQCIQEALREHSNPNYDKTSAPITCELLNKQVKVSPDMAIFITMNPGYAGRSNLPDNLKKLFRSLAMTKPDRQLIAQVMLYSQGFRTAEVLANKIVPFFKLCDEQLSSQSHYDFGLRALKSVLVSAGNVKRERIQKIKREKEERGEAVDEGEIAENLPEQEILIQSVCETMVPKLVAEDIPLLFSLLSDVFPGVQYHRGEMTALREELKKVCQEMYLTYGDGEEVGGMWVEKVLQLYQITQINHGLMMVGPSGSGKSMAWRVLLKALERLEGVEGVAHIIDPKAISKDHLYGTLDPNTREWTDGLFTHVLRKIIDSVRGELQKRQWIVFDGDVDPEWVENLNSVLDDNKLLTLPNGERLSLPPNVRIMFEVQDLKYATLATVSRCGMVWFSEDVLSTDMIFNNFLARLRSIPLDEGEDEAQRRRKGKEDEGEEAASPMLQIQRDAATIMQPYFTSNGLVTKALEHAFQLEHIMDLTRLRCLGSLFSMLHQACRNVAQYNANHPDFPMQIEQLERYIQVRGHQGLHRAHQLRQTTGLRTSEMLHLWGCALSPRRGRAFVEGLGKVQWVSVMQEDWEPLSLVNFAVSVFLLLLKFYKNQSLIPFLIAISGLCHTLVPAGDSRLKMRAELGEYIRRITTVPLPTAPNIPIIDYEVSISGEWSPWQAKVPQIEVETHKVAAPDVVVPTLDTVRHEALLYTWLAEHKPLVLCGPPGSGKTMTLFSALRALPDMEVVGLNFSSATTPELLLKTFDHYCEYRRTPNGVVLAPVQLGKWLVLFCDEINLPDMDKYGTQRVISFIRQMVEHGGFYRTSDQTWVKLERIQFVGACNPPTDPGRKPLSHRFLRHVPVVYVDYPGPASLTQIYGTFNRAMLRLIPSLRTYAEPLTAAMVEFYTMSQERFTQDTQPHYIYSPREMTRWVRGIFEALRPLETLPVEGLIRIWAHEALRLFQDRLVEDEERRWTDENIDTVALKHFPNIDREKAMSRPILYSNWLSKDYIPVDQEELRDYVKARLKVFYEEELDVPLVLFNEVLDHVLRIDRIFRQPQGHLLLIGVSGAGKTTLSRFVAWMNGLSVYQIKVHRKYTGEDFDEDLRTVLRRSGCKNEKIAFIMDESNVLDSGFLERMNTLLANGEVPGLFEGDEYATLMTQCKEGAQKEGLMLDSHEELYKWFTSQVIRNLHVVFTMNPSSEGLKDRAATSPALFNRCVLNWFGDWSTEALYQVGKEFTSKMDLEKPNYIVPDYMPVVYDKLPQPPSHREAIVNSCVFVHQTLHQANARLAKRGGRTMAITPRHYLDFINHYANLFHEKRSELEEQQMHLNVGLRKIKETVDQVEELRRDLRIKSQELEVKNAAANDKLKKMVKDQQEAEKKKVMSQEIQEQLHKQQEVIADKQMSVKEDLDKVEPAVIEAQNAVKSIKKQHLVEVRSMANPPAAVKLALESICLLLGESTTDWKQIRSIIMRENFIPTIVNFSAEEISDAIREKMKKNYMSNPSYNYEIVNRASLACGPMVKWAIAQLNYADMLKRVEPLRNELQKLEDDAKDNQQKANEVEQMIRDLEASIARYKEEYAVLISEAQAIKADLAAVEAKVNRSTALLKSLSAERERWEKTSETFKNQMSTIAGDCLLSAAFIAYAGYFDQQMRQNLFTTWSHHLQQANIQFRTDIARTEYLSNADERLRWQASSLPADDLCTENAIMLKRFNRYPLIIDPSGQATEFIMNEYKDRKITRTSFLDDAFRKNLESALRFGNPLLVQDVESYDPVLNPVLNREVRRTGGRVLITLGDQDIDLSPSFVIFLSTRDPTVEFPPDLCSRVTFVNFTVTRSSLQSQCLNEVLKAERPDVDEKRSDLLKLQGEFQLRLRQLEKSLLQALNEVKGRILDDDTIITTLENLKREAAEVTRKVEETDIVMQEVETVSQQYLPLSTACSSIYFTMESLKQIHFLYQYSLQFFLDIYHNVLYENPNLKGVTDHTQRLSIITKDLFQVAFNRVARGMLHQDHITFAMLLARIKLKGTVGEPTYDAEFQHFLRGNEIVLSAGSTPRIQGLTVEQAEAVVRLSCLPAFKDLIAKVQADEQFGIWLDSSSPEQTVPYLWSEETPATPIGQAIHRLLLIQAFRPDRLLAMAHMFVSTNLGESFMSIMEQPLDLTHIVGTEVKPNTPVLMCSVPGYDASGHVEDLAAEQNTQITSIAIGSAEGFNQADKAINTAVKSGRWVMLKNVHLAPGWLMQLEKKLHSLQPHACFRLFLTMEINPKVPVNLLRAGRIFVFEPPPGVKANMLRTFSSIPVSRICKVSTLSSWYAFPIEAKAQSHHQMQKWVPGPPEVPCGELHSCFCFSAVGKISFHGRAPWLTLVILALWKVEVGGSLEPRSSRLSGQARSGGSRL

SEQ ID NO: 917670 - protein, 545 aa, Homo sapiens
MSEPDRSVNDCVHWPSSHTGLRVFLTMEINPKVPVNLLRAGRIFVFEPPPGVKANMLRTFSSIPVSRICKSPNERARLYFLLAWFHAIIQERLRYAPLGWSKKYEFGESDLRSACDTVDTWLDDTAKGRQNISPDKIPWSALKTLMAQSIYGGRVDNEFDQRLLNTFLERLFTTRSFDSEFKLACKVDGHKDIQMPDGIRREEFVQWVELLPDTQTPSWLGLPNNAERVLLTTQGVDMISKMLKMQMLEDEDDLAYAETEKKTRTDSTSDGRPAWMRTLHTTASNWLHLIPQTLSHLKRTVENIKDPLFRFFEREVKMGAKLLQDVRQDLADVVQVCEGKKKQTNYLRTLINELVKGILPRSWSHYTVPAGMTVIQWVSDFSERIKQLQNISLAAASGGAKELKNIHVCLGGLFVPEAYITATRQYVAQANSWSLEELCLEVNVTTSQGATLDACSFGVTGLKLQGATCNNNKLSLSNAISTALPLTQLRWVKQTNTEKKASVVTLPVYLNFTRADLIFTVDFEIATKEDPRSFYERGVAVLCTE

SEQ ID NO: 917671 - protein, 400 aa, Homo sapiens [sequence omitted]

SEQ ID NO: 917672 - protein, 3687 aa, Homo sapiens
MSEPGGGGGEDGSAGLEVSAVQNVADVSVLQKHLRKLVPLLLEDGGEAPAALEAALEEKSALEQMRKFLSDPQVHTVLVERSTLKEDVGDEGEEEKEFISYNINIDIHYGVKSNSLAFIKRTPVIDADKPVSSQLRVLTLSEDSPYETLHSFISNAVAPFFKSYIRESGKADRDGDKMAPSVEKKIAELEMGLLHLQQNIEIPEISLPIHPMITNVAKQCYERGEKPKVTDFGDKVEDPTFLNQLQSGVNRWIREIQKVTKLDRDPASGTALQEISFWLNLERALYRIQEKRESPEVLLTLDILKHGKRFHATVSFDTDTGLKQALETVNDYNPLMKDFPLNDLLSATELDKIRQALVAIFTHLRKIRNTKYPIQRALRLVEAISRDLSSQLLKVLGTRKLMHVAYEEFEKVMVACFEVFQTWDDEYEKLQVLLRDIVKRKREENLKMVWRINPAHRKLQARLDQMRKFRRQHEQLRAVIVRVLRPQVTAVAQQNQGEVPEPQDMKVAEVLFDAADANAIEEVNLAYENVKEVDGLDVSKEGTEAWEAAMKRYDERIDRVETRITARLRDQLGTAKNANEMFRIFSRFNALFVRPHIRGAIRDYQTQLIQRVKDDIESLHDKFKVQYPQSQACKMSHVRDLPPVSGSIIWAKQIDRQLTAYMKRVEDVLGKGWENHVEGQKLKQDGDSFRMKLNTQEIFDDWARKVQQRNLGVSGRIFTIESTRVRGRTGNVLKLKVNFLPEIITLSKEVRNLKWLGFRVPLAIVNKAHQANQLYPFAISLIESVRTYERTCEKVEERNTISLLVAGLKKEVQALIAEGIALVWESYKLDPYVQRLAETVFNFQEKVDDLLIIEEKIDLEVRSLETCMYDHKTFSEILNRVQKAVDDLNLHSYSNLPIWVNKLDMEIERILGVRLQAGLRAWTQVLLGQAEDKAEVDMDTDAPQVSHKPGGEPKIKNVVHELRITNQVIYLNPPIEECRYKLYQEMFAWKMVVLSLPRIQSQRYQVGVHYELTEEEKFYRNALTRMPDGPVALEESYSAVMGIVSEVEQYVKVWLQYQCLWDMQAENIYNRLGEDLNKWQALLVQIRKARGTFDNAETKKEFGPVVIDYGKVQSKVNLKYDSWHKEVLSKFGQMLGSNMTEFHSQISKSRQELEQHSVDTASTSDAVTFITYVQSLKRKIKQFEKQVELYRNGQRLLEKQRFQFPPSWLYIDNIEGEWGAFNDIMRRKDSAIQQQVANLQMKIVQEDRAVESRTTDLLTDWEKTKPVTGNLRPEEALQALTIYEGKFGRLKDDREKCAKAKEALELTDTGLLSGSEERVQVALEELQDLKGVWSELSKVWEQIDQMKEQPWVSVQPRKLRQNLDALLNQLKSFPARLRQYASYEFVQRLLKGYMKINMLVIELKSEALKDRHWKQLMKRLHVNWVVSELTLGQIWDVDLQKNEAIVKDVLLVAQGEMALEEFLKQIREVWNTYELDLVNYQNKCRLIRGWDDLFNKVKEHINSVSAMKLSPYYKVFEEDALSWEDKLNRIMALFDVWIDVQRRWVYLEGIFTGSADIKHLLPVETQRFQSISTEFLALMKKVSKSPLVMDVLNIQGVQRSLERLADLLGKIQKALGEYLERERSSFPRFYFVGDEDLLEIIGNSKNVAKLQKHFKKMFAGVSSIILNEDNSVVLGISSREGEEVMFKTPVSITEHPKINEWLTLVEKEMRVTLAKLLAESVTEVEIFGKATSIDPNTYITWIDKYQAQLVVLSAQIAWSENVETALSSMGGGGDAAPLHSVLSNVEVTLNVLADSVLMEQPPLRRRKLEHLITELVHQRDVTRSLIKSKIDNAKSFEWLSQMRFYFDPKQTDVLQQLSIQMANAKFNYGFEYLGVQDKLVQTPLTDRCYLTMTQALEARLGGSPFGPAGTGKTESVKALGHQLGRFVLVFNCDETFDFQAMGRIFVGLCQVGAWGCFDEFNRLEERMLSAVSQQVQCIQEALREHSNPNYDKTSAPITCELLNKQVKVSPDMAIFITMNPGYAGRSNLPDNLKKLFRSLAMTKPDRQLIAQVMLYSQGFRTAEVLANKIVPFFKLCDEQLSSQSHYDFGLRALKSVLVSAGNVKRERIQKIKREKEERGEAVDEGEIAENLPEQEILIQSVCETMVPKLVAEDIPLLFSLLSDVFPGVQYHRGEMTALREELKKVCQEMYLTYGDGEEVGGMWVEKVLQLYQITQINHGLMMVGPSGSGKSMAWRVLLKALERLEGVEGVAHIIDPKAISKDHLYGTLDPNTREWTDGLFTHVLRKIIDSVRGELQKRQWIVFDGDVDPEWVENLNSVLDDNKLLTLPNGERLSLPPNVRIMFEVQDLKYATLATVSRCGMVWFSEDVLSTDMIFNNFLARLRSIPLDEGEDEAQRRRKGKEDEGEEAASPMLQIQRDAATIMQPYFTSNGLVTKALEHAFQLEHIMDLTRLRCLGSLFSMLHQACRNVAQYNANHPDFPMQIEQLERYIQVRGHQGLHRAHQLRQTTGLRTSEMLHLWGCALSPRRGRAFVEGLGKVQWVSVMQEDWEPLSLVNFAVSVFLLLLKFYKNQSLIPFLIAISGLCHTLVPAGDSRLKMRAELGEYIRRITTVPLPTAPNIPIIDYEVSISGEWSPWQAKVPQIEVETHKVAAPDVVVPTLDTVRHEALLYTWLAEHKPLVLCGPPGSGKTMTLFSALRALPDMEVVGLNFSSATTPELLLKTFDHYCEYRRTPNGVVLAPVQLGKWLVLFCDEINLPDMDKYGTQRVISFIRQMVEHGGFYRTSDQTWVKLERIQFVGACNPPTDPGRKPLSHRFLRHVPVVYVDYPGPASLTQIYGTFNRAMLRLIPSLRTYAEPLTAAMVEFYTMSQERFTQDTQPHYIYSPREMTRWVRGIFEALRPLETLPVEGLIRIWAHEALRLFQDRLVEDEERRWTDENIDTVALKHFPNIDREKAMSRPILYSNWLSKDYIPVDQEELRDYVKARLKVFYEEELDVPLVLFNEVLDHVLRIDRIFRQPQGHLLLIGVSGAGKTTLSRFVAWMNGLSVYQIKVHRKYTGEDFDEDLRTVLRRSGCKNEKIAFIMDESNVLDSGFLERMNTLLANGEVPGLFEGDEYATLMTQCKEGAQKEGLMLDSHEELYKWFTSQVIRNLHVVFTMNPSSEGLKDRAATSPALFNRCVLNWFGDWSTEALYQVGKEFTSKMDLEKPNYIVPDYMPVVYDKLPQPPSHREAIVNSCVFVHQTLHQANARLAKRGGRTMAITPRHYLDFINHYANLFHEKRSELEEQQMHLNVGLRKIKETVDQVEELRRDLRIKSQELEVKNAAANDKLKKMVKDQQEAEKKKVMSQEIQEQLHKQQEVIADKQMSVKEDLDKVEPAVIEAQNAVKSIKKQHLVEVRSMANPPAAVKLALESICLLLGESTTDWKQIRSIIMRENFIPTIVNFSAEEISDAIREKMKKNYMSNPSYNYEIVNRASLACGPMVKWAIAQLNYADMLKRVEPLRNELQKLEDDAKDNQQKANEVEQMIRDLEASIARYKEEYAVLISEAQAIKADLAAVEAKVNRSTALLKSLSAERERWEKTSETFKNQMSTIAGDCLLSAAFIAYAGYFDQQMRQNLFTTWSHHLQQANIQFRTDIARTEYLSNADERLRWQASSLPADDLCTENAIMLKRFNRYELGCQGEAWEECGW

SEQ ID NO: 917673 - protein, 2983 aa, Homo sapiens
MSEPGGGGGEDGSAGLEVSAVQNVADVSVLQKHLRKLVPLLLEDGGEAPAALEAALEEKSALEQMRKFLSDPQVHTVLVERSTLKEDVGDEGEEEKEFISYNINIDIHYGVKSNSLAFIKRTPVIDADKPVSSQLRVLTLSEDSPYETLHSFISNAVAPFFKSYIRESGKADRDGDKMAPSVEKKIAELEMGLLHLQQNIEIPEISLPIHPMITNVAKQCYERGEKPKVTDFGDKVEDPTFLNQLQSGVNRWIREIQKVTKLDRDPASGTALQEISFWLNLERALYRIQEKRESPEVLLTLDILKHGKRFHATVSFDTDTGLKQALETVNDYNPLMKDFPLNDLLSATELDKIRQALVAIFTHLRKIRNTKYPIQRALRLVEAISRDLSSQLLKVLGTRKLMHVAYEEFEKVMVACFEVFQTWDDEYEKLQVLLRDIVKRKREENLKMVWRINPAHRKLQARLDQMRKFRRQHEQLRAVIVRVLRPQVTAVAQQNQGEVPEPQDMKVAEVLFDAADANAIEEVNLAYENVKEVDGLDVSKEGTEAWEAAMKRYDERIDRVETRITARLRDQLGTAKNANEMFRIFSRFNALFVRPHIRGAIRDYQTQLIQRVKDDIESLHDKFKVQYPQSQACKMSHVRDLPPVSGSIIWAKQIDRQLTAYMKRVEDVLGKGWENHVEGQKLKQDGDSFRMKLNTQEIFDDWARKVQQRNLGVSGRIFTIESTRVRGRTGNVLKLKVNFLPEIITLSKEVRNLKWLGFRVPLAIVNKAHQANQLYPFAISLIESVRTYERTCEKVEERNTISLLVAGLKKEVQALIAEGIALVWESYKLDPYVQRLAETVFNFQEKVDDLLIIEEKIDLEVRSLETCMYDHKTFSEILNRVQKAVDDLNLHSYSNLPIWVNKLDMEIERILGVRLQAGLRAWTQVLLGQAEDKAEVDMDTDAPQVSHKPGGEPKIKNVVHELRITNQVIYLNPPIEECRYKLYQEMFAWKMVVLSLPRIQSQRYQVGVHYELTEEEKFYRNALTRMPDGPVALEESYSAVMGIVSEVEQYVKVWLQYQCLWDMQAENIYNRLGEDLNKWQALLVQIRKARGTFDNAETKKEFGPVVIDYGKVQSKVNLKYDSWHKEVLSKFGQMLGSNMTEFHSQISKSRQELEQHSVDTASTSDAVTFITYVQSLKRKIKQFEKQVELYRNGQRLLEKQRFQFPPSWLYIDNIEGEWGAFNDIMRRKDSAIQQQVANLQMKIVQEDRAVESRTTDLLTDWEKTKPVTGNLRPEEALQALTIYEGKFGRLKDDREKCAKAKEALELTDTGLLSGSEERVQVALEELQDLKGVWSELSKVWEQIDQMKEQPWVSVQPRKLRQNLDALLNQLKSFPARLRQYASYEFVQRLLKGYMKINMLVIELKSEALKDRHWKQLMKRLHVNWVVSELTLGQIWDVDLQKNEAIVKDVLLVAQGEMALEEFLKQIREVWNTYELDLVNYQNKCRLIRGWDDLFNKVKEHINSVSAMKLSPYYKVFEEDALSWEDKLNRIMALFDVWIDVQRRWVYLEGIFTGSADIKHLLPVETQRFQSISTEFLALMKKVSKSPLVMDVLNIQGVQRSLERLADLLGKIQKALGEYLERERSSFPRFYFVGDEDLLEIIGNSKNVAKLQKHFKKMFAGVSSIILNEDNSVVLGISSREGEEVMFKTPVSITEHPKINEWLTLVEKEMRVTLAKLLAESVTEVEIFGKATSIDPNTYITWIDKYQAQLVVLSAQIAWSENVETALSSMGGGGDAAPLHSVLSNVEVTLNVLADSVLMEQPPLRRRKLEHLITELVHQRDVTRSLIKSKIDNAKSFEWLSQMRFYFDPKQTDVLQQLSIQMANAKFNYGFEYLGVQDKLVQTPLTDRCYLTMTQALEARLGGSPFGPAGTGKTESVKALGHQLGRFVLVFNCDETFDFQAMGRIFVGLCQVGAWGCFDEFNRLEERMLSAVSQQVQCIQEALREHSNPNYDKTSAPITCELLNKQVKVSPDMAIFITMNPGYAGRSNLPDNLKKLFRSLAMTKPDRQLIAQVMLYSQGFRTAEVLANKIVPFFKLCDEQLSSQSHYDFGLRALKSVLVSAGNVKRERIQKIKREKEERGEAVDEGEIAENLPEQEILIQSVCETMVPKLVAEDIPLLFSLLSDVFPGVQYHRGEMTALREELKKVCQEMYLTYGDGEEVGGMWVEKVLQLYQITQINHGLMMVGPSGSGKSMAWRVLLKALERLEGVEGVAHIIDPKAISKDHLYGTLDPNTREWTDGLFTHVLRKIIDSVRGELQKRQWIVFDGDVDPEWVENLNSVLDDNKLLTLPNGERLSLPPNVRIMFEVQDLKYATLATVSRCGMVWFSEDVLSTDMIFNNFLARLRSIPLDEGEDEAQRRRKGKEDEGEEAASPMLQIQRDAATIMQPYFTSNGLVTKALEHAFQLEHIMDLTRLRCLGSLFSMLHQACRNVAQYNANHPDFPMQIEQLERYIQVRGHQGLHRAHQLRQTTGLRTSEMLHLWGCALSPRRGRAFVEGLGKVQWVSVMQEDWEPLSLVNFAVSVFLLLLKFYKNQSLIPFLIAISGLCHTLVPAGDSRLKMRAELGEYIRRITTVPLPTAPNIPIIDYEVSISGEWSPWQAKVPQIEVETHKVAAPDVVVPTLDTVRHEALLYTWLAEHKPLVLCGPPGSGKTMTLFSALRALPDMEVVGLNFSSATTPELLLKTFDHYCEYRRTPNGVVLAPVQLGKWLVLFCDEINLPDMDKYGTQRVISFIRQMVEHGGFYRTSDQTWVKLERIQFVGACNPPTDPGRKPLSHRFLRHVPVVYVDYPGPASLTQIYGTFNRAMLRLIPSLRTYAEPLTAAMVEFYTMSQERFTQDTQPHYIYSPREMTRWVRGIFEALRPLETLPVEGLIRIWAHEALRLFQDRLVEDEERRWTDENIDTVALKHFPNIDREKAMSRPILYSNWLSKVANSHHFRHTSFSAIPF

SEQ ID NO: 917674 - protein, 318 aa, Homo sapiens
RLWDCGPGVDMISKMLKMQMLEDEDDLAYAETEKKTRTDSTSDGRPAWMRTLHTTASNWLHLIPQTLSHLKRTVENIKDPLFRFFEREVKMGAKLLQDVRQDLADVVQVCEGKKKQTNYLRTLINELVKGILPRSWSHYTVPAGMTVIQWVSDFSERIKQLQNISLAAASGGAKELKNIHVCLGGLFVPEAYITATRQYVAQANSWSLEELCLEVNVTTSQGATLDACSFGVTGLKLQGATCNNNKLSLSNAISTALPLTQLRWVKQTNTEKKASVVTLPVYLNFTRADLIFTVDFEIATKEDPRSFYERGVAVLCTE

SEQ ID NO: 917675 - protein, 247 aa, Homo sapiens
HPFERFKDPLFRFFEREVKMGAKLLQDVRQDLADVVQVCEGKKKQTNYLRTLINELVKGILPRSWSHYTVPAGMTVIQWVSDFSERIKQLQNISLAAASGGAKELKNIHVCLGGLFVPEAYITATRQYVAQANSWSLEELCLEVNVTTSQGATLDACSFGVTGLKLQGATCNNNKLSLSNAISTALPLTQLRWVKQTNTEKKASVVTLPVYLNFTRADLIFTVDFEIATKEDPRSFYERGVAVLCTE

SEQ ID NO: 917676 - protein, 2851 aa, Homo sapiens
MSEPGGGGGEDGSAGLEVSAVQNVADVSVLQKHLRKLVPLLLEDGGEAPAALEAALEEKSALEQMRKFLSDPQVHTVLVERSTLKEDVGDEGEEEKEFISYNINIDIHYGVKSNSLAFIKRTPVIDADKPVSSQLRVLTLSEDSPYETLHSFISNAVAPFFKSYIRESGKADRDGDKMAPSVEKKIAELEMGLLHLQQNIEIPEISLPIHPMITNVAKQCYERGEKPKVTDFGDKVEDPTFLNQLQSGVNRWIREIQKVTKLDRDPASGTALQEISFWLNLERALYRIQEKRESPEVLLTLDILKHGKRFHATVSFDTDTGLKQALETVNDYNPLMKDFPLNDLLSATELDKIRQALVAIFTHLRKIRNTKYPIQRALRLVEAISRDLSSQLLKVLGTRKLMHVAYEEFEKVMVACFEVFQTWDDEYEKLQVLLRDIVKRKREENLKMVWRINPAHRKLQARLDQMRKFRRQHEQLRAVIVRVLRPQVTAVAQQNQGEVPEPQDMKVAEVLFDAADANAIEEVNLAYENVKEVDGLDVSKEGTEAWEAAMKRYDERIDRVETRITARLRDQLGTAKNANEMFRIFSRFNALFVRPHIRGAIRDYQTQLIQRVKDDIESLHDKFKVQYPQSQACKMSHVRDLPPVSGSIIWAKQIDRQLTAYMKRVEDVLGKGWENHVEGQKLKQDGDSFRMKLNTQEIFDDWARKVQQRNLGVSGRIFTIESTRVRGRTGNVLKLKVNFLPEIITLSKEVRNLKWLGFRVPLAIVNKAHQANQLYPFAISLIESVRTYERTCEKVEERNTISLLVAGLKKEVQALIAEGIALVWESYKLDPYVQRLAETVFNFQEKVDDLLIIEEKIDLEVRSLETCMYDHKTFSEILNRVQKAVDDLNLHSYSNLPIWVNKLDMEIERILGVRLQAGLRAWTQVLLGQAEDKAEVDMDTDAPQVSHKPGGEPKIKNVVHELRITNQVIYLNPPIEECRYKLYQEMFAWKMVVLSLPRIQSQRYQVGVHYELTEEEKFYRNALTRMPDGPVALEESYSAVMGIVSEVEQYVKVWLQYQCLWDMQAENIYNRLGEDLNKWQALLVQIRKARGTFDNAETKKEFGPVVIDYGKVQSKVNLKYDSWHKEVLSKFGQMLGSNMTEFHSQISKSRQELEQHSVDTASTSDAVTFITYVQSLKRKIKQFEKQVELYRNGQRLLEKQRFQFPPSWLYIDNIEGEWGAFNDIMRRKDSAIQQQVANLQMKIVQEDRAVESRTTDLLTDWEKTKPVTGNLRPEEALQALTIYEGKFGRLKDDREKCAKAKEALELTDTGLLSGSEERVQVALEELQDLKGVWSELSKVWEQIDQMKEQPWVSVQPRKLRQNLDALLNQLKSFPARLRQYASYEFVQRLLKGYMKINMLVIELKSEALKDRHWKQLMKRLHVNWVVSELTLGQIWDVDLQKNEAIVKDVLLVAQGEMALEEFLKQIREVWNTYELDLVNYQNKCRLIRGWDDLFNKVKEHINSVSAMKLSPYYKVFEEDALSWEDKLNRIMALFDVWIDVQRRWVYLEGIFTGSADIKHLLPVETQRFQSISTEFLALMKKVSKSPLVMDVLNIQGVQRSLERLADLLGKIQKALGEYLERERSSFPRFYFVGDEDLLEIIGNSKNVAKLQKHFKKMFAGVSSIILNEDNSVVLGISSREGEEVMFKTPVSITEHPKINEWLTLVEKEMRVTLAKLLAESVTEVEIFGKATSIDPNTYITWIDKYQAQLVVLSAQIAWSENVETALSSMGGGGDAAPLHSVLSNVEVTLNVLADSVLMEQPPLRRRKLEHLITELVHQRDVTRSLIKSKIDNAKSFEWLSQMRFYFDPKQTDVLQQLSIQMANAKFNYGFEYLGVQDKLVQTPLTDRCYLTMTQALEARLGGSPFGPAGTGKTESVKALGHQLGRFVLVFNCDETFDFQAMGRIFVGLCQVGAWGCFDEFNRLEERMLSAVSQQVQCIQEALREHSNPNYDKTSAPITCELLNKQVKVSPDMAIFITMNPGYAGRSNLPDNLKKLFRSLAMTKPDRQLIAQVMLYSQGFRTAEVLANKIVPFFKLCDEQLSSQSHYDFGLRALKSVLVSAGNVKRERIQKIKREKEERGEAVDEGEIAENLPEQEILIQSVCETMVPKLVAEDIPLLFSLLSDVFPGVQYHRGEMTALREELKKVCQEMYLTYGDGEEVGGMWVEKVLQLYQITQINHGLMMVGPSGSGKSMAWRVLLKALERLEGVEGVAHIIDPKAISKDHLYGTLDPNTREWTDGLFTHVLRKIIDSVRGELQKRQWIVFDGDVDPEWVENLNSVLDDNKLLTLPNGERLSLPPNVRIMFEVQDLKYATLATVSRCGMVWFSEDVLSTDMIFNNFLARLRSIPLDEGEDEAQRRRKGKEDEGEEAASPMLQIQRDAATIMQPYFTSNGLVTKALEHAFQLEHIMDLTRLRCLGSLFSMLHQACRNVAQYNANHPDFPMQIEQLERYIQVRGHQGLHRAHQLRQTTGLRTSEMLHLWGCALSPRRGRAFVEGLGKVQWVSVMQEDWEPLSLVNFAVSVFLLLLKFYKNQSLIPFLIAISGLCHTLVPAGDSRLKMRAELGEYIRRITTVPLPTAPNIPIIDYEVSISGEWSPWQAKVPQIEVETHKVAAPDVVVPTLDTVRHEALLYTWLAEHKPLVLCGPPGSGKTMTLFSALRALPDMEVVGLNFSSATTPELLLKTFDHYCEYRRTPNGVVLAPVQLGKWLVLFCDEINLPDMDKYGTQRVISFIRQMVEHGGFYRTSDQTWVKLERIQFVGACNPPTDPGRKPLSHRFLRHVPVVYVDYPGPASLTQIYGTFNRAMLRLIPSLRK

SEQ ID NO: 917677 - protein, 2822 aa, Homo sapiens
MSEPGGGGGEDGSAGLEVSAVQNVADVSVLQKHLRKLVPLLLEDGGEAPAALEAALEEKSALEQMRKFLSDPQVHTVLVERSTLKEDVGDEGEEEKEFISYNINIDIHYGVKSNSLAFIKRTPVIDADKPVSSQLRVLTLSEDSPYETLHSFISNAVAPFFKSYIRESGKADRDGDKMAPSVEKKIAELEMGLLHLQQNIEIPEISLPIHPMITNVAKQCYERGEKPKVTDFGDKVEDPTFLNQLQSGVNRWIREIQKVTKLDRDPASGTALQEISFWLNLERALYRIQEKRESPEVLLTLDILKHGKRFHATVSFDTDTGLKQALETVNDYNPLMKDFPLNDLLSATELDKIRQALVAIFTHLRKIRNTKYPIQRALRLVEAISRDLSSQLLKVLGTRKLMHVAYEEFEKVMVACFEVFQTWDDEYEKLQVLLRDIVKRKREENLKMVWRINPAHRKLQARLDQMRKFRRQHEQLRAVIVRVLRPQVTAVAQQNQGEVPEPQDMKVAEVLFDAADANAIEEVNLAYENVKEVDGLDVSKEGTEAWEAAMKRYDERIDRVETRITARLRDQLGTAKNANEMFRIFSRFNALFVRPHIRGAIRDYQTQLIQRVKDDIESLHDKFKVQYPQSQACKMSHVRDLPPVSGSIIWAKQIDRQLTAYMKRVEDVLGKGWENHVEGQKLKQDGDSFRMKLNTQEIFDDWARKVQQRNLGVSGRIFTIESTRVRGRTGNVLKLKVNFLPEIITLSKEVRNLKWLGFRVPLAIVNKAHQANQLYPFAISLIESVRTYERTCEKVEERNTISLLVAGLKKEVQALIAEGIALVWESYKLDPYVQRLAETVFNFQEKVDDLLIIEEKIDLEVRSLETCMYDHKTFSEILNRVQKAVDDLNLHSYSNLPIWVNKLDMEIERILGVRLQAGLRAWTQVLLGQAEDKAEVDMDTDAPQVSHKPGGEPKIKNVVHELRITNQVIYLNPPIEECRYKLYQEMFAWKMVVLSLPRIQSQRYQVGVHYELTEEEKFYRNALTRMPDGPVALEESYSAVMGIVSEVEQYVKVWLQYQCLWDMQAENIYNRLGEDLNKWQALLVQIRKARGTFDNAETKKEFGPVVIDYGKVQSKVNLKYDSWHKEVLSKFGQMLGSNMTEFHSQISKSRQELEQHSVDTASTSDAVTFITYVQSLKRKIKQFEKQVELYRNGQRLLEKQRFQFPPSWLYIDNIEGEWGAFNDIMRRKDSAIQQQVANLQMKIVQEDRAVESRTTDLLTDWEKTKPVTGNLRPEEALQALTIYEGKFGRLKDDREKCAKAKEALELTDTGLLSGSEERVQVALEELQDLKGVWSELSKVWEQIDQMKEQPWVSVQPRKLRQNLDALLNQLKSFPARLRQYASYEFVQRLLKGYMKINMLVIELKSEALKDRHWKQLMKRLHVNWVVSELTLGQIWDVDLQKNEAIVKDVLLVAQGEMALEEFLKQIREVWNTYELDLVNYQNKCRLIRGWDDLFNKVKEHINSVSAMKLSPYYKVFEEDALSWEDKLNRIMALFDVWIDVQRRWVYLEGIFTGSADIKHLLPVETQRFQSISTEFLALMKKVSKSPLVMDVLNIQGVQRSLERLADLLGKIQKALGEYLERERSSFPRFYFVGDEDLLEIIGNSKNVAKLQKHFKKMFAGVSSIILNEDNSVVLGISSREGEEVMFKTPVSITEHPKINEWLTLVEKEMRVTLAKLLAESVTEVEIFGKATSIDPNTYITWIDKYQAQLVVLSAQIAWSENVETALSSMGGGGDAAPLHSVLSNVEVTLNVLADSVLMEQPPLRRRKLEHLITELVHQRDVTRSLIKSKIDNAKSFEWLSQMRFYFDPKQTDVLQQLSIQMANAKFNYGFEYLGVQDKLVQTPLTDRCYLTMTQALEARLGGSPFGPAGTGKTESVKALGHQLGRFVLVFNCDETFDFQAMGRIFVGLCQVGAWGCFDEFNRLEERMLSAVSQQVQCIQEALREHSNPNYDKTSAPITCELLNKQVKVSPDMAIFITMNPGYAGRSNLPDNLKKLFRSLAMTKPDRQLIAQVMLYSQGFRTAEVLANKIVPFFKLCDEQLSSQSHYDFGLRALKSVLVSAGNVKRERIQKIKREKEERGEAVDEGEIAENLPEQEILIQSVCETMVPKLVAEDIPLLFSLLSDVFPGVQYHRGEMTALREELKKVCQEMYLTYGDGEEVGGMWVEKVLQLYQITQINHGLMMVGPSGSGKSMAWRVLLKALERLEGVEGVAHIIDPKAISKDHLYGTLDPNTREWTDGLFTHVLRKIIDSVRGELQKRQWIVFDGDVDPEWVENLNSVLDDNKLLTLPNGERLSLPPNVRIMFEVQDLKYATLATVSRCGMVWFSEDVLSTDMIFNNFLARLRSIPLDEGEDEAQRRRKGKEDEGEEAASPMLQIQRDAATIMQPYFTSNGLVTKALEHAFQLEHIMDLTRLRCLGSLFSMLHQACRNVAQYNANHPDFPMQIEQLERYIQVRGHQGLHRAHQLRQTTGLRTSEMLHLWGCALSPRRGRAFVEGLGKVQWVSVMQEDWEPLSLVNFAVSVFLLLLKFYKNQSLIPFLIAISGLCHTLVPAGDSRLKMRAELGEYIRRITTVPLPTAPNIPIIDYEVSISGEWSPWQAKVPQIEVETHKVAAPDVVVPTLDTVRHEALLYTWLAEHKPLVLCGPPGSGKTMTLFSALRALPDMEVVGLNFSSATTPELLLKTFDHYCEYRRTPNGVVLAPVQLGKWLVLFCDEINLPDMDKYGTQRVISFIRQMVEHGGFYRTSDQTWVKLERIQFVGACNPPTDPGRKPLSHRSTAPANAPC

SEQ ID NO: 917678 - protein, 2509 aa, Homo sapiens
MSEPGGGGGEDGSAGLEVSAVQNVADVSVLQKHLRKLVPLLLEDGGEAPAALEAALEEKSALEQMRKFLSDPQVHTVLVERSTLKEDVGDEGEEEKEFISYNINIDIHYGVKSNSLAFIKRTPVIDADKPVSSQLRVLTLSEDSPYETLHSFISNAVAPFFKSYIRESGKADRDGDKMAPSVEKKIAELEMGLLHLQQNIEIPEISLPIHPMITNVAKQCYERGEKPKVTDFGDKVEDPTFLNQLQSGVNRWIREIQKVTKLDRDPASGTALQEISFWLNLERALYRIQEKRESPEVLLTLDILKHGKRFHATVSFDTDTGLKQALETVNDYNPLMKDFPLNDLLSATELDKIRQALVAIFTHLRKIRNTKYPIQRALRLVEAISRDLSSQLLKVLGTRKLMHVAYEEFEKVMVACFEVFQTWDDEYEKLQVLLRDIVKRKREENLKMVWRINPAHRKLQARLDQMRKFRRQHEQLRAVIVRVLRPQVTAVAQQNQGEVPEPQDMKVAEVLFDAADANAIEEVNLAYENVKEVDGLDVSKEGTEAWEAAMKRYDERIDRVETRITARLRDQLGTAKNANEMFRIFSRFNALFVRPHIRGAIRDYQTQLIQRVKDDIESLHDKFKVQYPQSQACKMSHVRDLPPVSGSIIWAKQIDRQLTAYMKRVEDVLGKGWENHVEGQKLKQDGDSFRMKLNTQEIFDDWARKVQQRNLGVSGRIFTIESTRVRGRTGNVLKLKVNFLPEIITLSKEVRNLKWLGFRVPLAIVNKAHQANQLYPFAISLIESVRTYERTCEKVEERNTISLLVAGLKKEVQALIAEGIALVWESYKLDPYVQRLAETVFNFQEKVDDLLIIEEKIDLEVRSLETCMYDHKTFSEILNRVQKAVDDLNLHSYSNLPIWVNKLDMEIERILGVRLQAGLRAWTQVLLGQAEDKAEVDMDTDAPQVSHKPGGEPKIKNVVHELRITNQVIYLNPPIEECRYKLYQEMFAWKMVVLSLPRIQSQRYQVGVHYELTEEEKFYRNALTRMPDGPVALEESYSAVMGIVSEVEQYVKVWLQYQCLWDMQAENIYNRLGEDLNKWQALLVQIRKARGTFDNAETKKEFGPVVIDYGKVQSKVNLKYDSWHKEVLSKFGQMLGSNMTEFHSQISKSRQELEQHSVDTASTSDAVTFITYVQSLKRKIKQFEKQVELYRNGQRLLEKQRFQFPPSWLYIDNIEGEWGAFNDIMRRKDSAIQQQVANLQMKIVQEDRAVESRTTDLLTDWEKTKPVTGNLRPEEALQALTIYEGKFGRLKDDREKCAKAKEALELTDTGLLSGSEERVQVALEELQDLKGVWSELSKVWEQIDQMKEQPWVSVQPRKLRQNLDALLNQLKSFPARLRQYASYEFVQRLLKGYMKINMLVIELKSEALKDRHWKQLMKRLHVNWVVSELTLGQIWDVDLQKNEAIVKDVLLVAQGEMALEEFLKQIREVWNTYELDLVNYQNKCRLIRGWDDLFNKVKEHINSVSAMKLSPYYKVFEEDALSWEDKLNRIMALFDVWIDVQRRWVYLEGIFTGSADIKHLLPVETQRFQSISTEFLALMKKVSKSPLVMDVLNIQGVQRSLERLADLLGKIQKALGEYLERERSSFPRFYFVGDEDLLEIIGNSKNVAKLQKHFKKMFAGVSSIILNEDNSVVLGISSREGEEVMFKTPVSITEHPKINEWLTLVEKEMRVTLAKLLAESVTEVEIFGKATSIDPNTYITWIDKYQAQLVVLSAQIAWSENVETALSSMGGGGDAAPLHSVLSNVEVTLNVLADSVLMEQPPLRRRKLEHLITELVHQRDVTRSLIKSKIDNAKSFEWLSQMRFYFDPKQTDVLQQLSIQMANAKFNYGFEYLGVQDKLVQTPLTDRCYLTMTQALEARLGGSPFGPAGTGKTESVKALGHQLGRFVLVFNCDETFDFQAMGRIFVGLCQVGAWGCFDEFNRLEERMLSAVSQQVQCIQEALREHSNPNYDKTSAPITCELLNKQVKVSPDMAIFITMNPGYAGRSNLPDNLKKLFRSLAMTKPDRQLIAQVMLYSQGFRTAEVLANKIVPFFKLCDEQLSSQSHYDFGLRALKSVLVSAGNVKRERIQKIKREKEERGEAVDEGEIAENLPEQEILIQSVCETMVPKLVAEDIPLLFSLLSDVFPGVQYHRGEMTALREELKKVCQEMYLTYGDGEEVGGMWVEKVLQLYQITQINHGLMMVGPSGSGKSMAWRVLLKALERLEGVEGVAHIIDPKAISKDHLYGTLDPNTREWTDGLFTHVLRKIIDSVRGELQKRQWIVFDGDVDPEWVENLNSVLDDNKLLTLPNGERLSLPPNVRIMFEVQDLKYATLATVSRCGMVWFSEDVLSTDMIFNNFLARLRSIPLDEGEDEAQRRRKGKEDEGEEAASPMLQIQRDAATIMQPYFTSNGLVTKALEHAFQLEHIMDLTRLRCLGSLFSMLHQACRNVAQYNANHPDFPMQIEQLERYIQVRGHQGLHRAHHCARPQV

SEQ ID NO: 917679 - protein, 2117 aa, Homo sapiens
MSEPGGGGGEDGSAGLEVSAVQNVADVSVLQKHLRKLVPLLLEDGGEAPAALEAALEEKSALEQMRKFLSDPQVHTVLVERSTLKEDVGDEGEEEKEFISYNINIDIHYGVKSNSLAFIKRTPVIDADKPVSSQLRVLTLSEDSPYETLHSFISNAVAPFFKSYIRESGKADRDGDKMAPSVEKKIAELEMGLLHLQQNIEIPEISLPIHPMITNVAKQCYERGEKPKVTDFGDKVEDPTFLNQLQSGVNRWIREIQKVTKLDRDPASGTALQEISFWLNLERALYRIQEKRESPEVLLTLDILKHGKRFHATVSFDTDTGLKQALETVNDYNPLMKDFPLNDLLSATELDKIRQALVAIFTHLRKIRNTKYPIQRALRLVEAISRDLSSQLLKVLGTRKLMHVAYEEFEKVMVACFEVFQTWDDEYEKLQVLLRDIVKRKREENLKMVWRINPAHRKLQARLDQMRKFRRQHEQLRAVIVRVLRPQVTAVAQQNQGEVPEPQDMKVAEVLFDAADANAIEEVNLAYENVKEVDGLDVSKEGTEAWEAAMKRYDERIDRVETRITARLRDQLGTAKNANEMFRIFSRFNALFVRPHIRGAIRDYQTQLIQRVKDDIESLHDKFKVQYPQSQACKMSHVRDLPPVSGSIIWAKQIDRQLTAYMKRVEDVLGKGWENHVEGQKLKQDGDSFRMKLNTQEIFDDWARKVQQRNLGVSGRIFTIESTRVRGRTGNVLKLKVNFLPEIITLSKEVRNLKWLGFRVPLAIVNKAHQANQLYPFAISLIESVRTYERTCEKVEERNTISLLVAGLKKEVQALIAEGIALVWESYKLDPYVQRLAETVFNFQEKVDDLLIIEEKIDLEVRSLETCMYDHKTFSEILNRVQKAVDDLNLHSYSNLPIWVNKLDMEIERILGVRLQAGLRAWTQVLLGQAEDKAEVDMDTDAPQVSHKPGGEPKIKNVVHELRITNQVIYLNPPIEECRYKLYQEMFAWKMVVLSLPRIQSQRYQVGVHYELTEEEKFYRNALTRMPDGPVALEESYSAVMGIVSEVEQYVKVWLQYQCLWDMQAENIYNRLGEDLNKWQALLVQIRKARGTFDNAETKKEFGPVVIDYGKVQSKVNLKYDSWHKEVLSKFGQMLGSNMTEFHSQISKSRQELEQHSVDTASTSDAVTFITYVQSLKRKIKQFEKQVELYRNGQRLLEKQRFQFPPSWLYIDNIEGEWGAFNDIMRRKDSAIQQQVANLQMKIVQEDRAVESRTTDLLTDWEKTKPVTGNLRPEEALQALTIYEGKFGRLKDDREKCAKAKEALELTDTGLLSGSEERVQVALEELQDLKGVWSELSKVWEQIDQMKEQPWVSVQPRKLRQNLDALLNQLKSFPARLRQYASYEFVQRLLKGYMKINMLVIELKSEALKDRHWKQLMKRLHVNWVVSELTLGQIWDVDLQKNEAIVKDVLLVAQGEMALEEFLKQIREVWNTYELDLVNYQNKCRLIRGWDDLFNKVKEHINSVSAMKLSPYYKVFEEDALSWEDKLNRIMALFDVWIDVQRRWVYLEGIFTGSADIKHLLPVETQRFQSISTEFLALMKKVSKSPLVMDVLNIQGVQRSLERLADLLGKIQKALGEYLERERSSFPRFYFVGDEDLLEIIGNSKNVAKLQKHFKKMFAGVSSIILNEDNSVVLGISSREGEEVMFKTPVSITEHPKINEWLTLVEKEMRVTLAKLLAESVTEVEIFGKATSIDPNTYITWIDKYQAQLVVLSAQIAWSENVETALSSMGGGGDAAPLHSVLSNVEVTLNVLADSVLMEQPPLRRRKLEHLITELVHQRDVTRSLIKSKIDNAKSFEWLSQMRFYFDPKQTDVLQQLSIQMANAKFNYGFEYLGVQDKLVQTPLTDRCYLTMTQALEARLGGSPFGPAGTGKTESVKALGHQLGRFVLVFNCDETFDFQAMGRIFVGLCQVGAWGCFDEFNRLEERMLSAVSQQVQCIQEALREHSNPNYDKTSAPITCELLNKQVKVSPDMAIFITMNPGYAGRSNLPDNLKKLFRSLAMTKPDRQLIAQVMLYSQGFRTAEVLANKIVPFFKLCDEQLSSQSHYDFGLRALKSVLVSAGNVKRERIQKIKREKEE

SEQ ID NO: 917680 - protein, 72 aa, Homo sapiens
  misc_feature (2)..(2): Xaa can be any naturally occurring amino acid
YXSATAATGAQLEFPVRWVKQTNTEKKASVVTLPVYLNFTRADLIFTVDFEIATKEDPRSFYERGVAVLCTE

SEQ ID NO: 917681 - protein, 254 aa, Homo sapiens
MSEPGGGGGEDGSAGLEVSAVQNVADVSVLQKHLRKLVPLLLEDGGEAPAALEAALEEKSALEQMRKFLSDPQVHTVLVERSTLKGAGPRRAGSPEPGLAECRACQVLRGRRCPRDGRSPAAADDPWMGRARRPQTSRRPGPQGRRRPAEAGAAPGARPRHTHCPARSPQGAPLLVAGRGKGSPSAVTQNNGVALSARASQDGRVGWRQRLPGLRAGEAASLPPVSHELFGFDLCPSQVAFGRDVSGADPRSWG

SEQ ID NO: 917682 - protein, 74 aa, Homo sapiens
MLPHSTHPSVPVSAPIGQAIHRLLLIQAFRPDRLLAMAHMFVSTNLGESFMSIMEQPLDLTHIVGTEVMSWYSP

SEQ ID NO: 917683 - protein, 66 aa, Homo sapiens
MAITPRHYLDFINHYANLFHEKRSELEEQQMHLNVGLRKIKETVDQVRHRHKFLTGVSCSEDPFPY

SEQ ID NO: 917684 - protein, 859 aa, Homo sapiens
MSEPGGGGGEDGSAGLEVSAVQNVADVSVLQKHLRKLVPLLLEDGGEAPAALEAALEEKSALEQMRKFLSDPQVHTVLVERSTLKEDVGDEGEEEKEFISYNINIDIHYGVKSNSLAFIKRTPVIDADKPVSSQLRVLTLSEDSPYETLHSFISNAVAPFFKSYIRESGKADRDGDKMAPSVEKKIAELEMGLLHLQQNIEIPEISLPIHPMITNVAKQCYERGEKPKVTDFGDKVEDPTFLNQLQSGVNRWIREIQKVTKLDRDPASGTALQEISFWLNLERALYRIQEKRESPEVLLTLDILKHGKRFHATVSFDTDTGLKQALETVNDYNPLMKDFPLNDLLSATELDKIRQALVAIFTHLRKIRNTKYPIQRALRLVEAISRDLSSQLLKVLGTRKLMHVAYEEFEKVMVACFEVFQTWDDEYEKLQVLLRDIVKRKREENLKMVWRINPAHRKLQARLDQMRKFRRQHEQLRAVIVRVLRPQVTAVAQQNQGEVPEPQDMKVAEVLFDAADANAIEEVNLAYENVKEVDGLDVSKEGTEAWEAAMKRYDERIDRVETRITARLRDQLGTAKNANEMFRIFSRFNALFVRPHIRGAIRDYQTQLIQRVKDDIESLHDKFKVQYPQSQACKMSHVRDLPPVSGSIIWAKQIDRQLTAYMKRVEDVLGKGWENHVEGQKLKQDGDSFRMKLNTQEIFDDWARKVQQRNLGVSGRIFTIESTRVRGRTGNVLKLKVNFLPEIITLSKEVRNLKWLGFRVPLAIVNKAHQANQLYPFAISLIESVRTYERTCEKVEERNTISLLVAGLKKEVQALIAEGIALVWESYKLDPYVQRLAETVFNFQEKVCSHVILRCPGNE

SEQ ID NO: 917685 - protein, 137 aa, Homo sapiens
MSKIESEFNFKFAQQNPLNPLVNLTVSPKRNSSLDTRKKPCRYRRVHFCKSALFYIYECIFEALRPLETLPVEGLIRIWAHEALRLFQDRLVEDEERRWTDENIDTVALKHFPNIDREKAMSRPILYSNWLSKDYNQ

SEQ ID NO: 917686 - protein, 3471 aa, Homo sapiens
MSEPGGGGGEDGSAGLEVSAVQNVADVSVLQKHLRKLVPLLLEDGGEAPAALEAALEEKSALEQMRKFLSDPQVHTVLVERSTLKEDVGDEGEEEKEFISYNINIDIHYGVKSNSLAFIKRTPVIDADKPVSSQLRVLTLSEDSPYETLHSFISNAVAPFFKSYIRESGKADRDGDKMAPSVEKKIAELEMGLLHLQQNIEIPEISLPIHPMITNVAKQCYERGEKPKVTDFGDKVEDPTFLNQLQSGVNRWIREIQKVTKLDRDPASGTALQEISFWLNLERALYRIQEKRESPEVLLTLDILKHGKRFHATVSFDTDTGLKQALETVNDYNPLMKDFPLNDLLSATELDKIRQALVAIFTHLRKIRNTKYPIQRALRLVEAISRDLSSQLLKVLGTRKLMHVAYEEFEKVMVACFEVFQTWDDEYEKLQVLLRDIVKRKREENLKMVWRINPAHRKLQARLDQMRKFRRQHEQLRAVIVRVLRPQVTAVAQQNQGEVPEPQDMKVAEVLFDAADANAIEEVNLAYENVKEVDGLDVSKEGTEAWEAAMKRYDERIDRVETRITARLRDQLGTAKNANEMFRIFSRFNALFVRPHIRGAIRDYQTQLIQRVKDDIESLHDKFKVQYPQSQACKMSHVRDLPPVSGSIIWAKQIDRQLTAYMKRVEDVLGKGWENHVEGQKLKQDGDSFRMKLNTQEIFDDWARKVQQRNLGVSGRIFTIESTRVRGRTGNVLKLKVNFLPEIITLSKEVRNLKWLGFRVPLAIVNKAHQANQLYPFAISLIESVRTYERTCEKVEERNTISLLVAGLKKEVQALIAEGIALVWESYKLDPYVQRLAETVFNFQEKVDDLLIIEEKIDLEVRSLETCMYDHKTFSEILNRVQKAVDDLNLHSYSNLPIWVNKLDMEIERILGVRLQAGLRAWTQVLLGQAEDKAEVDMDTDAPQVSHKPGGEPKIKNVVHELRITNQVIYLNPPIEECRYKLYQEMFAWKMVVLSLPRIQSQRYQVGVHYELTEEEKFYRNALTRMPDGPVALEESYSAVMGIVSEVEQYVKVWLQYQCLWDMQAENIYNRLGEDLNKWQALLVQIRKARGTFDNAETKKEFGPVVIDYGKVQSKVNLKYDSWHKEVLSKFGQMLGSNMTEFHSQISKSRQELEQHSVDTASTSDAVTFITYVQSLKRKIKQFEKQVELYRNGQRLLEKQRFQFPPSWLYIDNIEGEWGAFNDIMRRKDSAIQQQVANLQMKIVQEDRAVESRTTDLLTDWEKTKPVTGNLRPEEALQALTIYEGKFGRLKDDREKCAKAKEALELTDTGLLSGSEERVQVALEELQDLKGVWSELSKVWEQIDQMKEQPWVSVQPRKLRQNLDALLNQLKSFPARLRQYASYEFVQRLLKGYMKINMLVIELKSEALKDRHWKQLMKRLHVNWVVSELTLGQIWDVDLQKNEAIVKDVLLVAQGEMALEEFLKQIREVWNTYELDLVNYQNKCRLIRGWDDLFNKVKEHINSVSAMKLSPYYKVFEEDALSWEDKLNRIMALFDVWIDVQRRWVYLEGIFTGSADIKHLLPVETQRFQSISTEFLALMKKVSKSPLVMDVLNIQGVQRSLERLADLLGKIQKALGEYLERERSSFPRFYFVGDEDLLEIIGNSKNVAKLQKHFKKMFAGVSSIILNEDNSVVLGISSREGEEVMFKTPVSITEHPKINEWLTLVEKEMRVTLAKLLAESVTEVEIFGKATSIDPNTYITWIDKYQAQLVVLSAQIAWSENVETALSSMGGGGDAAPLHSVLSNVEVTLNVLADSVLMEQPPLRRRKLEHLITELVHQRDVTRSLIKSKIDNAKSFEWLSQMRFYFDPKQTDVLQQLSIQMANAKFNYGFEYLGVQDKLVQTPLTDRCYLTMTQALEARLGGSPFGPAGTGKTESVKALGHQLGRFVLVFNCDETFDFQAMGRIFVGLCQVGAWGCFDEFNRLEERMLSAVSQQVQCIQEALREHSNPNYDKTSAPITCELLNKQVKVSPDMAIFITMNPGYAGRSNLPDNLKKLFRSLAMTKPDRQLIAQVMLYSQGFRTAEVLANKIVPFFKLCDEQLSSQSHYDFGLRALKSVLVSAGNVKRERIQKIKREKEERGEAVDEGEIAENLPEQEILIQSVCETMVPKLVAEDIPLLFSLLSDVFPGVQYHRGEMTALREELKKVCQEMYLTYGDGEEVGGMWVEKVLQLYQITQINHGLMMVGPSGSGKSMAWRVLLKALERLEGVEGVAHIIDPKAISKDHLYGTLDPNTREWTDGLFTHVLRKIIDSVRGELQKRQWIVFDGDVDPEWVENLNSVLDDNKLLTLPNGERLSLPPNVRIMFEVQDLKYATLATVSRCGMVWFSEDVLSTDMIFNNFLARLRSIPLDEGEDEAQRRRKGKEDEGEEAASPMLQIQRDAATIMQPYFTSNGLVTKALEHAFQLEHIMDLTRLRCLGSLFSMLHQACRNVAQYNANHPDFPMQIEQLERYIQRYLVYAILWSLSGDSRLKMRAELGEYIRRITTVPLPTAPNIPIIDYEVSISGEWSPWQAKVPQIEVETHKVAAPDVVVPTLDTVRHEALLYTWLAEHKPLVLCGPPGSGKTMTLFSALRALPDMEVVGLNFSSATTPELLLKTFDHYCEYRRTPNGVVLAPVQLGKWLVLFCDEINLPDMDKYGTQRVISFIRQMVEHGGFYRTSDQTWVKLERIQFVGACNPPTDPGRKPLSHRFLRHVPVVYVDYPGPASLTQIYGTFNRAMLRLIPSLRTYAEPLTAAMVEFYTMSQERFTQDTQPHYIYSPREMTRWVRGIFEALRPLETLPVEGLIRIWAHEALRLFQDRLVEDEERRWTDENIDTVALKHFPNIDREKAMSRPILYSNWLSKDYIPVDQEELRDYVKARLKVFYEEELDVPLVLFNEVLDHVLRIDRIFRQPQGHLLLIGVSGAGKTTLSRFVAWMNGLSVYQIKVHRKYTGEDFDEDLRTVLRRSGCKNEKIAFIMDESNVLDSGFLERMNTLLANGEVPGLFEGDEYATLMTQCKEGAQKEGLMLDSHEELYKWFTSQVIRNLHVVFTMNPSSEGLKDRAATSPALFNRCVLNWFGDWSTEALYQVGKEFTSKMDLEKPNYIVPDYMPVVYDKLPQPPSHREAIVNSCVFVHQTLHQANARLAKRGGRTMAITPRHYLDFINHYANLFHEKRSELEEQQMHLNVGLRKIKETVDQVEELRRDLRIKSQELEVKNAAANDKLKKMVKDQQEAEKKKVMSQEIQEQLHKQQEVIADKQMSVKEDLDKVEPAVIEAQNAVKSIKKQHLVEVRSMANPPAAVKLALESICLLLGESTTDWKQIRSIIMRENFIPTIVNFSAEEISDAIREKMKKNYMSNPSYNYEIVNRASLACGPMVKWAIAQLNYADMLKRVEPLRNELQKLEDDAKDNQQKANEVEQMIRDLEASIARYKEEYAVLISEAQASRQTWQLSRQK

SEQ ID NO: 917687 - protein, 3558 aa, Homo sapiens; identical to SEQ ID NO: 917657

SEQ ID NO: 917688 - protein, 3526 aa, Homo sapiens
GPRKYTAEGEWGAFNDIMRRKDSAIQQQVANLQMKIVQEDRAVESRTTDLLTDWEKTKPVTGNLRPEEALQALTIYEGKFGRLKDDREKCAKAKEALELTDTGLLSGSEERVQVALEELQDLKGVWSELSKVWEQIDQMKEQPWVSVQPRKLRQNLDALLNQLKSFPARLRQYASYEFVQRLLKGYMKINMLVIELKSEALKDRHWKQLMKRLHVNWVVSELTLGQIWDVDLQKNEAIVKDVLLVAQGEMALEEFLKQIREVWNTYELDLVNYQNKCRLIRGWDDLFNKVKEHINSVSAMKLSPYYKVFEEDALSWEDKLNRIMALFDVWIDVQRRWVYLEGIFTGSADIKHLLPVETQRFQSISTEFLALMKKVSKSPLVMDVLNIQGVQRSLERLADLLGKIQKALGEYLERERSSFPRFYFVGDEDLLEIIGNSKNVAKLQKHFKKMFAGVSSIILNEDNSVVLGISSREGEEVMFKTPVSITEHPKINEWLTLVEKEMRVTLAKLLAESVTEVEIFGKATSIDPNTYITWIDKYQAQLVVLSAQIAWSENVETALSSMGGGGDAAPLHSVLSNVEVTLNVLADSVLMEQPPLRRRKLEHLITELVHQRDVTRSLIKSKIDNAKSFEWLSQMRFYFDPKQTDVLQQLSIQMANAKFNYGFEYLGVQDKLVQTPLTDRCYLTMTQALEARLGGSPFGPAGTGKTESVKALGHQLGRFVLVFNCDETFDFQAMGRIFVGLCQVGAWGCFDEFNRLEERMLSAVSQQVQCIQEALREHSNPNYDKTSAPITCELLNKQVKVSPDMAIFITMNPGYAGRSNLPDNLKKLFRSLAMTKPDRQLIAQVMLYSQGFRTAEVLANKIVPFFKLCDEQLSSQSHYDFGLRALKSVLVSAGNVKRERIQKIKREKEERGEAVDEGEIAENLPEQEILIQSVCETMVPKLVAEDIPLLFSLLSDVFPGVQYHRGEMTALREELKKVCQEMYLTYGDGEEVGGMWVEKVLQLYQITQINHGLMMVGPSGSGKSMAWRVLLKALERLEGVEGVAHIIDPKAISKDHLYGTLDPNTREWTDGLFTHVLRKIIDSVRGELQKRQWIVFDGDVDPEWVENLNSVLDDNKLLTLPNGERLSLPPNVRIMFEVQDLKYATLATVSRCGMVWFSEDVLSTDMIFNNFLARLRSIPLDEGEDEAQRRRKGKEDEGEEAASPMLQIQRDAATIMQPYFTSNGLVTKALEHAFQLEHIMDLTRLRCLGSLFSMLHQACRNVAQYNANHPDFPMQIEQLERYIQVRGHQGLHRAHQLRQTTGLRTSEMLHLWGCALSPRRGRAFVEGLGKVQWVSVMQEDWEPLSLVNFAVSVFLLLLKFYKNQSLIPFLIAISGLCHTLVPAGDSRLKMRAELGEYIRRITTVPLPTAPNIPIIDYEVSISGEWSPWQAKVPQIEVETHKVAAPDVVVPTLDTVRHEALLYTWLAEHKPLVLCGPPGSGKTMTLFSALRALPDMEVVGLNFSSATTPELLLKTFDHYCEYRRTPNGVVLAPVQLGKWLVLFCDEINLPDMDKYGTQRVISFIRQMVEHGGFYRTSDQTWVKLERIQFVGACNPPTDPGRKPLSHRFLRHVPVVYVDYPGPASLTQIYGTFNRAMLRLIPSLRTYAEPLTAAMVEFYTMSQERFTQDTQPHYIYSPREMTRWVRGIFEALRPLETLPVEGLIRIWAHEALRLFQDRLVEDEERRWTDENIDTVALKHFPNIDREKAMSRPILYSNWLSKDYIPVDQEELRDYVKARLKVFYEEELDVPLVLFNEVLDHVLRIDRIFRQPQGHLLLIGVSGAGKTTLSRFVAWMNGLSVYQIKVHRKYTGEDFDEDLRTVLRRSGCKNEKIAFIMDESNVLDSGFLERMNTLLANGEVPGLFEGDEYATLMTQCKEGAQKEGLMLDSHEELYKWFTSQVIRNLHVVFTMNPSSEGLKDRAATSPALFNRCVLNWFGDWSTEALYQVGKEFTSKMDLEKPNYIVPDYMPVVYDKLPQPPSHREAIVNSCVFVHQTLHQANARLAKRGGRTMAITPRHYLDFINHYANLFHEKRSELEEQQMHLNVGLRKIKETVDQVEELRRDLRIKSQELEVKNAAANDKLKKMVKDQQEAEKKKVMSQEIQEQLHKQQEVIADKQMSVKEDLDKVEPAVIEAQNAVKSIKKQHLVEVRSMANPPAAVKLALESICLLLGESTTDWKQIRSIIMRENFIPTIVNFSAEEISDAIREKMKKNYMSNPSYNYEIVNRASLACGPMVKWAIAQLNYADMLKRVEPLRNELQKLEDDAKDNQQKANEVEQMIRDLEASIARYKEEYAVLISEAQAIKADLAAVEAKVNRSTALLKSLSAERERWEKTSETFKNQMSTIAGDCLLSAAFIAYAGYFDQQMRQNLFTTWSHHLQQANIQFRTDIARTEYLSNADERLRWQASSLPADDLCTENAIMLKRFNRYPLIIDPSGQATEFIMNEYKDRKITRTSFLDDAFRKNLESALRFGNPLLVQDVESYDPVLNPVLNREVRRTGGRVLITLGDQDIDLSPSFVIFLSTRDPTVEFPPDLCSRVTFVNFTVTRSSLQSQCLNEVLKAERPDVDEKRSDLLKLQGEFQLRLRQLEKSLLQALNEVKGRILDDDTIITTLENLKREAAEVTRKVEETDIVMQEVETVSQQYLPLSTACSSIYFTMESLKQIHFLYQYSLQFFLDIYHNVLYENPNLKGVTDHTQRLSIITKDLFQVAFNRVARGMLHQDHITFAMLLARIKLKGTVGEPTYDAEFQHFLRGNEIVLSAGSTPRIQGLTVEQAEAVVRLSCLPAFKDLIAKVQADEQFGIWLDSSSPEQTVPYLWSEETPATPIGQAIHRLLLIQAFRPDRLLAMAHMFVSTNLGESFMSIMEQPLDLTHIVGTEVKPNTPVLMCSVPGYDASGHVEDLAAEQNTQITSIAIGSAEGFNQADKAINTAVKSGRWVMLKNVHLAPGWLMQLEKKLHSLQPHACFRLFLTMEINPKVPVNLLRAGRIFVFEPPPGVKANMLRTFSSIPVSRICKSPNERARLYFLLAWFHAIIQERLRYAPLGWSKKYEFGESDLRSACDTVDTWLDDTAKGRQNISPDKIPWSALKTLMAQSIYGGRVDNEFDQRLLNTFLERLFTTRSFDSEFKLACKVDGHKDIQMPDGIRREEFVQWVELLPDTQTPSWLGLPNNAERVLLTTQGVDMISKMLKMQMLEDEDDLAYAETEKKTRTDSTSDGRPAWMRTLHTTASNWLHLIPQTLSHLKRTVENIKDPLFRFFEREVKMGAKLLQDVRQDLADVVQVCEGKKKQTNYLRTLINELVKGILPRSWSHYTVPAGMTVIQWVSDFSERIKQLQNISLAAASGGAKELKNIHVCLGGLFVPEAYITATRQYVAQANSWSLEELCLEVNVTTSQGATLDACSFGVTGLKLQGATCNNNKLSLSNAISTALPLTQLRWVKQTNTEKKASVVTLPVYLNFTRADLIFTVDFEIATKEDPRSFYERGVAVLCTE

SEQ ID NO: 917689 - protein, 3558 aa, Homo sapiens; identical to SEQ ID NO: 917657

SEQ ID NO: 917690 - protein, 3558 aa, Homo sapiens; identical to SEQ ID NO: 917657

SEQ ID NO: 917691 - protein, 3558 aa, Homo sapiens; identical to SEQ ID NO: 917657

SEQ ID NO: 917692 - protein, 1779 aa, Homo sapiens
TCCSPHRLVEDEERRWTDENIDTVALKHFPNIDREKAMSRPILYSNWLSKDYIPVDQEELRDYVKARLKVFYEEELDVPLVLFNEVLDHVLRIDRSIGSTQEEDFDEDLRTVLRRSGCKNEKIAFIMDESNVLDSGFLERMNTLLANGEVPGLFEGDEYATLMTQCKEGAQKEGLMLDSHEELYKWFTSQVIRNLHVVFTMNPSSEGLKDRAATSPALFNRCVLNWFGDWSTEALYQVGKEFTSKMDLEKPNYIVPDYMPVVYDKLPQPPSHREAIVNSCVFVHQTLHQANARLAKRGGRTMAITPRHYLDFINHYANLFHEKRSELEEQQMHLNVGLRKIKETVDQVEELRRDLRIKSQELEVKNAAANDKLKKMVKDQQEAEKKKVMSQEIQEQLHKQQEVIADKQMSVKEDLDKVEPAVIEAQNAVKSIKKQHLVEVRSMANPPAAVKLALESICLLLGESTTDWKQIRSIIMRENFIPTIVNFSAEEISDAIREKMKKNYMSNPSYNYEIVNRASLACGPMVKWAIAQLNYADMLKRVEPLRNELQKLEDDAKDNQQKANEVEQMIRDLEASIARYKEEYAVLISEAQAIKADLAAVEAKVNRSTALLKSLSAERERWEKTSETFKNQMSTIAGDCLLSAAFIAYAGYFDQQMRQNLFTTWSHHLQQANIQFRTDIARTEYLSNADERLRWQASSLPADDLCTENAIMLKRFNRYPLIIDPSGQATEFIMNEYKDRKITRTSFLDDAFRKNLESALRFGNPLLVQDVESYDPVLNPVLNREVRRTGGRVLITLGDQDIDLSPSFVIFLSTRDPTVEFPPDLCSRVTFVNFTVTRSSLQSQCLNEVLKAERPDVDEKRSDLLKLQGEFQLRLRQLEKSLLQALNEVKGRILDDDTIITTLENLKREAAEVTRKVEETDIVMQEVETVSQQYLPLSTACSSIYFTMESLKQIHFLYQYSLQFFLDIYHNVLYENPNLKGVTDHTQRLSIITKDLFQVAFNRVARGMLHQDHITFAMLLARIKLKGTVGEPTYDAEFQHFLRGNEIVLSAGSTPRIQGLTVEQAEAVVRLSCLPAFKDLIAKVQADEQFGIWLDSSSPEQTVPYLWSEETPATPIGQAIHRLLLIQAFRPDRLLAMAHMFVSTNLGESFMSIMEQPLDLTHIVGTEVKPNTPVLMCSVPGYDASGHVEDLAAEQNTQITSIAIGSAEGFNQADKAINTAVKSGRWVMLKNVHLAPGWLMQLEKKLHSLQPHACFRLFLTMEINPKVPVNLLRAGRIFVFEPPPGVKANMLRTFSSIPVSRICKSPNERARLYFLLAWFHAIIQERLRYAPLGWSKKYEFGESDLRSACDTVDTWLDDTAKGRQNISPDKIPWSALKTLMAQSIYGGRVDNEFDQRLLNTFLERLFTTRSFDSEFKLACKVDGHKDIQMPDGIRREEFVQWVELLPDTQTPSWLGLPNNAERVLLTTQGVDMISKMLKMQMLEDEDDLAYAETEKKTRTDSTSDGRPAWMRTLHTTASNWLHLIPQTLSHLKRTVENIKDPLFRFFEREVKMGAKLLQDVRQDLADVVQVCEGKKKQTNYLRTLINELVKGILPRSWSHYTVPAGMTVIQWVSDFSERIKQLQNISLAAASGGAKELKNIHVCLGGLFVPEAYITATRQYVAQANSWSLEELCLEVNVTTSQGATLDACSFGVTGLKLQGATCNNNKLSLSNAISTALPLTQLRWVKQTNTEKKASVVTLPVYLNFTRADLIFTVDFEIATKEDPRSFYERGVAVLCTE

SEQ ID NO: 917693 - protein, 1001 aa, Homo sapiens
KKITARYEAGVWGRVLITLGDQDIDLSPSFVIFLSTRDPTVEFPPDLCSRVTFVNFTVTRSSLQSQCLNEVLKAERPDVDEKRSDLLKLQGEFQLRLRQLEKSLLQALNEVKGRILDDDTIITTLENLKREAAEVTRKVEETDIVMQEVETVSQQYLPLSTACSSIYFTMESLKQIHFLYQYSLQFFLDIYHNVLYENPNLKGVTDHTQRLSIITKDLFQVAFNRVARGMLHQDHITFAMLLARIKLKGTVGEPTYDAEFQHFLRGNEIVLSAGSTPRIQGLTVEQAEAVVRLSCLPAFKDLIAKVQADEQFGIWLDSSSPEQTVPYLWSEETPATPIGQAIHRLLLIQAFRPDRLLAMAHMFVSTNLGESFMSIMEQPLDLTHIVGTEVKPNTPVLMCSVPGYDASGHVEDLAAEQNTQITSIAIGSAEGFNQADKAINTAVKSGRWVMLKNVHLAPGWLMQLEKKLHSLQPHACFRLFLTMEINPKVPVNLLRAGRIFVFEPPPGVKANMLRTFSSIPVSRICKSPNERARLYFLLAWFHAIIQERLRYAPLGWSKKYEFGESDLRSACDTVDTWLDDTAKGRQNISPDKIPWSALKTLMAQSIYGGRVDNEFDQRLLNTFLERLFTTRSFDSEFKLACKVDGHKDIQMPDGIRREEFVQWVELLPDTQTPSWLGLPNNAERVLLTTQGVDMISKMLKMQMLEDEDDLAYAETEKKTRTDSTSDGRPAWMRTLHTTASNWLHLIPQTLSHLKRTVENIKDPLFRFFEREVKMGAKLLQDVRQDLADVVQVCEGKKKQTNYLRTLINELVKGILPRSWSHYTVPAGMTVIQWVSDFSERIKQLQNISLAAASGGAKELKNIHVCLGGLFVPEAYITATRQYVAQANSWSLEELCLEVNVTTSQGATLDACSFGVTGLKLQGATCNNNKLSLSNAISTALPLTQLRWVKQTNTEKKASVVTLPVYLNFTRADLIFTVDFEIATKEDPRSFYERGVAVLCTE

SEQ ID NO: 917694 - protein, 4360 aa, Homo sapiens
MSEPGGGGGEDGSAGLEVSAVQNVADVSVLQKHLRKLVPLLLEDGGEAPAALEAALEEKSALEQMRKFLSDPQVHTVLVERSTLKEDVGDEGEEEKEFISYNINIDIHYGVKSNSLAFIKRTPVIDADKPVSSQLRVLTLSEDSPYETLHSFISNAVAPFFKSYIRESGKADRDGDKMAPSVEKKIAELEMGLLHLQQNIEIPEISLPIHPMITNVAKQCYERGEKPKVTDFGDKVEDPTFLNQLQSGVNRWIREIQKVTKLDRDPASGTALQEISFWLNLERALYRIQEKRESPEVLLTLDILKHGKRFHATVSFDTDTGLKQALETVNDYNPLMKDFPLNDLLSATELDKIRQALVAIFTHLRKIRNTKYPIQRALRLVEAISRDLSSQLLKVLGTRKLMHVAYEEFEKVMVACFEVFQTWDDEYEKLQVLLRDIVKRKREENLKMVWRINPAHRKLQARLDQMRKFRRQHEQLRAVIVRVLRPQVTAVAQQNQGEVPEPQDMKVAEVLFDAADANAIEEVNLAYENVKEVDGLDVSKEGTEAWEAAMKRYDERIDRVETRITARLRDQLGTAKNANEMFRIFSRFNALFVRPHIRGAIRDYQTQLIQRVKDDIESLHDKFKVQYPQSQACKMSHVRDLPPVSGSIIWAKQIDRQLTAYMKRVEDVLGKGWENHVEGQKLKQDGDSFRMKLNTQEIFDDWARKVQQRNLGVSGRIFTIESTRVRGRTGNVLKLKVNFLPEIITLSKEVRNLKWLGFRVPLAIVNKAHQANQLYPFAISLIESVRTYERTCEKVEERNTISLLVAGLKKEVQALIAEGIALVWESYKLDPYVQRLAETVFNFQEKVDDLLIIEEKIDLEVRSLETCMYDHKTFSEILNRVQKAVDDLNLHSYSNLPIWVNKLDMEIERILGVRLQAGLRAWTQVLLGQAEDKAEVDMDTDAPQVSHKPGGEPKIKNVVHELRITNQVIYLNPPIEECRYKLYQEMFAWKMVVLSLPRIQSQRYQVGVHYELTEEEKFYRNALTRMPDGPVALEESYSAVMGIVSEVEQYVKVWLQYQCLWDMQAENIYNRLGEDLNKWQALLVQIRKARGTFDNAETKKEFGPVVIDYGKVQSKVNLKYDSWHKEVLSKFGQMLGSNMTEFHSQISKSRQELEQHSVDTASTSDAVTFITYVQSLKRKIKQFEKQVELYRNGQRLLEKQRFQFPPSWLYIDNIEGEWGAFNDIMRRKDSAIQQQVANLQMKIVQEDRAVESRTTDLLTDWEKTKPVTGNLRPEEALQALTIYEGKFGRLKDDREKCAKAKEALELTDTGLLSGSEERVQVALEELQDLKGVWSELSKVWEQIDQMKEQPWVSVQPRKLRQNLDALLNQLKSFPARLRQYASYEFVQRLLKGYMKINMLVIELKSEALKDRHWKQLMKRLHVNWVVSELTLGQIWDVDLQKNEAIVKDVLLVAQGEMALEEFLKQIREVWNTYELDLVNYQNKCRLIRGWDDLFNKVKEHINSVSAMKLSPYYKVFEEDALSWEDKLNRIMALFDVWIDVQRRWVYLEGIFTGSADIKHLLPVETQRFQSISTEFLALMKKVSKSPLVMDVLNIQGVQRSLERLADLLGKIQKALGEYLERERSSFPRFYFVGDEDLLEIIGNSKNVAKLQKHFKKMFAGVSSIILNEDNSVVLGISSREGEEVMFKTPVSITEHPKINEWLTLVEKEMRVTLAKLLAESVTEVEIFGKATSIDPNTYITWIDKYQAQLVVLSAQIAWSENVETALSSMGGGGDAAPLHSVLSNVEVTLNVLADSVLMEQPPLRRRKLEHLITELVHQRDVTRSLIKSKIDNAKSFEWLSQMRFYFDPKQTDVLQQLSIQMANAKFNYGFEYLGVQDKLVQTPLTDRCYLTMTQALEARLGGSPFGPAGTGKTESVKALGHQLGRFVLVFNCDETFDFQAMGRIFVGLCQVGAWGCFDEFNRLEERMLSAVSQQVQCIQEALREHSNPNYDKTSAPITCELLNKQVKVSPDMAIFITMNPGYAGRSNLPDNLKKLFRSLAMTKPDRQLIAQVMLYSQGFRTAEVLANKIVPFFKLCDEQLSSQSHYDFGLRALKSVLVSAGNVKRERIQKIKREKEERGEAVDEGEIAENLPEQEILIQSVCETMVPKLVAEDIPLLFSLLSDVFPGVQYHRGEMTALREELKKVCQEMYLTYGDGEEVGGMWVEKVLQLYQITQINHGLMMVGPSGSGKSMAWRVLLKALERLEGVEGVAHIIDPKAISKDHLYGTLDPNTREWTDGLFTHVLRKIIDSVRGELQKRQWIVFDGDVDPEWVENLNSVLDDNKLLTLPNGERLSLPPNVRIMFEVQDLKYATLATVSRCGMVWFSEDVLSTDMIFNNFLARLRSIPLDEGEDEAQRRRKGKEDEGEEAASPMLQIQRDAATIMQPYFTSNGLVTKALEHAFQLEHIMDLTRLRCLGSLFSMLHQACRNVAQYNANHPDFPMQIEQLERYIQVRGHQGLHRAHQLRQTTGLRTSEMLHLWGCALSPRRGRAFVEGLGKVQWVSVMQEDWEPLSLVNFAVSVFLLLLKFYKNQSLIPFLIAISGLCHTLVPAGDSRLKMRAELGEYIRRITTVPLPTAPNIPIIDYEVSISGEWSPWQAKVPQIEVETHKVAAPDVVVPTLDTVRHEALLYTWLAEHKPLVLCGPPGSGKTMTLFSALRALPDMEVVGLNFSSATTPELLLKTFDHYCEYRRTPNGVVLAPVQLGKWLVLFCDEINLPDMDKYGTQRVISFIRQMVEHGGFYRTSDQTWVKLERIQFVGACNPPTDPGRKPLSHRFLRHVPVVYVDYPGPASLTQIYGTFNRAMLRLIPSLRTYAEPLTAAMVEFYTMSQERFTQDTQPHYIYSPREMTRWVRGIFEALRPLETLPVEGLIRIWAHEALRLFQDRLVEDEERRWTDENIDTVALKHFPNIDREKAMSRPILYSNWLSKDYIPVDQEELRDYVKARLKVFYEEELDVPLVLFNEVLDHVLRIDRIFRQPQGHLLLIGVSGAGKTTLSRFVAWMNGLSVYQIKVHRKYTGEDFDEDLRTVLRRSGCKNEKIAFIMDESNVLDSGFLERMNTLLANGEVPGLFEGDEYATLMTQCKEGAQKEGLMLDSHEELYKWFTSQVIRNLHVVFTMNPSSEGLKDRAATSPALFNRCVLNWFGDWSTEALYQVGKEFTSKMDLEKPNYIVPDYMPVVYDKLPQPPSHREAIVNSCVFVHQTLHQANARLAKRGGRTMAITPRHYLDFINHYANLFHEKRSELEEQQMHLNVGLRKIKETVDQVEELRRDLRIKSQELEVKNAAANDKLKKMVKDQQEAEKKKVMSQEIQEQLHKQQEVIADKQMSVKEDLDKVEPAVIEAQNAVKSIKKQHLVEVRSMANPPAAVKLALESICLLLGESTTDWKQIRSIIMRENFIPTIVNFSAEEISDAIREKMKKNYMSNPSYNYEIVNRASLACGPMVKWAIAQLNYADMLKRVEPLRNELQKLEDDAKDNQQKANEVEQMIRDLEASIARYKEEYAVLISEAQAIKADLAAVEAKVNRSTALLKSLSAERERWEKTSETFKNQMSTIAGDCLLSAAFIAYAGYFDQQMRQNLFTTWSHHLQQANIQFRTDIARTEYLSNADERLRWQASSLPADDLCTENAIMLKRFNRYPLIIDPSGQATEFIMNEYKDRKITRTSFLDDAFRKNLESALRFGNPLLVQDVESYDPVLNPVLNREVRRTGGRVLITLGDQDIDLSPSFVIFLSTRDPTVEFPPDLCSRVTFVNFTVTRSSLQSQCLNEVLKAERPDVDEKRSDLLKLQGEFQLRLRQLEKSLLQALNEVKGRILDDDTIITTLENLKREAAEVTRKVEETDIVMQEVETVSQQYLPLSTACSSIYFTMESLKQIHFLYQYSLQFFLDIYHNVLYENPNLKGVTDHTQRLSIITKDLFQVAFNRVARGMLHQDHITFAMLLARIKLKGTVGEPTYDAEFQHFLRGNEIVLSAGSTPRIQGLTVEQAEAVVRLSCLPAFKDLIAKVQADEQFGIWLDSSSPEQTVPYLWSEETPATPIGQAIHRLLLIQAFRPDRLLAMAHMFVSTNLGESFMSIMEQPLDLTHIVGTEVKPNTPVLMCSVPGYDASGHVEDLAAEQNTQITSIAIGSAEGFNQADKAINTAVKSGRWVMLKNVHLAPGWLMQLEKKLHSLQPHACFRLFLTMEINPKVPVNLLRAGRIFVFEPPPGVKANMLRTFSSIPVSRICKSPNERARLYFLLAWFHAIIQERLRYAPLGWSKKYEFGESDLRSACDTVDTWLDDTAKGRQNISPDKIPWSALKTLMAQSIYGGRVDNEFDQRLLNTFPTRST

SEQ ID NO: 917695 - protein, 583 aa, Homo sapiens
MQITSIAIGSAEGFNQADKAINTAVKSGRWVMLKNVHLAPGWLMQLEKKLHSLQPHACFRLFLTMEINPKVPVNLLRAGRIFVFEPPPGVKANMLRTFSSIPVSRICKSPNERARLYFLLAWFHAIIQERLRYAPLGWSKKYEFGESDLRSACDTVDTWLDDTAKGRQNISPDKIPWSALKTLMAQSIYGGRVDNEFDQRLLNTFLERLFTTRSFDSEFKLACKVDGHKDIQMPDGIRREEFVQWVELLPDTQTPSWLGLPNNAERVLLTTQGVDMISKMLKMQMLEDEDDLAYAETEKKTRTDSTSDGRPAWMRTLHTTASNWLHLIPQTLSHLKRTVENIKDPLFRFFEREVKMGAKLLQDVRQDLADVVQVCEGKKKQTNYLRTLINELVKGILPRSWSHYTVPAGMTVIQWVSDFSERIKQLQNISLAAASGGAKELKNIHVCLGGLFVPEAYITATRQYVAQANSWSLEELCLEVNVTTSQGATLDACSFGVTGLKLQGATCNNNKLSLSNAISTALPLTQLRWVKQTNTEKKASVVTLPVYLNFTRADLIFTVDFEIATKEDPRSFYERGVAVLCTE

SEQ ID NO: 917696 - protein, 3792 aa, Homo sapiens
MSEPGGGGGEDGSAGLEVSAVQNVADVSVLQKHLRKLVPLLLEDGGEAPAALEAALEEKSALEQMRKFLSDPQVHTVLVERSTLKEDVGDEGEEEKEFISYNINIDIHYGVKSNSLAFIKRTPVIDADKPVSSQLRVLTLSEDSPYETLHSFISNAVAPFFKSYIRESGKADRDGDKMAPSVEKKIAELEMGLLHLQQNIEIPEISLPIHPMITNVAKQCYERGEKPKVTDFGDKVEDPTFLNQLQSGVNRWIREIQKVTKLDRDPASGTALQEISFWLNLERALYRIQEKRESPEVLLTLDILKHGKRFHATVSFDTDTGLKQALETVNDYNPLMKDFPLNDLLSATELDKIRQALVAIFTHLRKIRNTKYPIQRALRLVEAISRDLSSQLLKVLGTRKLMHVAYEEFEKVMVACFEVFQTWDDEYEKLQVLLRDIVKRKREENLKMVWRINPAHRKLQARLDQMRKFRRQHEQLRAVIVRVLRPQVTAVAQQNQGEVPEPQDMKVAEVLFDAADANAIEEVNLAYENVKEVDGLDVSKEGTEAWEAAMKRYDERIDRVETRITARLRDQLGTAKNANEMFRIFSRFNALFVRPHIRGAIRDYQTQLIQRVKDDIESLHDKFKVQYPQSQACKMSHVRDLPPVSGSIIWAKQIDRQLTAYMKRVEDVLGKGWENHVEGQKLKQDGDSFRMKLNTQEIFDDWARKVQQRNLGVSGRIFTIESTRVRGRTGNVLKLKVNFLPEIITLSKEVRNLKWLGFRVPLAIVNKAHQANQLYPFAISLIESVRTYERTCEKVEERNTISLLVAGLKKEVQALIAEGIALVWESYKLDPYVQRLAETVFNFQEKVDDLLIIEEKIDLEVRSLETCMYDHKTFSEILNRVQKAVDDLNLHSYSNLPIWVNKLDMEIERILGVRLQAGLRAWTQVLLGQAEDKAEVDMDTDAPQVSHKPGGEPKIKNVVHELRITNQVIYLNPPIEECRYKLYQEMFAWKMVVLSLPRIQSQRYQVGVHYELTEEEKFYRNALTRMPDGPVALEESYSAVMGIVSEVEQYVKVWLQYQCLWDMQAENIYNRLGEDLNKWQALLVQIRKARGTFDNAETKKEFGPVVIDYGKVQSKVNLKYDSWHKEVLSKFGQMLGSNMTEFHSQISKSRQELEQHSVDTASTSDAVTFITYVQSLKRKIKQFEKQVELYRNGQRLLEKQRFQFPPSWLYIDNIEGEWGAFNDIMRRKDSAIQQQVANLQMKIVQEDRAVESRTTDLLTDWEKTKPVTGNLRPEEALQALTIYEGKFGRLKDDREKCAKAKEALELTDTGLLSGSEERVQVALEELQDLKGVWSELSKVWEQIDQMKEQPWVSVQPRKLRQNLDALLNQLKSFPARLRQYASYEFVQRLLKGYMKINMLVIELKSEALKDRHWKQLMKRLHVNWVVSELTLGQIWDVDLQKNEAIVKDVLLVAQGEMALEEFLKQIREVWNTYELDLVNYQNKCRLIRGWDDLFNKVKEHINSVSAMKLSPYYKVFEEDALSWEDKLNRIMALFDVWIDVQRRWVYLEGIFTGSADIKHLLPVETQRFQSISTEFLALMKKVSKSPLVMDVLNIQGVQRSLERLADLLGKIQKALGEYLERERSSFPRFYFVGDEDLLEIIGNSKNVAKLQKHFKKMFAGVSSIILNEDNSVVLGISSREGEEVMFKTPVSITEHPKINEWLTLVEKEMRVTLAKLLAESVTEVEIFGKATSIDPNTYITWIDKYQAQLVVLSAQIAWSENVETALSSMGGGGDAAPLHSVLSNVEVTLNVLADSVLMEQPPLRRRKLEHLITELVHQRDVTRSLIKSKIDNAKSFEWLSQMRFYFDPKQTDVLQQLSIQMANAKFNYGFEYLGVQDKLVQTPLTDRCYLTMTQALEARLGGSPFGPAGTGKTESVKALGHQLGRFVLVFNCDETFDFQAMGRIFVGLCQVGAWGCFDEFNRLEERMLSAVSQQVQCIQEALREHSNPNYDKTSAPITCELLNKQVKVSPDMAIFITMNPGYAGRSNLPDNLKKLFRSLAMTKPDRQLIAQVMLYSQGFRTAEVLANKIVPFFKLCDEQLSSQSHYDFGLRALKSVLVSAGNVKRERIQKIKREKEERGEAVDEGEIAENLPEQEILIQSVCETMVPKLVAEDIPLLFSLLSDVFPGVQYHRGEMTALREELKKVCQEMYLTYGDGEEVGGMWVEKVLQLYQITQINHGLMMVGPSGSGKSMAWRVLLKALERLEGVEGVAHIIDPKAISKDHLYGTLDPNTREWTDGLFTHVLRKIIDSVRGELQKRQWIVFDGDVDPEWVENLNSVLDDNKLLTLPNGERLSLPPNVRIMFEVQDLKYATLATVSRCGMVWFSEDVLSTDMIFNNFLARLRSIPLDEGEDEAQRRRKGKEDEGEEAASPMLQIQRDAATIMQPYFTSNGLVTKALEHAFQLEHIMDLTRLRCLGSLFSMLHQACRNVAQYNANHPDFPMQIEQLERYIQVRGHQGLHRAHQLRQTTGLRTSEMLHLWGCALSPRRGRAFVEGLGKVQWVSVMQEDWEPLSLVNFAVSVFLLLLKFYKNQSLIPFLIAISGLCHTLVPAGDSRLKMRAELGEYIRRITTVPLPTAPNIPIIDYEVSISGEWSPWQAKVPQIEVETHKVAAPDVVVPTLDTVRHEALLYTWLAEHKPLVLCGPPGSGKTMTLFSALRALPDMEVVGLNFSSATTPELLLKTFDHYCEYRRTPNGVVLAPVQLGKWLVLFCDEINLPDMDKYGTQRVISFIRQMVEHGGFYRTSDQTWVKLERIQFVGACNPPTDPGRKPLSHRFLRHVPVVYVDYPGPASLTQIYGTFNRAMLRLIPSLRTYAEPLTAAMVEFYTMSQERFTQDTQPHYIYSPREMTRWVRGIFEALRPLETLPVEGLIRIWAHEALRLFQDRLVEDEERRWTDENIDTVALKHFPNIDREKAMSRPILYSNWLSKDYIPVDQEELRDYVKARLKVFYEEELDVPLVLFNEVLDHVLRIDRIFRQPQGHLLLIGVSGAGKTTLSRFVAWMNGLSVYQIKVHRKYTGEDFDEDLRTVLRRSGCKNEKIAFIMDESNVLDSGFLERMNTLLANGEVPGLFEGDEYATLMTQCKEGAQKEGLMLDSHEELYKWFTSQVIRNLHVVFTMNPSSEGLKDRAATSPALFNRCVLNWFGDWSTEALYQVGKEFTSKMDLEKPNYIVPDYMPVVYDKLPQPPSHREAIVNSCVFVHQTLHQANARLAKRGGRTMAITPRHYLDFINHYANLFHEKRSELEEQQMHLNVGLRKIKETVDQVEELRRDLRIKSQELEVKNAAANDKLKKMVKDQQEAEKKKVMSQEIQEQLHKQQEVIADKQMSVKEDLDKVEPAVIEAQNAVKSIKKQHLVEVRSMANPPAAVKLALESICLLLGESTTDWKQIRSIIMRENFIPTIVNFSAEEISDAIREKMKKNYMSNPSYNYEIVNRASLACGPMVKWAIAQLNYADMLKRVEPLRNELQKLEDDAKDNQQKANEVEQMIRDLEASIARYKEEYAVLISEAQAIKADLAAVEAKVNRSTALLKSLSAERERWEKTSETFKNQMSTIAGDCLLSAAFIAYAGYFDQQMRQNLFTTWSHHLQQANIQFRTDIARTEYLSNADERLRWQASSLPADDLCTENAIMLKRFNRYPLIIDPSGQATEFIMNEYKDRKITRTSFLDDAFRKNLESALRFGNPLLVQDVESYDPVLNPVLNREVRRTGGRVLITLGDQDIDLSPSFVIFLSTRDPTLEFPTTILCSSGHCYNFTMR

SEQ ID NO: 917697 - protein, 3675 aa, Homo sapiens
MSEPGGGGGEDGSAGLEVSAVQNVADVSVLQKHLRKLVPLLLEDGGEAPAALEAALEEKSALEQMRKFLSDPQVHTVLVERSTLKEDVGDEGEEEKEFISYNINIDIHYGVKSNSLAFIKRTPVIDADKPVSSQLRVLTLSEDSPYETLHSFISNAVAPFFKSYIRESGKADRDGDKMAPSVEKKIAELEMGLLHLQQNIEIPEISLPIHPMITNVAKQCYERGEKPKVTDFGDKVEDPTFLNQLQSGVNRWIREIQKVTKLDRDPASGTALQEISFWLNLERALYRIQEKRESPEVLLTLDILKHGKRFHATVSFDTDTGLKQALETVNDYNPLMKDFPLNDLLSATELDKIRQALVAIFTHLRKIRNTKYPIQRALRLVEAISRDLSSQLLKVLGTRKLMHVAYEEFEKVMVACFEVFQTWDDEYEKLQVLLRDIVKRKREENLKMVWRINPAHRKLQARLDQMRKFRRQHEQLRAVIVRVLRPQVTAVAQQNQGEVPEPQDMKVAEVLFDAADANAIEEVNLAYENVKEVDGLDVSKEGTEAWEAAMKRYDERIDRVETRITARLRDQLGTAKNANEMFRIFSRFNALFVRPHIRGAIRDYQTQLIQRVKDDIESLHDKFKVQYPQSQACKMSHVRDLPPVSGSIIWAKQIDRQLTAYMKRVEDVLGKGWENHVEGQKLKQDGDSFRMKLNTQEIFDDWARKVQQRNLGVSGRIFTIESTRVRGRTGNVLKLKVNFLPEIITLSKEVRNLKWLGFRVPLAIVNKAHQANQLYPFAISLIESVRTYERTCEKVEERNTISLLVAGLKKEVQALIAEGIALVWESYKLDPYVQRLAETVFNFQEKVDDLLIIEEKIDLEVRSLETCMYDHKTFSEILNRVQKAVDDLNLHSYSNLPIWVNKLDMEIERILGVRLQAGLRAWTQVLLGQAEDKAEVDMDTDAPQVSHKPGGEPKIKNVVHELRITNQVIYLNPPIEECRYKLYQEMFAWKMVVLSLPRIQSQRYQVGVHYELTEEEKFYRNALTRMPDGPVALEESYSAVMGIVSEVEQYVKVWLQYQCLWDMQAENIYNRLGEDLNKWQALLVQIRKARGTFDNAETKKEFGPVVIDYGKVQSKVNLKYDSWHKEVLSKFGQMLGSNMTEFHSQISKSRQELEQHSVDTASTSDAVTFITYVQSLKRKIKQFEKQVELYRNGQRLLEKQRFQFPPSWLYIDNIEGEWGAFNDIMRRKDSAIQQQVANLQMKIVQEDRAVESRTTDLLTDWEKTKPVTGNLRPEEALQALTIYEGKFGRLKDDREKCAKAKEALELTDTGLLSGSEERVQVALEELQDLKGVWSELSKVWEQIDQMKEQPWVSVQPRKLRQNLDALLNQLKSFPARLRQYASYEFVQRLLKGYMKINMLVIELKSEALKDRHWKQLMKRLHVNWVVSELTLGQIWDVDLQKNEAIVKDVLLVAQGEMALEEFLKQIREVWNTYELDLVNYQNKCRLIRGWDDLFNKVKEHINSVSAMKLSPYYKVFEEDALSWEDKLNRIMALFDVWIDVQRRWVYLEGIFTGSADIKHLLPVETQRFQSISTEFLALMKKVSKSPLVMDVLNIQGVQRSLERLADLLGKIQKALGEYLERERSSFPRFYFVGDEDLLEIIGNSKNVAKLQKHFKKMFAGVSSIILNEDNSVVLGISSREGEEVMFKTPVSITEHPKINEWLTLVEKEMRVTLAKLLAESVTEVEIFGKATSIDPNTYITWIDKYQAQLVVLSAQIAWSENVETALSSMGGGGDAAPLHSVLSNVEVTLNVLADSVLMEQPPLRRRKLEHLITELVHQRDVTRSLIKSKIDNAKSFEWLSQMRFYFDPKQTDVLQQLSIQMANAKFNYGFEYLGVQDKLVQTPLTDRCYLTMTQALEARLGGSPFGPAGTGKTESVKALGHQLGRFVLVFNCDETFDFQAMGRIFVGLCQVGAWGCFDEFNRLEERMLSAVSQQVQCIQEALREHSNPNYDKTSAPITCELLNKQVKVSPDMAIFITMNPGYAGRSNLPDNLKKLFRSLAMTKPDRQLIAQVMLYSQGFRTAEVLANKIVPFFKLCDEQLSSQSHYDFGLRALKSVLVSAGNVKRERIQKIKREKEERGEAVDEGEIAENLPEQEILIQSVCETMVPKLVAEDIPLLFSLLSDVFPGVQYHRGEMTALREELKKVCQEMYLTYGDGEEVGGMWVEKVLQLYQITQINHGLMMVGPSGSGKSMAWRVLLKALERLEGVEGVAHIIDPKAISKDHLYGTLDPNTREWTDGLFTHVLRKIIDSVRGELQKRQWIVFDGDVDPEWVENLNSVLDDNKLLTLPNGERLSLPPNVRIMFEVQDLKYATLATVSRCGMVWFSEDVLSTDMIFNNFLARLRSIPLDEGEDEAQRRRKGKEDEGEEAASPMLQIQRDAATIMQPYFTSNGLVTKALEHAFQLEHIMDLTRLRCLGSLFSMLHQACRNVAQYNANHPDFPMQIEQLERYIQVRGHQGLHRAHQLRQTTGLRTSEMLHLWGCALSPRRGRAFVEGLGKVQWVSVMQEDWEPLSLVNFAVSVFLLLLKFYKNQSLIPFLIAISGLCHTLVPAGDSRLKMRAELGEYIRRITTVPLPTAPNIPIIDYEVSISGEWSPWQAKVPQIEVETHKVAAPDVVVPTLDTVRHEALLYTWLAEHKPLVLCGPPGSGKTMTLFSALRALPDMEVVGLNFSSATTPELLLKTFDHYCEYRRTPNGVVLAPVQLGKWLVLFCDEINLPDMDKYGTQRVISFIRQMVEHGGFYRTSDQTWVKLERIQFVGACNPPTDPGRKPLSHRFLRHVPVVYVDYPGPASLTQIYGTFNRAMLRLIPSLRTYAEPLTAAMVEFYTMSQERFTQDTQPHYIYSPREMTRWVRGIFEALRPLETLPVEGLIRIWAHEALRLFQDRLVEDEERRWTDENIDTVALKHFPNIDREKAMSRPILYSNWLSKDYIPVDQEELRDYVKARLKVFYEEELDVPLVLFNEVLDHVLRIDRIFRQPQGHLLLIGVSGAGKTTLSRFVAWMNGLSVYQIKVHRKYTGEDFDEDLRTVLRRSGCKNEKIAFIMDESNVLDSGFLERMNTLLANGEVPGLFEGDEYATLMTQCKEGAQKEGLMLDSHEELYKWFTSQVIRNLHVVFTMNPSSEGLKDRAATSPALFNRCVLNWFGDWSTEALYQVGKEFTSKMDLEKPNYIVPDYMPVVYDKLPQPPSHREAIVNSCVFVHQTLHQANARLAKRGGRTMAITPRHYLDFINHYANLFHEKRSELEEQQMHLNVGLRKIKETVDQVEELRRDLRIKSQELEVKNAAANDKLKKMVKDQQEAEKKKVMSQEIQEQLHKQQEVIADKQMSVKEDLDKVEPAVIEAQNAVKSIKKQHLVEVRSMANPPAAVKLALESICLLLGESTTDWKQIRSIIMRENFIPTIVNFSAEEISDAIREKMKKNYMSNPSYNYEIVNRASLACGPMVKWAIAQLNYADMLKRVEPLRNELQKLEDDAKDNQQKANEVEQMIRDLEASIARYKEEYAVLISEAQAIKADLAAVEAKVNRSTALLKSLSAERERWEKTSETFKNQMSTIAGDCLLSAAFIAYAGYFDQQMRQNLFTTWSHHLQQANIQFRTDIARTEYLSNADERLRWQASSLPADDLCTENAIMLKRFNRYRI

SEQ ID NO: 917698 - protein, 342 aa, Homo sapiens
  misc_feature (4)..(4): Xaa can be any naturally occurring amino acid
  misc_feature (9)..(9): Xaa can be any naturally occurring amino acid
PPPXSVGRXLDQEPSWLGLPNNAERVLLTTQGVDMISKMLKMQMLEDEDDLAYAETEKKTRTDSTSDGRPAWMRTLHTTASNWLHLIPQTLSHLKRTVENIKDPLFRFFEREVKMGAKLLQDVRQDLADVVQVCEGKKKQTNYLRTLINELVKGILPRSWSHYTVPAGMTVIQWVSDFSERIKQLQNISLAAASGGAKELKNIHVCLGGLFVPEAYITATRQYVAQANSWSLEELCLEVNVTTSQGATLDACSFGVTGLKLQGATCNNNKLSLSNAISTALPLTQLRWVKQTNTEKKASVVTLPVYLNFTRADLIFTVDFEIATKEDPRSFYERGVAVLCTE

SEQ ID NO: 917699 - protein, 2880 aa, Homo sapiens
MSEPGGGGGEDGSAGLEVSAVQNVADVSVLQKHLRKLVPLLLEDGGEAPAALEAALEEKSALEQMRKFLSDPQVHTVLVERSTLKEDVGDEGEEEKEFISYNINIDIHYGVKSNSLAFIKRTPVIDADKPVSSQLRVLTLSEDSPYETLHSFISNAVAPFFKSYIRESGKADRDGDKMAPSVEKKIAELEMGLLHLQQNIEIPEISLPIHPMITNVAKQCYERGEKPKVTDFGDKVEDPTFLNQLQSGVNRWIREIQKVTKLDRDPASGTALQEISFWLNLERALYRIQEKRESPEVLLTLDILKHGKRFHATVSFDTDTGLKQALETVNDYNPLMKDFPLNDLLSATELDKIRQALVAIFTHLRKIRNTKYPIQRALRLVEAISRDLSSQLLKVLGTRKLMHVAYEEFEKVMVACFEVFQTWDDEYEKLQVLLRDIVKRKREENLKMVWRINPAHRKLQARLDQMRKFRRQHEQLRAVIVRVLRPQVTAVAQQNQGEVPEPQDMKVAEVLFDAADANAIEEVNLAYENVKEVDGLDVSKEGTEAWEAAMKRYDERIDRVETRITARLRDQLGTAKNANEMFRIFSRFNALFVRPHIRGAIRDYQTQLIQRVKDDIESLHDKFKVQYPQSQACKMSHVRDLPPVSGSIIWAKQIDRQLTAYMKRVEDVLGKGWENHVEGQKLKQDGDSFRMKLNTQEIFDDWARKVQQRNLGVSGRIFTIESTRVRGRTGNVLKLKVNFLPEIITLSKEVRNLKWLGFRVPLAIVNKAHQANQLYPFAISLIESVRTYERTCEKVEERNTISLLVAGLKKEVQALIAEGIALVWESYKLDPYVQRLAETVFNFQEKVDDLLIIEEKIDLEVRSLETCMYDHKTFSEILNRVQKAVDDLNLHSYSNLPIWVNKLDMEIERILGVRLQAGLRAWTQVLLGQAEDKAEVDMDTDAPQVSHKPGGEPKIKNVVHELRITNQVIYLNPPIEECRYKLYQEMFAWKMVVLSLPRIQSQRYQVGVHYELTEEEKFYRNALTRMPDGPVALEESYSAVMGIVSEVEQYVKVWLQYQCLWDMQAENIYNRLGEDLNKWQALLVQIRKARGTFDNAETKKEFGPVVIDYGKVQSKVNLKYDSWHKEVLSKFGQMLGSNMTEFHSQISKSRQELEQHSVDTASTSDAVTFITYVQSLKRKIKQFEKQVELYRNGQRLLEKQRFQFPPSWLYIDNIEGEWGAFNDIMRRKDSAIQQQVANLQMKIVQEDRAVESRTTDLLTDWEKTKPVTGNLRPEEALQALTIYEGKFGRLKDDREKCAKAKEALELTDTGLLSGSEERVQVALEELQDLKGVWSELSKVWEQIDQMKEQPWVSVQPRKLRQNLDALLNQLKSFPARLRQYASYEFVQRLLKGYMKINMLVIELKSEALKDRHWKQLMKRLHVNWVVSELTLGQIWDVDLQKNEAIVKDVLLVAQGEMALEEFLKQIREVWNTYELDLVNYQNKCRLIRGWDDLFNKVKEHINSVSAMKLSPYYKVFEEDALSWEDKLNRIMALFDVWIDVQRRWVYLEGIFTGSADIKHLLPVETQRFQSISTEFLALMKKVSKSPLVMDVLNIQGVQRSLERLADLLGKIQKALGEYLERERSSFPRFYFVGDEDLLEIIGNSKNVAKLQKHFKKMFAGVSSIILNEDNSVVLGISSREGEEVMFKTPVSITEHPKINEWLTLVEKEMRVTLAKLLAESVTEVEIFGKATSIDPNTYITWIDKYQAQLVVLSAQIAWSENVETALSSMGGGGDAAPLHSVLSNVEVTLNVLADSVLMEQPPLRRRKLEHLITELVHQRDVTRSLIKSKIDNAKSFEWLSQMRFYFDPKQTDVLQQLSIQMANAKFNYGFEYLGVQDKLVQTPLTDRCYLTMTQALEARLGGSPFGPAGTGKTESVKALGHQLGRFVLVFNCDETFDFQAMGRIFVGLCQVGAWGCFDEFNRLEERMLSAVSQQVQCIQEALREHSNPNYDKTSAPITCELLNKQVKVSPDMAIFITMNPGYAGRSNLPDNLKKLFRSLAMTKPDRQLIAQVMLYSQGFRTAEVLANKIVPFFKLCDEQLSSQSHYDFGLRALKSVLVSAGNVKRERIQKIKREKEERGEAVDEGEIAENLPEQEILIQSVCETMVPKLVAEDIPLLFSLLSDVFPGVQYHRGEMTALREELKKVCQEMYLTYGDGEEVGGMWVEKVLQLYQITQINHGLMMVGPSGSGKSMAWRVLLKALERLEGVEGVAHIIDPKAISKDHLYGTLDPNTREWTDGLFTHVLRKIIDSVRGELQKRQWIVFDGDVDPEWVENLNSVLDDNKLLTLPNGERLSLPPNVRIMFEVQDLKYATLATVSRCGMVWFSEDVLSTDMIFNNFLARLRSIPLDEGEDEAQRRRKGKEDEGEEAASPMLQIQRDAATIMQPYFTSNGLVTKALEHAFQLEHIMDLTRLRCLGSLFSMLHQACRNVAQYNANHPDFPMQIEQLERYIQVRGHQGLHRAHQLRQTTGLRTSEMLHLWGCALSPRRGRAFVEGLGKVQWVSVMQEDWEPLSLVNFAVSVFLLLLKFYKNQSLIPFLIAISGLCHTLVPAGDSRLKMRAELGEYIRRITTVPLPTAPNIPIIDYEVSISGEWSPWQAKVPQIEVETHKVAAPDVVVPTLDTVRHEALLYTWLAEHKPLVLCGPPGSGKTMTLFSALRALPDMEVVGLNFSSATTPELLLKTFDHYCEYRRTPNGVVLAPVQLGKWLVLFCDEINLPDMDKYGTQRVISFIRQMVEHGGFYRTSDQTWVKLERIQFVGACNPPTDPGRKPLSHRFLRHVPVVYVDYPGPASLTQIYGTFNRAMLRLIPSLRTYAEPLTAAMVEFYTMSQQVDEFTPVYNRL

SEQ ID NO: 917700 - protein, 2826 aa, Homo sapiens
MSEPGGGGGEDGSAGLEVSAVQNVADVSVLQKHLRKLVPLLLEDGGEAPAALEAALEEKSALEQMRKFLSDPQVHTVLVERSTLKEDVGDEGEEEKEFISYNINIDIHYGVKSNSLAFIKRTPVIDADKPVSSQLRVLTLSEDSPYETLHSFISNAVAPFFKSYIRESGKADRDGDKMAPSVEKKIAELEMGLLHLQQNIEIPEISLPIHPMITNVAKQCYERGEKPKVTDFGDKVEDPTFLNQLQSGVNRWIREIQKVTKLDRDPASGTALQEISFWLNLERALYRIQEKRESPEVLLTLDILKHGKRFHATVSFDTDTGLKQALETVNDYNPLMKDFPLNDLLSATELDKIRQALVAIFTHLRKIRNTKYPIQRALRLVEAISRDLSSQLLKVLGTRKLMHVAYEEFEKVMVACFEVFQTWDDEYEKLQVLLRDIVKRKREENLKMVWRINPAHRKLQARLDQMRKFRRQHEQLRAVIVRVLRPQVTAVAQQNQGEVPEPQDMKVAEVLFDAADANAIEEVNLAYENVKEVDGLDVSKEGTEAWEAAMKRYDERIDRVETRITARLRDQLGTAKNANEMFRIFSRFNALFVRPHIRGAIRDYQTQLIQRVKDDIESLHDKFKVQYPQSQACKMSHVRDLPPVSGSIIWAKQIDRQLTAYMKRVEDVLGKGWENHVEGQKLKQDGDSFRMKLNTQEIFDDWARKVQQRNLGVSGRIFTIESTRVRGRTGNVLKLKVNFLPEIITLSKEVRNLKWLGFRVPLAIVNKAHQANQLYPFAISLIESVRTYERTCEKVEERNTISLLVAGLKKEVQALIAEGIALVWESYKLDPYVQRLAETVFNFQEKVDDLLIIEEKIDLEVRSLETCMYDHKTFSEILNRVQKAVDDLNLHSYSNLPIWVNKLDMEIERILGVRLQAGLRAWTQVLLGQAEDKAEVDMDTDAPQVSHKPGGEPKIKNVVHELRITNQVIYLNPPIEECRYKLYQEMFAWKMVVLSLPRIQSQRYQVGVHYELTEEEKFYRNALTRMPDGPVALEESYSAVMGIVSEVEQYVKVWLQYQCLWDMQAENIYNRLGEDLNKWQALLVQIRKARGTFDNAETKKEFGPVVIDYGKVQSKVNLKYDSWHKEVLSKFGQMLGSNMTEFHSQISKSRQELEQHSVDTASTSDAVTFITYVQSLKRKIKQFEKQVELYRNGQRLLEKQRFQFPPSWLYIDNIEGEWGAFNDIMRRKDSAIQQQVANLQMKIVQEDRAVESRTTDLLTDWEKTKPVTGNLRPEEALQALTIYEGKFGRLKDDREKCAKAKEALELTDTGLLSGSEERVQVALEELQDLKGVWSELSKVWEQIDQMKEQPWVSVQPRKLRQNLDALLNQLKSFPARLRQYASYEFVQRLLKGYMKINMLVIELKSEALKDRHWKQLMKRLHVNWVVSELTLGQIWDVDLQKNEAIVKDVLLVAQGEMALEEFLKQIREVWNTYELDLVNYQNKCRLIRGWDDLFNKVKEHINSVSAMKLSPYYKVFEEDALSWEDKLNRIMALFDVWIDVQRRWVYLEGIFTGSADIKHLLPVETQRFQSISTEFLALMKKVSKSPLVMDVLNIQGVQRSLERLADLLGKIQKALGEYLERERSSFPRFYFVGDEDLLEIIGNSKNVAKLQKHFKKMFAGVSSIILNEDNSVVLGISSREGEEVMFKTPVSITEHPKINEWLTLVEKEMRVTLAKLLAESVTEVEIFGKATSIDPNTYITWIDKYQAQLVVLSAQIAWSENVETALSSMGGGGDAAPLHSVLSNVEVTLNVLADSVLMEQPPLRRRKLEHLITELVHQRDVTRSLIKSKIDNAKSFEWLSQMRFYFDPKQTDVLQQLSIQMANAKFNYGFEYLGVQDKLVQTPLTDRCYLTMTQALEARLGGSPFGPAGTGKTESVKALGHQLGRFVLVFNCDETFDFQAMGRIFVGLCQVGAWGCFDEFNRLEERMLSAVSQQVQCIQEALREHSNPNYDKTSAPITCELLNKQVKVSPDMAIFITMNPGYAGRSNLPDNLKKLFRSLAMTKPDRQLIAQVMLYSQGFRTAEVLANKIVPFFKLCDEQLSSQSHYDFGLRALKSVLVSAGNVKRERIQKIKREKEERGEAVDEGEIAENLPEQEILIQSVCETMVPKLVAEDIPLLFSLLSDVFPGVQYHRGEMTALREELKKVCQEMYLTYGDGEEVGGMWVEKVLQLYQITQINHGLMMVGPSGSGKSMAWRVLLKALERLEGVEGVAHIIDPKAISKDHLYGTLDPNTREWTDGLFTHVLRKIIDSVRGELQKRQWIVFDGDVDPEWVENLNSVLDDNKLLTLPNGERLSLPPNVRIMFEVQDLKYATLATVSRCGMVWFSEDVLSTDMIFNNFLARLRSIPLDEGEDEAQRRRKGKEDEGEEAASPMLQIQRDAATIMQPYFTSNGLVTKALEHAFQLEHIMDLTRLRCLGSLFSMLHQACRNVAQYNANHPDFPMQIEQLERYIQVRGHQGLHRAHQLRQTTGLRTSEMLHLWGCALSPRRGRAFVEGLGKVQWVSVMQEDWEPLSLVNFAVSVFLLLLKFYKNQSLIPFLIAISGLCHTLVPAGDSRLKMRAELGEYIRRITTVPLPTAPNIPIIDYEVSISGEWSPWQAKVPQIEVETHKVAAPDVVVPTLDTVRHEALLYTWLAEHKPLVLCGPPGSGKTMTLFSALRALPDMEVVGLNFSSATTPELLLKTFDHYCEYRRTPNGVVLAPVQLGKWLVLFCDEINLPDMDKYGTQRVISFIRQMVEHGGFYRTSDQTWVKLERIQFVGACNPPTDPGRKPLSHRSCARGSLSRLQHQ

SEQ ID NO: 917701 - protein, 2509 aa, Homo sapiens; identical to SEQ ID NO: 917678

SEQ ID NO: 917702 - protein, 364 aa, Homo sapiens
MSEPGGGGGEDGSAGLEVSAVQNVADVSVLQKHLRKLVPLLLEDGGEAPAALEAALEEKSALEQMRKFLSDPQVHTVLVERSTLKEDVGDEGEEEKEFISYNINIDIHYGVKSNSLAFIKRTPVIDADKPVSSQLRVLTLSEDSPYETLHSFISNAVAPFFKSYIRESGKADRDGDKMAPSVEKKIAELEMGLLHLQQNIEIPEISLPIHPMITNVAKQCYERGEKPKVTDFGDKVEDPTFLNQLQSGVNRWIREIQKVTKLDRDPASGTALQEISFWLNLERALYRIQEKRESPEVLLTLDILKHGKRFHATVSFDTDTGLKQALETVNDYNPLMKDFPLNDLLSATELDSKSFRGKSFPHAE

SEQ ID NO: 917703 - protein, 71 aa, Homo sapiens
VTLRSTRNASFTPSLTQLLVADTRERQCVVTLPVYLNFTRADLIFTVDFEIATKEDPRSFYERGVAVLCTE

SEQ ID NO: 917704 - protein, 129 aa, Homo sapiens
MQDVESYDPVLNPVLNREVRRTGGRVLITLGDQDIDLSPSFVIFLSTRDPTVRNGTLPQGNLAGCGFETGLRQTVLLPILEVEFPPDLCSRVTFVNFTVTRSSLQSQCLNEVLKAERPDVDEKRSDLLK

SEQ ID NO: 917705 - protein, 318 aa, Homo sapiens
MGTSGTHSRPQPHTQTHIQRIPLKEHTCKSPHRGTHKWGHQEHRATATHTDPHTEDPTQGAHVRKSPTEGHTNGDIRNTGPQPHTQTHIQRIPLKEHTCESPHRGAHKWGHQEHRATATHTDPHTEDPTQGAHVRKSPQRGTQMGTSGTQGHSHTHRPTYRGSHSRSTSAKVPTEGHTNGDIRNTLGATATHTDPHTEDPTQGAHVQKSPQRGTQVGTSGTQGHSHTHRPTYRGSHSRNTRVKVPTEVHTGSTQEQAHHRQDPKWKSRQTPRRQVDRAQSQTTLRDRGEQWNQNSGYGHGDSRKGNSSMDADRTNPKL

SEQ ID NO: 917706 - protein, 533 aa, Homo sapiens
METLTSRHEKRALHSQASAISQDREEKIMSQEPLSFKDVAVVFTEEELELLDSTQRQLYQDVMQENFRNLLSVGERNPLGDKNGKDTEYIQDEELRFFSHKELSSCKIWEEVAGELPGSQDCRVNLQGKDFQFSEDAAPHQGWEGASTPCFPIENSLDSLQGDGLIGLENQQFPAWRAIRPIPIQGSWAKAFVNQLGDVQERCKNLDTEDTVYKCNWDDDSFCWISCHVDHRFPEIDKPCGCNKCRKDCIKNSVLHRINPGENGLKSNEYRNGFRDDADLPPHPRVPLKEKLCQYDEFSEGLRHSAHLNRHQRVPTGEKSVKSLERGRGVRQNTHIRNHPRAPVGDMPYRCDVCGKGFRYKSVLLIHQGVHTGRRPYKCEECGKAFGRSSNLLVHQRVHTGEKPYKCSECGKGFSYSSVLQVHQRLHTGEKPYTCSECGKGFCAKSALHKHQHIHPGEKPYSCGECGKGFSCSSHLSSHQKTHTGERPYQCDKCGKGFSHNSYLQAHQRVHMGQHLYKCNVCGKSFSYSSGLL

SEQ ID NO: 917707 - protein, 430 aa, Homo sapiens
SLLTMSLEYLTLYPLVILGYISTQAMPPLFSLGYHQCRWNYEDEQDVKAVDAGFDEHDIPYDAMWLDIEHTEGKRYFTWDKNRFPNPKRMQELLRSKKRKLVVISDPHIKIDPDYSVYVKAKDQGFFVKNQEGEDFEGVCWPGLSSYLDFTNPKVREWYSSLFAFPVYQGSTDILFLWNDMNEPSVFRGPEQTMQKNAIHHGNWEHRELHNIYGFYHQMATAEGLIKRSKGKERPFVLTRSFFAGSQKYGAVWTGDNTAEWSNLKISIPMLLTLSITGISFCGADIGGFIGNPETELLVRWYQAGAYQPFFRGHATMNTKRREPWLFGEEHTRLIREAIRERYGLLPYWYSLFYHAHVASQPVMRPLWVEFPDELKTFDMEDEYMLGSALLVHPVTEPKATTVDVFLPGSNEVPLPSRNLRKRLNATTAE

SEQ ID NO: 917708 - protein, 554 aa, Homo sapiens
SLLTMSLEYLTLYPLVILGYISTQAMPPLFSLGYHQCRWNYEDEQDVKAVDAGFDEHDIPYDAMWLDIEHTEGKRYFTWDKNRFPNPKRMQELLRSKKRKLVVISDPHIKIDPDYSVYVKAKDQGFFVKNQEGEDFEGVCWPGLSSYLDFTNPKVREWYSSLFAFPVYQGSTDILFLWNDMNEPSVFRGPEQTMQKNAIHHGNWEHRELHNIYGFYHQMATAEGLIKRSKGKERPFVLTRSFFAGSQKYGAVWTGDNTAEWSNLKISIPMLLTLSITGISFCGADIGGFIGNPETELLVRWYQAGAYQPFFRGHATMNTKRREPWLFGEEHTRLIREAIRERYGLLPYWYSLFYHAHVASQPVMRPLWVEFPDELKTFDMEDEYMLGSALLVHPVTEPKATTVDVFLPGSNEVWYDYKTFAHWEGGCTVKIPVALDTIPVFQRGGSVIPIKTTVGKSTGWMTESSYGLRVALSTKGSSVGELYLDDGHSFQYLHQKQFLHRKFSFCSSVLINSFADQRGHYPSKCVVEKILVLGFRKEPSSVTTHSSGEKAVHS

SEQ ID NO: 917709 - protein, 202 aa, Homo sapiens
MHTALCARQFLLNSVAQKFAVSLWSLGRTRVASLGPSWFLLMQTVTRPNTARPGTPRLRRSRSSGKPLSAPQKPALGKGGAGVQTAGAAASGKGGAGVQTAGAAARGKEGVLQQQTAGAAAWGRGLCWGADGGGCTWGAGRAGVQTAGAAVSCPSLRVSGAASLRFPPAALALRSLWPGEDPSCIGGHSKSAVWSLHCLFRV

SEQ ID NO: 917710 - protein, 741 aa, Homo sapiens
AGKIMNQCLEGDPVACEDVAVNFTQEEWALLDISQRKLYREVMLETFRNLTSIGKKWKDQNIEYEYQNPRRNFRSLIEGNVNEIKEDSHCGETFTQVPDDRLNFQEKKASPEAKSCDNFVCGEVGIGNSSFNMNIRGDIGHKAYEYQDYAPKPYKCQQPKKAFRYHPSFRTQERNHTGEKPYACKECGKTFISHSGIRRRMVMHSGDGPYKYYILSMKELTLERNRMNVNNVLNPLVILLPIEYMKELTLEKSLMNVSNVGKHSIVPVLFKHIKEPTLGESHMNVNNVANPSVGVIPFKYMKELTLGRSPVNVANVIKHSVVTDPILDIKGVTRERSLINVRNVEKHSRIPVPFVDMKGPTLRKNLMNVSSVGKHYLISFQTHLRMRSGERPYKFPFNIMKGLTLERNPMSVSNVGKPSDVPHTFEGMVGLTGEKPYECKECGKAFRSASHLQIHERTQTHIRIHSGERPYKCKTCGKGFYSPKSFQRHEKTHTAEKPYECKQCGKAFSSSSSFPYHERTHTGEKPYECKQCGKAFRSASILQMHAGTHPEEKPYECKQCGKAFRSAPHLRIHGRTHTGEKPYECKECGKAFRSAKNLRIHERTQTHVRMHSVERPYKCKICGKGFYSAKSFQIHEKSYTGGKPYECKQCGLQLPRTAAESVDSEKLQGPGKQETHVQLLSLYCLRRVLDCSREFCRRRRNIWKLKNACALCLLPWHLGGLLPTTLCLKIQKSAAHGGGYQ

SEQ ID NO: 917711 - protein, 164 aa, Homo sapiens
KETIVYTGSVERAPGECSGMTLLSRCPEANIAHPVATVPKSACREESSSPGAEAECKSAGPALQHAGSLPVHPICCFLGVVATSSKGGWICSPVHSPYPRGTCGALATSSQGAAEEVGSLLIPVPSENWRLPSPNHTCNKVFCLLLTAPENLLRENKTFDCCSS

SEQ ID NO: 917712 - protein, 259 aa, Homo sapiens
ATPGPAAPPVQWFSTVVVLSMAGVAVNVYVPWLTTLAMHPGVPEGPGVSEPGPRELCAFVSGAAAHMLRALQPRRTRPPKRRPNHRRFLHNQICRQFTKIEAATQRLALSILSQEAPPQRPSLQKPPPPPPSPFLGVACAVAPTEAPHASASLSLAALDTSTLDLFDNIALTPECASMPWDPSSGSDAPLPAPGLSHRDLGQLDLRQVPHFCGPLPLPQHALGEEADLVAPDWGWVDCWEVPRAWDSQGIPEGWGTSSP

SEQ ID NO: 917713 - protein, 170 aa, Homo sapiens
AAREPLQRTREMKMGRRIHLELRNRTPSDVKELVLDNKNLKSLDLFNCEVTNLNDYRENVFKLLLQLTYLDGYDRDDKEAPNLDAEGYVEGLDEEEEDEDEEEYDEDAQVVEDEEEEEGEEEDVSGEEEEDEKGYNDGEVDDEEDEEELREEERGQKRKGEPEDEGEDDD

SEQ ID NO: 917714 - protein, 170 aa, Homo sapiens; identical to SEQ ID NO: 917713

SEQ ID NO: 917715 - protein, 522 aa, Homo sapiens
AVTPQRLAQCPAHSWCSINICQMVEEQRPLCPQEVNVMNTPHPLHKQEKAPAHKNPVCFLRSPAAHSRTTRKPSPTFPLFSSVTWFLSQYQIQALGTKRVRRLPQEACPATFLNVGAEISITLEPAQPSEGDNVTLVVHGLSGELLAYSWYAGPTLSVSYLVASYIVSTGDETPGPAHTGREAVRPDGSLDIQGILPRHSGTYILQTFNRQLQTEVGYGHVQVHEILAQPTVLANSTALVERRDTLRLMCSSPSPTAEVRWFFNGGALPVALRLGLSPDGRVLARHGIRREEAGAYQCEVWNPVSVSRSEPINLTVYFGPERVAILQDSTTRTGCTIKVDFNTSLTLWCVSRSCPEPEYVWTFNGQALKNGQDHLNISSMTAAQEGTYTCIAKNTKTLLSGSASVVVKLSAAAVATMIVPVPTKPTEGQDVTLTVQGYPKDLLVYAWYRGPASEPNRLLSQLPSGTWIAGPAHTGREVGFPNCSLLVQKLNLTDTGRYTLKTVTVQGKTETLEVELQVAPLG

SEQ ID NO: 917716 - protein, 179 aa, Homo sapiens
MCGHNNFKVRNDYTDEKLEGTKEEGGRTQKASLLRSDPGTTCFSSHCPGHHFPLRVGKSVVLVTTSWRFSPSGKVQTPHPPNLDGPRRANRNTFLWTCHVGIPDLPALPAPASFLGTQLTLKKASDGPRTEKVTQDLAQPFWTTGRQLRFVLHLSLQQKDLSKCWRGAEVVLGPTRLFL

SEQ ID NO: 917717 - protein, 180 aa, Homo sapiens
MVPREHRRSDRPQHQLLMAHTSWGCKACPWLWQRDDRAVAPAGVAVAAARVARAMDEGQDMESRGRNEPRGHRAQLSGSHGEAQRETHSQVAVDLGDSSLVHLSSHNVPGPMRLARGRETQNDSRHGTLLGEVSQPRNGGLGMLNAMAQAASVLMKPPYQCVFFINSGGGGVVVGIRTCV

SEQ ID NO: 917718 - protein, 366 aa, Homo sapiens
MLIILLEPAVQGVGVSPGKSILQVLNLISANMLTKLLLIPHYSSHTCSCTFFFNISVGFTSKGLSPKENNKEELYHLVILERKESHGINNFDLKEVWENMPKFDSLWDYDVKNYKGMPLTCNKNLTHRKDQQHNKSSIHFSLKQSVSIRDSAHQYFIHDKPFIRNLLKLKNNIRYAGNKYVKCFENKIGLSLQAQLAELQRFQTGEKMYECNPVEKSINSSSVSPLPPCVKNICNKYRKILKYPLLHTQYGRTHIREKSYKCNDCGKAFSKSSNLTNHQRIHSGQRPYKCNECGKAFNQCSNLTRHQRVHTGEKPYQCNICGKVCSQNSNLASHQRMHTGEKPYKCNECGLGSMIHELLPWSRTIL

SEQ ID NO: 917719 - protein, 78 aa, Homo sapiens
EADLAGLLALSGESPSFGFKPAPRGPQVPTLRCRVLGSPCRLKPRTCSFLSRRGPKTFPVPSLREGLEICVHFGLKSF

SEQ ID NO: 917720 - protein, 369 aa, Homo sapiens
MALSQGLFTFKDVAIEFSQEEWECLDPAQRALYRDVMLENYRNLLSLDEDNIPPEDDISVGFTSKGLSPKENNKEELYHLVILERKESHGINNFDLKEVWENMPKFDSLWDYDVKNYKGMPLTCNKNLTHRKDQQHNKSSIHFSLKQSVSIRDSAHQYFIHDKPFIRNLLKLKNNIRYAGNKYVKCFENKIGLSLQAQLAELQRFQTGEKMYECNPVEKSINSSSVSPLPPCVKNICNKYRKILKYPLLHTQYGRTHIREKSYKCNDCGKAFSKSSNLTNHQRIHSGQRPYKCNECGKAFNQCSNLTRHQRVHTGEKPYQCNICGKVCSQNSNLASHQRMHTGEKPYKCNECGLGSMIHELLPWSRTIL

SEQ ID NO: 917721 - protein, 78 aa, Homo sapiens; identical to SEQ ID NO: 917719

SEQ ID NO: 917722 - protein, 78 aa, Homo sapiens; identical to SEQ ID NO: 917719

SEQ ID NO: 917723 - protein, 217 aa, Homo sapiens
MALSQGLFTFKDVAIEFSQEEWECLDPAQRALYRDVMLENYRNLLSLDEDNIPPEDDISVGFTSKGLSPKENNKEELYHLVILERKESHGINNFDLKEVWENMPKFDSLWDYDVKNYKGMPLTCNKNLTHRKDQQHNKSSIHFSLTKKKKNERKTMQQGERTENTQDKREHDTKKTTQKKQSRDNNSTNTNEGGETNNTAGGPLRNTTSSKERHAKR

SEQ ID NO: 917724 - protein, 333 aa, Homo sapiens
MRITSLQKMVTTLVHLYIFPYISVGFTSKGLSPKENNKEELYHLVILERKESHGINNFDLKEVWENMPKFDSLWDYDVKNYKGMPLTCNKNLTHRKDQQHNKSSIHFSLKQSVSIRDSAHQYFIHDKPFIRNLLKLKNNIRYAGNKYVKCFENKIGLSLQAQLAELQRFQTGEKMYECNPVEKSINSSSVSPLPPCVKNICNKYRKILKYPLLHTQYGRTHIREKSYKCNDCGKAFSKSSNLTNHQRIHSGQRPYKCNECGKAFNQCSNLTRHQRVHTGEKPYQCNICGKVCSQNSNLASHQRMHTGEKPYKCNECGLGSMIHELLPWSRTIL

SEQ ID NO: 917725 - protein, 531 aa, Homo sapiens
MQASADQVERDILETQKRLQQDRLNSEQSQALQHQQETGSSLKEAEVLLKDLFLDVDKARRLKHPQAEETEKDIEQLHERVTQECAEYCALYEKMVLPPRRGIQGRLGTRAGAETEAGLRRPVWAGHGGAGGTDRGAQHRAEGDQRPRRAAAEPGGAGGTEGGVVARAEPGQPVHALQGCTWQLSALAEQQRRILQQDWSDLMADPAGVRREYEVGWQRAILVLTAAPHPTRPQHFKQHELLSQEQSVNQLEEDGKRMVELRHPAVGPIQAHQEALKMEWQNFLNLCICQETQLQHVEDYSRVSPRAAAGRQGGRAGALAARAEREELPVPAMEPQPTAWGSPHPEAVLQLEVAPESSGPCTDTAKDQQSDKLPDLMPPAVATGLSPGAESIAGDRRGREEVASMAPASSSHAAPSPGHGASLGVRDQGVQSELLYLTKERPLLFTRATALLPQDLFILPVLGLSICKLEVLRAGKGGCEEGFGQLLLLSEVASSSRHGGLSTTGLLGYLPLICSLVRALLNRQARGAGTR

SEQ ID NO: 917726 - protein, 119 aa, Homo sapiens
MKPESCLICQATQQHQEKEQPWWPQTVVTGSQTSTPLRVPSLTPPLPTPEWSFQMTNLVRSLPCQEPLHGFFVNQGSSPDLSVFIYKNDTGTRKSEMRKAVCGHPLVNIEKSEAEQPRT

SEQ ID NO: 917727 - protein, 119 aa, Homo sapiens; identical to SEQ ID NO: 917726

SEQ ID NO: 917728 - protein, 533 aa, Homo sapiens
MAQPSAPAASMLLPCPECPSGPRFMTCCLSVSTFCSPSLRRPPGFVQCLLLKLCSKFNASCDLPYTTWGPSPPQPFSCVPASCRRHHDHHHPPVHLLQLHQGLLRPGSGSSRTSCRLSGGLGAGSCRLGSAGGLGSALRGSSYSSCYCFGSGGGYGSSFGGVDGLLAGGEKATMQNLNDRLASYLDKMRALEEANTELEVKIRDWYQRQAPGPARDYSQYYRTIEELQNKILTATLNNANILLQIDNAHLAAADFCTKFETEQALRLSVEAAINGLRRVLDGLTLARADLEMQIENLKEELAYLKKNHEEEINALRGQVGGEINVEMDAAPGMDLSRILNEMREYTDSKATARCLGGAHSSASCVDHRVTRCINRPGAELKLGSGGWVGRLTPPCPVSCLQTEELKREVATNSELVQSGKSKISELWRTMQALEIELQSQLSMKASLEGNLAETESRYCMQLSQIQGLIGSVEEQLAQLRCETEQQNQQYKILLDVKTRLEQEIATYHRLLEGEDAQLLCPGSVGLYFSFLLP

SEQ ID NO: 917729 - protein, 553 aa, Homo sapiens
MSDFDEFERQLNENKQERDKENRHRKRSHSRSRSRDRKRRSRSRDRRNRDQRSASRDRRRRSKPLTRGAKEEHGGLMCASLPAPSSLMSTPFTFLTPVHPVPPISSPGPSTGKSPLTLKPAPLSQALPQTLSFPGESGAYLVAGRVKGCLGGGSQAHCCRSPRHEKKKKVRKYWDVPPPGFEHITPMQYKAMQDSSHCSSPHHDPDGLAVTPTPVPVVGSQMTRQARRLYVGNIPFGITENPEIKELFPFLFKVKYCGAEIPRSNKKFATIEAMMDFFNAQMRLGGLTQAPGNPVLAVQINQDKNFAFLEFRSVDETTQAMAFDGIIFQGQSLKIRRPHDYQPLPGMSENPSVYVPGIGAVLSALHGRQFYDTGIGAVLSALHARQFYDTGIGAVLSALHGRQFYDTGIGAVLSALHGRQFYDTGIGAVLSALHGRQFYDTGIGAVLSALHARQTVQVLGDNLVLELKSSSSLPIGVVSTVVPDSAHKLFIGGLPNYLNDDQVKELLTSFGPLKAFNLVKDSATGLSKGYAFCEYVDINVTDQGTGREAANLR

SEQ ID NO: 917730 - protein, 222 aa, Homo sapiens
MGAQPGEPQNTCSRIQTLFRRVKTLLIKAPPPPQPPPPPPSWNPGCTHVYGYAFGHMHDNNLEHLPSQQVLDTGEQLMVPVEVLEVDNKEALWKFLLSGAMAGAVSRTGTAPLDRAKVYMQVYSSKTNFTNLLGGLQSMVQEGGFRSLWRGNGINVLKIAPEYAIKFSVFEQCKNYFCGIQGSPPFQERLLAGSLAVAISQTLINPMENFFLFSTLSLILSA

SEQ ID NO: 917731 - protein, 171 aa, Homo sapiens
PVYEGDVRKKDRTLRFREAKELPEVIQRIMTAAKGPDACLHSGPSKAWGRAGRADFQNSQVVSGPCCGERDLRAARTSDAVRLPSDRLAPVLWCPVATKDKRKGRTQKQSLYDMKGLAKPPARSVSRLLLLFTHKRVCHIHTPTPTTTDLTHSPQTYTLPMNQDLPGRLCH

SEQ ID NO: 917732 - protein, 190 aa, Homo sapiens
CCGGQGLLVGTDLQSLSPGSRLSKIYSQSTLSLSTVANEAHNNLGVKRPTSRRLPGSRERDWENGSNASSPASVPEYTGPRLYKEPSAKSNKFIIHNALSHCCLAGKVNEPQKNRILEEIEKSKANHFLILFRDSSCQFRALYTLSGETEDCRGWQGMGPGPSRPPWWKASTSTTRTASASPRSPPRPCP

SEQ ID NO: 917733 - protein, 283 aa, Homo sapiens
MLHTGYRWMMPTWLPMTSAPSEAGSLELPQGLDKLTLPGANLEMQPENLKEDLVYLKKNHEEKVLGPRDSNPRIEIQGPAGAVRRSYMPCPVASFSAELCAALSWGSLLPEKQDTRKVDKDVSVKMDTVPGVNLSCILNEMRDQDKKLVEKSCKDAQGWFFSVEQPLSCAPLVKVSINPCGPLCLPERGAELQGGHQHRGPAERQDGDVELYISVQNLSRPSSARTQLAQLQGLIRSMEQQLCELCCDAEHQDHEHQVLLDVKTRLEQEIATYSRLLEVEDAH

SEQ ID NO: 917734 - protein, 283 aa, Homo sapiens; identical to SEQ ID NO: 917733

SEQ ID NO: 917735 - protein, 283 aa, Homo sapiens; identical to SEQ ID NO: 917733

SEQ ID NO: 917736 - protein, 47 aa, Homo sapiens
MGRWAVSEDRVICPVALVGLVKSVFKLSPALSRGSGALEGKYGYTFR

SEQ ID NO: 917737 - protein, 148 aa, Homo sapiens
RWALTVNMTFLSQVLSFPMSAGRVSVVVFSLCSCSSGVPKRCLRGSLGNSNERRWLAQQVELRDTHCCLSSTSCSYKLGRGIRGLGTYTHPHTRAHAHFNNPDWARTKSSQSVSLAGVLTGHGPAALLFSSWKPPALGGQPFCSLANG

SEQ ID NO: 917738 - protein, 148 aa, Homo sapiens; identical to SEQ ID NO: 917737

SEQ ID NO: 917739 - protein, 148 aa, Homo sapiens; identical to SEQ ID NO: 917737

SEQ ID NO: 917740 - protein, 148 aa, Homo sapiens; identical to SEQ ID NO: 917737

SEQ ID NO: 917741 - protein, 490 aa, Homo sapiens
QKSLQFSRLQGKSRRPRNHPPVQPSPAALRPPSPATGPVCPAGACDEGPVELRTRPKATGLPGAALPLRKRPLRRPSPEPAAPRGRCGPCRPPGPSARRLRPAGGPRAPPRPGPPEALYYPGALLPLYPTRAMGSPFPLVNLPTPLYPMMCPMEHPLSADIAMATRADEDGDTPLHIAVVQGNLPAVHRLVNLFQQGGRELDIYNNLRQTPLHLAVITTLPSVVRLLVTAGASPMALDRHGQTAAHLACEHRSPTCLRALLDSAAPGTLDLEARNYDGLTALHVAVNTECQETVQLLLERGADIDAVDIKSGRSPLIHAVENNSLSMVQLLLQHGANVNAQMYSGSSALHSASGRRLLPLVRTLVRSGADSSLKNCHNDTPLMVARSRRVIDILRGKATRPASTSQPDPSPDRSANTSPESSSRLSSNGLLSASPSSSPSQSPPRDPPGFPMAPPNFFLPSPSPPAFLPFAGVLRGPGRPVPPSPAPGGS

SEQ ID NO: 917742 - protein, 490 aa, Homo sapiens; identical to SEQ ID NO: 917741

SEQ ID NO: 917743 - protein, 486 aa, Homo sapiens
QKSLQFSRLQGKSRRPRNHPPVQPSPAALRPPSPATGPVCPAGACDEGPVELRTRPKATGLPGAALPLRKRPLRRPSPEPAAPRGRCGPCRPPGPSARRLRPAGGPRAPPRPGPPEALYYPGALLPLYPTRAMGSPFPLVNLPTPLYPMMCPMEHPLSADIAMATRADEDGDTPLHIAVVQGNLPAVHRLVNLFQQGGRELDIYNNLRQTPLHLAVITTLPSVVRLLVTAGASPMALDRHGQTAAHLACEHRSPTCLRALLDSAAPGTLDLEARNYDGLTALHVAVNTECQETVQLLLERGADIDAVDIKSGRSPLIHAVENNSLSMVQLLLQHGANVNAQMYSGSSALHSASGRRLLPLVRTLVRSGADSSLKNCHNDTPLMVARSRRVIDILRGKATRPASTSQPDPSPDRSANTSPESSSRLSSNGLLSASQCHTAPVMSLTLFAVTPTHCSHPFSHVGLASHSLNVPGMLHLMPLHLQFSLT

SEQ ID NO: 917744 - protein, 482 aa, Homo sapiens
MIYFWEAQRGNLTERVKTLFLAENSVKLKNLTGYTAYMVSVAAFNAAGDGPRSTPTQGQTQQAAPSAPSSVKFSELTTTSVNVSWEAPQFPNGILEGYRLVYEPCSPVDGVSKIVTVDVKGNSPLWLKVKDLAEGVTYRFRIRAKTFTYGPEIEANVTTGPGEGAPGPPGVPIIVRYSSAIAIHWSSGDPGKGPITRYVIEARPSDEGLWDILIKDIPKEVSSYTFSMDILKPGVSYDFRVIAVNDYGFGTPSSPSQSVPAQKANPFYEEWWFLVVIALVGLIFILLLVFVLIIRGQSKKYAKKTDSGNSAKSGALGHSEMMSLDESSFPALELNNRRLSVKNSFCRKNGLYTRSPPRPSPGSLHYSDEDVTKYNDLIPAESSSLTEKPSEISDSQGSDSEYEVDSNHQKAHSFVNHYISDPTYYNSWRRQQKGISRAQAYSYTESDSGEPDHTTVTNSTSTQQGSLFRPKASRNSNAPEPP

SEQ ID NO: 917745 - protein, 482 aa, Homo sapiens; identical to SEQ ID NO: 917744

SEQ ID NO: 917746 - protein, 599 aa, Homo sapiens
MGWAWGDPEKRKGFGWARWLTPVIPALWEAKAGRSPEDIPPLLGDTEKGWFQLELGGAIEGGGRRRGKENRFLYLPFTLSHCCFPTRCLYFWPELCLPQPCVFLTVSFSLLEPPPCSSVPSLFPYHPRSSFLRLLPPQQKRDLAGSAQPVSPEDTGQVFQVSHSFPHPLYDMSLLKNRFLRPGDDSSHDLMLLRLSEPAELTDAVKVMDLPTQEPALGTTCYASGWGSIEPEEWGPAHNSVFAWPVVLTPKKLQCVDLHVISNDVCAQVHPQKVTKFMLCAGRWTGGKSTCSGDSGGPLVCNGVLQGITSWGSEPCALPERPSLYTKVVHYRKWIKDTIHLHYAGEAGAMTSCSCDYPCSAPLPSRPNHGAVDVRPLVDVACVVPGRGLVCQQGKGGVLENEGFIGLLREAPQPQTHHLAVDTCVSMWDLVLSIALSVGCTGAVPLIQSRIVGGWECEKHSQPWQVAVYSHGWAHCGGVLVHPQWVLTAAHCLKKNSQVWLGRHNLFEPEDTGQRVPVSHSFPHPLYNMSLLKHQSLRPDEDSSHDLMLLRLSEPAKITDVVKVLGLPPRSQHWGPPATPQAGAASNQRSSCAPGVFSV

SEQ ID NO: 917747 - protein, 599 aa, Homo sapiens; identical to SEQ ID NO: 917746

SEQ ID NO: 917748 - protein, 136 aa, Homo sapiens
AKTGALFPLLDSLPIFLWEWVLETFLSVPESWELLSVICLRGSERWSCLGSYWGQSFSLCLSSFTLRVILGVHLSVMVCFKVSHHGALSHVPCLKSLLCTPRWCITGSGSRTPSQPTPECPCPTPTSSKFKSTSRS

SEQ ID NO: 917749 - protein, 475 aa, Homo sapiens
MGWAWGDPEKRKGFGWARWLTPVIPALWEAKAGRSPEDIPPLLGDTEKGWFQLELGGAIEGGGRRRGKENRFLYLPFTLSHCCFPTRCLYFWPELCLPQPCVFLTVSFSLLEPPPCSSVPSLFPYHPRSSFLRLLPPQQKRDLAGSAQPVSPEDTGQVFQVSHSFPHPLYDMSLLKNRFLRPGDDSSHDLMLLRLSEPAELTDAVKVMDLPTQEPALGTTCYASGWGSIEPEEWGPAHNSVFAWPVVLTPKKLQCVDLHVISNDVCAQVHPQKVTKFMLCAGRWTGGKSTCSGDSGGPLVCNGVLQGITSWGSEPCALPERPSLYTKVVHYRKWIKDTIHLHYAGEAGAMTSCSCDYPCSAPLPSRPNHGAVDVRPLVDVACVVPGRGLVCQQGKGGVLENEGFIGLLREAPQPQTHHLAVDTCVSMWDLVLSIALSVGCTGIARSGWVGTTCLSLKTQARGSLSATASHTRSTI

SEQ ID NO: 917750 - protein, 284 aa, Homo sapiens
CCDNTALVPRSLSAGSMMKSGSQSAPMPAPYVLRRPEGQASVPHLQGPGSMENSLSGCLETAARALSGPRKAGLRSSRMPEVQLERELLSRVGRGRHGVRGSLGDGASGALIAMVTTLPLLGVPLLLVHDAEDVTQHGGPQVDVGHGILDKQGRVRREPSMSRCSRSPLVTDCDRLLPRNFLDRRLRLEDEEEGCSSKDSPSGSPALLLRKEVSPKASPARPTCMVWRKSPSGALIISAVRSARERRLECTELDTSCLRIGILLDGRGGIQSRGVILQIWLEFQ

SEQ ID NO: 917751 - protein, 284 aa, Homo sapiens; identical to SEQ ID NO: 917750

SEQ ID NO: 917752 - protein, 824 aa, Homo sapiens
YRSYLRPITQAPSETATDAASLFALQAFLRSRDRSHQKFYNMMTKTQMFIRFIEECSFVSDKDASLAFFDDCVDKVDMDKSGEVRLIELDESFKSEHTVFVTPPEIPHLPNGEEPPLQYSYNGFPVLRNNLFERPEGFLQAKKNKLPSKSSMSHCALPQLLFKMHYFILDFMYMVTSVFRYNFELVFQVCYRILMQLCGQYDQPVLAVRVLFEMQKAGIDPNAITYGYYNKAVLESTWPSRSRSGYFLWTKVRNVVLGVTQFKRALKKHAHLSQTTLSGGQSDLGYNSLSKDEVRRGDTSTEDIQEEKDKKGSDCSSLSESESTKGSADCLPKLSYQNSSSIVRLTGTSNNSAGKISGESMESTPELLLISSLEDTNETRNIQSRCFRKRHKSDNETNLQQQVVWGNRNRNLSGGVLMGFMLNRINQEATPGDIVEKLGADAKILSNVISKSTRPNTLDIGKPPLRSKRDSLEKESSDDDTPFDGSNYLADKVDSPVIFDLEDLDSETDVSKAGCVATQNPKRIQRMNSSFSVKPFEKTDVATGFDPLSLLVAETEQQQKEEEEEDEDDSKSISTPSARRDLAEEIVMYMNNMSSPLTSRTPSIDLQRACDDKLNKKSPPLVKACRRSSLPPNSPKPVRLTKSKSYTKSEEKPRDRLWSSPAFSPTCPFREESQDTLTHSSPSFNLDTLLVPKLDVLRNSMFTAGKGVAEKASKWYSRFTMYTTSSKDQSSDRTSLSSVGAQDSESTSLTDEDVCHELEGPISSQETSATSGTKRIDLSRISLESSASLEGYFAFPLPVYENTYFPTALSTNYVGTLGFLPSDR

SEQ ID NO: 917753 - protein, 248 aa, Homo sapiens
LSQTVSGMDLRQTSADVQQRGLTVRTKTNTERNSININKKDVHTKTLSEGHQHRRAKENQEDLGLWEEKFGKFVDIKANETKLSILVSTGPSSIGLDFSLHGFEHLYGIPQHAESHQLKNTGDGDAYRLYNLDVYGYQIYDKMGIYGSVPYLLAHKLGRTIGIFWLNASETLVEINTEPAVEYTLTQMGPVAAKQKVRSRTHVHWMSESGIIDVFLLTGPTPSDVFKQYSHLTEKGCSKHCSCCCSPA

SEQ ID NO: 917754 - protein, 235 aa, Homo sapiens
MTTSIRQFTSSSSIKGSSGLGGGSSRTSCRLSGGLGAGSCRLGSAGGLGSTLGGSSYSSCYSFGSGGGYGSSFGGVDGLLAGGEKATMQNLNDRLASYLDKVRALEEANTELEVKIRDWYQRQAPGPARDYSQYYRTIEELQNKIPHSTHVEQRPTYTATDKTNDPNRLLDDYRTQVMRQKQSPDSQNVEADIDGLTQGDWTEHEPGQRRPGECRKRTVNGGAGHNRRRTTQRRR

SEQ ID NO: 917755 - protein, 470 aa, Homo sapiens
MTTSIRQFTSSSSIKGSSGLGGGSSRTSCRLSGGLGAGSCRLGSAGGLGSTLGGSSYSSCYSFGSGGGYGSSFGGVDGLLAGGEKATMQNLNDRLASYLDKVRALEEANTELEVKIRDWYQRQAPGPARDYSQYYRTIEELQNKEDLFRTLVWAQPPPSDDLTTLPSPLILTATVDNANILLQIDNARLAADDFRTKFETEQALRLSVEADINGLRRVLDELTLARADLEMHIENLKEELAYLKKNHEVRWLGQKVKDAEEWVAEPWGWAMAEAVRESTAGALGLVTLEGFPVCGALILGEMNAPRGQVGGEINVEMGAAPGVDLSRILNEMREQYEKMAEKNRKDAEDWFFSKTEELNREVATNSELVQSGKSEISELRCTMQALEIELQSQLSMKASLEGNLAETENRYCMQLSQIQGLIGSVEERLAQLLCEMEQQNQEYKILLDMKMRLELEITTYHRLLEGEDAQ

SEQ ID NO: 917756 - protein, 498 aa, Homo sapiens
FEDLIRHAVCRPLLSSPSPVCLPPAAATMTTSIRQFTSSSSIKGSSGLGGGSSRTSCRLSGGLGAGSCRLGSAGGLGSTLGGSSYSSCYSFGSGGGYGSSFGGVDGLLAGGEKATMQNLNDRLASYLDKVRALEEANTELEVKIRDWYQRQAPGPARDYSQYYRTIEELQNKEDLFRTLVWAQPPPSDDLTTLPSPLILTATVDNANILLQIDNARLAADDFRTKFETEQALRLSVEADINGLRRVLDELTLARADLEMHIENLKEELAYLKKNHEVRWLGQKVKDAEEWVAEPWGWAMAEAVRESTAGALGLVTLEGFPVCGALILGEMNAPRGQVGGEINVEMGAAPGVDLSRILNEMREQYEKMAEKNRKDAEDWFFSKTEELNREVATNSELVQSGKSEISELRCTMQALEIELQSQLSMKASLEGNLAETENRYCMQLSQIQGLIGSVEERLAQLLCEMEQQNQEYKILLDMKMRLELEITTYHRLLEGEDAQ

SEQ ID NO: 917757 - protein, 445 aa, Homo sapiens
MTTSIRQFTSSSSIKGSSGLGGGSSRTSCRLSGGLGAGSCRLGSAGGLGSTLGGSSYSSCYSFGSGGGYGSSFGGVDGLLAGGEKATMQNLNDRLASYLDKVRALEEANTELEVKIRDWYQRQAPGPARDYSQYYRTIEELQNKILTATVDNANILLQIDNARLAADDFRTKFETEQALRLSVEADINGLRRVLDELTLARADLEMHIENLKEELAYLKKNHEVRWLGQKVKDAEEWVAEPWGWAMAEAVRESTAGALGLVTLEGFPVCGALILGEMNAPRGQVGGEINVEMGAAPGVDLSRILNEMREQYEKMAEKNRKDAEDWFFSKTEELNREVATNSELVQSGKSEISELRCTMQALEIELQSQLSMKASLEGNLAETENRYCMQLSQIQGLIGSVEERLAQLLCEMEQQNQEYKILLDMKMRLELEITTYHRLLEGEDAQ

SEQ ID NO: 917758 - protein, 265 aa, Homo sapiens
  misc_feature (250)..(250): Xaa can be any naturally occurring amino acid
  misc_feature (260)..(260): Xaa can be any naturally occurring amino acid
RLVGGVIGEALLSSPSPVCLPPAAATMTTSIRQFTSSSSIKGSSGLGGGSSRTSCRLSGGLGAGSCRLGSAGGLGSTLGGSSYSSCYSFGSGGGYGSSFGGVDGLLAGGEKATMQNLNDRLASYLDKVRALEEANTELEVKIRDWYQRQAPGPARDYSQYYRTIEELQNKILTATVDNANILLQIDNARLAADDFRTKFETEQALRLSVEADINGLRRVLDELTLARADLEMHIENLKGKEPGPNLERKXPRREGKIETXPAKGP

SEQ ID NO: 917759 - protein, 470 aa, Homo sapiens; identical to SEQ ID NO: 917755

SEQ ID NO: 917760 - protein, 117 aa, Homo sapiens
MVFRVETLQSHTSRCHIQTPHVAGHTRVCICPMPLPVPSTRMPFPRCHGHHSGLSDNPLSEFQWLLPPLAQRPRKEREDQPRGGWSPKAMNFQENVTLAMALFTILTSIYFFNKAQQ

SEQ ID NO: 917761 - protein, 149 aa, Homo sapiens
MDLELRGHNGPPPHPTPANPTTLPPGRQPSLICPLNTICLGMGLEGGRFGGLGERQKELEGGTDRVHSHRGKKAPNQGAGRSLDSGSSIFSLLSGAGLCRVLTQGVVAEHRATTGSPAVAVFKNRPGTCKLLIPVTRAQIGTQSQPVGG

SEQ ID NO: 917762 - protein, 144 aa, Homo sapiens
MGQRLLHSQRMPACGCCRVAVAAPRAHSKGRAPCQLTHPGGLTTACNTILLHPGFTDEETEAYEEIRSALWPLQASTWDRGAKAQPSHAQGFSAVAKPLDSPVRRFCRLLEKARETMGSHSSHLSSGKNYNSVLLHSQNHHGLM

SEQ ID NO: 917763 - protein, 143 aa, Homo sapiens
IAVEETVMGWGLGLPPLPGRPGASVALCEVLLCRSLTQTTAPDVLATHPDLAVLPFWLNKRQTAPLHLAVCGLTNAYEDRINNSHHSRGGELNKSLLGSGKNPFRTPCDMCSHLARISLGGKRRLQERGRRLGWMAAFESVLR

SEQ ID NO: 917764 - protein, 171 aa, Homo sapiens
MDIRVSIVLSFWIVEVCWAVVERSLLGSSEPLARASPHFLAVYHAVASLATPPGIWMMSATDLFYGDPFAFPGGPFGKDLDRPQWALPGDTNLLLWLTLRLRWSQPHPLQQETAHLSGSLAFLDLLGVCIYKEKGPLVCEQHRGTEVPCLLVSPPSPSDIFLSSCCLVSWY

SEQ ID NO: 917765 - protein, 171 aa, Homo sapiens; identical to SEQ ID NO: 917764

SEQ ID NO: 917766 - protein, 155 aa, Homo sapiens
VTSHAANMLQVPTGPCTPLLQNVPHKSSLPEGIRPGTVLRIRGLVPPNASRFHVNLLCGEEQGSDAALHFNPRLDTSEVVFNSKEQGSWGREERGPGVPFQRGQPFEVLIIASDDGFKAVVGDAQYHHFRHRLPLARVRLVEVGGDVQLDSVRIF

SEQ ID NO: 917767 - protein, 176 aa, Homo sapiens
VTSHAANMLQVPTGPCTPLLQNVPHKSSLPEGIRPGTVLRIRGLVPPNASRFHVNLLCGEEQGSDAALHFNPRLDTSEVVFNSKEQGSWGREERGPGVPFQRGQPFEVLIIASDDGFKVRLCDRGHGPPESSPPTLPCTAVVGDAQYHHFRHRLPLARVRLVEVGGDVQLDSVRIF

SEQ ID NO: 917768 - protein, 254 aa, Homo sapiens
SSKQVMKMNKILHKLGSQICVLKVEWQFIQQTRKEIPGLGDSMYKDIDVRRTSFLKSVAAFENCSGHFCSSDPWQSTLTTTYIWTHVCKGCIQDVISKVQQISLSSQGTLNIHYQTNSLDTGSSLATERGHLYFPDHLGSIETPDGSSTDYSKTHWNEITGPRIFFWAKGNNSEMGSPKLVALLPPWKEGRAQTLVLSAIPDMWLPSLGPRQLSQLLSFPEGALGYDGERAMQSSEYNLLASLEEAVLWKQFQW

SEQ ID NO: 917769 - protein, 189 aa, Homo sapiens
MCSTGRAELGKGEPSPCTGRPERRGRRKTSPAPPAPTPDAGPQTSDDLEPPPHGCQEADRGSSWGATAPRPFRQNLSDLGRCSALPLKKNLCPGGSSLGAPPPRTPQRRVTLAVQRWLSHPRRRAVGLVGTWDADVDIRDYIGKRASQHVSQSITEEIETLMGVLDKDDGESTASSGGGDPEQPLEEKE

SEQ ID NO: 917770 - protein, 879 aa, Homo sapiens
MFQDPVAFKDVAVNFTQEEWALLDISQRKLYREVMLETFRNLTSLGKRWKDQNIEYEHQNPRRNFRSLIEEKVNEIKDDSHCGETFTPVPDDRLNFQEKKASPEVKSCESFVCGEVGLGNSSFNMNIRGDIGHKAYEYQEYGPKPCKCQQPKKAFRYRPSFRTQERDHTGEKPNACKVCGKTFISHSSVRRHMVMHSGDGPYKYYILSMKEFTLERNHVNVNSVVNPLVILLPIEYIKELTLEKSLMNIRSVGKHFIVPDPIVDMKGFTWEKRLINVRNVEKHSRVPVMKNLYECKQCGKALSSLTSFQTHVRLHSGERPYECKICGKDFCSVNSFQRHEKIHSGEKPYKCKQCGKAFPHSSSLRYHERTHTGEKPYECKQCGKAFRSASHLRVHGRTHTGEKPYECKECGKAFRYVNNLQSHERTQTHIRIHSGERRYKCKICGKGFYCPKSFQRHEKTHTGEKLYECKQRSVVPSVVPVPFDIMKGLTLERSPINASNVGKPSELCQSFECMVGLTLKRNPMSVSNDGKPSDLPHTFEYVVGHHNGEKPYACKECGKPFGSAQNLRIHERTQTHIMHSVERPYKCKICGRGFYSAKSFQIHEKSYTGEKPYECKQCGKAFVSFTSFRYHERTHTGENPYECKQFGKAFRSVKNLRFHKRTHTGEKPCECKKCRKAFHNFSSLQIHERMHRGEKLCECKHVGKHSYLPRSFEYMQEHTMERNPMNVKNAEKHSACLLPFIDMKRLTLEGNTMNASNVAKLSLLPVLFNIMKEHTREKPYQCKQCAKAFISSTSFQYHERTHMGEKPYECMPSGKAFISSSSLQYHERTHTGEKPYEYKQCGKAFRSASHLQMHGRTHTGEKPYECKQYGKAFRPDKIL

SEQ ID NO: 917771 - protein, 879 aa, Homo sapiens; identical to SEQ ID NO: 917770

SEQ ID NO: 917772 - protein, 879 aa, Homo sapiens; identical to SEQ ID NO: 917770

SEQ ID NO: 917773 - protein, 576 aa, Homo sapiens
MFQDPVAFKDVAVNFTQEEWALLDISQRKLYREVMLETFRNLTSLGKRWKDQNIEYEHQNPRRNFRSLIEEKVNEIKDDSHCGETFTPVPDDRLNFQEKKASPEVKSCESFVCGEVGLGNSSFNMNIRGDIGHKAYEYQEYGPKPCKCQQPKKAFRYRPSFRTQERDHTGEKPNACKVCGKTFISHSSVRRHMVMHSGDGPYKYYILSMKEFTLERNHVNVNSVVNPLVILLPIEYIKELTLEKSLMNIRSVGKHFIVPDPIVDMKGFTWEKRLINVRNVEKHSRVPVMKNLYECKQCGKALSSLTSFQTHVRLHSGERPYECKICGKDFCSVNSFQRHEKIHSGEKPYKCKQCGKAFPHSSSLRYHERTHTGEKPYECKQCGKAFRSASHLRVHGRTHTGEKPYECKECGKAFRYVNNLQSHERTQTHIRIHSGERRYKCKICGKGFYCPKSFQRHEKTHTGEKLYECKQRSVVPSVVPVPFDIMKGLTLERSPINASNVGKPSELCQSFECMVGLTLKRNPMSVSNDGKPSDLPHTFEYVVGHTMERSPMHVRNVGNPSDLPRTFEFMKGHKHT

SEQ ID NO: 917774 - protein, 174 aa, Homo sapiens
MITAHCTLYLQGSSNPPTSASQVAGITALACMNSSHPPNQPRRYQRSKVGYHQHKSPKGHPTDDRPGGARGRSTPFASRNAAVRLGAVRSLCRQRSPRAVTSCGLGEPAARGEPGLEVLGSSGSLGCTQGSALGRRGHKTPGLHSAQGLVDIEPPGNLCHQRRVLMPAARNTTK

SEQ ID NO: 917775 - protein, 705 aa, Homo sapiens
GVWGSGAGLCLIGLHGSALHSYTSLPPAMSDFHVHPQATVGEEGGVARFQCQIHGLPKPLITWEKNRVPIDTDNERYTLLPKGVLQITGLRAEDGGIFHCVASNIASIRISHGARLTVSGSGSGAYKEPAILVGPENLTLTVHQTAVLECVATGNPRPIVSWSRLDGRPIGVEGIQVLGTGNLIISDVTVQHSGVYVCAANRPGTRVRRTAQGRLVVQAPAEFVQHPQSISRPAGTTAMFTCQAQGEPPPHVTWLKNGQVLGPGGHVRLKNNNSTLTISGIGPEDEAIYQCVAENSAGSSQASARLTVLWAEGLPGPPRNVRAVSVSSTEVRVSWSEPLANTKEIIGYVLHIRKAADPPELEYQEAVSKSTFQHLVSDLEPSTAYSFYIKAYTPRGASSASVPTLASTLGEAPAPPPLSVRVLGSSSLQLLWEPWPRLAQHEGGFKLFYRPASKTSFTGPILLPGTVSSYNLSQLDPTAVYEVKLLAYNQHGDGNATVRFVSLRGASERTALSPPCDCRKEEAANQTSTTGIVIGIHIGVTCIIFCVLFLLFGQRGRVLLCKDVENQLSPPQGPRSQRDPGILALNGARRGQRGQLGRDEKRVDMKELEQLFPPASAAGQPDPRPTQDPAAPAPCEETQLSVLPLQGCGLMEGKTTEAKTTEATAPCAGLAAAPPPPDGGPGLLSEGQASRPAAARVTQPAHSEQ

SEQ ID NO: 917776 - protein, 807 aa, Homo sapiens
GVWGSGAGLCLIGLHGSALHSYTSLPPAMSDFHVHPQATVGEEGGVARFQCQIHGLPKPLITWEKNRVPIDTDNERYTLLPKGVLQITGLRAEDGGIFHCVASNIASIRISHGARLTVSGSGSGAYKEPAILVGPENLTLTVHQTAVLECVATGNPRPIVSWSRLDGRPIGVEGIQVLGTGNLIISDVTVQHSGVYVCAANRPGTRVRRTAQGRLVVQAPAEFVQHPQSISRPAGTTAMFTCQAQGEPPPHVTWLKNGQVLGPGGHVRLKNNNSTLTISGIGPEDEAIYQCVAENSAGSSQASARLTVLWAEGLPGPPRNVRAVSVSSTEVRVSWSEPLANTKEIIGYVLHIRKAADPPELEYQEAVSKSTFQHLVSDLEPSTAYSFYIKAYTPRGASSASVPTLASTLGEGEAWVWSTKPQALTQGIRAEPPCTLVLVVRCAGCPALRLSGLSLLGGKGFFFYFLGRCCFHKHMPLARGRGLSGFWGLGSQVEGRKIELPLGPHIVASSLPAAPAPPPLSVRVLGSSSLQLLWEPWPRLAQHEGGFKLFYRPASKTSFTGPILLPGTVSSYNLSQLDPTAVYEVKLLAYNQHGDGNATVRFVSLRGASERTALSPPCDCRKEEAANQTSTTGIVIGIHIGVTCIIFCVLFLLFGQRGRVLLCKDVENQLSPPQGPRSQRDPGILALNGARRGQRGQLGRDEKRVDMKELEQLFPPASAAGQPDPRPTQDPAAPAPCEETQLSVLPLQGCGLMEGKTTEAKTTEATAPCAGLAAAPPPPDGGPGLLSEGQASRPAAARVTQPAHSEQ

SEQ ID NO: 917777 - protein, 561 aa, Homo sapiens
GNVESCLFSVGVHSIPVTWEEDGRPIGVEGIQVLGTGNLIISDVTVQHSGVYVCAANRPGTRVRRTAQGRLVVQAPAEFVQHPQSISRPAGTTAMFTCQAQGEPPPHVTWLKNGQVLGPGGHVRLKNNNSTLTISGIGPEDEAIYQCVAENSAGSSQASARLTVLWAEGLPGPPRNVRAVSVSSTEVRVSWSEPLANTKEIIGYVLHIRKAADPPELEYQEAVSKSTFQHLVSDLEPSTAYSFYIKAYTPRGASSASVPTLASTLGEAPAPPPLSVRVLGSSSLQLLWEPWPRLAQHEGGFKLFYRPASKTSFTGPILLPGTVSSYNLSQLDPTAVYEVKLLAYNQHGDGNATVRFVSLRGASERTALSPPCDCRKEEAANQTSTTGIVIGIHIGVTCIIFCVLFLLFGQRGRVLLCKDVENQLSPPQGPRSQRDPGILALNGARRGQRGQLGRDEKRVDMKELEQLFPPASAAGQPDPRPTQDPAAPAPCEETQLSVLPLQGCGLMEGKTTEAKTTEATAPCAGLAAAPPPPDGGPGLLSEGQASRPAAARVTQPAHSEQ

SEQ ID NO: 917778 - protein, 144 aa, Homo sapiens
MTCIVVSAILQTLITVKRSTGTWAMRNILPNHVTAETSLSHPPGQRPNSLTAGTSLPYPAGQQALPPRSLPPSPMITPACEWQLVLALSWFPPPQGFAGNKDVAVEATNLMAASSPSVTVGEASMERSASRESKGNMIKGKEEQ

SEQ ID NO: 917779 - protein, 154 aa, Homo sapiens
SPRLESRRGVEPLMSCQPYKVELVIDGQALLPPFFNGISSMYTSLKSTFVAFADGRGTTESMPSPPLANSNHESPVNQLGNMQNMRLGPSFILTGIFLGNGRTEASPFFTDEFALSKIFPEYKRNLFGKFQTNMAFSLELDPPSLLLSVVLFMF

SEQ ID NO: 917780 - protein, 272 aa, Homo sapiens
VFDMPEMVLGLGACIAMDTTRYSKWGGSSEEVPGASTERAALLDGHDLLRTNASKQTAALGALKEEVGDCHSCCSGTQAQLQTTRAELGEAQAKLMEQESALRELRERVTQGLAEAGRGREDVRTELFRALEAVRLQNNSCEPCPTSWLSFEGSCYFFSVPKTTWAAAQDHCADASAHLVIVGGLDEQGFLTRNTRGRGYWLGLRAVRHLGKVQGYQWVDGVSLSFSHWNQGEPNDAWGRENCVMMLHTGLWNDAPCDSEKDGWICEKRHNC

SEQ ID NO: 917781 - protein, 529 aa, Homo sapiens
MVSADDTHGLSLWEHLKGVRLQILVHLGRTQEGREVQTYVWPWGTCHPLEPVWSLPAHPQLEFWAFSPAHRWDLVNFSQVALVSITLLSHSFCKGLPGGVKGSGGHRGGGEMAFSGCQAPYLSPAVPFSGTIQGGLQDGFQITVNGAVLSCSGTRFAVDFQTGFSGNDIAFHFNPRFEDGGYVVCNTRQKGTWGPEERKMHMPFQKGMPFDLCFLVQSSDFKEHGWSWKPLQEQKTKHRKFSLISEELNDENTWTQAGKQHTLGPGRGRRASGRLANGAGLDTKVMVNGSLFVQYFHRVPFHRVDTISVNGSVQLSYISFQNPRAVPVQPAFSTVPFSQPVCFPPRPRGRRQKPPSVRPANPAPITQTVIHTVQSASGQMFSQTPAIPPMMYPHPAYPMPFITTIPGGLYPSKSIILSGTVLPSAQRFHINLCSGSHIAFHMNPRFDENAVVRNTQINNSWGSEERSLPRKMPFVRGQSFSVWILCEAHCLKVAVDGQHVFEYYHRLRNLPTINKLEVGGDIQLTHVQT

SEQ ID NO: 917782 - protein, 467 aa, Homo sapiens
MVSADDTHGLSLWEHLKGVRLQILVHLGRTQEGREVQTYVWPWGTCHPLEPVWSLPAHPQLEFWAFSPAHRWDLVNFSQVALVSITLLSHSFCKGLPGGVKGSGGHRGGGEMAFSGCQAPYLSPAVPFSGTIQGGLQDGFQITVNGAVLSCSGTRFAVDFQTGFSGNDIAFHFNPRFEDGGYVVCNTRQKGTWGPEERKMHMPFQKGMPFDLCFLVQSSDFKVMVNGSLFVQYFHRVPFHRVDTISVNGSVQLSYISFQNPRAVPVQPAFSTVPFSQPVCFPPRPRGRRQKPPSVRPANPAPITQTVIHTVQSASGQMFSQTPAIPPMMYPHPAYPMPFITTIPGGLYPSKSIILSGTVLPSAQRFHINLCSGSHIAFHMNPRFDENAVVRNTQINNSWGSEERSLPRKMPFVRGQSFSVWILCEAHCLKVAVDGQHVFEYYHRLRNLPTINKLEVGGDIQLTHVQT

SEQ ID NO: 917783 - protein, 98 aa, Homo sapiens
AFPGPRFAVDFQTGFSGNDIAFHFNPRFEDGGYVVCNTRQKGTWGPEERKMHMPFQKGMPFDLCFLVQSSDFKEHGWSWKPLQEQKTKHRKFSLISRS

SEQ ID NO: 917784 - protein, 160 aa, Homo sapiens
MTNTKGKRRGTRYMFSRPFRKHGVVPLATYMRIYKKVDIVDVKGMGTVQKGMPHKCYHGKTGRVYSVTQHAVGIVVNKQVKGKILAKRINVRIKHIKHSKSQDSFLKRVKENDQKKKEAKEKGTWVQLKRQPAPPREAHFVRTSGKEPELLEPIPCEFMA

SEQ ID NO: 917785 - protein, 140 aa, Homo sapiens
MAAPMLALFPHLTMKRLNSMFSKIFSSSEVPQFVGAECTYTNLKVTFEKCPQRIIENFGIHVVLAISEVQRRNHCSTALHPLIEHTLIQYMPDPSANIPTHNNPARYTNYWEMTTQHTYTHTNTPQTSPAHTNITQFLHS

SEQ ID NO: 917786 - protein, 160 aa, Homo sapiens
FACYQVLPIHTLPTNKEMRVVLCCTSPLQGCLPGTRQCDWDEPFIIREDTGYLGSHGVECLQHSAQKPLNLGRKLLPHQIGASANSINFQFLRQQKAQLERETSALSHPPSFILGATLCSVEFAQDSQSELINLPGLSHPVCHLSGSSPRKSIPKFKKSS

SEQ ID NO: 917787 - protein, 160 aa, Homo sapiens; identical to SEQ ID NO: 917786

SEQ ID NO: 917788 - protein, 160 aa, Homo sapiens; identical to SEQ ID NO: 917786

SEQ ID NO: 917789 - protein, 160 aa, Homo sapiens; identical to SEQ ID NO: 917786

SEQ ID NO: 917790 - protein, 160 aa, Homo sapiens; identical to SEQ ID NO: 917786

SEQ ID NO: 917791 - protein, 160 aa, Homo sapiens; identical to SEQ ID NO: 917786

SEQ ID NO: 917792 - protein, 140 aa, Homo sapiens
MLYHTVLPTTACSFIVAVNAPFLSFSPLKIREHAGLSCARHSIPHMVDEGGCGSDGSTAVHPGGWTCVPGYQSLRLTSPHVHAALPLAVSTFWVSLKDFTGADFTKAKLFLKEVDMKDLKSGLLKKSKHRLMTYLHPTRF

SEQ ID NO: 917793 - protein, 593 aa, Homo sapiens
MSANPRWDISRALGVAKLFHLVCGVREACVTPFLTLYLRQLGLAAPWVGTLMGTKHLIAAFWAPVCAFLAKSYRKRRALLIGSLLGSVGASLLMVLVPPVDKNRVHFPCNGSSGLTSTDALPGVTLPVNITSAQESASSHPAKRTAEVEMPGFRNPPGESDRETFRDLHVYLAPSVEGARTTSQALLHPVTSGLKDHPWEVTFEVVKTALPLLPGGKGPGNPANLSGTKGKAWAFDLSLEALRRTFILSLGSVAFWELLTAPLEQVADDSLYEFLDFVDATDRYRSLWVWRLLGMSAGVCGITALVGQLDCFLMTSGPRGVVHFYGYSVVSTLALLVSIAFPIPICQQWEPSYKRVKALSIVGGDPHLILLASTTVLVGAIVSTVQNFLFWHMKDHGSGELVMGFSVALSLLGEILLHPFKATLLRKLSRTGLVGLGLSCLAGQLLYYSFLWSWWSVLPIQILSAISNRALWWAVGASVEDLATPRMERALSALFRGHFYGSGCSLGSFVGGFVVMRFSLAVLYQACCVALLLWLALLLSIQRRLPRERKIKYSKLLSMEVLLNSAMAEAIKSNCQCQEDHGDLQDSVGREGS

SEQ ID NO: 917794 - protein, 1358 aa, Homo sapiens
MIEPSEDSFETMMEHKNPSSKQMESSEGSSNTTEATSGSGVRGEAGPASGPAQEKKEPPSGPLQEMEELPTDLLQDMEEPSSGPRKEIEDPPNDLLQDLEESCNGSHQARGDPLSGASDRMKEASVNPSGAREEQEAHTDLKESGREETPQEQNQTEHSTAELMAMVRSIISLYFRMQDLKEQQRVAEEILIKGINAGQLPAPKHFSGDRREFHEFIVLCQLTLQSYPRMFYNDRLRVGYVINHLSGLALEWAKALLQENSPLIGDFPAFLEAMSEVFEYRQALRVAEEAMFTIRQGGRSATEYIDEFQSLVPILGWPDEVLQAHLCQGLNEEIRHYLFRVPQPDSLDSLIVLILQIEEKLAERRAMLRLPPEARPRNLTWIDSPAPERWMVSSWLPSEVHPDINRAHLFLLLMVRVNPYHSVAVQALVDSGADGNFMDEKFAQEHYVELYEKPYPQPVQSVDGSLIGNEPVWLYTEPLVCIHQNHQESIEFDIVPSPNFSVVLGIRWLRVHAPEVDWIKGRCTFHSPYCLKNCFRPPPPCIALERHGMSLLPGLPHPYSDLADVFNPKEADDETSDQPSSDGSDDLSESEPSELQQAGDSDHSETFYECPSTAPWEPVGARMQERARLQEEYWDLQDMLTNRQDYIQMIPELFDQLHGAEWFTKLELRGTIVEESVNGHRTEDVWKAAFGLELEEMKSYQPFALSPDPIIPQNVIHFILKDMLGFFVLSYGQEVLIYSMSQEEHLHHVRQVLVRFRHHNVYCSLDKSQFHRQTVEFLGFVVTPKGVKLNKNVMTIITGYPTPGSKLSLRNFIEFVFPYRHFVERFSIIAEPLVRQLLSSYQFYWGVEEQEAFECLKRAFRKAPLLHHPKPQNPFYLETGVTGTALHASLIQIDDQTGKRACCAFYSRNISPIEVEYSQAEMKILPIRAAFMVWCRYLENTEEPIMILLNTEDLASLNNDRLTVLLPGHWVFFFSHFNFDVMELPEQDGGRALPPVRNLRWRRAFQRNTAARQTLLLASRGFPRDPSTESGEEENEEQDELNEQILRQELLAMIPIDQILNSFLAHFSMAQIRAVILHFFRGLLYWKNTLALAAILVLLRVRQCLSLRPAPAMRVARPQPQRSLRLILDSSLIAGSSITTAITQLLTQMPALVGANTIPAQELAELFLGPGRWQRNALHSQAHRGLQFTPGFWLTLCEFFGVRVTPQEGHLPALRQNRYLELHVVGDEDVVLREALQDDLQRYRQCGLHDGLQDTSQDKQDNDVQEAPPSHTAATHPPRPRHLMDPQVLEFLGSRLLHIHSADGQLHLLSREQAARALSQFLTLIYRRALPIPAWESQPREQARLEELPDEDEDANLD

SEQ ID NO: 917795 - protein, 119 aa, Homo sapiens
MTPGVGYMVPCTTASAAHGSTTEDPKTKCPALCGRVQGGRMTPVFECRSPNEDHIYQEEMLEMARKGVLPAVPTAYSCLPGKPKSQKHFHDDIFGAVFPYEAKKDRAAVQPSSLEMSAL

SEQ ID NO: 917796 - protein, 245 aa, Homo sapiens
MVCVSDSEHLFEAALITQASVNPTKRPPNPAALPLDPRNPAVPSEPPALLTARLALLSFKKPPNPADPPLKSRPHPRREHPPTSVPAPLSRPSRRPLTTARGAAAPGSRERPALEGTPPSGSRPLPRLRGGIALRCSPRAASRFRLPAASYCGSGGAGRRHRRRLREWQRSWRRAACGRSGRGEERRGHLGPSLCSSFRSARGRTRDGMEPTTIPSTVVFQASRENPHTPEQTALPGRERLGAKP

SEQ ID NO: 917797 - protein, 121 aa, Homo sapiens
MGTRTIIGCKVLPNRTHLYCVRQTRVLYFYFYFFEMESHSPRLECNGMILAHCNLCVLSLRDSPASASPVTGIIGARHYAQLIFYIFSRHEVSPCQSGWSQTPDLRQSARLSLPKCLGLQA

SEQ ID NO: 917798 - protein, 793 aa, Homo sapiens
MAKDTLGRNGDVELDLQRSVQAVLRELSTQAPALQSNQGMWRWSLHKKVERDPGKSPVLVRILLRELEKAESQDLRHVIIPLLHTVMYVLTKATGITEELYQRIYAFCTRLLTLPTPYCTVALDCAIRLKTEMAVPGTLYQRMVIAEQNLTNELYPYQERVFLFVDPELVSASVCSALLLEIEAAQAQQTPETCMRHVVSHALQAALGEACHAGALHRKLQASPRRTLEHYFHAVVAALEQMASEASPSREGHVERLEEIYCSLLGPAAGRCGGDLVQERPPSIPLPSPYITFHLWTGKELVLFLRPRSQLRLSADLEVLDLQGLRPDRELARVSVLSTDSGIERDLPTGADELPAPGSPEMERAGLQRKGGIKKRAWPLDFLMPGSWDGPPGLHRRTGRPSGDGEMLPGVSRLHTARVLVLGDDRMLGRLAQAYHRLRKRETQKFCLTPRLSLQLYYIPVLAPEKPAASRQPELGELATFLGRVDPWYQSNVNTLCPAIHKLAEMVGEGSYFGPDHRGKDEVKYSFPPSLDTSRTVDPFILDVITYYIRMGTQPIYFQIYTVKIFFSDLSQDPTEDIFLIELKVKIQDSKFPKATQKVRNGECRAKKERRDEKGNAGERAEWQEKGEPSQSRNWSQDQDLVTAFKLLAPYSRPYQNQSDDASTLVSGSSHCPLPAAPVTDHTCLNVNVTEVVKSSNLAGKSFSTVTNTFRTNNIQIQSRDQRLLTLSLDKDDQRTFRDVVRFEVAPCPEPCSGAQKSKAPWLNLHGQQEVEAIKAKPKPLLMPINTFSGIVQ

SEQ ID NO: 917799 - protein, 793 aa, Homo sapiens; identical to SEQ ID NO: 917798

SEQ ID NO: 917800 - protein, 716 aa, Homo sapiens
MSSLGQHVCTKHVLLNRKPKVPVNQEGNTLERRRKGSETVLVSFVIRTVEMRLLDPSSILEGQLRAKTERERGGFHSRTCVGRRILQCPQQDTCVEMDSPVSTAGRVWQKGFSSVHGGTCVEMDSPVSMAGRVRREGFSSIHSRTCVSRRILQCPRQDVCGEKDSPVSTVGSVWREGFSSVHGGTCVARRILQYPRRDVLSTAGRVWQGFSSIHGGTCVSRRILQCPRKDMCGEKDSPVSTVGSVWREGFSSIHSGMCDVYGEKDSPVSTAGRVWQEGFSSVHGGTCVEMDSPVSTAGHVWREGFSGVHGGTCVARRILQCPRRDVCGEKDSPVSTAGDMCGEDSPVSTAGRVWGEGFSSVHGGMCVGRRILQCPQWDTCGKKDSPVSTAGRVWGKGFSSVHSGTRVARRILQCPQQDVCGEKDSPVSTVDVCGEKDSPVSTVGHVCQEGFSSVHGGTCVWKRILQCPRRDVCGEKDSPVSMAGDVCGEDSQCPRRDVCGEKDSPVSTAGHVCGQKDSPVSTVGRVCGKGFSSVHGRTCVWRRILQCPRQDVCVEKDSPVSTEGRVWREGFSSVHGRTCVGRRILQCPQQDVYGEKDSPVSMARHVWRRILQCPRQDLCGQKDSPVSTAGRVWREGFSSVHGGTCVGRRILQCPQWDTCGKRDSPVSTAGRVWEEGFSGVVFAGSSLPANKVFLPIVALAFRSQPSFLPKGRAFLT

SEQ ID NO: 917801 - protein, 147 aa, Homo sapiens
LQKCLQEGMKGHRGERVSEYEKIVDSPGAARVLWCAASTLPLIAAASVGLAPPTIVLDLFPFPRTIAWMMKHIAEYCFITIQELYPFKFLYGGFQHTAKQPKVISVFLNPAQEWIGRKGAGPNPMTMLAGGALQKATAPQASSLRSL

SEQ ID NO: 917802 - protein, 307 aa, Homo sapiens
GSGLSPSSDLSLKSLASQSCLPPGKGLSHSLQGKKPAAPCLPKAEAAQFSAPAAPGTPEMLCGPSQPGACPGPSDCPSRIATLPPTPAPVMFTASLGKGLPHFLEEESTSSFPQVSESFSFFPQPYQHTYVPARTTAPETLSVGSLETWLWSQQDLSTDRWGPESLRLTTNLCCSLEPLVWVVGSHENRGNEKRPGPALHSNPKVSALSPHHRAASTKEFGRGDSCTRKREGGDLKSTVKTTDTRGGSPKTSASLGLGTSLRTVGSWLKDLGSPEAATEPSPLTSVFSSIQEVTPTLSHTNNREQQL

SEQ ID NO: 917803 - protein, 363 aa, Homo sapiens
MGERLFESAEGSQCGETFTQVPEDMLNKKTLPGVKSCESGTCGEIFMGYSSFNRNIRTDTGHQPHKCQKFLEKPYKHKQRRKALSHSHCFRTHERPHTREKPFDCKECEKSFISPASIRRYMVTHSGDGPYKCKFCGKALDCLSLYLTHERTHTGEKRYECKQCGKAFSWHSSVRIHERTHTGEKPYECKECGKSFNFSSSFRRHERTHTGEKPYKCKECGKAFNCPSSFHRHERTHTGEKPYECKLYGKALSRLISFRRHMRMHTGERPHKCKICGKAFYSPSSFQRHERSHTGEKPYKCKQCGKAFTCSTSFQYHERTHTGEKPDGCKQCGKAFRSAKYIRIHGRTHTESKPGTTGQSSNE

SEQ ID NO: 917804 - protein, 113 aa, Homo sapiens
KVPGLASRYVEEGLGGTNRILLWRDPGLRSGDPGDWDPRPPWRGLALGPLGRQVGLGPQLGPRASCPVPTRRLRPRPRSPLWAAPRPQPGVFPDCAGATGGSWGVGCVPPFFC

SEQ ID NO: 917805 - protein, 619 aa, Homo sapiens
GFAVAAWLGSGRLAWRGSDRLAWHFWLSGPPFADWKPRAILLGGCGRGSSSLLMVSWGGEKRGGAEGSPKPAVYATRKTGSVRSQEDQWYLGYPGDQWSSGFSYSWWKNSVGSESKHGEGALDQPQHDVRLEDLGELHRAARSGDVPGVEHVLVPGDTGVDKRDRKKSIQQLVPEYKEKQTPESLPQNNNPDWHPTNLTLSDETCQRSKNLKVDDKCPSVSPSMPENQSATKELGQMNLTEREKMDTGVVLLSGNDTLHDLCQSQLPENKESKEEKTPKKQNKQINLPLLHLQKTSQEPEMAKDCDREDIPIYPVLPHVQKSEEMRIEQGKLEWKNQLKLVINELKQRFGEIYEKYKIPACPEEEPLLDNSTRGTDVKDIPFNLTNNIPGCEEEDASEISVSVVFETFPEQKEPSLKNIIHSYYHPYSGSQEHVCQSSSKLHLHENKLDCDNDNKPGIGHIFSTDKNFHNDASTKKARNPEVVTVEMKEDQEFDLQMTKNMNQNSDSGSTNNYKSLKPKLENLSSLPPDSDRTSEVYLHEELQQDMQKFKNEVNTLEEEFLALKKENVQLHKEVEEEMEKHRSNSTELSGTLTDGTTVGNDDDGLNQQIPRKENGEHDR

SEQ ID NO: 917806 - protein, 158 aa, Homo sapiens [sequence omitted]

SEQ ID NO: 917807 - protein, 158 aa, Homo sapiens [sequence omitted]

SEQ ID NO: 917808 - protein, 169 aa, Homo sapiens
MSQKEEHPWTPDSLQCSGLWALTALHGDPAEATPGPPGGPRQQAPSPTSRVSSRGPLVLLPCQLCHGAMCVPALFHGSPREGRGRQMQSMLATALGSRDRGTLMISGNFREVEPLQCYLHSLPTFLLVLPLFSSLQVSPLPLPSGSLPSLPHYHQAPPNTTEIVHGQRT

SEQ ID NO: 917809 - protein, 126 aa, Homo sapiens
MSKNAGSSQLYQMPAANTTLVPLSLPGEWGATMGVRDHGQDNRNSLLGLIPFGQPQAVTTRMTATLWKELAASGPSAWASVRSMGRKKGTNVLSKQCSVYLLPGPVLNPPVASSVPPADPLNSPRP

SEQ ID NO: 917810 - protein, 148 aa, Homo sapiens
MAAEALAAEAVASRLERQEEDIRWLWSEVERLRDEQLNAPYSCQAEGPCLTREVAQLRAENCDLRHRLCSLRLCLAEERSRQATLESAELEAAQEAGAQPPPSQSQDKDMKKKKMKESEADSECKGKSGKQRLTKWLLKLVRNWLKAR

SEQ ID NO: 917811 - protein, 582 aa, Homo sapiens
MGSQSGKASPLPGGFSFTVDLGFVLAPLNLPLTCDEAPCAFVLLGALEEQLETVVGPGSGRPLCHYRLRAPGCGHQRPPGPPHTAGAADSPLPARDLGMSRAVETADAGRAVLQSFGSPNKKHVGVILQRGALVLLLCCLPCWALFLNTQHILLLFRQDPDVSSGVVGNCVNGVANYALVSVLNLGVRGSAYANIISQFAQTVFLLLYIVLKKLHLETWAGWSSQCLQDWGPFFSLAVPSMLMICVEWWAYEIGSFLMGLLSVVDLSAQAVIYEVATVTYMDPPRASRAHQVQTLLSLRQDSHTGAHNLTTKGDISLTDIPLGLSIGVCVRVGMALGAADTVQAKRSAVSGVLSIVGISLVLGTLISILKNQLGHIFTNDEDVIALVSQVLPVYSVFHVFEAICCVYGGVLRGTGKQAFGAAVNAITYYIIGLPLGILLTFVVRMRIMGLWLGMLACVFLATAAFVAYTARLDWKLAAEEAKKHSGRQQQQRAESTATRPGPEKAVLSSVATGSSPGITLTTYSRSECHVDFFRTPEEAHALSAPTSRLSVKQLVIRRGAALGAASATLMVGLTVRILATRH

SEQ ID NO: 917812 - protein, 566 aa, Homo sapiens
MDSLQDTVALDHGGCCPALSRLVPRGFGTEMWTLFALSGPLFLFQVLTFMIYIVSTVFCGHLGKVELASVTLAVAFVNVCGVSVGVGLSSACDTLMSQSFGSPNKKHVGVILQRGALVLLLCCLPCWALFLNTQHILLLFRQDPDVSRLTQDYVMIFIPGLPVIFLYNLLAKYLQNQKITWPQVLSGVVGNCVNGVANYALVSVLNLGVRGSAYANIISQFAQTVFLLLYIVLKKLHLETWAGWSSQCLQDWGPFFSLAVPSMLMICVEWWAYEIGSFLMGLLSVVDLSAQAVIYEVATVTYMIPLGLSIGVCVRVGMALGAADTVQAKRSAVSGVLSIVGISLVLGTLISILKNQLGHIFTNDEDVIALVSQVLPVYSVFHVFEAICCVYGGVLRGTGKQAFGAAVNAITYYIIGLPLGILLTFVVRMRIMGLWLGMLACVFLATAAFVAYTARLDWKLAAEEAKKHSGRQQQQRAESTATRPGPEKAVLSSVATGSSPGITLTTYSRSECHVDFFRTPEEAHALSAPTSRLSVKQLVIRRGAALGAASATLMVGLTVRILATRH

SEQ ID NO: 917813 - protein, 145 aa, Homo sapiens
MEYHGFRICVLLVGAPALGLCTPDVPTLGLCTPDVPTLGLCTLMYPHLASVPQMYPHSASVPQMYPPSASVPQMYPHSASVPRCTHTRPLYPDVPTLGLRTPDAPTLSPYNPDVPTLSPPTPQIHPHSASVPQVYSHSALIPQDF

SEQ ID NO: 917814 - protein, 104 aa, Homo sapiens
MSTPCLERPPERNTPCQRLPAAEPATLPPTSWPLHRPSLPLSTLPSRSRSPCVHQQPLPVCPAPHAAPGQHGETPSLLKIQKLAGRVAGTFNLSYLGGRGRRIT

SEQ ID NO: 917815 - protein, 192 aa, Homo sapiens
TRKSYTMVNPSSITLRCIFPIHQECLSQERQETVSPELRVSTWHCSSSSSSICGHWPGVTNHQVLANVGFHHVKLVLSCKTKSCIYFSLPPCQWIESLCTVLPRTGGEKVGAVSWLPRLMLIWVTSKSHAARTNTALGALVAQADMACLPVGFTRGLRPLWKASSGVSWNTRPWFGAEGFCLALGLPWETCE

SEQ ID NO: 917816 - protein, 147 aa, Homo sapiens
MFFFRCWRSMTEERWRNEDSGKSGAQHPLGLSKGSLQPFQLFRHPFAILSGAPTLEHETIGAAEVQPGDPLGALASVRFLSRWVLSPLLAPGLSELMALFRLFSRHGLGNAHSCDPATDGFFANNRNMQRLLRAVLVGSEVGGCGAP

SEQ ID NO: 917817 - protein, 417 aa, Homo sapiens
AVAYTLSNTMNLLAHLGFLVPEPLTFYLLGITPQPLTFYLLGITPQPLTFYLLGITPPPLTFYLLEITPPPLTFYLLGITPQPLTFYLLGITPPPLTFYLLGITPPPLTFYLLGITPQPLTFYLLGISPQPLTFYLLGITPQPLTFYLLGITPPPLTFYLLGITPQPLTFYLLGITPQPLTFYLLGITPQPLTFYLLGITPPPLTFYLLGITPPPLTFYLLGITPQPLTFYLLGITPPPLTFYLLGITPQPLTFYLLGITPPPLTFYLLGITPQPLTFYLLGITPQPLTFYLLGITPQPLTFYLLGITPQPLTFYLLGITPQPLTFYLLGITPPPLTFYLLGITPPPLTFYLLGITPQTLVPAALLSVSMGLSALEMSWQWNHTGMQVAFCTCLLPLSKRFQRCLDAIIDVAPSCHL

SEQ ID NO: 917818 - protein, 144 aa, Homo sapiens
GTSSLWRMELGLGIPSGLGTTVLLHHQICSLHSPNYLLTCWCKSGVPLRSEGATSHLHTCACSVELSGAHRSSRVCQTKAMALGKRGKIATQIQLLAGSPVCSPDSVPSIPKDFNFWGAKGLLHLVRKPRGKKNSGIDEESGIQ

SEQ ID NO: 917819 - protein, 396 aa, Homo sapiens; identical to SEQ ID NO: 915433

SEQ ID NO: 917820 - protein, 178 aa, Homo sapiens
LIFRCASCSFDVYCSGGLSGNGLRMQEKYGGLSTGRFHRMIPACIKHIVYPRCCAQSCGDPERPGRFHLQGVCKFMCTALWEKAISGSLAQPLSQTPPRHCHGWVPHPQTPWCWADLLLLLRSRANGPLLTKRAYKRKAAPVPGLLRFKTAPTAAETKNLLPRGHTFHSDIRKRIVVA

SEQ ID NO: 917821 - protein, 964 aa, Homo sapiens
NNTLDQEGHIILHSMHRYLPRLHLVPAEKAVEVIQLNGPGVHTFTFPQTEFFAVTAYQNIQITQLKIDYNPFAKGFRDDGLNNNPQRDGKQKNSSDQEGNNISSSSGHRVRLTEGQGSEIQPGDLDPLSRGHETSGKGLEKTSLNIKRDFLGFMDTDSALSEVPQLKQEISECLIASSFEDDSRVASPLDQNGSFNVVIKEEPLDDYDYELGECPEGVTVKQEETDEETDVYSNSDDDPILEKQLKRHNKVDNPEADHLSSKWLPSSPSGVAKAKMFKLDTGKMPVVYLEPCAVTRSTVKISELPDNMLSTSRKDKSSMLAELEYLPTYIENSNETAFCLGKESENGLRKHSPDLRVVQKYPLLKEPQWKYPDISDSISTERILDDSKDSVGDSLSGKEDLGRKRTTMLKIATAAKVVNANQNASPNVPGKRGRPRKLKLCKAGRPPKNTGKSLISTKNTPVSPGSTFPDVKPDLEDVDGVLFVSFESKEALDIHAVDGTTEESSSLQASTTNDSGYRARISQLEKELIEDLKTLRHKQVIHPGLQEVGLKLNSVDPTMSIDLKYLGVQLPLAPATSFPFWNLTGTNPASPDAGFPFVSRTGKTNDFTKIKGWRGKFHSASASRNEGGNSESSLKNRSAFCSDKLDEYLENEGKLMETSMGFSSNAPTSPVVYQLPTKSTSYVRTLDSVLKKQSTISPSTSYSLKPHSVPPVSRKAKSQNRQATFSGRTKSSYKSILPYPVSPKQKYSHVILGDKVTKNSSGIISENQANNFVVPTLDENIFPKQISLRQAQQQQQQQQGSRPPGLSKSQVKLMDLEDCALWEGKPRTYITEERADVSLTTLLTAQASLKTKPIHTIIRKRAPPCNNDFCRLGCVCSSLALEKRQPAHCRRPDCMFGCTCLKRKVVLVKGGSKTKHFQRKAAHRDPVFYDTLGEEAREEEEGIREEEEQLKEKKKRKKLEYSEY

SEQ ID NO: 917822 - protein, 2887 aa, Homo sapiens
NNTLDQEGHIILHSMHRYLPRLHLVPAEKAVEVIQLNGPGVHTFTFPQTEFFAVTAYQNIQITQLKIDYNPFAKGFRDDGLNNNPQRDGKQKNSSDQEGNNISSSSGHRVRLTEGQGSEIQPGDLDPLSRGHETSGKGLEKTSLNIKRDFLGFMDTDSALSEVPQLKQEISECLIASSFEDDSRVASPLDQNGSFNVVIKEEPLDDYDYELGECPEGVTVKQEETDEETDVYSNSDDDPILEKQLKRHNKVDNPEADHLSSKWLPSSPSGVAKAKMFKLDTGKMPVVYLEPCAVTRSTVKISELPDNMLSTSRKDKSSMLAELEYLPTYIENSNETAFCLGKESENGLRKHSPDLRVVQKYPLLKEPQWKYPDISDSISTERILDDSKDSVGDSLSGKEDLGRKRTTMLKIATAAKVVNANQNASPNVPGKRGRPRKLKLCKAGRPPKNTGKSLISTKNTPVSPGSTFPDVKPDLEDVDGVLFVSFESKEALDIHAVDGTTEESSSLQASTTNDSGYRARISQLEKELIEDLKTLRHKQVIHPGLQEVGLKLNSVDPTMSIDLKYLGVQLPLAPATSFPFWNLTGTNPASPDAGFPFVSRTGKTNDFTKIKGWRGKFHSASASRNEGGNSESSLKNRSAFCSDKLDEYLENEGKLMETSMGFSSNAPTSPVVYQLPTKSTSYVRTLDSVLKKQSTISPSTSYSLKPHSVPPVSRKAKSQNRQATFSGRTKSSYKSILPYPVSPKQKYSHVILGDKVTKNSSGIISENQANNFVVPTLDENIFPKQISLRQAQQQQQQQQGSRPPGLSKSQVKLMDLEDCALWEGKPRTYITEERADVSLTTLLTAQASLKTKPIHTIIRKRAPPCNNDFCRLGCVCSSLALEKRQPAHCRRPDCMFGCTCLKRKVVLVKGGSKTKHFQRKAAHRDPVFYDTLGEEAREEEEGIREEEEQLKEKKKRKKLEYTICETEPEQPVRHYPLWVKVEGEVDPEPVYIPTPSVIEPMKPLLLPQPEVLSPTVKGKLLTGIKSPRSYTPKPNPVIREEDKDPVYLYFESMMTCARVRVYERKKEDQRQPSSSSSPSPSFQQQTSCHSSPENHNNAKLMAGGSTFACTATSTSVVTPRKTTKEKSWKSSCNEGESSSTSYMHQRSPGGPTKLIEIISDCNWEEDRNKILSILSQHINSNMPQSLKVGSFIIELASQRKSRGEKNPPVYSSRVKISMPSCQDQDDMAEKSGSETPDGPLSPGKMEDISPVQTDALDSVRERLHGGKGLPFYAGLSPAGKLVAYKRKPSSSTSGLIQVNGKSYPQAKLLLGQMGALHPANRLAAYITGRLRPSVLDLSTLSTVISKVASNAKVAASRKPRTLLPSTSNSKMASSSGTATNRPGKNLKAFVPAKRPIVMVVTPVVSSEPVQVCSPVTAAVTTTTPQVFLENTTAVTPMTAISDVETKETTYSSGATTTGVVEVSETNTSTSVTSTQSTATVNLTKTTGITTPVASVAFPKSLVASPSTITLPVASTASTSLVVVTAAASSSMVTTPTSSLGSVPIILSGINGSPPVSQRPENAAQIPVATPQVSPNTVKRAGPRLLLIPVQQGSPTLRPVSNTQLQGHRMVLQPVRSPSGMNLFRHPNGQIVQLLPLHQLRGSNTQPNLQPVMFRNPGSVMGIRLPAPSKPSETPPSSTSSSAFSVMNPVIQAVGSSSAVNVITQAPSLLSSGASFVSQAGTLTLRISPPEPQSFASKTGSETKITYSSGGQPVGTASLIPLQSGSFALLQLPGQKPVPSSILQHVASLQMKRESQNPDQKDETNSIKREQETKKVLQSEGEAVDPEANVIKQNSGAATSEETLNDSLEDRGDHLDEECLPEEGCATVKPSEHSCITGSHTDQDYKDVNEEYGARNRKSSKEKVAVLEVRTISEKASNKTVQNLSKVQHQKLGDVKVEQQKGFDNPEENSSEFPVTFKEESKFELSGSKVMEQQSNLQPEAKEKECGDSLEKDRERWRKHLKGPLTRKCVGASQECKKEADEQLIKETKTCQENSDVFQQEQGISDLLGKSGITEDARVLKTECDSWSRISNPSAFSIVPRRAAKSSRGNGHFQGHLLLPGEQIQPKQEKKGGRSSADFTVLDLEEDDEDDNEKTDDSIDEIVDVVSDYQSEEVDDVEKNNCVEYIEDDEEHVDIETVEELSEEINVAHLKTTAAHTQSFKQPSCTHISADEKAAERSRKAPPIPLKLKPDYWSDKLQKEAEAFAYYRRTHTANERRRRGEMRDLFEKLKITLGLLHSSKVSKSLILTRAFSEIQGLTDQADKLIGQKNLLTRKRNILIRKVSSLSGKTEEVVLKKLEYIYAKQQALEAQKRKKKMGSDEFDISPRISKQQEGSSASSVDLGQMFINNRRGKPLILSRKKDQATENTSPLNTPHTSANLVMTPQGQLLTLKGPLFSGPVVAVSPDLLESDLKPQVAGSAVALPENDDLFMMPRIVNVTSLATEGGLVDMGGSKYPHEVPDSKPSDHLKDTVRNEDNSLEDKGRISSRGNRDGRVTLGPTQVFLANKDSGYPQIVDVSNMQKAQEFLPKKISGDMRGIQYKWKESESRGERVKSKDSSFHKLKMKDLKDSSIEMELRKVTSAIEEAALDSSELLTNMEDEDDTDETLTSLLNEIAFLNQQLNDDSVGLAELPSSMDTEFPGDARRAFISKVPPGSRATFQVEHLGTGLKELPDVQGESDSISPLLLHLEDDDFSENEKQLAEPASEPDVLKIVIDSEIKDSLLSNKKAIDGGKNTSGLPAEPESVSSPPTLHMKTGLENSNSTDTLWRPMPKLAPLGLKVANPSSDADGQSLKVMPCLAPIAAKVGSVGHKMNLTGNDQEGRESKVMPTLAPVVAKLGNSGASPSSAGK

SEQ ID NO: 917823 - protein, 684 aa, Homo sapiens
MLVLSILLYTCEMFQDSVAFEDVAVTFTQEEWALLDPSQKNLCRDVMQETFRNLASIGKKWKPQNIYVEYENLRRNLRIVGERLFESKEGHQHGEILTQVPDDMLKKTTTGVKSCESSVYGEVGSAHSSLNRHIRDDTGHKAYEYQEYGQKPYKCKYCKKPFNCLSSVQTHERAHSGRKLYVCEECGKTFISHSNLQRHRIMHRGDGPYKCKFCGKALMFLSLYLIHKRTHTGEKPYQCKQCGKAFSHSSSLRIHERTHTGEKPYKCNECGKAFHSSTCLHAHKRTHTGEKPYECKQCGKAFSSSHSFQIHERTHTGEKPYECKECGKAFKCPSSVRRHERTHSRKKPYECKHCGKVLSYLTSFQNHLGMHTGEISHKCKICGKAFYSPSSLQTHEKTHTGEKPYKCNQCGKAFNSSSSFRYHERTHTGEKPYECKQCGKAFRSASLLQTHGRTHTGEKPYACKECGKPFSNFSFFQIHERMHREEKPYECKGYGKTFSLPSLFHRHERTHTGGKTYECKQCGRSFNCSSSFRYHGRTHTGEKPYECKQCGKAFRSASQLQIHGRTHTGEKPYECKQCGKAFGSASHLQMHGRTHTGEKPYECKQCGKSFGCASRLQMHGRTHTGEKPYKCKQCGKAFGCPSNLRRHGRTHTGEKPYKCNQCGKVFRCSSQLQVHGRAHCIDTP

SEQ ID NO: 917824 - protein, 638 aa, Homo sapiens
MQETFRNLASIGKKWKPQNIYVEYENLRRNLRIVGERLFESKEGHQHGEILTQVPDDMLKKTTTGVKSCESSVYGEVGSAHSSLNRHIRDDTGHKAYEYQEYGQKPYKCKYCKKPFNCLSSVQTHERAHSGRKLYVCEECGKTFISHSNLQRHRIMHRGDGPYKCKFCGKALMFLSLYLIHKRTHTGEKPYQCKQCGKAFSHSSSLRIHERTHTGEKPYKCNECGKAFHSSTCLHAHKRTHTGEKPYECKQCGKAFSSSHSFQIHERTHTGEKPYECKECGKAFKCPSSVRRHERTHSRKKPYECKHCGKVLSYLTSFQNHLGMHTGEISHKCKICGKAFYSPSSLQTHEKTHTGEKPYKCNQCGKAFNSSSSFRYHERTHTGEKPYECKQCGKAFRSASLLQTHGRTHTGEKPYACKECGKPFSNFSFFQIHERMHREEKPYECKGYGKTFSLPSLFHRHERTHTGGKTYECKQCGRSFNCSSSFRYHGRTHTGEKPYECKQCGKAFRSASQLQIHGRTHTGEKPYECKQCGKAFGSASHLQMHGRTHTGEKPYECKQCGKSFGCASRLQMHGRTHTGEKPYKCKQCGKAFGCPSNLRRHGRTHTGEKPYKCNQCGKVFRCSSQLQVHGRAHCIDTP

SEQ ID NO: 917825 - protein, 638 aa, Homo sapiens; identical to SEQ ID NO: 917824

SEQ ID NO: 917826 - protein, 241 aa, Homo sapiens
MGGGVQRRPWEKLFYNPTMEQRLQTAPMRVRPQFLIWCGRVRLWRGLGNDQAWHSPGHKYASSGPGDTKKGLKPHRPLLCSFLHSRGHEVPLEVCQDILVPVPHTSTRHEKQPFSFQASGGPLPAAALVSCWALGLAPAPATGSPHLEAQPRPFHSTHLDQRTLPPSETASPSGFPLLLVRPPSYESSFPQPPHPFYQVLREPPVTPRWLRQMCPLVPSEPTLRSQSWHFYFNFFIFLLHH

SEQ ID NO: 917827 - protein, 117 aa, Homo sapiens
MEHMLLANHTDKATFTGTQRQRSCSGASVSQPRPLRGKLVGYWDPHSRLLSRGRALGSVSAPSTPRGRGWKATFDGCILHDDLLTKVHGFQSLIGLQQHLACGDSGSLMKNCHDISA

SEQ ID NO: 917828 - protein, 154 aa, Homo sapiens
MRRLPLPGVWCQPPAWQRNSSPCSPKLLQAFCFPDSEWARCPVGTRLVSPPTGDDVKIQLSLVSPGDDILRLVFLQENRDRSPPTGLFHRPILFSPPVSFGSVFSLIQTRKSPLAQPRLLSWRRARGWSQPRWPRLLGKGRACKFEMKARKPRN

SEQ ID NO: 917829 - protein, 117 aa, Homo sapiens; identical to SEQ ID NO: 917827

SEQ ID NO: 917830 - protein, 184 aa, Homo sapiens
MPVHGNSTLALSFLGVCYGLLAGLPVSRLWPPVACLSSRVHREVVVALTGLPPSLCAPPPGAGSPRGPARSYPLLGHLLDPRSSRPAPRPVPPQPLGPPGPPQGVGTGGSLGGSRPLSSFPGRSSFAAPLTERRLPGPVSQGSAQPSNLWERALPRLNENSPVETVEKWLEGRRPKCLFLCDPM

SEQ ID NO: 917831 - protein, 121 aa, Homo sapiens
MRRLPLPGVWCQPPAWQRNSSPCSPKLLQAFCFPDSEWARCPVGTRLVSPPTGDDVKIQLSLVSPGDDILRLVFLQENRDRSPPTDGVSLCRPGWSVVAQSWLTATSDSQVQEILLHQPPK

SEQ ID NO: 917832 - protein, 218 aa, Homo sapiens
RKRISQAPSVSCRFGAMASQGRRRRPLRRPETVVPGEATETDSERSASSSEEEELYLGPSGPTRGRPTGLRVAGEAAETDSEPEPEPEPTAAPRDLPPLVVQRESAEEAWGTEEAPAPAPARSLLQLRLAESQARLDHDVAAAVSGVYRRAGRDVAALASRLAAAQAAGLAAAHSVRLARGDLCALAERLDIVAGCRLLPDIRGVPGTEPEKDPGPRA

SEQ ID NO: 917833 - protein, 1046 aa, Homo sapiens
QGARAAGGSGAGGGVAAAAVPLILEQLMALQQQQIHQLQLIEQIRSQVALMQRPPPRPSLSPAAAPSAPGPAPSQLPGLAALPLSAGAPAAAIAGSGPAAPAAFEGAQPLSRPESGASTPGGPAEPSAPAAPSAAPAPAAPAPAPAPQSAASSQPQSASTPPALAPGSLLGAAPGLPSPLLPQTSASGVIFPNPLVSIAATANALDPLSALMKHRKGKPPNVSVFEPKASAEDPFFKHKCRFCAKVFGSDSALQIHLRSHTGERPFKCNICGNRFSTKGNLKVHFQRHKEKYPHIQMNPYPVPEYLDNVPTCSGIPYGMSLPPEKPVTTWLDSKPVLPTVPTSVGLQLPPTVPGAHGYADSPSATPASRSPQRPSPASSECASLSPGLNHVESGVSATAESPQSLLGGPPLTKAEPVSLPCTNARAGDAPVGAQASAAPTSVDGAPTSLGSPGLPAVSEQFKAQFPFGGLLDSMQTSETSKLQQLVENIDKKMTDPNQCVICHRVLSCQSALKMHYRTHTGERPFKCKICGRAFTTKGNLKTHFGVHRAKPPLRVQHSCPICQKKFTNAVVLQQHIRMHMGGQIPNTPLPEGFQDAMDSELAYDDKNAETLSSYDDDMDENSMEDDAELKDAATDPAKPLLSYAGSCPPSPPSVISSIAALENQMKMIDSVMSCQQLTGLKSVENGSGESDRLSNDSSSAVGDLESRSAGSPALSESSSSQALSPAPSNGESFRSKSPGLGAPEEPQEIPLKTERPDSPAAAPGSGGAPGRAGIKEEAPFSLLFLSRERGPSQSTPSLISSAAPTMIKMEVNGHGKAMALGEGPPLPAGVQVPAGPQTVMGPGLAPMLAPPPRRTPKQHNCQSCGKTFSSASALQIHERTHTGEKPFGCTICGRAFTTKGNLKVHMGTHMWNNAPARRGRRLSVENPMALLGGDALKFSEMFQKDLAARAMNVDPSFWNQYAAAITNGLAMKNNEISVIQNGGIPQLPVSLGGSALPPLGSMASGMDKARTGSSPPIVSLDKASSETAASRPFTRFIEDNKEIGIN

SEQ ID NO: 917834 - protein, 107 aa, Homo sapiens
AGRWPWDVLELMFLCLRESKRRGAQSESPSSRRCKVGDSRGQKGARAWASEGARPGPFELQNILCVAMWVLHLRRKLLESLSTERPHSLIYICWFCLLYSIKQDVCM

SEQ ID NO: 917835 - protein, 866 aa, Homo sapiens
MYIKLIIATPEIQDFVKVLRSPHWTNGRKSKKASKTRESPKEAVREESTDLASCLQYSQQFTGELERTLFALSTQQKNMDSVSPTASLIPWQPSFPDGGVEAGYEALDANQQLQQAMEERAQLEVHLGQVMGSLKQLQMEKDQHAENLKGESALWWQRMREMSEQVHALREETVHSMSRVQELETILAELRNQMVSNRYLCGGLWIIRYPEGSGSKRPWAMTQYQEVTVALDSSYITISRRNKTIESLIPMLQPLPHMSWGCGFSGKHWPDWLSGAPYFHSDSGPNLLFDSGQATSPPWACVSRGGKARKPAKPGSPKEAITEEAEDLASHLLYSWQHVGELEQEQRKADRSQPGAVSAAVGELGGAVGSEHWMQSSEAKCLPCPYLAVALVNNSNKELKQENSALAEQLQVVLIDKAGMQCDLEELKKKLELTELTLQQLSSWCEAPDANQQLQQPTDERAQLEAHLGQVMEWLKYLQMEREQYAEYLHGESAMWWQRMREMSEQVHTLREERVHSMSRVQELETILAELRNQVAEPLPPEPPAGPSEVEQKLQAEAEHLWKELENLAGQLQAQVEENEGLSHLNQEQEEVAQVVGARGEVAGARGEVAGARGEVAGARGEATGAAGEPARAEAEGRFLSQLNPYPEPPAGPSEVEALRHTVRNDRTTIRRALSQKHELKKYLGELKEMERLEAEPVATGPVESHGSPWGSAEEEQAQLHGQLKEQRVHCQRLSYPVALAQKEPEAAASAPGTGGDSVWGNPPDLAGDHGEAAGEKVRHIIPEPEVSAEDVDRENEYISRLAQDKEEMKVKLLELVLQLVGDCNKWHGRFLAAAQNPADEPAPWDPAPQEIGAANKQGDLPQCGA

SEQ ID NO: 917836 - protein, 151 aa, Homo sapiens
MVKRMWFFRWEIREDLSGKETFESKSEEGGSESSESVKNFLSKASSKHEGSQEGVCLVSSKNKQASVAGKYYINQELWDAGLSQPKEGESGFFRPIMKIFYSCQSRTYELSSLEQVTGPFRTSVSLLWNGDNNTCFTRQLRGSSEICENIV

SEQ ID NO: 917837 - protein, 775 aa, Homo sapiens
MSPQPILYGFLVLGFRAAWGHPKMPTAAKSLVVSKDKCEPSVMPGQGHQGAPWSSSDASVWEDARCQAVRGLAVAKSVKEHPLLSRPGKGVSFSPGEFREDCSSTSCGGPDISQDSVAFEDVAINFTCEEWALLGPSQKSLYRDVMQETIRNLDCIGMIWQNHDIEEDQYKDLRRNLRCHMVERACEIKDNSQCGGPFTQTQDSIVNEKIPGVDPWESSECTDVLMGRSSLNCYVRVDSEHKPCEYQEYGEKPYTHTQCGTAFSYQPCFQIHERPQHGKKLYDCKECASFSSLENLQRHMAAHHGDGPRICKLCGNAFIWPSLFHMLRRTHTEEKPYEYEQCSTAFPAYSSTLRHERTHSGEKPYQCKQCGKAFSCSCYTQLYERTHTGEQSYECKQCGKAFYHLGSFQRHMIVHTGDGPHKCKICGKGFLSPSSVRRHKRTHTGEKPYECKYCGKAFSDCTGFRRHMITHTGDGPHKCKVCGKAFDSPSLCRRHETTHTGEKPYKCECGKAFSDFYYFRNHETTHTGEKPYKCKQCGKAFISFRSSNYIRVHEKTHTGEKPYECKQCGKALSHLKSFQRHMIMHTGDGPHKCKICGKSFDSPSSFRRHERIHTGERPYKCKLCGKGFRSSSYIQLHERTHTGEKPYGCQQCGKALSDLSSFRRHMITHTGNGPHKCKICGKGFDYPSSVQRHERTHTGEKPYECKECGKAFSHSSYLRIHERVHTGEKPYKCKECGKPFHCPSAFHKHERTHIRVHVSNNVRICGVCEYKIFKC

SEQ ID NO: 917838 - protein, 240 aa, Homo sapiens
MSGELAVWRVTEGAGCMSGELAVCRVTEGAGCMSGELAVCRVTEGAGCMSGELAVCRVTEGAGCMSGELAVCRVTEGAGCMSGELAVCTVTEGASCMSGEPAVCRVTEGARCMSGEPAVWRVTEGAGCMSGELAVWRVTEGAGCMSGELAVWRVTEGAGCMSGELAVCTVTEGAGCMSGELAVCRVTEGPCCVSGELAVCRVTEGPCCISGECIRSVLICLIPDHVSTQDTCVCVKGVRS

SEQ ID NO: 917839 - protein, 167 aa, Homo sapiens
GVLQCSASCGKGVWKRTVACTNSQGKCDASTRPRAEEACEDYSGCYEWKTGDWSTCSSTCGKGLQSRVVQCMHKVTGRHGSECPALSKPAPYRQCYQEVCNDRINANTITSPRLAALTYKCTRDQWTVYCRVIREKNLCQDMRWYQRCCQTCRDFYANKMRQPPPSS

SEQ ID NO: 917840 - protein, 187 aa, Homo sapiens
FPSPCWAKKRILIMMARKMAMISWYAVVVAVNAVGTLPPCIILAVTISAHINLTASNHEHLCLFERFLYLSKNIRGVLDKISAWETRETQNRDMNKSTLERPYANSLSPTHHLMLVDVLMGSVSYITESTVYSMAAQYERGVLMEQVFVWGPHFSSVTGVPSSTHKSTDTITELNLGLPAQCRKAKH

SEQ ID NO: 917841 - protein, 144 aa, Homo sapiens
MPRQKFAVGGTAEGKYGVRAPTQCPYWAPPSGAVKRQPTSSSPQNGRSTDSLHCEPGKASNTQHQPVKAAGREAVACKATGLELPKTMETLLFHQRDLDKEIINGSAENAGVDILNQAGNILRARKRRGLKNLTTNLLESEPAT

SEQ ID NO: 917842 - protein, 144 aa, Homo sapiens
MAWPIQPADLIPSSPLLQAPPLPATVLGLQLPQLNRGLSPAALKAFRGWLSFVRLGICPSVLLKGPPRIRGWIWQKSWRGSAARSRDDTSLLGGESTSAEKGEATCLDPSRRAPVPCKAACHPPPSLPPLPSSPGLPPPSDLKK

SEQ ID NO: 917843 - protein, 622 aa, Homo sapiens
MGSLTFRDVAIQFSLEEWQCLDTAQQNLYRNVMLENYRNLVFLGIAAPKPDLIIFLEQGKEPWNMKRHELVKEPPVICSHFAQDLWPEQGREDSFQKVILRRYEKCGHENLQLKIGCTNVDECKVHKKGYNKLNQSLTTTQSKVFQCGKYANIFHKCSNSKRHKIRHTGKKLLKCKEYVRSFCMLSHLSQHKRIYTRENSYKSEEHGKAFNWSSALTYKRIHTGEKPCKCEECGKAFSKFSILTKHKVIHTGEKHYKCEECGKAFTRSSSLIEHKRSHAGEKPYKCEECGKAFSKASTLTAHKTIHAGEKPYKCEECGKAFNRSSNLMEHKRIHTGEKPCKCEECGKAFGNFSTLTKHKVIHTGEKPYKCEECGKAFSWPSSLTEHKRIHAGDKPYKCEECGKTFKWSSTLTKHKIIHTGEKPYKCEECGKAFTTFSSLTKHKVIHTGEKHYKCEECGKVFSWSSSLTTHKAIHAGEKLYKCEECGKAFKWSSNLMEHKRIHTGEKPYKCEECGKAFSKVANLTKHKVIHTGEKQYKCEECGKAFIWSSRLSEHKRIHTGEKPYKCEECGKAFSWVSVLNKHKKIHAGKKFYKCEECGKDFNQSSHLTTHKRIHTGGKTLQM

SEQ ID NO: 917844 - protein, 470 aa, Homo sapiens
MEPLRAPALRRLLPPLLLLLLSLPPRARAKYVRGNLSSKEVSMPSPPLRPAGPRGTQGRRGERVPPRPLPPLLADSGSLGGVGPRAMGDWARVEAKGSRRVAARPGGCRRDVEDWVFLTRFCFLSDYGRLDFRFRYPEAKCCQNILLYFDDPSQWPAVYKAGDKDCLAKESVIRPENNQVINLTTQYAWSGCQVVSEEGTRYLSCSSGRSFRSVRERWWYIALSKCGGDGLQLEYEMVLTNGKSFWTRHFSADEFGILETDVTFLLIFILIFFLSCYFGFLSLLFFCIYWGQYATDGIGNESVKILAKLLFSSSFLIFLLMLILLGKGFTVTRGRISHAGSVKLSVYMTLYTLTHVVLLIYEAEFFDPGQVLYTYESPAGYGLIGLQVAAYVWFCYAVLVSLRHFPEKQPFYVPFFAAYTLWFFAVPVMALIANFGIPKWAREKIVNGIQLGIHLYAHGVFLVLLPQPPE

SEQ ID NO: 917845 - protein, 170 aa, Homo sapiens
MPRVYIGRLSYNVQEKAIQRFFSGYGRLLEVDLKNGYGFVEFEDSRDTDDALYELNSEELCGERVIVEHARGPRRNRDSYSYGSRRGGGGYSSRRHLAETNTDHLSRSKGRSRSRSKGRKSRSKSKSKPKSDRGSHSHSRSRSKDEYEKYRSRSRSRSKSRSRSRSSSRD

SEQ ID NO: 917846 - protein, 152 aa, Homo sapiens
LNKESDKMHSKQGRNKQQKQRFIENESTFYKVGAGLSSGSRAPVTESSGVQLPPRGFPLATGVHPMQMKWWPSINLIGCRKQPSEANMKLQSYTPMQPSDWFWKAANQRLRPWKGKRDLRDPKPGNMRNVNGQDQFLPTKTLLHGRRPCSMA

SEQ ID NO: 917847 - protein, 487 aa, Homo sapiens
MAREGLRTLVVAKKALTEEQYQDFEPMQSSSVESTHSTYTCAHRRLPLCPQSRYTQAKLSMHDRSLKVAAVVESLEREMELLCLTGVEDQLQADVRPTLEMLRNAGIKIWMLTGDKLETATCIAKSSHLVSRTQDIHIFRQVTSRGEAHLELNAFRRKHDCALVISGDSLEVCLKYYEHEFVELACQCPAVVCCRCSPTQKARIVTLLQQHTGRRTCAIGDGGNDVSMIQAADCGIGIEGKRTLGQQTLSTCLVNTHQHVLSAQSAHTRYTLGRRTSAHAQRTAHTRHTVITRQLVPSAQSAHTQHTVSAHQHVLSAQSAHSTHSVSARQHVLSAQSAHTAHTCLVHISTCSAHTWHTRLAHYTCSAHGRAHTQITRESFNRAGPDSAALLTPVTPMEGKQASLAADFSITQFRHIGRLLMVHGRNSYKRSAALGQFVMHRGLIISTMQVLVELTVVFVCGLSLQAVFSSVFYFASVPLYQGFLMVG

SEQ ID NO: 917848 - protein, 750 aa, Homo sapiens
MDPVACEDVAVNFTQEEWALLDISQRKLYREVMLETFRNLTSIGKKWKDQNIEYEYQNPRRNFRSLIEGNVNEIKEDSHCGETFTQVPDDRLNFQEKKASPEAKSCDNFVCGEVGIGNSSFNMNIRGDIGHKAYEYQDYAPKPYKCQQPKKAFRYHPSFRTQERNHTGEKPYACKECGKTFISHSGIRRRMVMHSGDGPYKYYILSMKELTLERNRMNVNNVLNPLVILLPIEYMKELTLEKSLMNVSNVGKHSIVPVLFKHIKEPTLGESHMNVNNVANPSVGVIPFKYMKELTLGRSPVNVANVIKHSVVTDPILDIKGVTRERSLINVRNVEKHSRIPVPFVDMKGPTLRKNLMNVSSVGKHYLISFQTHLRMRSGERPYKFPFSIMKGLTLERNPMSVSNVGKPSDVPHTFEGMVGLTGEKPYECKECGKAFRSASHLQIHERTQTHIRIHSGERPYKCKTCGKGFYSPTSFQRHEKTHTAEKPYECKQCGKAFSSSSSFWYHERTHTGEKPYECKQCGKAFRSASILQMHAGTHPEEKPYECKQCGKAFRSAPHLRIHGRTHTGEKPYECKECGKAFRSAKNLRIHERTQTHVRMHSVERPYKCKICGKGFYSAKSFQIPEKSYTGEKPYECKQCGLQLPRTAAESVDSEKLQGPGKQETHVQDALSNRGAGAGPCQLFNPPEGGRSIAGLLIAWLLEETRSRDSFFPALRGTRSLLRSFCLSIACAVSWTAHGSSAGDAGISGS

SEQ ID NO: 917849 - protein, 750 aa, Homo sapiens; identical to SEQ ID NO: 917848

SEQ ID NO: 917850 - protein, 750 aa, Homo sapiens; identical to SEQ ID NO: 917848

SEQ ID NO: 917851 - protein, 952 aa, Homo sapiens
LSLFRAESPTTASPALGGPAPGCSRRTPPPPMAPLALVGVTLLLAAPPCSGAATPTPSLPPPPANDSDTSTGGCQGSYRCQPGVLLPVWEPDDPSLGDKAARAVVYFVAMVYMFLGVSIIADRFMAAIEVITSKEKEITITKANGETSVGTVRIWNETVSNLTLMALGSSAPEILLSVIEVCGHNFQAGELGPGTIVGSAAFNMFVVIAVCIYVIPAGESRKIKHLRVFFVTASWSIFAYVWLYLILAVFSPGVVQVWEALLTLVFFPVCVVFAWMADKRLLFYKYVYKRYRTDPRSGIIIGAEGDPPKSIELDGTFVGAEAPGELGGLGPGPAEARELDASRREVIQILKDLKQKHPDKDLEQLVGIANYYALLHQQKSRAFYRIQATRLMTGAGNVLRRHAADASRRAAPAEGAGEDEDDGASRIFFEPSLYHCLENCGSVLLSVTCQGGEGNSTFYVDYRTEDGSAKAGSDYEYSEGTLVFKPGETQKELRIGIIDDDIFEEDEHFFVRLLNLRVGDAQGMFEPDGGGRPKGRLVAPLLATVTILDDDHAGIFSFQDRLLHVSECMGTVDVRVVRSSGARGTVRLPYRTVDGTARGGGVHYEDACGELEFGDDETMKTLQVKIVDDEEYEKKDNFFIELGQPQWLKRGISALLLNQGDGDRKLTAEEEEARRIAEMGKPVLGENCRLEVIIEESYDFKNTVDKLIKKTNLALVIGTHSWREQFLEAITVSAGDEEEEEDGSREERLPSCFDYVMHFLTVFWKVLFACVPPTEYCHGWACFGVSILVIGLLTALIGDLASHFGCTVGLKDSVNAVVFVALGTSIPDTFASKVAALQDQCADASIGNVTGSNAVNVFLGLGVAWSVAAVYWAVQGRPFEVRTGTLAFSVTLFTVFAFVGIAVLLYRRRPHIGGELGGPRGPKLATTALFLGLWLLYILFASLEAYCHIRGF

SEQ ID NO: 917852 - protein, 545 aa, Homo sapiens
ITCLMPVDPHTWEFFYGTYVSSGKHVQTPPVQHTADDRPSPRSSPSPPRRSEGTLVFKPGETQKELRIGIIDDDIFEEDEHFFVRLLNLRVGDAQGMFEPDGGGRPKGRLVAPLLATVTILDDDHAGIFSFQDRLLHVSECMGTVDVRVVRSSGARGTVRLPYRTVDGTARGGGVHYEDACGELEFGDDETMKTLQVKIVDDEEYEKKDNFFIELGQPQWLKRGISGDGDRKLTAEEEEARRIAEMGKPVLGENCRLEVIIEESYDFKNTVDKLIKKTNLALVIGTHSWREQFLEAITVSAGDEEEEEDGSREERLPSCFDYVMHFLTVFWKVLFACVPPTEYCHGWACFGVSILVIGLLTALIGDLASHFGCTVGLKDSVNAVVFVALGTSIPGNTLGDFGGVGSQMSQAGATQDPAKMNTFASKVAALQDQCADASIGNVTGSNAVNVFLGLGVAWSVAAVYWAVQGRPFEVRTGTLAFSVTLFTVFAFVGIAVLLYRRRPHIGGELGGPRGPKLATTALFLGLWLLYILFASLEAYCHIRGF

SEQ ID NO: 917853 - protein, 365 aa, Homo sapiens
VGAAEIGRGRKRIAEMGKPVLGENCRLEVIIEESYDFKNTVDKLIKKTNLALVIGTHSWREQFLEAITVSAGDEEEEEDGSREERLPSCFDYVMHFLTVFWKVLFACVPPTEYCHGWACFGVSILVIGLLTALIGDLASHFGCTVGLKDSVNAVVFVALGTSIPGNTLGDFGGVGSQMSQAGATQDPAKMRHVRQQGGGAAGPVRRRVHRQRDRLQRGERVPWPGRRLVCGRRVLGGAGPPLRGAHWHAGLLRHALHRLRLRGHCRAAVPAPAAHRRRAGRPARTQARHHRALPGPLAPVHPLRQPGGVLPHPGLLGPRAETRPHRPPGARDSAAPALGPWSPFPPRLGLLSWDSASLLRPLPWL

SEQ ID NO: 917854 - protein, 1028 aa, Homo sapiens
LSLFRAESPTTASPALGGPAPGCSRRTPPPPMAPLALVGVTLLLAAPPCSGAATPTPSLPPPPANDSDTSTGGCQGSYRCQPGVLLPVWEPDDPSLGDKAARAVVYFVAMVYMFLGVSIIADRFMAAIEVITSKEKEITITKANGETSVGTVRIWNETVSNLTLMALGSSAPEILLSVIEVCGHNFQAGELGPGTIVGSAAFNMFVVIAVCIYVIPAGESRKIKHLRVFFVTASWSIFAYVWLYLILAVFSPGVVQVWEALLTLVFFPVCVVFAWMADKRLLFYKYVYKRYRTDPRSGIIIGAEGDPPKSIELDGTFVGAEAPGELGGLGPGPAEARELDASRREVIQILKDLKQKHPDKDLEQLVGIANYYALLHQQKSRAFYRIQATRLMTGAGNVLRRHAADASRRAAPAEGAGEDEDDGASRIFFEPSLYHCLENCGSVLLSVTCQGGEGNSTFYVDYRTEDGSAKAGSDYEYSEGTLVFKPGETQKELRIGIIDDDIFEEDEHFFVRLLNLRVGDAQGMFEPDGGGRPKGRLVAPLLATVTILDDDHAGIFSFQDRLLHVSECMGTVDVRVVRSSGARGTVRLPYRTVDGTARGGGVHYEDACGELEFGDDETMKTLQVKIVDDEEYEKKDNFFIELGQPQWLKRGISALLLNQGDGDRKLTAEEEEARRIAEMGKPVLGENCRLEVIIEESYDFKNTVDKLIKKTNLALVIGTHSWREQFLEAITVSAGDEEEEEDGSREERLPSCFDYVMHFLTVFWKVLFACVPPTEYCHGWACFGVSILVIGLLTALIGDLASHFGCTVGLKDSVNAVVFVALGTSIPGNTLGDFGGVGSQMSQAGATQDPAKMRHVRQQGGGAAGPVRRRVHRQRDRLQRGERVPWPGRRLVCGRRVLGGAGPPLRGAHWHAGLLRHALHRLRLRGHCRAAVPAPAAHRRRAGRPARTQARHHRALPGPLAPVHPLRQPGGVLPHPGLLGPRAETRPHRPPGARDSAAPALGPWSPFPPRLGLLSWDSASLLRPLPWL

SEQ ID NO: 917855 - protein, 227 aa, Homo sapiens
MPQLGRVPTGDEEEEEDGSREERLPSCFDYVMHFLTVFWKVLFACVPPTEYCHGWACFGVSILVIGLLTALIGDLASHFGCTVGLKDSVNAVVFVALGTSIPDTFASKVAALQDQCADASIGNVTGSNAVNVFLGLGVAWSVAAVYWAVQGRPFEVRTGTLAFSVTLFTVFAFVGIAVLLYRRRPHIGGELGGPRGPKLATTALFLGLWLLYILFASLEAYCHIRGF

SEQ ID NO: 917856 - protein, 241 aa, Homo sapiens
MSIKTTCRKTQCKSATKIFLIQINLTSLANPVLRSKKPRKIPENNKGWQECEETGNFVRCWWALNPKQVFLQETQRRQQCEGGGREGSDAATTTRSWKGERVKSPLESLDGHGPADTLISDFWPPNHERICFGAHQAKGRRDQGKWPGPLPSSTAADLSQEHSCGQPRTLLPEINLLSPPALKPLWVMKEMLTLSTTRMRLEDSTKRNKLGTRGQIPHEATYVRDQEYLIIQSTQIHRDRG

SEQ ID NO: 917857 - protein, 260 aa, Homo sapiens
MLSVVENGLDPQAAIPVIKKKLVGSVKALQKQYVSLDTVVTSEDGDANTMCSALEAVFIHGLHAKHIRAEAGGKRKKSAHQKPLPQPVFWPLLKAVTHKHIISELEHLTFVNMDVGRCRAWLRLALNNGLMECYLKLLLQEQARLQLQRKESLDSISHSSGSEDIEVHHSGHKIRRNQKPTASSLSLDTASSSQLSCSLNSDSCLLQENGSKSPDHCEEPMSYDSDLGTANAEDSDQSLQEKTRAGSQRMTSTGLPGSNP

SEQ ID NO: 917858 - protein, 232 aa, Homo sapiens
MASGAGAPLPVVSGRETASSARRLRGCRGRERPSPRSSLRLVSCDSLREQLREWRCFQWWRMDWTPRLPSRHIISELEHLTFVNMDVGRCRAWLRLALNNGLMECYLKLLLQEQARLQLQRKESLDSISHSSGSEDIEVHHSGHKIRRNQKPTASSLSLDTASSSQLSCSLNSDSCLLQENGSKSPDHCEEPMSYDSDLGTANAEDSDQSLQEKTRAGSQRMTSTGLPGSNP

SEQ ID NO: 917859 - protein, 183 aa, Homo sapiens
MLSVVENGLDPQAAIPVIKKKLVGSVKALQKQHIISELEHLTFVNMDVGRCRAWLRLALNNGLMECYLKLLLQEQARLQLQRKESLDSISHSSGSEDIEVHHSGHKIRRNQKPTASSLSLDTASSSQLSCSLNSDSCLLQENGSKSPDHCEEPMSYDSDLGTANAEDSDQSLQESRIPRRPAP

SEQ ID NO: 917860 - protein, 293 aa, Homo sapiens
MDTILVFSLIIASYDANKKDLRDSSCRLEQLPGIFPKDVRSIRELQMQETHTETKRTTFIQNRTIATLQCLGSDSKVKVNLVYLERRPKVKHILKNLRIIAAPRRNSSASSSCHLIPTSKFQTGSLLKGKAFLPGISQCKVLGASSETFPTSAPSITPGNKEGEKTTSTDTDENLEKRQKWSIVVKILIAVTLLLSGVAIIVFVIFEVPCPYQCLGARKLCQCQWLWRWQKKGGQPPGTAESKPDSQPQKESVLCVVYVICLKKCNYRLTKRQNEVHLELHGVLYLASPFLGT

SEQ ID NO: 917861 - protein, 165 aa, Homo sapiens
PGRGPFTCTQLHGRMAAEFHPESRHRNTGIVAAALASAPTLTYSLGENESFSPSIPTTCLHGEGEKADELLMNCGGDFDGTFFSTKSQQRLGVGQKYSECSFDKSFIGYAFTWEDGSLRERPCGHSFSIGPLVAEGDLHSGTFLYRHRADGPRPSPTFSLRTINQ

SEQ ID NO: 917862 - protein, 402 aa, Homo sapiens
AGPGASGGGGGGGTMGRARRFQWPLLLLWAAAAGPGAGQEVQTENVTVAEGGVAEITCRLHQYDGSIVVIQNPARQTLFFNGTRALKDERFQLEEFSPRRVRIRLSDARLEDEGGYFCQLYTEDTHHQIATLTVLVAPENPVVEVREQAVEGGEVELSCLVPRSRPAATLRWYRDRKELKGVSSSQENGKVWSVASTVRFRVDRKDDGGIIICEAQNQALPSGHSKQTQYVLDVQYSPTARIHASQAVVREGDTLVLTCAVTGNPRPNQIRWNRGNESLPERAEAVGETLTLPGLVSADNGTYTCEASNKHGHARALYVLVVYDPGAVVEAQTSVPYAIVGGILALLVFLIICVLVGMVWCSVRQKGSYLTHEASGLDEQGEAREAFLNGSDGHKRKEEFFI

SEQ ID NO: 917863 - protein, 402 aa, Homo sapiens; identical to SEQ ID NO: 917862

SEQ ID NO: 917864 - protein, 402 aa, Homo sapiens; identical to SEQ ID NO: 917862

SEQ ID NO: 917865 - protein, 344 aa, Homo sapiens
AGPGASGGGGGGGTMGRARRFQWPLLLLWAAAAGPGAGQEVQTENVTVAEGGVAEITCRLHQYDGSIVVIQNPARQTLFFNGTRALKDERFQLEEFSPRRVRIRLSDARLEDEGGYFCQLYTEDTHHQIATLTVLVAPENPVVEVREQAVEGGEVELSCLVPRSRPAATLRWYRDRKELKGVSSSQENGKVWSVASTVRFRVDRKDDGGIIICEAQNQALPSGHSKQTQYVLDVQYSPTARIHASQAVVREGDTLVLTCAVTGNPRPNQIRWNRGNESLPERAEAVGETLTLPGLVSADNGTYTCEASNKHGHARALYVLVVYGESRLRPTEGGGGAPGGGGGA

SEQ ID NO: 917866 - protein, 319 aa, Homo sapiens
CHLGPWFPMVAGNRQLDRFEPTFVPSLTPYFPSPCGSGPRESCGGGPGAGGRGRRGGAQLPRSAVPSGCHPALVPGPQGAERTTVVSSSVRRRTRRCPPDTASRRSTCWMCSVSDRRARTQGIPTPATRTREGPPCLRDGLETTLSSYFCLTDSPTARIHASQAVVREGDTLVLTCAVTGNPRPNQIRWNRGNESLPERAEAVGETLTLPGLVSADNGTYTCEASNKHGHARALYVLVVYDPGAVVEAQTSVPYAIVGGILALLVFLIICVLVGMVWCSVRQKGSYLTHEASGLDEQGEAREAFLNGSDGHKRKEEFFI

SEQ ID NO: 917867 - protein, 371 aa, Homo sapiens
WHHSHFIDGATEAPKGAGQEVQTENVTVAEGGVAEITCRLHQYDGSIVVIQNPARQTLFFNGTRALKDERFQLEEFSPRRVRIRLSDARLEDEGGYFCQLYTEDTHHQIATLTVLVAPENPVVEVREQAVEGGEVELSCLVPRSRPAATLRWYRDRKELKGVSSSQENGKVWSVASTVRFRVDRKDDGGIIICEAQNQALPSGHSKQTQYVLDVQYSPTARIHASQAVVREGDTLVLTCAVTGNPRPNQIRWNRGNESLPERAEAVGETLTLPGLVSADNGTYTCEASNKHGHARALYVLVVYDPGAVVEAQTSVPYAIVGGILALLVFLIICVLVGMVWCSVRQKGPEVRAQRSGSPRGQGPKVQTPQVQ

SEQ ID NO: 917868 - protein, 344 aa, Homo sapiens; identical to SEQ ID NO: 917865

SEQ ID NO: 917869 - protein, 347 aa, Homo sapiens
AGPGASGGGGGGGTMGRARRFQWPLLLLWAAAAGPGAGQEVQTENVTVAEGGVAEITCRLHQYDGSIVVIQNPARQTLFFNGTRALKDERFQLEEFSPRRVRIRLSDARLEDEGGYFCQLYTEDTHHQIATLTVLVAPENPVVEVREQAVEGGEVELSCLVPRSRPAATLRWYRDRKELKGVSSSQENGKVWSVASTVRFRVDRKDDGGIIICEAQNQALPSGHSKQTQYVLDVQYSPTARIHASQAVVREGDTLVLTCAVTGNPRPNQIRWNRGNESLPERAEAVGETLTLPGLVSADNGTYTCEASNKHGHARALYVLVVYGNRTCLRLSLPISKVEINNSTYIT

SEQ ID NO: 917870 - protein, 151 aa, Homo sapiens
MSLQDSTLSREGKPEGEIMAAVFFSVGRLSPEVTQPDEDLHLQAEETQLVKESVTFKDVAIDFTLEEWRLMDPTQRNLHKDVMLENYRNLVSLGLAVSKPDMISHLENGKGPWVTVREISRIPYPGSHSITQAGMQWCDHSSLQSQTPGLK

SEQ ID NO: 917871 - protein, 146 aa, Homo sapiens
IKEFGEVAELQRKGRGLRLLLRRETTQNDRWRARALGRRCPSFYDLVNCVSFLFLFFSLPLLLLLLLFFFNRYTLERRSRHRFPRRLTLRSKSRASWTRSLWPGGTNSSLGHFERAVPTFSVACGRGEDLLSPSNEGKCETLALYL

SEQ ID NO: 917872 - protein, 126 aa, Homo sapiens
PSGRQDVPPAPSSPRPRPSPQYVFFRFLNFLFLSLQVVLSGVNRQHRWPPGASPSRSLGEAGGERPARALRRPRAPGRAGGGGPPGGGIPACSIGPGLARLAALGGLPSILESSRLLPSPRSSACL

SEQ ID NO: 917873 - protein, 358 aa, Homo sapiens
MRGPLGWPQPEDGPGRNPTADFRTASLAKGVPRGLSGAQTRGLLDGPAPRRSPRSSLGLRGGDCGRGARAGSSWREKCRVHVSARGPSASETNPRGEPRALAVCAPDAGTPPAALFLAVELPGPAQRVQRSFRKRHNFDATVSIVLGFLMITNVICLGSKLCKSAGLNSAGGCVCGEALTTRSLTAEQGTKRAECGGGGGSRSRSGMGVFSVTDCTELLAHRSHSGCPGRTLMYAVGWCSPGHSSQFHGVVDKCGERGPFSGNASTSGTVTAEQFCRPGHRLAIGLTPGRGGPWITRRLGSRLRRVWEGTLTCFQRDLVLVGSAAKRDRVENKIQGVGTPSRGASPAQPISLSCHGVE

SEQ ID NO: 917874 - protein, 126 aa, Homo sapiens; identical to SEQ ID NO: 917872

SEQ ID NO: 917875 - protein, 520 aa, Homo sapiens
MDVVEVAGSWWAQEREDIIMKYEKALATLYLGPLTKAPSGLQGHQAGLPEDKGPKPFRSYNNNVDHLGIVHETELPPLTAREAKQIRREISRKSKWVDMLGDWEKYKSSRKLIDRAYKGMPMNIRGPMWSVLLNIEEMKLKNPGRYQIMKEKGKRSSEHIQRIDRDISGTLRKHMFFRDRYGTKQRELLHILLAYEEYNPEVGYCRDLSHIAALFLLYLPEEDAFWALVQLLASERHSLQGFHSPNGGTVQGLQDQQEHVVATSQPKTMGHQDKKDLCGQCSPLGCLIRILIDGISLGLTLRLWDVYLVEGEQALMPITRIAFKVQQKRLTKTSRCGPWARFCNRFVDTWARDEDTVLKHLRASMKKLTRKQGDLPPPAKPEQGSSASRPVPASRGGKTLCKGDRQAPPGPPARFPRPIWSASPPRAPRSSTPCPGGAVREDTYPVGTQGVPSPALAQGGPQGSWRFLQWNSMPRLPTDLDVEGPWFRHYDFRQSCWVRAISQEDQLAPCWQAEHPAERV

SEQ ID NO: 917876 - protein, 163 aa, Homo sapiens
MRFGLEDSEYNALERRWNPCEAQDNLPVWLVLIPSEYQRSRRLQMLSSGIQTKDLILAEAATAASAGGTPLGSLSDLVSSTWSKYAEGTQKSRQFPRATHDCQPSRPAVLTVHGPGPWESLMWVSHESAWTQSRHWRNRSDSHDSGMRMFCPRSTAEKIMLKP

SEQ ID NO: 917877 - protein, 476 aa, Homo sapiens
CCRSHRMAAVVLPPTAGAQRSSVSDRAALGTWDLGIWVSVDVTCVVNVLELLNSPFSSFCEPDKNTREGHTEGGELVNELLKSWLKGLVTFEDVAVEFTQEEWALLDPAQRTLYRDVMLENCRNLASLGNQVDKPRLISQLEQEDKVMTEERGILSGTCPDVENPFKAKGLTPKLHVFRKEQSRNMKMERNHLGATLNECNQCFKVFSTKSSLTRHRKIHTGERPYGCSECGKSYSSRSYLAVHKRIHNGEKPYECNDCGKTFSSRSYLTVHKRIHNGEKPYECSDCGKTFSNSSYLRPHLRIHTGEKPYKCNQCFREFRTQSIFTRHKRVHTGEGHYVCNQCGKAFGTRSSLSSHYSIHTGEYPYECHDCGRTFRRRSNLTQHIRTHTGEKPYTCNECGKSFTNSFSLTIHRRIHNGEKSYECSDCGKSFNVLSSVKKHMRTHTGKKPYECNYCGKSFTSNSYLSVHTRMHNRQM

SEQ ID NO: 917878 - protein, 167 aa, Homo sapiens
TWILQVPVQDLHAVMVLFDEILQSRCFHPQWQRPLGPFSSYGSSVFTQLNLATAHSSSPCLNRLELSFHSLPTTADRCHRRPVLTSTPQGSVGCPLASDPARRCPLLLPIGLEARHCSWVAKCLELQDSPLFWHCCPPAEDQADIFRRHMEVMVNFATVKTKVNWVH

SEQ ID NO: 917879 - protein, 512 aa, Homo sapiens
RIPSSVTRRWLWVGAAGTAEATARLNVFAKPEATEVSPNKGTLSVMEDSAQEIATCNSRNGNPAPKITWYRNGQRLEVPVEMNPEGYMTSRTVREASGLLSLTSTLYLRLRKDDRDASFHCAAHYSLPEGRHGRLDSPTFHLTLHYPTEHVQFWVGSPSTPAGWVREGDTVQLLCRGDGSPSPEYTLFRLQDEQEEVLNVNLEGNLTLEGVTRGQSGTYGCRVEDYDAADDVQLSKTLELRVAYLDPLELSEGKVLSLPLNSSAVVNCSVHGLPTPALRWTKDSTPLGDGPMLSLSSITFDSNGTYVCEASLPTVPVLSRTQNFTLLVQGSPELKTAEIEPKADGSWREGDEVTLICSARGHPDPKLSWSQLGGSPAEPIPGRQGWVSSSLTLKVTSALSRDGISCEASNPHGNKRHVFHFGTVSPQTSQAGVAVMAVAVSVGLLLLVVAVFYCVRRKGGPCCRQRREKGAPPPGEPGLSHSGSEQPEQTGLLMGGASGGARGGSGGFGDEC

SEQ ID NO: 917880 - protein, 564 aa, Homo sapiens
APRPQTDRSGARPRLASAEMQGSELQVTMHDTRGRSPPYQLDSQGRLVLAEPGGDERDYVCVVRVGAAGTAEATARLNVFAKPEATEVSPNKGTLSVMEDSAQEIATCNSRNGNPAPKITWYRNGQRLEVPVEMNPEGYMTSRTVREASGLLSLTSTLYLRLRKDDRDASFHCAAHYSLPEGRHGRLDSPTFHLTLHYPTEHVQFWVGSPSTPAGWVREGDTVQLLCRGDGSPSPEYTLFRLQDEQEEVLNVNLEGNLTLEGVTRGQSGTYGCRVEDYDAADDVQLSKTLELRVAYLDPLELSEGKVLSLPLNSSAVVNCSVHGLPTPALRWTKDSTPLGDGPMLSLSSITFDSNGTYVCEASLPTVPVLSRTQNFTLLVQGSPELKTAEIEPKADGSWREGDEVTLICSARGHPDPKLSWSQLGGSPAEPIPGRQGWVSSSLTLKVTSALSRDGISCEASNPHGNKRHVFHFGTVSPQTSQAGVAVMAVAVSVGLLLLVVAVFYCVRRKGGPCCRQRREKGAPPPGEPGLSHSGSEQPEQTGLLMGGASGGARGGSGGFGDEC

SEQ ID NO: 917881 - protein, 610 aa, Homo sapiens
EIEPMLSSQATEQDSISKKKRKENERQSGEGETKRRRDGTGMRWRKGDRKNQELIGNGGRRRWGGTEGEDSCVLGRRELGDPESLVPGGWCWRPGLFSLSRGLGIWTPGSWESREFRSPAHESEWGELLREEPRLQSPSSKPRPCPCLPQIATCNSRNGNPAPKITWYRNGQRLEVPVEMNPEGYMTSRTVREASGLLSLTSTLYLRLRKDDRDASFHCAAHYSLPEGRHGRLDSPTFHLTLHYPTEHVQFWVGSPSTPAGWVREGDTVQLLCRGDGSPSPEYTLFRLQDEQEEVLNVNLEGNLTLEGVTRGQSGTYGCRVEDYDAADDVQLSKTLELRVAYLDPLELSEGKVLSLPLNSSAVVNCSVHGLPTPALRWTKDSTPLGDGPMLSLSSITFDSNGTYVCEASLPTVPVLSRTQNFTLLVQGSPELKTAEIEPKADGSWREGDEVTLICSARGHPDPKLSWSQLGGSPAEPIPGRQGWVSSSLTLKVTSALSRDGISCEASNPHGNKRHVFHFGTVSPQTSQAGVAVMAVAVSVGLLLLVVAVFYCVRRKGGPCCRQRREKGAPPPGEPGLSHSGSEQPEQTGLLMGGASGGARGGSGGFGDEC

SEQ ID NO: 917882 - protein, 512 aa, Homo sapiens; identical to SEQ ID NO: 917879

SEQ ID NO: 917883 - protein, 512 aa, Homo sapiens; identical to SEQ ID NO: 917879

SEQ ID NO: 917884 - protein, 523 aa, Homo sapiens
RIPSSVTRRWLWVGAAGTAEATARLNVFAKPEATEVSPNKGTLSVMEDSAQEIATCNSRNGNPAPKITWYRNGQRLEVPVEMNPEGYMTSRTVREASGLLSLTSTLYLRLRKDDRDASFHCAAHYSLPEGRHGRLDSPTFHLTLHYPTEHVQFWVGSPSTPAGWVREGDTVQLLCRGDGSPSPEYTLFRLQDEQEEVLNVNLEGNLTLEGVTRGQSGTYGCRVEDYDAADDVQLSKTLELRVAYLDPLELSEGKVLSLPLNSSAVVNCSVHGLPTPALRWTKDSTPLGDGPMLSLSSITFDSNGTYVCEASLPTVPVLSRTQNFTLLVQGSPELKTAEIEPKADGSWREGDEVTLICSARGHPDPKLSWSQLGGSPAEPIPGRQGWVSSSLTLKVTSALSRDGISCEASNPHGNKRHVFHFGTVSPQTSQAGVAVMAVAVSVGLLLLVVAVFYCVRRKGGPCCRQRREKGAPPPGEPGLSHSGSEQPEQTGLLMGGASGGARGGSGGFGDECWSPHLTSCCRV

SEQ ID NO: 917885 - protein, 406 aa, Homo sapiens
CQSVVPDDRDASFHCAAHYSLPEGRHGRLDSPTFHLTLHYPTEHVQFWVGSPSTPAGWVREGDTVQLLCRGDGSPSPEYTLFRLQDEQEEVLNVNLEGNLTLEGVTRGQSGTYGCRVEDYDAADDVQLSKTLELRVAYLDPLELSEGKVLSLPLNSSAVVNCSVHGLPTPALRWTKDSTPLGDGPMLSLSSITFDSNGTYVCEASLPTVPVLSRTQNFTLLVQGSPELKTAEIEPKADGSWREGDEVTLICSARGHPDPKLSWSQLGGSPAEPIPGRQGWVSSSLTLKVTSALSRDGISCEASNPHGNKRHVFHFGTVSPQTSQAGVAVMAVAVSVGLLLLVVAVFYCVRRKGGPCCRQRREKGAPPPGEPGLSHSGSEQPEQTGLLMGGASGGARGGSGGFGDEC

SEQ ID NO: 917886 - protein, 442 aa, Homo sapiens
RIPSSVTRRWLWVGAAGTAEATARLNVFAKPEATEVSPNKGTLSVMEDSAQEIATCNSRNGNPAPKITWYRNGQRLEVPVEMNPEGYMTSRTVREASGLLSLTSTLYLRLRKDDRDASFHCAAHYSLPEGRHGRLDSPTFHLTLHYPTEHVQFWVGSPSTPAGWVREGDTVQLLCRGDGSPSPEYTLFRLQDEQEEVLNVNLEGNLTLEGVTRGQSGTYGCRVEDYDAADDVQLSKTLELRVAYLDPLELSEGKVLSLPLNSSAVVNCSVHGLPTPALRWTKDSTPLGDGPMLSLSSITFDSNGTYVCEASLPTVPVLSRTQNFTLLVQGSPELKTAEIEPKADGSWREGDEVTLICSARGHPDPKLSWSQLGGSPAEPIPGRQGWVSSSLTLKVTSALSRDGISCEASNPHGNKRHVFHFGTVSPHRESVDALSVGYLTAQ

SEQ ID NO: 917887 - protein, 355 aa, Homo sapiens
RIPSSVTRRWLWVGAAGTAEATARLNVFAKPEATEVSPNKGTLSVMEDSAQEIATCNSRNGNPAPKITWYRNGQRLEVPVEMNPEGYMTSRTVREASGLLSLTSTLYLRLRKDDRDASFHCAAHYSLPEGRHGRLDSPTFHLTLHYPTEHVQFWVGSPSTPAGWVREGDTVQLLCRGDGSPSPEYTLFRLQDEQEEVLNVNLEGNLTLEGVTRGQSGTYGCRVEDYDAADDVQLSKTLELRVAYLDPLELSEGKVLSLPLNSSAVVNCSVHGLPTPALRWTKDSTPLGDGPMLSLSSITFDSNGTYVCEASLPTVPVLSRTQNFTLLVQGSGGREGVGLDGDSVGCGTWTNRTSS

SEQ ID NO: 917888 - protein, 313 aa, Homo sapiens
MARYEAGVNRQRVEGQSGTYGCRVEDYDAADDVQLSKTLELRVAYLDPLELSEGKVLSLPLNSSAVVNCSVHGLPTPALRWTKDSTPLGDGPMLSLSSITFDSNGTYVCEASLPTVPVLSRTQNFTLLVQGSPELKTAEIEPKADGSWREGDEVTLICSARGHPDPKLSWSQLGGSPAEPIPGRQGWVSSSLTLKVTSALSRDGISCEASNPHGNKRHVFHFGTVSPQTSQAGVAVMAVAVSVGLLLLVVAVFYCVRRKGGPCCRQRREKGAPPPGEPGLSHSGSEQPEQTGLLMGGASGGARGGSGGFGDEC

SEQ ID NO: 917889 - protein, 345 aa, Homo sapiens
ALKGERLCKLPVKLRKRYVLYDSYERYVLSFPSYLVLTPPRVKLFECEPYFFPVLLKAALNDTGLEGIVNSPVLLEHLDPLELSEGKVLSLPLNSSAVVNCSVHGLPTPALRWTKDSTPLGDGPMLSLSSITFDSNGTYVCEASLPTVPVLSRTQNFTLLVQGSPELKTAEIEPKADGSWREGDEVTLICSARGHPDPKLSWSQLGGSPAEPIPGRQGWVSSSLTLKVTSALSRDGISCEASNPHGNKRHVFHFGTVSPQTSQAGVAVMAVAVSVGLLLLVVAVFYCVRRKGGPCCRQRREKGAPPPGEPGLSHSGSEQPEQTGLLMGGASGGARGGSGGFGDEC

SEQ ID NO: 917890 - protein, 67 aa, Homo sapiens
LSLLVVIFYRLKQRGALLPPTAGKGGSPPGEPGLSHSGSEQPEQTGLLMGGASGGARGGSGGFGDEC

SEQ ID NO: 917891 - protein, 252 aa, Homo sapiens
EIEPMLSSQATEQDSISKKKRKENERQSGEGETKRRRDGTGMRWRKGDRKNQELIGNGGRRRWGGTEGEDSCVLGRRELGDPESLVPGGWCWRPGLFSLSRGLGIWTPGSWESREFRSPAHESEWGELLREEPRLQSPSSKPRPCPCLPQIATCNSRNGNPAPKITWYRNGQRLEVPVEMNPEGYMTSRTVREASGLLSLTSTLYLRLRKDDRDASFHCAAHYSLPEGRHGRLDSPTFHLTLHCESVLAFDL

SEQ ID NO: 917892 - protein, 181 aa, Homo sapiens [sequence omitted]

SEQ ID NO: 917893 - protein, 499 aa, Homo sapiens
GVVGAERCEHWRSRVAKPEATEVSPNKGTLSVMEDSAQEIATCNSRNGNPAPKITWYRNGQRLEVPVEMNPEGYMTSRTVREASGLLSLTSTLYLRLRKDDRDASFHCAAHYSLPEGRHGRLDSPTFHLTLHYPTEHVQFWVGSPSTPAGWVREGDTVQLLCRGDGSPSPEYTLFRLQDEQEEVLNVNLEGNLTLEGVTRGQSGTYGCRVEDYDAADDVQLSKTLELRVAYLDPLELSEGKVLSLPLNSSAVVNCSVHGLPTPALRWTKDSTPLGDGPMLSLSSITFDSNGTYVCEASLPTVPVLSRTQNFTLLVQGSPELKTAEIEPKADGSWREGDEVTLICSARGHPDPKLSWSQLGGSPAEPIPGRQGWVSSSLTLKVTSALSRDGISCEASNPHGNKRHVFHFGTVSPQTSQAGVAVMAVAVSVGLLLLVVAVFYCVRRKGGPCCRQRREKGAPPPGEPGLSHSGSEQPEQTGLLMGGASGGARGGSGGFGDEC

SEQ ID NO: 917894 - protein, 477 aa, Homo sapiens
PDSVGRTVSVMEDSAQEIATCNSRNGNPAPKITWYRNGQRLEVPVEMNPEGYMTSRTVREASGLLSLTSTLYLRLRKDDRDASFHCAAHYSLPEGRHGRLDSPTFHLTLHYPTEHVQFWVGSPSTPAGWVREGDTVQLLCRGDGSPSPEYTLFRLQDEQEEVLNVNLEGNLTLEGVTRGQSGTYGCRVEDYDAADDVQLSKTLELRVAYLDPLELSEGKVLSLPLNSSAVVNCSVHGLPTPALRWTKDSTPLGDGPMLSLSSITFDSNGTYVCEASLPTVPVLSRTQNFTLLVQGSPELKTAEIEPKADGSWREGDEVTLICSARGHPDPKLSWSQLGGSPAEPIPGRQGWVSSSLTLKVTSALSRDGISCEASNPHGNKRHVFHFGTVSPQTSQAGVAVMAVAVSVGLLLLVVAVFYCVRRKGGPCCRQRREKGAPPPGEPGLSHSGSEQPEQTGLLMGGASGGARGGSGGFGDEC

SEQ ID NO: 917895 - protein, 512 aa, Homo sapiens; identical to SEQ ID NO: 917879

SEQ ID NO: 917896 - protein, 472 aa, Homo sapiens
RIPSSVTRRWLWVGAAGTAEATARLNVFAKPEATEVSPNKGTLSVMEDSAQEIATCNSRNGNPAPKITWYRNGQRLEVPVEMNPEGYMTSRTVREASGLLSLTSTLYLRLRKDDRDASFHCAAHYSLPEGRHGRLDSPTFHLTLHYPTEHVQFWVGSPSTPAGWVREGDTVQLLCRGDGSPSPEYTLFRLQDEQEEVLNVNLEGNLTLEGVTRGQSGTYGCRVEDYDAADDVQLSKTLELRVAYLDPLELSEGKVLSLPLNSSAVVNCSVHGLPTPALRWTKDSTPLGDGPMLSLSSITFDSNGTYVCEASLPTVPVLSRTQNFTLLVQGSPELKTAEIEPKADGSWREGDEVTLICSARGHPDPKLSWSQLGGSPAEPIPGRQGWVSSSLTLKVTSALSRDGISCEASNPHGNKRHVFHFGTVSPQTSQAGVAVMAVAVSVGLLLLVVAVFYCVRRKGGPCCRQRREKGAP

SEQ ID NO: 917897 - protein, 354 aa, Homo sapiens
MTETPASTAPPTTACPRAATAAWTAPPSTSPCTDEQEEVLNVNLEGNLTLEGVTRGQSGTYGCRVEDYDAADDVQLSKTLELRVAYLDPLELSEGKVLSLPLNSSAVVNCSVHGLPTPALRWTKDSTPLGDGPMLSLSSITFDSNGTYVCEASLPTVPVLSRTQNFTLLVQGSPELKTAEIEPKADGSWREGDEVTLICSARGHPDPKLSWSQLGGSPAEPIPGRQGWVSSSLTLKVTSALSRDGISCEASNPHGNKRHVFHFGTVSPQTSQAGVAVMAVAVSVGLLLLVVAVFYCVRRKGGPCCRQRREKGAPPPGEPGLSHSGSEQPEQTGLLMGGASGGARGGSGGFGDEC

SEQ ID NO: 917898 - protein, 503 aa, Homo sapiens
PDSVGRTVSVMEDSAQEIATCNSRNGNPAPKITWYRNGQRLEVPVEMNPEGYMTSRTVREASGLLSLTSTLYLRLRKDDRDASFHCAAHYMCMPRGAGLRDQTETSHTCIHDLTAVTYPSGSHVAVRGLCGMTSSIPEQSWDTRRCAHCSRLAAARWGTGDDPSPESQYRYFARITGLMQGMDEQEEVLNVNLEGNLTLEGVTRGQSGTYGCRVEDYDAADDVQLSKTLELRVAYLDPLELSEGKVLSLPLNSSAVVNCSVHGLPTPALRWTKDSTPLGDGPMLSLSSITFDSNGTYVCEASLPTVPVLSRTQNFTLLVQGSPELKTAEIEPKADGSWREGDEVTLICSARGHPDPKLSWSQLGGSPAEPIPGRQGWVSSSLTLKVTSALSRDGISCEASNPHGNKRHVFHFGTVSPQTSQAGVAVMAVAVSVGLLLLVVAVFYCVRRKGGPCCRQRREKGAPPPGEPGLSHSGSEQPEQTGLLMGGASGGARGGSGGFGDEC

SEQ ID NO: 917899 - protein, 308 aa, Homo sapiens
MDPLSIVGLGQSGTYGCRVEDYDAADDVQLSKTLELRVAYLDPLELSEGKVLSLPLNSSAVVNCSVHGLPTPALRWTKDSTPLGDGPMLSLSSITFDSNGTYVCEASLPTVPVLSRTQNFTLLVQGSPELKTAEIEPKADGSWREGDEVTLICSARGHPDPKLSWSQLGGSPAEPIPGRQGWVSSSLTLKVTSALSRDGISCEASNPHGNKRHVFHFGTVSPQTSQAGVAVMAVAVSVGLLLLVVAVFYCVRRKGGPCCRQRREKGAPPPGEPGLSHSGSEQPEQTGLLMGGASGGARGGSGGFGDEC

SEQ ID NO: 917900 - protein, 239 aa, Homo sapiens
AGTGLGVRDDSTPLGDGPMLSLSSITFDSNGTYVCEASLPTVPVLSRTQNFTLLVQGSPELKTAEIEPKADGSWREGDEVTLICSARGHPDPKLSWSQLGGSPAEPIPGRQGWVSSSLTLKVTSALSRDGISCEASNPHGNKRHVFHFGTVSPQTSQAGVAVMAVAVSVGLLLLVVAVFYCVRRKGGPCCRQRREKGAPPPGEPGLSHSGSEQPEQTGLLMGGASGGARGGSGGFGDEC

SEQ ID NO: 917901 - protein, 162 aa, Homo sapiens
RIPSSVTRRWLWVGAAGTAEATARLNVFAKPEATEVSPNKGTLSVMEDSAQEIATCNSRNGNPAPKITWYRNGQRLEVPVEMNPEGYMTSRTVREASGLLSLTSTLYLRLRKDDRDASFHCAAHYSLPEGRHGRLDSPTFHLTLHYLTEQLQIYDCAVEHVH

SEQ ID NO: 917902 - protein, 288 aa, Homo sapiens
RGLEHGTARLKEQEGEGGLGPRKEKGRARGRERRRKMQLTRCCFVFLVQGSLYLVICGQDDGPPGSEDPERDDHEGQPRPRVPRKRGHISPKSRPMANSTLLGLLAPPGEAWGILGQPPNRPNHSPPPSAKVKKIFGWGDFYSNIKTVALNLLVTGKIVDHGNGTFSVHFQHNATGQGNISISLVPPSKAVEFHQEQQIFIEAKASKIFNCRMEWEKVERGRRTSLCTHDPAKICSRDHAQSSATWSCSQPFKVVCVYIAFYSTDYRLVQKVCPDYNYHSDTPYYPSG

SEQ ID NO: 917903 - protein, 288 aa, Homo sapiens; identical to SEQ ID NO: 917902

SEQ ID NO: 917904 - protein, 288 aa, Homo sapiens; identical to SEQ ID NO: 917902

SEQ ID NO: 917905 - protein, 288 aa, Homo sapiens; identical to SEQ ID NO: 917902

SEQ ID NO: 917906 - protein, 124 aa, Homo sapiens
MIVNLQKRISSLADSKHSLNVNGRVQILPKPVKFKAKQKVGHRSYEESQARQFGSRKKWSQDFSKPPYPFLFHKGYLNPREQDKVGGCIHNLALASWKQSTLPQFNKLVLSSGIRTVLGNSCAV

SEQ ID NO: 917907 - protein, 124 aa, Homo sapiens; identical to SEQ ID NO: 917906

SEQ ID NO: 917908 - protein, 124 aa, Homo sapiens; identical to SEQ ID NO: 917906

SEQ ID NO: 917909 - protein, 971 aa, Homo sapiens
MIWLRNRRCLEPLQGTPKWVPVLGELQKTLQKGEYLPLRPLPMFESNFVQVTHQGGPVFVNHRTNRLAMGVAASLPGLVLPDILLIGQPAEDRDCSGLVLTRMIPWTSSTSAVHDLSAWRLKLRLVSGRQYYLALDAPDNEVGFLFHCWVRLINLLQEPAPTWTPRTTRTAPLDMPLAEAPASTWHLQDQPISRHAVRVAERNFPHKTVAAQRQRKAKALKRSFKSQAVGDSVPLIWSQLEHADVRKKPAEKKSHSDPRPDRTHTQIRLPGQGHVVESPSHCVSADSPDGFFLGSCSSLDPCLWHQDTEDLMDSGGSTFCTCFIVETPTWIGSSPEGPSCVSSSPEGPSCTCSIPEGPSRTCSIPEGPSHTCSIPEGLSCMALSPPASRGKLPGDFDVLPTGIPGRAVLERSQSGGKPEPVVTVRTQETDVVEMTTQAKSPESPFTVTKKESKDILISQTKEVTLEAFRGQGKLEDWAHWAKLEERSPDLPGVRSKELEQRKRWVKAKELAVEGPSQEHSRPFSVEALTLTKLMITANSKEQPSKSALVSLPSWLLATPQASATSMMASVPSRPGQLSLLEGKPVVVREQPESHTWVKEGKRPWGEMKEQPWGEMKEPPWDPKGPPKVPFRSKPTSASLKREGISQAPIPLTASPWEDLRPSPLSETLISKMEATARASQQPKRVSQEPMRMPAQHPLATVGKRNVESRLGGFAPSGRYQNYGYAFIYWGAGGGGGEPVEPPNFQRLKLEPETQRVAPRCLCARAGPRGGVGGARGGVGAPLPAPRCTTAPIGWGSGVLANPAAGCVSPDPGGTAPRGLRSERHPGTIPQQIQWPPTSGWSCLLRGCWMWKPRSPPRGNGRRRPSTRASPARTRSVTATRTSWTTTAASRPGPAAGRARSPASTISACTTRCAPSAGWRAGTSRSRTGFSPAKSDCPSAASSEDAVILHLFVSRSPGSRLSTPTSQCLSHE

SEQ ID NO: 917910 - protein, 971 aa, Homo sapiens; identical to SEQ ID NO: 917909

SEQ ID NO: 917911 - protein, 255 aa, Homo sapiens
MVIVIFIMTGFTVSRVPPTPMMVIVIIFIMMGFTVSRACTTPTMVIIIIMTSSTVSRACTTPTMVIVIIIITMMGSTVSRTSTTPTMVIIIITMLGLHSLQGPHHSHDVSRAYTTPTMVIVIIVTGSTVSRASTTPTMVIIIITMLGLHSLQGPHHTHDGHCHHNDGLHSIQGLYHPHDGHHHHHDAGASQSPGSPPPPRWVLTTPTMVIIIIMMVFTVSRACTYPHDGHHYCLRCGGALQCFDGGHLIAITISS

SEQ ID NO: 917912 - protein, 1260 aa, Homo sapiens
QDGGARSRDPVIAAVEGPPTEREVGGSLEVRPRCVHRAGGRGACVHRQARSGAELICLWGEAWGTAGGCRRRVRMTGPSCSRSASWSRRAPFPALSRYSCLFQFPPVGTANGIFPRPRIHRQAEIDYSSPTSVPDSEDRNKMKEWKSKMEISEEKKSARAASEKLQRQITQECELVETSNSEDRLLKHWVSPLKDAMRHLPSQESGIREMHIIPQKAIVGEIGHGCNEGEKILSAGESSHRYEVSGQNFKQKSGLTEHQKIHNINKTYECKECEKTFNRSSNLIIHQRIHTGNKPYVCNECGKDSNQSSNLIIHQRIHTGKKPYICHECGKDFNQSSNLVRHKQIHSGGNPYECKECGKAFKGSSNLVLHQRIHSRGKPYLCNKCGKAFSQSTDLIIHHRIHTGEKPYECYDCGQMFSQSSHLVPHQRIHTGEKPLKCNECEKAFRQHSHLTEHQRLHSGEKPYECHRCGKTFSGRTAFLKHQRLHAGEKIEECEKTFSKDEELREEQRIHQEEKAYWCNQCGRNFQGTSDLIRHQVTHTGEKPYECKECGKTFNQSSDLLRHHRIHSGEKPCVCSKCGKSFRGSSDLIRHHRVHTGEKPYECSECGKAFSQRSHLVTHQKIHTGEKPYQCTECGKAFRRRSLLIQHRRIHSGEKPYECKECGKLFIWRTAFLKHQSLHTGEKLECEKTFSQDEELRGEQKIHQEAKAYWCNQCGRAFQGSSDLIRHQVTHTREKPYECKECGKTFNQSSDLLRHHRIHSGEKPYVCNKCGKSFRGSSDLIKHHRIHTGEKPYECSECGKAFSQRSHLATHQKIHTGEKPYQCSECGNAFRRRSLLIQHRRLHSGEKPYECKECGKLFMWHTAFLKHQRLHAGEKLEECEKTFSKDEELRKEQRTHQEKKVYWCNQCSRTFQGSSDLIRHQVTHTREKPYEVKNVGKLNQSSDLLRHHRIHSGEKPYVCNKCGESFRSSSDLIKHHRVHTGEKPHECSECGKVFSQRSHLVTHQKIHTGEKPYQCTECEKAFRRRSLLIQRRRIHSGEKPYECKECGKLFMWHTAFLKHQRLHAGEKLEEREKTFSKDEELRGEQKIHQEEKAYWCNQCGRAFQGSSDLIGHQVTHTGEKPYECKECGKTFNQSSDLLRHHRIHSGEKPYVCNKCGKSFRGSSDLIRHHRVHTGEKPYECPECWKAFSQNSHLVSHQRIHTREKPFECSNCGKAFSGWTAFLKHQKLHIGKEFEDCKSLQTGPILIGSRNLMNAVKLGKV

SEQ ID NO: 917913 - protein, 399 aa, Homo sapiens
MLLPPGSLSRPRTFSSQPLQTKLMTHNGLFRPIPYVTAASADEATASQQPPQAQLHRYNGLFRPSSCLPAFSPGPELSQVDLTRPSSCILVAPPGPASASRQPLQSQRLPHSRFFTPSIYLTVDPPSQAPNLSAASTHPAPACQWPLQAHGAHFLTTAFPGPVFPFRRPLRAQNLLKSASPDPLAPSGRSLRAQLFFLVGSPGPIPASQQPLWTQCLPISWRPWSAHSFLKPSSPGPGQASRWPLQDELLPSDGISRPQMVSGRWAPPRQGWASRRLPQAQVVLKSGSPGPASQQVSKLFWLNSCPAPNRLCRPRTFSSQALRAHLLPPGGLYSSSTGWRTASAGPALPPRGLSRPSSCTHGGLPGQVPACLPAARVRPAPPSRWPVDANSCLWTLHRA

SEQ ID NO: 917914 - protein, 383 aa, Homo sapiens
MAYLGPYPTSRQPPQMRLLPHNSLHRHSSIVTMASLDPAPASQPSLQALNFLKSTSPGPAHASLQPLQAQLMHLGGPSRPSLCLPSASTVPTSASQQILHAQHLPHCGPPKPSSQPFSSFYTPSSRLPVASSGPWGSFLTTAFPGPVFPFRRPLRAQNLLKSASPDPLAPSGRSLRAQLFFLVGSPGPIPASQQPLWTQCLPISWRPWSAHSFLKPSSPGPGQASRWPLQDELLPSDGISRPQMVSGRWAPPRQGWASRRLPQAQVVLKSGSPGPASQQVSKLFWLNSCPAPNRLCRPRTFSSQALRAHLLPPGGLYSSSTGWRTASAGPALPPRGLSRPSSCTHGGLPGQVPACLPAARVRPAPPSRWPVDANSCLWTLHRA

SEQ ID NO: 917915 - protein, 399 aa, Homo sapiens; identical to SEQ ID NO: 917913

SEQ ID NO: 917916 - protein, 399 aa, Homo sapiens; identical to SEQ ID NO: 917913

SEQ ID NO: 917917 - protein, 399 aa, Homo sapiens; identical to SEQ ID NO: 917913

SEQ ID NO: 917918 - protein, 34 aa, Homo sapiens
MFKVQDPPGDRLISDSLMQTLDRNILLQLSRLLI

SEQ ID NO: 917919 - protein, 652 aa, Homo sapiens
SSAGGQEAVGEEEDLEEMEDLRELGWGAGSAGQLASLRLPNVPRMTATPESLFPTGDELDSSQLQMESDEVDTLKEGEDPADRMHPFLAIYELQSLKVHPLVGTCTLYSVRLTHGDFSWTTKKKYRHFQELHRDLLRHKVLMSLLPLARNQSTQPPSSYLTFIHPFHRFAVAYSPARDAGNREMPSLPRAGPEGSTRHAASKQKYLENYLNRLLTMSFYRNYHAMTEFLEVSQLSFIPDLGRKGLEGMIRKRSGGHRVPGLTCCGRDQVCYRWSKRWLVVKDSFLLYMCLETGAISFVQLFDPGFEVQVGKRSTEARHGVRIDTSHRSLILKCSSYRQARWWAQEITELAQGPGRDFLQLHRHDSYAPPRPGTLARWFVNGAGYFAAVADAILRAQEEIFITDWWLSPEVYLKRPAHSDDWRLDIMLKRKAEEGVRVSILLFKEVELALGINSGYSKRALMLLHPNIKVMRHPDQVTLWAHHEKLLVVDQVVAFLGGLDLAYGRWDDLHYRLTDLGDSSESAASQPPTPRPDSPATPDLSHNQFFWLGKDYSNLITKDWVQLDRPFEDFIDRETTPRMPWRDVGVVVHGLPARDLARHFIQRWNFTKTTKAKYKTPTYPYLLPKSTSTANQLPFTLPGGQCTTVQEEDVVVS

SEQ ID NO: 917920 - protein, 543 aa, Homo sapiens
WVVEKIPRPLALPRKCSELLYVFQTQLALKLLQCLKVTDAPHFYGLPSLERTLRGMANLTAFPGWSSHSPLTKPLDICVKYLSGLLEVITSFYVERGGNAMSFMGKGVTKSTILCLLHLSHEMMAQAGSLEWMSLWFLPLGSHSEEHIPTQQGLAWLIPLWVDRDPEVRFTSLGLGSALTTLETGCVALANSCQNISGGLWGTVVNILLDQSECSMVRREAAFILQNLLVIPMPTEIIKDYTWQGPCVHDEDSGLSLIGKPALQALLYHCHFYEHLNQMVKHCYLGRCMFDLNFSAFDRNSESNDLNGRKKQASPANKASQLSQEDFLFLIVTALQMLPSYRHVSRNSEPCCLHHLQLNTLRLMPLENTTVQQMVFMLLSNLALSHDCKGVIQKSNFLQNFLSLALPKGGNKHLSNLTILWLKLLLNISSGEDGQQMILRLDGCLDLLTEMSKYKHKSSPLLPLLIFHNVCFSPANKPKILANEKVITVLAACLESENQNAQRIGAAALWALIYNYQKAKTALKSPSVKRRVDEAYSLAKKTP

SEQ ID NO: 917921 - protein, 619 aa, Homo sapiens
FVTPSLLSAMCSLLDNLLTIAPRDTAKAFRQAHLIELLCSIADATLIQTCVQELRALLPSSPPAEHTQAQVSFLLEYLSSLSRLLQSCLLVEPDLVIQDELVKPLITNIIGILTICTKDVLDKELISAFYHTWTHLFNLLAMLLRKAGAITLPSVTVALAKHWTAAIDMFCTCAGLSATCPALYTASLQFLSVLLTEEAKGHLQAKSKTHLCCSPTVASLLDDSQENQKSLEQLSDVILQCYEGKSSKDILKRVAANALMSLLAVSRRAQKHALKANLIDNCMEQMKHINAQLNLDSLRPGKAALKKKEDGVIKELSIAMQLLRNCLYQNEECKEAALEAHLVPVLHSLWPWILMDDSLMQISLQLLCVYTANFPNGCSSLCWSSCGQHPVQATHRGAVSNSLMLCILKLASQMPLENTTVQQMVFMLLSNLALSHDCKGVIQKSNFLQNFLSLALPKGGNKHLSNLTILWLKLLLNISSGEDGQQMILRLDGCLDLLTEMSKYKHKSSPLLPLLIFHNVCFSPANKPKILANEKVITVLAACLESENQNAQRIGAAALWALIYNYQKAKTALKSPSVKRRVDEAYSLAKKTFPNSEANPLNAYYLKCLENLVQLLNSS

SEQ ID NO: 917922 - protein, 407 aa, Homo sapiens
GNVSPEGERRKLMTVLLFSSFTRTHFNKCYEGKSSKDILKRVAANALMSLLAVSRRAQKHALKANLIDNCMEQMKHINAQLNLDSLRPGKAALKKKEDGVIKELSIAMQLLRNCLYQNEECKEAALEAHLVPVLHSLWPWILMDDSLMQISLQLLCVYTANFPNGCSSLCWSSCGQHPVQATHRGAVSNSLMLCILKLASQMPLENTTVQQMVFMLLSNLALSHDCKGVIQKSNFLQNFLSLALPKGGNKHLSNLTILWLKLLLNISSGEDGQQMILRLDGCLDLLTEMSKYKHKSSPLLPLLIFHNVCFSPANKPKILANEKVITVLAACLESENQNAQRIGAAALWALIYNYQKAKTALKSPSVKRRVDEAYSLAKKTFPNSEANPLNAYYLKCLENLVQLLNSS

SEQ ID NO: 917923 - protein, 619 aa, Homo sapiens; identical to SEQ ID NO: 917921

SEQ ID NO: 917924 - protein, 451 aa, Homo sapiens
FVTPSLLSAMCSLLDNLLTIAPRDTAKAFRQAHLIELLCSIADATLIQTCVQELRALLPSSPPAEHTQAQVSFLLEYLSSLSRLLQSCLLVEPDLVIQDELVKPLITNIIGILTICTKDVLDKELISAFYHTWTHLFNLLAMLLRKAGAITLPSVTVALAKHWTAAIDMFCTCAGLSATCPALYTASLQFLSVLLTEEAKGHLQAKSKTHLCCSPTVASLLDDSQENQKSLEQLSDVILQCYEGKSSKDILKRVAANALMSLLAVSRRAQKHALKANLIDNCMEQMKHINAQLNLDSLRPGKAALKKKEDGVIKELSIAMQLLRNCLYQNEECKEAALEAHLVPVLHSLWPWILMDDSLMQISLQLLCVYTANFPNGCSSLCWSSCGQHPVQATHRGAVSNSLMLCILKLASQMPLENTTVQQMVFMLLSNLALSHDCKGVIQKAKINCRS

SEQ ID NO: 917925 - protein, 196 aa, Homo sapiens
MVFMLLSNLALSHDCKGVIQKSNFLQNFLSLALPKGGNKHLSNLTILWLKLLLNISSGEDGQQMILRLDGCLDLLTEMSKYKHKSSPLLPLLIFHNVCFSPANKPKILANEKVITVLAACLESENQNAQRIGAAALWALIYNYQKAKTALKSPSVKRRVDEAYSLAKKTFPNSEANPLNAYYLKCLENLVQLLNSS

SEQ ID NO: 917926 - protein, 186 aa, Homo sapiens
RVRGRVVPLENTTVQQMVFMLLSNLALSHDCKGVIQKSNFLQNFLSLALPKGGNKHLSNLTILWLKLLLNISSGEDGQQMILRLDGCLDLLTEMSKYKHKSSPLLPLLIFHNVCFSPANKPKILANEKVITVLAACLESENQNAQRIGAAALWALIYNYQKAKTALKSPSVKRRVDEAYSLAKKTP

SEQ ID NO: 917927 - protein, 376 aa, Homo sapiens
MEFCMVMTWHLSAVESNARSVSNYSPAHCALKANLIDNCMEQMKHINAQLNLDSLRPGKAALKKKEDGVIKELSIAMQLLRNCLYQNEECKEAALEAHLVPVLHSLWPWILMDDSLMQISLQLLCVYTANFPNGCSSLCWSSCGQHPVQATHRGAVSNSLMLCILKLASQMPLENTTVQQMVFMLLSNLALSHDCKGVIQKSNFLQNFLSLALPKGGNKHLSNLTILWLKLLLNISSGEDGQQMILRLDGCLDLLTEMSKYKHKSSPLLPLLIFHNVCFSPANKPKILANEKVITVLAACLESENQNAQRIGAAALWALIYNYQKAKTALKSPSVKRRVDEAYSLAKKTFPNSEANPLNAYYLKCLENLVQLLNSS

SEQ ID NO: 917928 - protein, 593 aa, Homo sapiens
FVTPSLLSAMCSLLDNLLTIAPRDTAKAFRQAHLIELLCSIADATLIQTCVQELRALLPSSPPAEHTQAQVSFLLEYLSSLSRLLQSCLLVEPDLVIQDELVKPLITNIIGILTICTKDVLDKELISAFYHTWTHLFNLLAMLLRKAGAITLPSVTVALAKHWTAAIDMFCTCAGLSATCPALYTASLQFLSVLLTEEAKGHLQAKSKTHLCCSPTVASLLDDSQENQKSLEQLSDVILQCYEGKSSKDILKRVAANALMSLLAVSRRAQKHALKANLIDNCMEQMKHINAQLNLDSLRPGKAALKKKEDGVIKELSIAMQLLRNCLYQNEECKEAALEAHLVPVLHSLWPWILMDDSLMQISLQLLCVYTANFPNGCSSLCWSSCGQHPVQATHRGAVSNSLMLCILKLASQMPLENTTVQQMVFMLLSNLALSHDCKGVIQKSNFLQNFLSLALPKGGNKHLSNLTILWLKLLLNISSGEDGQQMILRLDGCLDLLTEMSKYKHKSSPLLPLLIFHNVCFSPANKPKILANEKVITVLAACLESENQNAQRIGAAALWALIYNYQKAKTALKSPSVKRRVDEAYSLAKKTP

SEQ ID NO: 917929 - protein, 148 aa, Homo sapiens
QGSTMFSVHEQSAHLGLPKPKGSWQDLSDGAIWQLWSLWEACCCQGEAWKIHCNQCQFPLALCFPPPPSLCPPQARVTAVERLLRRALSHLDPANWRDVDVGLWPQIVTILPCPLPAKGIVTHLCEHHKGDVTLFQNGIVARCSGSCL

SEQ ID NO: 917930 - protein, 124 aa, Homo sapiens
IVIITHCMPTSKYPIYPINICTYKLTCEFNNNHESLDEELHLLIISCRKLFYFKIWAFLDVSFVERILKSQKERQCALRVFKARIYTNRYETNEEDKTLQEIYRKYRKLIESELSYFVIVYSVM

SEQ ID NO: 917931 - protein, 133 aa, Homo sapiens
MWGYLSLMPVFLAVWAISGVWIVFAIAVTNRTVDLSKGFPYISICGSFPPQSCIFSQVLNMGAALAAWICIVRYHQLRDWGVRRWPNQLILWTGLLCALGTSVVGNFQVRPSRRPGSVPAGVWNYNSQHAPWP

SEQ ID NO: 917932 - protein, 290 aa, Homo sapiens
ELQKVLFWVRDLNYKLMTAMSSLPGIFPGWHLSYVDVKDNSRDETFHFQCDCWLSKSEGDGQTVRDFACANNKICDELEETTYEIVIETGNGGETRENVWLILEGRKNRSKEFLMENSSRQRAFRKGTTDTFEFDSIYLGDIASLCVGHLAREDRFIPKRELAWHVKTITITEMEYGNVYFFNCDCLIPLKRKRKYFKVFEVTKTTESFASKVQSLVPVKYEVIVTTGYEPGAGTDANVFVTIFGANGDTGKRELKQKMRNLFERGSTDRFFLETLELVVTRLGLAAECG

SEQ ID NO: 917933 - protein, 477 aa, Homo sapiens
MWFLERLRGSGENGAARGVGSEAGDKASKGPLYSNVLTPDKIPDFFIPPKLPSGPAEGEGQAALGPSTSEQNLASAAPRQTPRSPRLPAKLAAESKSLLKAATRHVIQIESAEDWLSEEATDADPQAQGAMSLPSVPKAQTSYGFAMLAESPHTRRKESLFHSEHGALAQVGSPGAGRRRAAAKANGGDGGPREAGGALMSPGRYFSGGESDTGSSAESSPFGSPLLSRSVSLLKGFAQDSQAKVSQLRHSVGRHGSLSADDSTPDASPGSRRRLTRRAPPEPGPESGQARGEHTVHVGPRGSVRLLAEYEAGQARLRVHLLAAEGLYDRLCDARSINCCVGLCLVPGKLQKQRSTIVKNSRRPVFNEDFFFDGLGPASVRKLALRIKVVNKGSSLKRDTLLGEKELPLTSLLPFLPSHSSLGCTGVCVCVPGERLQALEYSCLCAGVCTCKHNESTVCTSSIPGATERSAPVGAVR

SEQ ID NO: 917934 - protein, 155 aa, Homo sapiens
MQLSPWNVHVHGVETGFHHVSQDGLHLLTLVNYHTQKRQVRSNLVRSSGSDGDFGTEGQSVKSPCQDLISIHERCISQGLPAAVLAILDQAGEQELSLLVFPFSATRVATHAKWRRRACCVRAPDSHRLLFTFPIGSAHYAVGTKTPGVCYGQGR

SEQ ID NO: 917935 - protein, 356 aa, Homo sapiens
MQILSRCQGLMSEECGRTTALAAGRTRKGAGEEGLVSPEGAGDEDSCSSSAPLSPSSSPRSMASGSGCPPGKCVCNSCGLEIVDKYLLKVNDLCWHVRCLSCSVCRTSLGRHTSCYIKDKDIFCKLDYFRRYGTRCSRCGRHIHSTDWVRRAKGNVYHLACFACFSCKRQLSTGEEFALVEEKVLCRVHYDCMLDNLKREVENGNGISVEGALLTEQDVNHPKPAKRARTSFTADQLQVMQAQFAQDNNPDAQTLQKLAERTGLSRRVIQVWFQNCRARHKKHVSPNHSSSTPVTAVPPSRLSPPMLEEMAYSAYVPQDGTMLTALHSYMDAHSPTTLGLQPLLPHSMTQLPISHT

SEQ ID NO: 917936 - protein, 376 aa, Homo sapiens
KSSLNLRHGDCNLGDEASSLRRSQVHCQGLMSEECGRTTALAAGRTRKGAGEEGLVSPEGAGDEDSCSSSAPLSPSSSPRSMASGSGCPPGKCVCNSCGLEIVDKYLLKVNDLCWHVRCLSCSVCRTSLGRHTSCYIKDKDIFCKLDYFRRYGTRCSRCGRHIHSTDWVRRAKGNVYHLACFACFSCKRQLSTGEEFALVEEKVLCRVHYDCMLDNLKREVENGNGISVEGALLTEQDVNHPKPAKRARTSFTADQLQVMQAQFAQDNNPDAQTLQKLAERTGLSRRVIQVWFQNCRARHKKHVSPNHSSSTPVTAVPPSRLSPPMLEEMAYSAYVPQDGTMLTALHSYMDAHSPTTLGLQPLLPHSMTQLPISHT

SEQ ID NO: 917937 - protein, 1156 aa, Homo sapiens
SGSAQPRPPAAPRGPSRPSGRRLLLEPRAPPAPRAPDAMKQLCLCAAASFASQDWGKSDERLLQAVENNDAPRVAALIARKGLVPTKLDPEGKSAFHLAAMRGAASCLEVMIAHGSNVMSADGAGYNALHLAAKYGHPQCLKQLLQASCVVDVVDSSGWTALHHAAAGGCLSCSEVLCSFKAHLNPQDRSGATPLIIAAQMCHTDLCRLLLQQGAAANDQDLQGRTALMLACEGASPETVEVLLQGGAQPGITDALGQDAAHYGALAGDKLILHLLQEAAQRPSPPSALTEDDSGEASSQNSMSSHGKQGAPKKRKAPPPPASIPMPDDRDAYEEIVRLRQERGRLLQKIRGLEQHKEQRQQESPEASSLHILERQVQELQQLLVERQEEKESLGREVESLQSRLSLLENERENTSYDVTTLQDEEGELPDLPGAEVLLSRQLSPSAQEHLASLQEQVAVLTRQNQELMEKVQILENFEKDETQMEVEALAEVIPLALYDSLRAEFDQLRRQHAEALQALRQQETREVPREEGAACGESEVAGATATKNGPTHMELNGSVAPETKVNGAETIDEEAAGDETMEARTMEAEATGAEATGAEATGAKVTETKPTGAEVREMETTEEEANMETKPTGAQATDTETTGVEAMGVEATKTKAEEAEMQAYGVGAGQAEPPVTGTTNMEATGSRATGMESTGVSATGVENPGVEATVPGISAGPILHPGAAEASEKLQVELETRIRGLEEALRQREREAAAELEAALGKCEAAEAEAGRLRERVREAEGSGASGGGGGDTTQLRAALEQAREDLRDRDSRLRELEAASACLDEARASRLLAEEEARGLRAELAQREEARLEQSRELEVLREQLATARATGEQQRTAAAELGRARDAAEARVAELPAACEEARQGLAELREASEALRQSVVPASEHRRLQEEALELRGRAASLEQEVVATGKEAARLRAELERERVCSVALSEHERIVGTLQANVAQLEGQLEELGRRHEKTSAEVFQVQREALFMKSERHAAEAQLATAEQQLRGLRTEAERARQAQSRAQEALDKAKEKDKKITELSKEVFNLKEALKEQPAALATPEVEALRDQVKDLQQQLQEAARDHSSVVALYRSHLLYAIQGQMDEDVQRILSQILQMQRLQAQGR

SEQ ID NO: 917938 - protein, 1117 aa, Homo sapiens
MKTLRARFKKTESQDWGKSDERLLQAVENNDAPRVAALIARKGLVPTKLDPEGKSAFHLAAMRGAASCLEVMIAHGSNVMSADGAGYNALHLAAKYGHPQCLKQLLQASCVVDVVDSSGWTALHHAAAGGCLSCSEVLCSFKAHLNPQDRSGATPLIIAAQMCHTDLCRLLLQQGAAANDQDLQGRTALMLACEGASPETVEVLLQGGAQPGITDALGQDAAHYGALAGDKLILHLLQEAAQRPSPPSALTEDDSGEASSQNSMSSHGKQGAPKKRKAPPPPASIPMPDDRDAYEEIVRLRQERGRLLQKIRGLEQHKEQRQQESPEASSLHILERQVQELQQLLVERQEEKESLGREVESLQSRLSLLENERENTSYDVTTLQDEEGELPDLPGAEVLLSRQLSPSAQEHLASLQEQVAVLTRQNQELMEKVQILENFEKDETQMEVEALAEVIPLALYDSLRAEFDQLRRQHAEALQALRQQETREVPREEGAACGESEVAGATATKNGPTHMELNGSVAPETKVNGAETIDEEAAGDETMEARTMEAEATGAEATGAEATGAKVTETKPTGAEVREMETTEEEANMETKPTGAQATDTETTGVEAMGVEATKTKAEEAEMQAYGVGAGQAEPPVTGTTNMEATGSRATGMESTGVSATGVENPGVEATVPGISAGPILHPGAAEASEKLQVELETRIRGLEEALRQREREAAAELEAALGKCEAAEAEAGRLRERVREAEGSGASGGGGGDTTQLRAALEQAREDLRDRDSRLRELEAASACLDEARASRLLAEEEARGLRAELAQREEARLEQSRELEVLREQLATARATGEQQRTAAAELGRARDAAEARVAELPAACEEARQGLAELREASEALRQSVVPASEHRRLQEEALELRGRAASLEQEVVATGKEAARLRAELERERVCSVALSEHERIVGTLQANVAQLEGQLEELGRRHEKTSAEVFQVQREALFMKSERHAAEAQLATAEQQLRGLRTEAERARQAQSRAQEALDKAKEKDKKITELSKEVFNLKEALKEQPAALATPEVEALRDQVKDLQQQLQEAARDHSSVVALYRSHLLYAIQGQMDEDVQRILSQILQMQRLQAQGR

SEQ ID NO: 917939 - protein, 864 aa, Homo sapiens
AQPNSQNWNSMSSHGKQGAPKKRKAPPPPASIPMPDDRDAYEEIVRLRQERGRLLQKIRGLEQHKEQRQQESPEASSLHILERQVQELQQLLVERQEEKESLGREVESLQSRLSLLENERENTSYDVTTLQDEEGELPDLPGAEVLLSRQLSPSAQEHLASLQEQVAVLTRQNQELMEKVQILENFEKDETQMEVEALAEVIPLALYDSLRAEFDQLRRQHAEALQALRQQETREVPREEGAACGESEVAGATATKNGPTHMELNGSVAPETKVNGAETIDEEAAGDETMEARTMEAEATGAEATGAEATGAKVTETKPTGAEVREMETTEEEANMETKPTGAQATDTETTGVEAMGVEATKTKAEEAEMQAYGVGAGQAEPPVTGTTNMEATGSRATGMESTGVSATGVENPGVEATVPGISAGPILHPGAAEASEKLQVELETRIRGLEEALRQREREAAAELEAALGKCEAAEAEAGRLRERVREAEGSGASGGGGGDTTQLRAALEQAREDLRDRDSRLRELEAASACLDEARASRLLAEEEARGLRAELAQREEARLEQSRELEVLREQLATARATGEQQRTAAAELGRARDAAEARVAELPAACEEARQGLAELREASEALRQSVVPASEHRRLQEEALELRGRAASLEQEVVATGKEAARLRAELERERVCSVALSEHERIVGTLQANVAQLEGQLEELGRRHEKTSAEVFQVQREALFMKSERHAAEAQLATAEQQLRGLRTEAERARQAQSRAQEALDKAKEKDKKITELSKEVFNLKEALKEQPAALATPEVEALRDQVKDLQQQLQEAARDHSSVVALYRSHLLYAIQGQMDEDVQRILSQILQMQRLQAQGR

SEQ ID NO: 917940 - protein, 1146 aa, Homo sapiens
SGSAQPRPPAAPRGPSRPSGRRLLLEPRAPPAPRAPDAMKQLCLCAAASFASQDWGKSDERLLQAVENNDAPRVAALIARKGLVPTKLDPEGKSAFHLAAMRGAASCLEVMIAHGSNVMSADGAGYNALHLAAKYGHPQCLKQLLQRQGLTVLAQAAGGCLSCSEVLCSFKAHLNPQDRSGATPLIIAAQMCHTDLCRLLLQQGAAANDQDLQGRTALMLACEGASPETVEVLLQGGAQPGITDALGQDAAHYGALAGDKLILHLLQEAAQRPSPPSALTEDDSGEASSQNSMSSHGKQGAPKKRKAPPPPASIPMPDDRDAYEEIVRLRQERGRLLQKIRGLEQHKEQRQQESPEASSLHILERQVQELQQLLVERQEEKESLGREVESLQSRLSLLENERENTSYDVTTLQDEEGELPDLPGAEVLLSRQLSPSAQEHLASLQEQVAVLTRQNQELMEKVQILENFEKDETQMEVEALAEVIPLALYDSLRAEFDQLRRQHAEALQALRQQETREVPREEGAACGESEVAGATATKNGPTHMELNGSVAPETKVNGAETIDEEAAGDETMEARTMEAEATGAEATGAEATGAKVTETKPTGAEVREMETTEEEANMETKPTGAQATDTETTGVEAMGVEATKTKAEEAEMQAYGVGAGQAEPPVTGTTNMEATGSRATGMESTGVSATGVENPGVEATVPGISAGPILHPGAAEASEKLQVELETRIRGLEEALRQREREAAAELEAALGKCEAAEAEAGRLRERVREAEGSGASGGGGGDTTQLRAALEQAREDLRDRDSRLRELEAASACLDEARASRLLAEEEARGLRAELAQREEARLEQSRELEVLREQLATARATGEQQRTAAAELGRARDAAEARVAELPAACEEARQGLAELREASEALRQSVVPASEHRRLQEEALELRGRAASLEQEVVATGKEAARLRAELERERVCSVALSEHERIVGTLQANVAQLEGQLEELGRRHEKTSAEVFQVQREALFMKSERHAAEAQLATAEQQLRGLRTEAERARQAQSRAQEALDKAKEKDKKITELSKEVFNLKEALKEQPAALATPEVEALRDQVKDLQQQLQEAARDHSSVVALYRSHLLYAIQGQMDEDVQRILSQILQMQRLQAQGR

SEQ ID NO: 917941 - protein, 186 aa, Homo sapiens
MKTLRARFKKTESQDWGKSDERLLQAVENNDAPRVAALIARKGLVPTKLDPEGKSAFHLAAMRGAASCLEVMIAHGSNVMSADGAGYNALHLAAKYGHPQCLKQLLQASCVVDVVDSSGWTALHHAAAGGCLSCSEVLCSFKAHLNPQDRSGATPLIIAAQMCHTDLCRLLLQQGAAANDQDLQGR

SEQ ID NO: 917942 - protein, 128 aa, Homo sapiens
RKIMWEYLTPYSVVIPLMMDSPEKFIQNKIFILEAIILSKLTQEQKTKHLMFQTPHVPTRKWELNNENTWTQGGEHHTLGPVKGWRNITSVPCSYISDTFLETLRFLTWGYQCLVASADRMDKVECSL

SEQ ID NO: 917943 - protein, 210 aa, Homo sapiens
MTVWTGDVVGGGTDSNIFMTLYGINGSTEEMQLDKKKARFEREQNDTFIMEILDIAPFTKMRIRIDGLGSRPEWFLERILLKNMNTGDLTMFYYGDWLSQRKGKKTLVCEMCAVIDEEEMMEWTSYTVAVKTSDILGAGTDANVFIIIFGENGDSGTLALKQSANWNKFERNNTDTFNFPDMLSLGHLCKLRVWHDNKGSSHSRPEPFTI

SEQ ID NO: 917944 - protein, 152 aa, Homo sapiens
MTVWTGDVVGGGTDSNIFMTLYGINGSTEEMQLDKKKARFEREQNDTFIMEILDIAPFTKMRIRIDGLGSRPEWFLERILLKNMNTGDLTMFYYGDWLSQRKGKKTLVCEMCAVIDEEEMMEWTSYTVAEQALMPTCSSSSSGRTGIVGHWP

SEQ ID NO: 917945 - protein, 210 aa, Homo sapiens; identical to SEQ ID NO: 917943

SEQ ID NO: 917946 - protein, 402 aa, Homo sapiens
QHPFHLQLKIREVPRRSCSHQSHGAACEAEAPPTGPPPNWHHCCPCPYSQPHVTLGQKQWWGSQGSVKSLSQLQDKFEHLKMIQQEEIRKLEEEKKQLEGEIIDFYKMKAASEALQTQLSTDTKKDKHPWSRNFVTLTQQVSVAAWIQKSGLVDLKVQIIDLSTIMYGVLIILATAQLAGPMDGENHSVVSEFLFLGLTHSWEIQLLLLVFSSVLYVASITGNILIVFSVTTDPHLHSPMYFLLVSLSFIDLGACSVTSPKMIYDLFRKRKVISFGGCIAQIFFIHVIGGVEMVLLIAMAFDSYVYSRPCLPGYHQQRLENSQDCCLFLPLEVLSQRGTHQMPARALLYEVPVGTYWEVSPSQDTRGSGTHLRRQSDPYQSSNTVQGDLLLSSEPSGFSKML

SEQ ID NO: 917947 - protein, 401 aa, Homo sapiens [sequence omitted]

SEQ ID NO: 917948 - protein, 136 aa, Homo sapiens
MTPPNHCTSPALQSSHLKNGASGLKVFNAPSGWDIRVLGPLSPGPHESSRSSGRSRVPSFPLLPLLSTQPFLKLALKIPHPGTSVQKETGQDSKPAARLPLGVLPHFGMSVRACWLLCMHAGFCAWVYMKLCIYYS

SEQ ID NO: 917949 - protein, 174 aa, Homo sapiens
MVLAGLIRKLGHQLAEIRERALKSILCKIEHNLICYADLIQERQLFLHLLEWFNFPSVPMKEEVLNLLSRLVKYPPAVQHLVDVGAVEFLSKLRSNVEPNLQAEIDGILDGLFLLPSEVPALSSASYQTNQTELSKNPEILTGYFPQDKSNFQQMEVPPRPVVNQTVKCLKFST

SEQ ID NO: 917950 - protein, 172 aa, Homo sapiens
MVLAGLIRKLGHQLAEIRERALKSILCKIEHNLICYADLIQERQLFLHLLEWFNFPSVPMKEEVLNLLSRLVKYPPAVQHLVDVGAVEFLSKLRSNVEPNLQAEIDGILDGLFLLPSEVPALSSASYQTNQTELSKNPEILTGYFPQDKSNFQQMEVPPRPVGVYMSGSKSC

SEQ ID NO: 917951 - protein, 169 aa, Homo sapiens
MSAPPALQIREANAHLAAVHRRAAELEARLDAAERTVHAQAERLALHDQQLRAALDELGRAKDREIATLQEQLMTSEATVHSLQATVHQRDELIRQLQPRAELLQDICRRRPPLAGLLDALAEAERLGPLPASDPGHPPPGGPGPPLDNSTGEEADRDHLQPAVFGTTV

SEQ ID NO: 917952 - protein, 128 aa, Homo sapiens
FCLSMTLEVAGIPGLCGIFIGKRQIFFKLRNTCSMCFSNREENCRRKVTNTLTEKVTFQPDLEVKGAKTLKRRSQDGQIGTAPVYGSQRERCKRRVISAFPSEFQVKMKISTVSLFMPSLKPGSSFSI

SEQ ID NO: 917953 - protein, 262 aa, Homo sapiens
MSWCSSCLILGTHIRLTLWSLELPCKVTCGGWHQQFWRVCQMSMTRCGAPSAEVAGQNGPKLTGVTVGPRRVCASTGRQGSQQPGRAGGAGGSPEWVGARPHCPESQALHQRSPKAERPGSTCLCESEATLRVRHNRPNAARGPRRPRLPWCWLAVGGERRAGKQLCESSEEPVFAPRLLPQGGRWTRSPTPPSVAWVPRASLPGSKLPLGGAHAGADPRRGPGDLGVHQYVHVLERLLAGSRTSLQTLSGLTIRLMEQAEG

SEQ ID NO: 917954 - protein, 412 aa, Homo sapiens
MLIGYTEKPPTVPNEELSRTNIFLPQPCPRVGAWAYKFLQTPGPPDAGQLVTNNDKHQVPWIQTARCLEAYSMCGEWEPSVFLRASAAEGRPSKEGFSGRGETVQGGLQRQRGDRPRRASAAEGRPSKEGFSGRGETIQGRLNHTAFPHCQGVWDLQLGFNLGSQVLSAWVLFAAACSHSSFPCARSQALHVRQPPSARPRVTRALHARPLRPAGGQGPALGSTLPVGLTPPSRPAAGRSDWPPAPFQPSPLPPSATRAPAVPAVPRGSGEAAPRCAPLPLAARAFVWRQLRPQLPLNVERGREGSLSMGHLSPRQPPPHRRPRPALRLPPRRLPQPRRRPRPRPGAAPQRARAQPPPPPPREEPGWSWSTSAISCFQCLALCETELSEWSTRCCVRCDPSASAFSCIVTPS

SEQ ID NO: 917955 - protein, 310 aa, Homo sapiens
MTVRSELLIVPAVVSDLCATGDHDCEQVCISSPGSYTCACHEGFTLNSDGKTCNVCSGGGGSSATDLVFLIDGSKSVRPENFELVKKFISQIVDTLDVSDKLAQVGLVQYSSSVRQEFPLGRFHTKKDIKAAVRNMSYMEKGTMTGAALKYLIDNSFTVSSGARPGAQKVGIVFTDGRSQDYINDAAKKAKDLGFKMFAVGVGNAVEDELREIASEPVAEHYFYTADFKTINQIGKKLQKKICVEEDPCACESLVKFQAKVEGLLQALTRKHIPSQRGLGLGRGAGQCWGRRGHGPSVVSWAGFSWPAYC

SEQ ID NO: 917956 - protein, 133 aa, Homo sapiens
MSSFSALASHPLLPLVVPNVTCNVFHSVSTDWANHLPGVSGLVPKLPWVKKLGTIADAPQLACSVLLGSIVPWLAFQNLPMLDDRRWDMARSCPGIQMVLSGTMLVLTTSWNTAGFFQSNSQMKTAVGSSLLY

SEQ ID NO: 917957 - protein, 1291 aa, Homo sapiens
VGPVPAAWPERLQRRRNQGPEREAQVQGAGEGRIRTGAQHYSTNRSPQKEPGDAAKAVNRGGGTVGAAGSRGWGETCGHVASMAPACQILRWALALGLGLMFEVTHAFRSQDEFLSSLESYEIAFPTRVDHNGALLAFSPPPPRRQRRGTGATAESRLFYKVASPSTHFLLNLTRSSRLLAGHVSVEYWTREGLAWQRAARPHCLYAGHLQGQASSSHVAISTCGGLHGLIVADEEEYLIEPLHGGPKGSRSPEESGPHVVYKRSSLRHPHLDTACGVRDEKPWKGRPWWLRTLKPPPARPLGNETERGQPGLKRSVSRERYVETLVVADKMMVAYHGRRDVEQYVLAIMNIVAKLFQDSSLGSTVNILVTRLILLTEDQPTLEITHHAGKSLDSFCKWQKSIVNHSGHGNAIPENGVANHDTAVLITRYDICIYKNKPCGTLGLAPVGGMCERERSCSVNEDIGLATAFTIAHEIGHTGGQGTQEGEEGRSWAGPSAPGRADTPFPRFGMNHDGVGNSCGARGQDPAKLMAAHITMKTNPFVWSSCSRDYITSFLEEDAPGCPSERVTLMVGQGTRETIEIRDAPWDPHPAEAPELLICSHLAGQLLFSRGSSGLGLCLNNRPPRQDFVYPTVAPGQAYDADEQCRFQHGGGREGGEPERAPRPQEVCSELWCLSKSNRCITNSIPAAEGTLCQTHTIDKGWCYKRVCVPFGSRPEGVDGAWGPWTPWGDCSRTCGGGVSSSSRHCDSPRPTIGGKYCLGERRRHRSCNTDDCPPGSQDFREVQCSEFDSIPFRGKFYKWKTYRGGGVKACSLTCLAEGFNFYTERAAAVVDGTPCRPDTVDICVSGECKHVGCDRVLGSDLREDKCRVCGGDGSACETIEGVFSPASPGAGYEDVVWIPKGSVHIFIQDLNLSLSHLALKGDQESLLLEGLPGTPQPHRLPLAGTTFQLRQGPDQVQSLEALGPINASLIVMVLARTELPALRYRFNAPIARDSLPPYSWHYAPWTKCSAQCAGGSQVQAVECRNQLDSSAVAPHYCSAHSKLPKRQRACNTEPCPPDWVVGNWSLCSRSCDAGVRSRSVVCQRRVSAAEEKALDDSACPQPRPPVLEACHGPTCPPEWAALDWSEVSRPLPSRPLGCPGGVSTETPLRGLQVSCPLLTSHWGSTLSTKRPFQLQCTPSCGPGLRHRVVLCKSADHRATLPPAHCSPAAKPPATMRCNLRRCPPARWVAGEWGECSAQCGVGQRQRSVRCTSHTGQASHECTEALRPPTTQQCEAKCDSPTPGDGPEGT

SEQ ID NO: 917958 - protein, 1184 aa, Homo sapiens
TARRPRARRRLQRRRNQGPEREAQVQGAGEGRIRTGAQHYSTNRSPQKEPGDAAKAVNRGGGTVGAAGSRGWGETCGHVASMAPACQILRWALALGLGLMFEVTHAFRSQDEFLSSLESYEIAFPTRVDHNGALLAFSPPPPRRQRRGTGATAESRLFYKVASPSTHFLLNLTRSSRLLAGHVSVEYWTREGLAWQRAARPHCLYAGHLQGQASSSHVAISTCGGLHGLIVADEEEYLIEPLHGGPKGSRSPEESGPHVVYKRSSLRHPHLDTACGVRDEKPWKGRPWWLRTLKPPPARPLGNETERGQPGLKRSVSRERYVETLVVADKMMVAYHGRRDVEQYVLAIMNIVAKLFQDSSLGSTVNILVTRLILLTEDQPTLEITHHAGKSLDSFCKWQKSIVNHSGHGNAIPENGVANHDTAVLITRYDICIYKNKPCGTLGLAPVGGMCERERSCSVNEDIGLATAFTIAHEIGHTFGMNHDGVGNSCGARGQDPAKLMAAHITMKTNPFVWSSCSRDYITSFLDSGLGLCLNNRPPRQDFVYPTVAPGQAYDADEQCRFQHGVKSRQCKYGEVCSELWCLSKSNRCITNSIPAAEGTLCQTHTIDKGWCYKRVCVPFGSRPEGVDGAWGPWTPWGDCSRTCGGGVSSSSRHCDSPRPTIGGKYCLGERRRHRSCNTDDCPPGSQDFREVQCSEFDSIPFRGKFYKWKTYRGGGVKACSLTCLAEGFNFYTERAAAVVDGTPCRPDTVDICVSGECKHVGCDRVLGSDLREDKCRVCGGDGSACETIEGVFSPASPGAGYEDVVWIPKGSVHIFIQDLNLSLSHLALKGDQESLLLEGLPGTPQPHRLPLAGTTFQLRQGPDQVQSLEALGPINASLIVMVLARTELPALRYRFNAPIARDSLPPYSWHYAPWTKCSAQCAGGSQVQAVECRNQLDSSAVAPHYCSAHSKLPKRQRACNTEPCPPDWVVGNWSLCSRSCDAGVRSRSVVCQRRVSAAEEKALDDSACPQPRPPVLEACHGPTCPPEWAALDWSECTPSCGPGLRHRVVLCKSADHRATLPPAHCSPAAKPPATMRCNLRRCPPARWVAGEWGECSAQCGVGQRQRSVRCTSHTGQASHECTEALRPPTTQQCEAKCDSPTPGDGPEECKDVNKVAYCPLVLKFQFCSRAYFRQMCCKTCQGH

SEQ ID NO: 917959 - protein, 1314 aa, Homo sapiens
TARRPRARRRLQRRRNQGPEREAQVQGAGEGRIRTGAQHYSTNRSPQKEPGDAAKAVNRGGGTVGAAGSRGWGETCGHVASMAPACQILRWALALGLGLMFEVTHAFRSQDEFLSSLESYEIAFPTRVDHNGALLAFSPPPPRRQRRGTGATAESRLFYKVASPSTHFLLNLTRSSRLLAGHVSVEYWTREGLAWQRAARPHCLYAGHLQGQASSSHVAISTCGGLHGLIVADEEEYLIEPLHGGPKGSRSPEESGPHVVYKRSSLRHPHLDTACGVRDEKPWKGRPWWLRTLKPPPARPLGNETERGQPGLKRSVSRERYVETLVVADKMMVAYHGRRDVEQYVLAIMNIVAKLFQDSSLGSTVNILVTRLILLTEDQPTLEITHHAGKSLDSFCKWQKSIVNHSGHGNAIPENGVANHDTAVLITRYDICIYKNKPCGTLGLAPVGGMCERERSCSVNEDIGLATAFTIAHEIGHTGGQGTQEGEEGRSWAGPSAPGRADTPFPRFGMNHDGVGNSCGARGQDPAKLMAAHITMKTNPFVWSSCSRDYITSFLEEDAPGCPSERVTLMVGQGTRETIEIRDAPWDPHPAEAPELLICSHLAGQLLFSRGSSGLGLCLNNRPPRQDFVYPTVAPGQAYDADEQCRFQHGVKSRQCKYGEVCSELWCLSKSNRCITNSIPAAEGTLCQTHTIDKGWCYKRVCVPFGSRPEGVDGAWGPWTPWGDCSRTCGGGVSSSSRHCDSPRPTIGGKYCLGERRRHRSCNTDDCPPGSQDFREVQCSEFDSIPFRGKFYKWKTYRGGGVKACSLTCLAEGFNFYTERAAAVVDGTPCRPDTVDICVSGECKHVGCDRVLGSDLREDKCRVCGGDGSACETIEGVFSPASPGAGYEDVVWIPKGSVHIFIQDLNLSLSHLALKGDQESLLLEGLPGTPQPHRLPLAGTTFQLRQGPDQVQSLEALGPINASLIVMVLARTELPALRYRFNAPIARDSLPPYSWHYAPWTKCSAQCAGGSQVQAVECRNQLDSSAVAPHYCSAHSKLPKRQRACNTEPCPPDWVVGNWSLCSRSCDAGVRSRSVVCQRRVSAAEEKALDDSACPQPRPPVLEACHGPTCPPEWAALDWSECTPSCGPGLRHRVVLCKSADHRATLPPAHCSPAAKPPATMRCNLRRCPPARWVAGEWGECSAQCGVGQRQRSVRCTSHTGQASHECTEALRPPTTQQCEAKCDSPTPGDGPEGGARHPEPQLAGSPPPALQRAGQRGPRGGGNWEGRVRRSRKLFIGNPPRAPLQHPPLPVHIVRPPLQGGSGEGTAVHPSTL

SEQ ID NO: 917960 - protein, 68 aa, Homo sapiens
AQPPGTALKWVTSQGAPGGSWPEAATEGIGGPDFILELLEPRKCIAVSLPGHPSPSPPCKHLLSATVC

SEQ ID NO: 917961 - protein, 113 aa, Homo sapiens
GQVAKLFQDSSLGSTVNILVTRLILLTEDQVLGDFLPFPFPFIPACPAVPWVVGAHAFPSVHPQPTLEITHHAGKSLDSFCKWQKSIVNHSGHGNAIPENGVANHDTAVLITR

SEQ ID NO: 917962 - protein, 240 aa, Homo sapiens
SDPASAHPGEADISGWGLEWGTVHGADECPPGWTHSFLSPPTQWCYKRVCVPFGSRPEGVDGAWGPWTPWGDCSRTCGGGVSSSSRHCDSPRPTIGGKYCLGERRRHRSCNTDDCPPGSQDFREVQCSEFDSIPFRGKFYKWKTYRGGGVKACSLTCLAEGFNFYTERAAAVVDGTPCRPDTVDICVSGECKHVGCDRVLGSDLREDKCRVCGGDGSACETIEGVFSPASPGAGESLQLP

SEQ ID NO: 917963 - protein, 839 aa, Homo sapiens
MFLGGQVAKLFQDSSLGSTVNILVTRLILLTEDQPTLEITHHAGKSLDSFCKWQKSIVNHSGHGNAIPENGVANHDTAVLITRYDICIYKNKPCGTLGLAPVGGMCERERSCSVNEDIGLATAFTIAHEIGHTFGMNHDGVGNSCGARGQDPAKLMAAHITMKTNPFVWSSCSRDYITSFLDSGLGLCLNNRPPRQDFVYPTVAPGQAYDADEQCRFQHGVKSRQCKYGEVCSELWCLSKSNRCITNSIPAAEGTLCQTHTIDKGWCYKRVCVPFGSRPEGVDGAWGPWTPWGDCSRTCGGGVSSSSRHCDSPRPTIGGKYCLGERRRHRSCNTDDCPPGSQDFREVQCSEFDSIPFRGKFYKWKTYRGGGVKACSLTCLAEGFNFYTERAAAVVDGTPCRPDTVDICVSGECKHVGCDRVLGSDLREDKCRVCGGDGSACETIEGVFSPASPGAGYEDVVWIPKGSVHIFIQDLNLSLSHLALKGDQESLLLEGLPGTPQPHRLPLAGTTFQLRQGPDQVQSLEALGPINASLIVMVLARTELPALRYRFNAPIARDSLPPYSWHYAPWTKCSAQCAGGSQVQAVECRNQLDSSAVAPHYCSAHSKLPKRQRACNTEPCPPDWVVGNWSLCSRSCDAGVRSRSVVCQRRVSAAEEKALDDSACPQPRPPVLEACHGPTCPPEWAALDWSECTPSCGPGLRHRVVLCKSADHRATLPPAHCSPAAKPPATMRCNLRRCPPARWVAGEWGECSAQCGVGQRQRSVRCTSHTGQASHECTEALRPPTTQQCEAKCDSPTPGDGPEECKDVNKVAYCPLVLKFQFCSRAYFRQMCCKTCQGH

SEQ ID NO: 917964 - protein, 1247 aa, Homo sapiens
TARRPRARRRLQRRRNQGPEREAQVQGAGEGRIRTGAQHYSTNRSPQKEPGDAAKAVNRGGGTVGAAGSRGWGETCGHVASMAPACQILRWALALGLGLMFEVTHAFRSQDEFLSSLESYEIAFPTRVDHNGALLAFSPPPPRRQRRGTGATAESRLFYKVASPSTHFLLNLTRSSRLLAGHVSVEYWTREGLAWQRAARPHCLYAGHLQGQASSSHVAISTCGGLHGLIVADEEEYLIEPLHGGPKGSRSPEESGPHVVYKRSSLRHPHLDTACGVRDEKPWKGRPWWLRTLKPPPARPLGNETERGQPGLKRSVSRERYVETLVVADKMMVAYHGRRDVEQYVLAIMNIVAKLFQDSSLGSTVNILVTRLILLTEDQPTLEITHHAGKSLDSFCKWQKSIVNHSGHGNAIPENGVANHDTAVLITRYDICIYKNKPCGTLGLAPVGGMCERERSCSVNEDIGLATAFTIAHEIGHTGGQGTQEGEEGRSWAGPSAPGRADTPFPRFGMNHDGVGNSCGARGQDPAKLMAAHITMKTNPFVWSSCSRDYITSFLEEDAPGCPSERVTLMVGQGTRETIEIRDAPWDPHPAEAPELLICSHLAGQLLFSRGSSGLGLCLNNRPPRQDFVYPTVAPGQAYDADEQCRFQHGVKSRQCKYGEVCSELWCLSKSNRCITNSIPAAEGTLCQTHTIDKGWCYKRVCVPFGSRPEGVDGAWGPWTPWGDCSRTCGGGVSSSSRHCDSPRPTIGGKYCLGERRRHRSCNTDDCPPGSQDFREVQCSEFDSIPFRGKFYKWKTYRGGGVKACSLTCLAEGFNFYTERAAAVVDGTPCRPDTVDICVSGECKHVGCDRVLGSDLREDKCRVCGGDGSACETIEGVFSPASPGAGYEDVVWIPKGSVHIFIQDLNLSLSHLALKGDQESLLLEGLPGTPQPHRLPLAGTTFQLRQGPDQVQSLEALGPINASLIVMVLARTELPALRYRFNAPIARDSLPPYSWHYAPWTKCSAQCAGGSQVQAVECRNQLDSSAVAPHYCSAHSKLPKRQRACNTEPCPPDWVVGNWSLCSRSCDAGVRSRSVVCQRRVSAAEEKALDDSACPQPRPPVLEACHGPTCPPEWAALDWSECTPSCGPGLRHRVVLCKSADHRATLPPARWVAGEWGECSAQCGVGQRQRSVRCTSHTGQASHECTEALRPPTTQQCEAKCDSPTPGDGPEECKDVNKVAYCPLVLKFQFCSRAYFRQMCCKTCQGH

SEQ ID NO: 917965 - protein, 280 aa, Homo sapiens
MATEAPVNIAPPECSTVVSTAVDSLIWQPNSLNMHMIRPKSAKGRTRPSLQKSQGVEVCAHHIPSPPPAIPYELPSSQKPGACAPKSPNQGASDEIPELQQQVPTGASSSLNKYPVLPSINRKNLEEEAVETVAKKASSLQLSSIRALYQDETGTMKTSEEDSRARACAVERKFIVRTKKQGSSRAGNLEEPSDQEPRLLLAVRSPTGQRFVRHFRPTDDLQTIVAVAEQKNKTSYRHCSIETMEVPRRRFSDLTKSLQECRIPHKSVLGISLEDGEGWP

SEQ ID NO: 917966 - protein, 280 aa, Homo sapiens; identical to SEQ ID NO: 917965

SEQ ID NO: 917967 - protein, 320 aa, Homo sapiens; identical to SEQ ID NO: 820635

SEQ ID NO: 917968 - protein, 320 aa, Homo sapiens; identical to SEQ ID NO: 820635

SEQ ID NO: 917969 - protein, 282 aa, Homo sapiens
MSKSESPKEPEQLRKLFIGGLSFETTDESLRSHFEQWGTLTDCVVMRDPNTKRSRGFGFVTYATVEEVDAAMNARPHKVDGRVVEPKRAVSREDSQRPGAHLTVKKIFVGGIKEDTEEHHLRDYFEQYGKIEVIEIMTDRGSGKKRGFAFVTFDDHDSVDKIVIQKYHTVNGHNCEVRKALSKQEMASASSSQRGRSGSGNFGGGRGGGFGGNDNFGRGGNFSGRGMYGFVHVVVTSHHLGYEDCTVRELHSECHLKSKSELELETFSYKVTLVAAVVVMLK

SEQ ID NO: 917970 - protein, 320 aa, Homo sapiens; identical to SEQ ID NO: 820635

SEQ ID NO: 917971 - protein, 320 aa, Homo sapiens; identical to SEQ ID NO: 820635

SEQ ID NO: 917972 - protein, 239 aa, Homo sapiens
MSKSESPKEPEQLRKLFIGGLSFETTDESLRSHFEQWGTLTDCVVMRDPNTKRSRGFGFVTYATVEEVDAAMNARPHKVDGRVVEPKRAVSREDSQRPGAHLTVKKIFVGGIKEDTEEHHLRDYFEQYGKIEVIEIMTDRGSGKKRGFAFVTFDDHDSVDKIVIQKYHTVEVVSVGMTTSVVEETSVVVVALVAAVVVVDMVAVGMAIMDLVMMEAILEVVEATMILGITTISLQILDP

SEQ ID NO: 917973 - protein, 193 aa, Homo sapiens
SEAASVAAEGCGGPGRVADSELHLGFGVRVSGKATRSRGGSGAGGGRLRRSRPMRKLFSFGRRPGRAVLGSIDHEYPGPAYHTRDAELRKIHRAALKGDAAEVERRLARRCRDVDAQDRTVLHLACAHGRVQVVTLLLSRKCQIDICDRLNRTPLMKAVYCQEETCSIILLEHGTSPNIKDVYSNTALHDGKH

SEQ ID NO: 917974 - protein, 178 aa, Homo sapiens
PNEMNQWSFNSEVGVGAPAITNNTRANCESVSVAISLAAAHPITKELNGLEEIHKYIFEAIATIDNDLFDGFVPSKLKTFWKGFTILDAIKNICDSWEKVKISRLTGVWKKLILTLMDDFEGFKTLMKEVTADVVEIARELELEVKLKMFGAWNADLDLETSPDESKNDEATVSMKVG

SEQ ID NO: 917975 - protein, 178 aa, Homo sapiens; identical to SEQ ID NO: 917974

SEQ ID NO: 917976 - protein, 261 aa, Homo sapiens
MVPRGSPLSPRLGAEREGTLLPNPRLGTPRESLPPHLHGIWPPPAPAWLPDIPAVAPLHGESHLLINTFGSRGQGRTASSSVPDSPGSDRMSSMFCQFQQGVLRLFNLCRQTHPPTRAAARSGDCGPLLTVPRGPNTYPPTHTLPVPGKHTLAARGTLRKSHGRGCQYHLGPALTFYPPLLAISRGGCTSDGDSAEWTENLGQTASGFLESQISQTEPSGRQRGSDQWTEKGRLSVSRKCQGLHATANLCQMTNALKGSKG

SEQ ID NO: 917977 - protein, 551 aa, Homo sapiens
MIGSFLRPPQPCRTRALLSGSDAVLKCDHPMALWYFSSILGEDPSLLNSMPDIRKLPGGSLQLTNPQPSQTGLYRCQGNDDTLMVQYEIDFQVVTTLHVTHKSLDQKSLQNETLILDGKVLIFTHWDPRQDCNRCGELGECRRLGYCYIEEPVEKPMPCQLYLRDEKMQFSRMRPELQPQSTMPPMLWLLLHFAAPALGFYFSISCPSGKQCQQALLSGNDILLYCNSSGAHWYYLFTQGKKGRLTSLTNISNMEIMPEGSLLIKDPLPSQTGLYHCWNKNGRQVVQYEIDFQDVTTLHITHKDLGQRPLQNETLHLGSKQLIFTWWEPWQDCNRCEEPGECKRLGYRYIEEPLEEAMPCWLYLGEVLVWSSRLRPELQVEACHVQCTNNTQLRVDYVIFDNFRLDEKTEFVWLDCPLGSMYRPVNWRANDTPLTWESQLSGQDFTTFLDPSTGGRQLQVFQPAVYKCFVQQELVAQFKPAASLETLEAQWRENDAQWREARKALRGRADSVLKGLKLVLLVVTVLALLGALLKCIHPSPGRRSTQVLVVK

SEQ ID NO: 917978 - protein, 181 aa, Homo sapiens
LPCKSWKPQTPGAKQSPGGRMAVSCRLPCRYPSTQFGSLTGLQSLISALFALLQQPLFLAMMGPLQGDPLWVNVGLLLLSLLGFCLPLYLICYRRQLERQLQQRQEDDKLFLKINGSSNQEAFVREPPGLQLGQCPGAILAWGQELVQGHRPTAPPAGGLRGALELMTGEARPPGPPTRPP

SEQ ID NO: 917979 - protein, 324 aa, Homo sapiens
VFTQRVRRQRSRGPSVARASEGLGAGAGAGARRHRSHPGLSAATGGPGFEMASPPRCSPTAHDRECKLPPPSAPASEYCPGKLSWGTMARALGRFKLSIPHTHLLATLDPLALDREPPPHLLPEKHQVPEKLIWGDQDPLSKIPFKILSGHEHAVSTCHFCVDDTKLLSGSYDCTVKLWDPVDGSVVRDFEHRPKAPVVECSITGDSSRVIAASYDKTVRAWDLETGKLLWKVRYDTFIVSCKFSPDGKYVVSGFDVDHGICIMDAENITTVSVIKDHHTRSITSCCFDPDSQRVASVSLDRCIKIWDVTSQATLLTITKFLNL

SEQ ID NO: 917980 - protein, 170 aa, Homo sapiens
QRKAAGHLGLPQHSAEMVESTRSALIMLDTIVQAMAASLPTLHNGPLSAKKISDTILGVSETGYHSGPQCTHSFLERVFIHRNPRNLGQALGLLRGGKTNKQTNKGERRRLRNKERTEEWSKRKEGRETGRNKREADIHILDKAPGRELSEEKKEAGPCRPTSGLSSICW

SEQ ID NO: 917981 - protein, 156 aa, Homo sapiens
LENAIKFLNRNAYIMIAIYGRNFCRSAKDAFNLLMRNVLKVAVTDEVTYFVLFLGKLLVAGSIGVLAFLFFTQRLPVIAQGPASLNYYWVPLLTVIFGSYLIAHGFFSVYAMCVETIFICFLEDLERNDGSTARPYYVSQPLLKIFQEENPQTRKQ

SEQ ID NO: 917982 - protein, 180 aa, Homo sapiens
MVCGRIRARAPGAAGPAPSDRSLFVRGGRWALGVVLGLAGAQTAERTRPQCSCKRPPRAASLVPAPQSLLCPAPADAETGRSCFGPVLLASPEWPLTHWSAIVLVSSVQGAPGLATLPGAPQPCPEEGNQELACTQDPQECGPGPKRFQEKSPSGTTLTLTFAFAGGECAWAWMFTWTGI

SEQ ID NO: 917983 - protein, 147 aa, Homo sapiens
MDYIVKAGHIQALPCGTVRRGLPPSRPQNGRSTNSLHCVPAKATDTQCQPVKAAGRAAVPCKATRVELSKAEVAHLLYQHELKVEVKEPAKLHQNQNGNESDFWSSSLLHSHQRRDSLQMPAQQVNAENCSLLERKPTSKSNTGNQH

SEQ ID NO: 917984 - protein, 151 aa, Homo sapiens [sequence omitted]

SEQ ID NO: 917985 - protein, 178 aa, Homo sapiens
MVVTEQTSQTPVAGPVKICFNFLLMLSSRVWPCVLLSLMRNNNDKDHESSRYHSDNEVPFSVLVILKENGKGASLRDPGPAGLYGLTGKGAYLLGENALCAHIHAIDLEKEFLKSPALTGHLELLTSPTPQHSSRIKGFFHEHEFYKGSQEQAWAWLDCTVQELGNLKEYGVVCAPDN

SEQ ID NO: 917986 - protein, 139 aa, Homo sapiens
SRAAAYYYYIRGRVDHQRIHTGEKPYVCQECGKAFTQSSCLSIHRRVHTGEKPYRCGECGKAFAQKANLTQHQRIHTGEKPYSCNVCGKAFVLSAHLNQHLRVHTQETLYQCQRCQKAFRCHSSLSRHQRVHNKQQYCL

SEQ ID NO: 917987 - protein, 871 aa, Homo sapiens
MAEEFVTLKDVGMDFTLGDWEQLGLEQGDTFWDTALDNCQDLFLLDPPRPNLTSHPDGSEDLEPLAGGSPEATSPDVTETKNSPLMEDFFEEGFSQEIIEMLSKDGFWNSNFGEACIEDTWLDSLLGDPESLLRSDIATNGESPTECKSHELKRGLSPVSTVSTGEDSMVHNVSEKTLTPAKSKEYRGEFFSYSDHSQQDSVQEGEKPYQCSECGKSFSGSYRLTQHWITHTREKPTVHQECEQGFDRNASLSVYPKTHTGYKFYVCNEYGTTFSQSTYLWHQKTHTGEKPCKSQDSDHPPSHDTQPGEHQKTHTDSKSYNCNECGKAFTRIFHLTRHQKIHTRKRYECSKCQATFNLRKHLIQHQKTHAAKTTSECQECGKIFRHSSLLIEHQALHAGEEPYKCNERGKSFRHNSTLKIHQRVHSGEKPYKCSECGKAFHRHTHLNEHRRIHTGYRPHKCQECVRSFSRPSHLMRHQAIHTAEKPYSCAECKETFSDNNRLVQHQKMHTVKTPYECQECGERFICGSTLKCHESVHAREKQGFFVSGKILDQNPEQKEKCFKCNKCEKTFSCSKYLTQHERIHTRGVKPFECDQCGKAFGQSTRLIHHQRIHSRVRLYKWGEQGKAISSASLIKLQSFHTKEHPFKCNECGKTFSHSAHLSKHQLIHAGENPFKCSKCDRVFTQRNYLVQHERTHARKKPLVCNECGKTFRQSSCLSKHQRIHSGEKPYVCDYCGKAFGLSAELVRHQRIHTGEKPYVCQECGKAFTQSSCLSIHRRVHTGEKPYRCGECGKAFAQKANLTQHQRIHTGEKPYSCNVCGKAFVLSAHLNQHLRVHTQETLYQCQRCQKAFRCHSSLSRHQRVHNKQQYCL

SEQ ID NO: 917988 - protein, 871 aa, Homo sapiens; identical to SEQ ID NO: 917987

SEQ ID NO: 917989 - protein, 139 aa, Homo sapiens; identical to SEQ ID NO: 917986

SEQ ID NO: 917990 - protein, 871 aa, Homo sapiens; identical to SEQ ID NO: 917987

SEQ ID NO: 917991 - protein, 587 aa, Homo sapiens
MAEEFVTLKDVGMDFTLGDWEQLGLEQGDTFWDTALDNCQDLFLLDPPRPNLTSHPDGSEDLEPLAGGSPEATSPDVTETKNSPLMEDFFEEGFSQEIIEMLSKDGFWNSNFGEACIEDTWLDSLLGDPESLLRSDIATNGESPTECKSHELKRGLSPVSTVSTGEDSMVHNVSEKTLTPAKSKEYRGEFFSYSDHSQQDSVQEGEKPYQCSECGKSFSGSYRLTQHWITHTREKPTVHQECEQGFDRNASLSVYPKTHTGYKFYVCNEYGTTFSQSTYLWHQKTHTGEKPCKSQDSDHPPSHDTQPGEHQKTHTDSKSYNCNECGKAFTRIFHLTRHQKIHTRKRYECSKCQATFNLRKHLIQHQKTHAAKTTSECQECGKIFRHSSLLIEHQALHAGEEPYKCNERGKSFRHNSTLKIHQRVHSGEKPYKCSECGKAFHRHTHLNEHRRIHTGYRPHKCQECVRSFSRPSHLMRHQAIHTAEKPYSCAECKETFSDNNRLVQHQKMHTVKTPYECQECGERFICGSTLKCHESVHAREKQGFFVSGKILDQNPEQKEKCFKCNKCEKTFSCSKYLTQHERIHTRE

SEQ ID NO: 917992 - protein, 129 aa, Homo sapiens
ILRLQPAFPQVYRDITTLSFRTSLCFSLASIPLSWELGGSGHFYRPSLWGLSTLPFSTGLSWCLSTAPPLSFQTQQGYALHSLSWSLYFPALCSLSVLTLILLLLPPFLQAHFSFLSLGHSRWPHQGVT

SEQ ID NO: 917993 - protein, 944 aa, Homo sapiens
MQVGATSAKGRLTLGLVLLLLDILGARQHGQRVSHGWKGGFLTAPLCFPQPCQPGTRRGRRRSLKEATEPQLAMAEEFVTLKDVGMDFTLGDWEQLGLEQGDTFWDTALDNCQDLFLLDPPRPNLTSHPDGSEDLEPLAGGSPEATSPDVTETKNSPLMEDFFEEGFSQEIIEMLSKDGFWNSNFGEACIEDTWLDSLLGDPESLLRSDIATNGESPTECKSHELKRGLSPVSTVSTGEDSMVHNVSEKTLTPAKSKEYRGEFFSYSDHSQQDSVQEGEKPYQCSECGKSFSGSYRLTQHWITHTREKPTVHQECEQGFDRNASLSVYPKTHTGYKFYVCNEYGTTFSQSTYLWHQKTHTGEKPCKSQDSDHPPSHDTQPGEHQKTHTDSKSYNCNECGKAFTRIFHLTRHQKIHTRKRYECSKCQATFNLRKHLIQHQKTHAAKTTSECQECGKIFRHSSLLIEHQALHAGEEPYKCNERGKSFRHNSTLKIHQRVHSGEKPYKCSECGKAFHRHTHLNEHRRIHTGYRPHKCQECVRSFSRPSHLMRHQAIHTAEKPYSCAECKETFSDNNRLVQHQKMHTVKTPYECQECGERFICGSTLKCHESVHAREKQGFFVSGKILDQNPEQKEKCFKCNKCEKTFSCSKYLTQHERIHTRGVKPFECDQCGKAFGQSTRLIHHQRIHSRVRLYKWGEQGKAISSASLIKLQSFHTKEHPFKCNECGKTFSHSAHLSKHQLIHAGENPFKCSKCDRVFTQRNYLVQHERTHARKKPLVCNECGKTFRQSSCLSKHQRIHSGEKPYVCDYCGKAFGLSAELVRHQRIHTGEKPYVCQECGKAFTQSSCLSIHRRVHTGEKPYRCGECGKAFAQKANLTQHQRIHTGEKPYSCNVCGKAFVLSAHLNQHLRVHTQETLYQCQRCQKAFRCHSSLSRHQRVHNKQQYCL

SEQ ID NO: 917994 - protein, 891 aa, Homo sapiens
MDFTLGDWEQLGLEQGDTFWDTALDNCQDLFLLGFSQESSQPAVSPSSAHQCHTVRQQQGPDSSSDPPRPNLTSHPDGSEDLEPLAGGSPEATSPDVTETKNSPLMEDFFEEGFSQEIIEMLSKDGFWNSNFGEACIEDTWLDSLLGDPESLLRSDIATNGESPTECKSHELKRGLSPVSTVSTGEDSMVHNVSEKTLTPAKSKEYRGEFFSYSDHSQQDSVQEGEKPYQCSECGKSFSGSYRLTQHWITHTREKPTVHQECEQGFDRNASLSVYPKTHTGYKFYVCNEYGTTFSQSTYLWHQKTHTGEKPCKSQDSDHPPSHDTQPGEHQKTHTDSKSYNCNECGKAFTRIFHLTRHQKIHTRKRYECSKCQATFNLRKHLIQHQKTHAAKTTSECQECGKIFRHSSLLIEHQALHAGEEPYKCNERGKSFRHNSTLKIHQRVHSGEKPYKCSECGKAFHRHTHLNEHRRIHTGYRPHKCQECVRSFSRPSHLMRHQAIHTAEKPYSCAECKETFSDNNRLVQHQKMHTVKTPYECQECGERFICGSTLKCHESVHAREKQGFFVSGKILDQNPEQKEKCFKCNKCEKTFSCSKYLTQHERIHTRGVKPFECDQCGKAFGQSTRLIHHQRIHSRVRLYKWGEQGKAISSASLIKLQSFHTKEHPFKCNECGKTFSHSAHLSKHQLIHAGENPFKCSKCDRVFTQRNYLVQHERTHARKKPLVCNECGKTFRQSSCLSKHQRIHSGEKPYVCDYCGKAFGLSAELVRHQRIHTGEKPYVCQECGKAFTQSSCLSIHRRVHTGEKPYRCGECGKAFAQKANLTQHQRIHTGEKPYSCNVCGKAFVLSAHLNQHLRVHTQETLYQCQRCQKAFRCHSSLSRHQRVHNKQQYCL

SEQ ID NO: 917995 - protein, 871 aa, Homo sapiens; identical to SEQ ID NO: 917987

SEQ ID NO: 917996 - protein, 113 aa, Homo sapiens
PGVPNACGWAGGEVLAGPPCSFWRLQHVDSPSWPVASFWRSPVLLDSWLLSLQRQQWRFLRCGLYPSWMVTLFPSLGKLVEGMAQDCLGSGTLTFSVPGPWRPQAMCGPWVSE

SEQ ID NO: 917997 - protein, 136 aa, Homo sapiens
MTLGKASPGLSGSQALGLCVCQSFPQTREEVKELSLRPCLDKTRRRTQSQRPRGRDRGKKKGPPRPQESQGDRRTKRPTQPGTGSSNSPASASRVAGITDILRVGFRLGSASGMYPCEILELTSERVQASNFYQRQ

SEQ ID NO: 917998 - protein, 157 aa, Homo sapiens
STNQCSGMNLYGWPLHSSLPTFKKKSVLLKKVFDKGVTIFYFIKSPPVSSHLFIILSKPLVAAPGISRTSAHRTSERVLPHSDACHRLRFIQTNAEQTMKSLWYFQQYHHRGTVLISLNFSNVEEPLEGSLEHEDRPPSSNHHLTLCEPGTVRMSVL

SEQ ID NO: 917999 - protein, 139 aa, Homo sapiens
STNQCSGMNLYGWPLHSSLPTFKKKSVLLKKVFDKGVTIFYFIKSPPVSSHLFIILSKPLVAAPGISRTSAHRTSERVLPHSDACHRLRFIQTNAEQTMKSLWYFQQYHHRGTVLISLHVQGTGRGNRDGGPMSGDFTV

SEQ ID NO: 918000 - protein, 574 aa, Homo sapiens
AKTLGPPGSLETGVLTFRDVAIEFSLEEWQCLDTAQQNLYRNVMLENYRNLVFVGIAASKPDLITCLEQGKEPWNVKRHEMVAEPPVVCSYFARDLWPKQGKKNYFQKVILRRYKKCGCENLQLRKYCKSMDECKVHKECYNGLNQCLTTTQNKIFQCDKYVKVFHKFSNSNRHTIRHTGKKSFKCKECEKSFCMLSHLAQHKRIHSGEKPYKCKECGKAYNETSNLSTHKRIHTGKKPYKCEECGKAFNRLSHLTTHKIIHTGKKPYKCEECGKAFNQSANLTTHKRIHTGEKPYKCEECGRAFSQSSTLTAHKIIHAGEKPYKCEECGKAFSQSSTLTTHKIIHTGEKFYKCEECGKAFSQLSHLTTHKRIHSGEKPYKCEECGKAFKQSSTLTTHKRIHAGEKFYKCEVCSKAFSRFSHLTTHKRIHTGEKPYKCEECGKAFNLSSQLTTHKIIHTGEKPYKCEECGKAFNQSSTLSKHKVIHTGEKPYKYEECGKAFNQSSHLTTHKMIHTGEKPYKCEECGKAFNNSSILNRHKMIHTGEKLYKPESCNNACDNIAKISKYKRNCAGEK

SEQ ID NO: 918001 - protein, 628 aa, Homo sapiens
DLEGKMQMKIPKFNNRLELAGGKAKSTGPQKLQSPLPLGTQAQGDQSSVPEPLAGVVGVPAEWPHTGVLTFRDVAIEFSLEEWQCLDTAQQNLYRNVMLENYRNLVFVGIAASKPDLITCLEQGKEPWNVKRHEMVAEPPVVCSYFARDLWPKQGKKNYFQKVILRRYKKCGCENLQLRKYCKSMDECKVHKECYNGLNQCLTTTQNKIFQCDKYVKVFHKFSNSNRHTIRHTGKKSFKCKECEKSFCMLSHLAQHKRIHSGEKPYKCKECGKAYNETSNLSTHKRIHTGKKPYKCEECGKAFNRLSHLTTHKIIHTGKKPYKCEECGKAFNQSANLTTHKRIHTGEKPYKCEECGRAFSQSSTLTAHKIIHAGEKPYKCEECGKAFSQSSTLTTHKIIHTGEKFYKCEECGKAFSQLSHLTTHKRIHSGEKPYKCEECGKAFKQSSTLTTHKRIHAGEKFYKCEVCSKAFSRFSHLTTHKRIHTGEKPYKCEECGKAFNLSSQLTTHKIIHTGEKPYKCEECGKAFNQSSTLSKHKVIHTGEKPYKYEECGKAFNQSSHLTTHKMIHTGEKPYKCEECGKAFNNSSILNRHKMIHTGEKLYKPESCNNACDNIAKISKYKRNCAGEK

SEQ ID NO: 918002 - protein, 583 aa, Homo sapiens [sequence omitted]

SEQ ID NO: 918003 - protein, 162 aa, Homo sapiens
MAGDGRRAEAVREGWGVYVTPRAPIREGRGRLAPQNGGSSDAPAYRTPPSRQGRREVRFSDEPPEVYGDFEPLVAKERSPVGKRTRLEEFRSDSAKEEVRESAYYLRSRQRRQPRPQETEEMKTRRTTRLQQQHSEQPPLQPSPVTTRRGLRDSHSSEGPRR

SEQ ID NO: 918004 - protein, 283 aa, Homo sapiens [sequence omitted]

SEQ ID NO: 918005 - protein, 565 aa, Homo sapiens
MAGDGRRAEAVREGWGVYVTPRAPIREGRGRLAPQNGGSSDAPAYRTPPSRQGRREVRFSDEPPEVYGDFEPLVAKERSPVGKRTRLEEFRSDSAKEEVRESAYYLRSRQRRQPRPQETEEMKTRRTTRLQQQHSEQPPLQPSPVTTRRGLRDSHSSEEDEASSQTDLSQTISKKTVRSIQEAPVSEDLVIRLRRPPLRYPRYEATSVQQKVNFSEEGETEEDDQDSSHSSVTTVKARSRDSDESGDKTTRSSSQYIESFWQSSQSQNFTAHDKQRSVLSSGYQKTPQEWAPQTARIRTRMQNDSILKSELGNQSPSTSSRQVTGQPPLASGSFWFFSTPEVETTAVQEFQNQMNQLKNKYQGQDEKLWKRSQTFLEKHLNSSHPRSQPAILLLTAARDAEEALRCLSEQIADAYSSFRSVRAIRIDGTDKATQDSDTVKLEVDQELSNGFKNGQNAAVVHRFESFPAGSTLIFYKYCDHENAAFKDVALVLTVLLEEETLGTSLGLKEVEEKVRDFLKVKFTNSNTPNSYNHMDPDKLNGLWSRISHLVLPVQPENALKRGICL

SEQ ID NO: 918006 - protein, 146 aa, Homo sapiens
MRLGVGVSDANPAEKQVKGVPAVSGWREGPEVQVVSSGRSRPIDRLAGLGLGLRPRLFPLPPLGEARRVGKAGGCLHFAPGSHDREEEELILHRGEEGGGREGLISFLPVVHGFLKPRVRPVFVFPPLCEEGGVERLQRASQIVQT

SEQ ID NO: 918007 - protein, 475 aa, Homo sapiens
MKSGLASKSGNKLQVDAGLSIIHIGETPSEHGKCKKFFSDVSILDLHQQLHSGKISHTCNEYRKRFCYSSALCLHQKVHMGEKRYKCDVCSKAFSQNSQLQTHQRIHTGEKPFKCEQCGKSFSRRSGMYVHCKLHTGEKPHICEECGKAFIHNSQLREHQRIHTGEKPFKCYICGKSFHSRSNLNRHSMVHMQEKSFRCDTCSNSFGQRSALNSHCMDHTKEKLYKCEECGRSFTCRQDLCKHQMDHTGDKPYNCNVCGKGFRWSSCLSRHQRVHNGETTFKCDGCGKRFYMNSQGHSHQRAYREEELYKCQKCGKGYISKFNLDLHQRVHTGERPYNCKECGKSFRWASGILRHKRLHTGEKPFKCEECGKRFTENSKLRFHQRIHTGEKPYKCEECGKGFRWASTHLTHQRLHSREKLFQCEDCGKSSEHSSCLQDQQSDHSGEKTSKCEDCGKRYERRLNLDMILSLFLNDI

SEQ ID NO: 918008 - protein, 151 aa, Homo sapiens
MKIAKVTMERRPAGTLCLLGRMPGPGPLSSQREQWRPPRTWTQPARATASGHSHDHAELTGTPQPADLGAILGLFLCPFFISNYKAAPGFLVSLCHVSKWLFGVRPIRKLTHHASSSIHQCLPPQLLGCKPSLAPVFRTEPSSVPRSFFPY

SEQ ID NO: 918009 - protein, 151 aa, Homo sapiens; identical to SEQ ID NO: 918008

SEQ ID NO: 918010 - protein, 166 aa, Homo sapiens
MGWLLGYGQERSLSFLALLESCRGGLVTMATGSMETCSRPFPGWAWTPAHLLMHCVPWPQHPEEVPGWSLCCLSTHPSTLAGAGRVLKGSRMGFWHAEAIEWLQDPASIQDTETHNSLIFRQIESKSLHGCCSMSCPFCFGVLVCFGPGAAFSSLCFSLAQLFSEF

SEQ ID NO: 918011 - protein, 409 aa, Homo sapiens
LPAPQRPSCSPGSVSAAAVNMEPPDAPAQAAGAPRLLLLAVLLAAHPDAQAEVRLSVPPLVEVMRGKSVILDCTPTGTHDHYMLEWFLTDRSGARPRLASAEMQGSELQVTMHDTRGRSPPYQLDSQGRLVLAEARWRRARLRVRGTAEATARLNVFAKPEATEVSPNKGTLSVMEDSAQEIATCNSRNGNPAPKITWYRNGQRLEVPVEMNPEGYMTSRTVREASGLLSLTSTLYLRLRKDDRDASFHCAAHYSLPEGRHGRLDSPTFHLTLHYPTEHVQFWVGSPSTPAGWVREGDTVQLLCRGDGSPSPEYTLFRLQDEQEEVLNVNLEGNLTLEGVTRGQSGTYGCRVEDYDAADDVQLSKTLELRVAYLTLLCSESAMAPQYPWEKPRCLTMAFKVHLASSTIS

SEQ ID NO: 918012 - protein, 685 aa, Homo sapiens
MGTRSSPEEGTPPPLVPECDVEVQPQGHPEESREQEASEVLAEPSSRGGAEQQAEEEEVGEGSSTESSRDAPEATPPIAMAATPPASTSSREGVRGAARRLQGQQLEALTRVALMEQRVKELQRQRKELRIEMEVEVALLRGELAGERVAARREEEQLRELLEQQAASEQRGRQQREEQRRLSQERDRLEGLRQRLRKAQGQLDSQPEDQRERLLQGVQEMREQLDVAQRAYEDLEFQQLERESRQEEEDRDSPGPQVPDPKVQELQASMAQHRHRIRVLEEQLKSLGEQMAAESRGLSRKKEEALQALSQERSRLLELNCLQGTPGGDFSEPNPALTKLLFTQKTDRQLLVLQDAVAHSAATPTSSCLFSVHSSLQGSIGLQRTGSLPRKRGERGSQRGSPRPLSFHCTGEDPPVPHFLPTSALILQQRMEETRTYACRGEVDRLRPGCIQPCNLVPSTLESLEASALPPAVGDSGRYPLYQLLNCGRGNSCGAIHPDIAHMERLLQQAMAERERLLKAREGTRRGTEGSSGPAVPAITAPPTPPHPPGPRILDLRQHLEGWGHNPENCPHVQVSGCCCRGPLVKMGGRIKTWRKRWFCFDRQARRLAYYADKEETKLKGVIYFQAIEEVYYDHLRCAFKSPNPRLTFCVKTYERLFYMVAPSPEAMRIWMDVIVTAADENHAP

SEQ ID NO: 918013 - protein, 634 aa, Homo sapiens
MGTRSSPEEGTPPPLVPECDVEVQPQGHPEESREQEASEVLAEPSSRGGAEQQAEEEEVGEGSSTESSRDAPEATPPIAMAATPPASTSSREGVRGAARRLQGQQLEALTRVALMEQRVKELQRQRKELRIEMEVEVALLRGELAGERVAARREEEQLRELLEQQAASEQRGRQQREEQRRLSQERDRLEGLRQRLRKAQGQLDSQPEDQRERLLQGVQEMREQLDVAQRAYEDLEFQQLERESRQEEEDRDSPGPQVPDPKVQELQASMAQHRHRIRVLEEQLKSLGEQMAAESRGLSRKKEEALQALSQERSRLLELNCLQGTPGGDFSEPNPALTKLLFTQKTDRQLLVLQDAVAHSAATPTSSCLFSVHSSLQGSIGLQRTGSLPRKRGERGSQRGSPRPLSFHCTESLEASALPPAVGDSGRYPLYQLLNCGRGNSCGAIHPDIAHMERLLQQAMAERERLLKAREGTRRGTEGSSGPAVPAITAPPTPPHPPGPRILDLRQHLEGWGHNPENCPHVQVSGCCCRGPLVKMGGRIKTWRKRWFCFDRQARRLAYYADKEETKLKGVIYFQAIEEVYYDHLRCAFKSPNPRLTFCVKTYERLFYMVAPSPEAMRIWMDVIVTAADENHAP

SEQ ID NO: 918014 - protein, 502 aa, Homo sapiens
MEVEVALLRGELAGERVAARREEEQLRELLEQQAASEQRGRQQREEQRRLSQERDRLEGLRQRLRKAQGQLDSQPEDQRERLLQGVQEMREQLDVAQRAYEDLEFQQLERESRQEEEDRDSPGPQVPDPKVQELQASMAQHRHRIRVLEEQLKSLGEQMAAESRGLSRKKEEALQALSQERSRLLELNCLQGTPGGDFSEPNPALTKLLFTQKTDRQLLVLQDAVAHSAATPTSSCLFSVHSSLQGSIGLQRTGSLPRKRGERGSQRGSPRPLSFHCTESLEASALPPAVGDSGRYPLYQLLNCGRGNSCGAIHPDIAHMERLLQQAMAERERLLKAREGTRRGTEGSSGPAVPAITAPPTPPHPPGPRILDLRQHLEGWGHNPENCPHVQVSGCCCRGPLVKMGGRIKTWRKRWFCFDRQARRLAYYADKEETKLKGVIYFQAIEEVYYDHLRCAFKSPNPRLTFCVKTYERLFYMVAPSPEAMRIWMDVIVTAADENHAP

SEQ ID NO: 918015 - protein, 148 aa, Homo sapiens
GSLAPTQAEPAKPDSQLFPRVGSDFRPSALPPSKFRSLESILPSNPVVQALGLFLGPRRPSPQPWHSLLQMEVEVALLRGELAGERVAARREEEQLRELLEQQNRSVWLTGSSSAVSFLVHGCWCAPSHLRPGVVPIPQRKTFGLLRE

SEQ ID NO: 918016 - protein, 601 aa, Homo sapiens
MGTRSSPEEGTPPPLVPECDVEVQPQGHPEESREQEASEVLAEPSSRGGAEQQAEEEEVGEGSSTESSRDAPEATPPIAMAATPPASTSSREGVRGAARRLQGQQLEALTRVALMEQRVKELQRQRKELRIEMEVEVALLRGELAGERVAARREEEQLRELLEQQAASEQRGRQQREEQRRLSQERDRLEGLRQRLRKAQGQLDSQPEDQRERLLQGVQEMREQLDVAQRAYEDLEFQQLERESRQEEEDRDSPGPQVPDPKVQELQASMAQHRHRIRVLEEQLKSLGEQMAAESRGLSRKKEEALQALSQERSRLLELNCLQGTPGGDFSEPNPALTKLLFTQKTDRQLLVLQDAVAQLRCHPYFFLPLFCPQLPAESLEASALPPAVGDSGRYPLYQLLNCGRGNSCGAIHPDIAHMERLLQQAMAERERLLKAREGTRRGTEGSSGPAVPAITAPPTPPHPPGPRILDLRQHLEGWGHNPENCPHVQVSGCCCRGPLVKMGGRIKTWRKRWFCFDRQARRLAYYADKEETKLKGVIYFQAIEEVYYDHLRCAFKSPNPRLTFCVKTYERLFYMVAPSPEAMRIWMDVIVTAADENHAP

SEQ ID NO: 918017 - protein, 184 aa, Homo sapiens
VTGMWSGGAGYCVRWESLCLEVLLTYLWSAGHWQSLKFLDRSLIPCFKLTVCWLIFTSTHYQLLHRSAPPHAWALNLYAQSPQSSCKDTHLTLLWFCQIMLGCFSTWMSFFSYLGSDIGLVLDHPDMWMPLSAKGCLSPNIPPQETLLYRCSLYPPQILTLLVIMVLELFRRKRKVENKFKKKE

SEQ ID NO: 918018 - protein, 206 aa, Homo sapiens
MTGYLYTCEDLCDMQGCSCGCTDVKVKTTVTSGLQPLAKNAIYLSMGQCDSRCQGMVITERPKISSEFAWNFHPRLFTVKRKNMIPACRLVDFQMLSSKNLEFKHDPLDDMSKEVLTEIPRIVKCQDEVSMTTQSYIPASHFLPGTIYTLPILMMIYLRAAFKDEIILGQNHEGSWDEDIILDYSSGLCVVTMGPGREHKRIENSV

SEQ ID NO: 918019 - protein, 236 aa, Homo sapiens
MTAEFLSLLCLGLCLGYEDEKKNEKPPKPSLHAWPSSVVEAESNVTLKCQAHSQNVTFVLRKVNDSGYKQEQSSAENEAEFPFTDLKPKDAGRYFCAYKTTASHEWSESSEHLQLVVTDKHDELEAPSMKTDTRTIFVAIFSCISILLLFLSVFIIYRCSQHGSSSEESTKRTSHSKLPEQEAAEADLSNMERVSLSTADPQGVTYAELSTSALSEAASDTTQEPPGSHEYAALKV

SEQ ID NO: 918020 - protein, 189 aa, Homo sapiens
TLHAPGRHAGRGNSIIPGSGYKQEQSSAENEAEFPFTDLKPKDAGRYFCAYKTTASHEWSESSEHLQLVVTDKHDELEAPSMKTDTRTIFVAIFSCISILLLFLSVFIIYRCSQHGSSSEESTKRTSHSKLPEQEAAEADLSNMERVSLSTADPQGVTYAELSTSALSEAASDTTQEPPGSHEYAALKV

SEQ ID NO: 918021 - protein, 110 aa, Homo sapiens
  misc_feature (7)..(7): Xaa can be any naturally occurring amino acid
  misc_feature (14)..(14): Xaa can be any naturally occurring amino acid
  misc_feature (16)..(16): Xaa can be any naturally occurring amino acid
EQPITLXLCDLLTXGXCHPYSSILCSLHHLQMQPARCHHAEGIHQENQAFQTSRAEAAEADLSNMERVSLSTADPQGVTYAELSTSALSEAASDTTQEPPGSHEYAALKV

SEQ ID NO: 918022 - protein, 205 aa, Homo sapiens
MTAEFLSLLCLGLCLGYEDEKKNEKPPKPSLHAWPSSVVEAESNVTLKCQAHSQNVTFVLRKVNDSGYKQEQSSAENEAEFPFTDLKPKDAGRYFCAYKTTASHEWSESSEHLQLVVTDKHDELEAPSMKTGSSSEESTKRTSHSKLPEQEAAEADLSNMERVSLSTADPQGVTYAELSTSALSEAASDTTQEPPGSHEYAALKV

SEQ ID NO: 918023 - protein, 433 aa, Homo sapiens
MNSLSEANTKFMFDLFQQFRKSKENNIFYSPISITSALGMVLLGAKDNTAQQIKKVLHFDQVTENTTGKAATYHVDRSGNVHHQFQKLLTEFNKSTDAYELKIANKLFGEKTYLFLQEYLDAIKKFYQTSVESVDFANAPEESRKKINSWVESQTNEKIKNLIPEGNIGSNTTLVLVNAIYFKGQWEKKFNKEDTKEEKFWPNKNTYKSIQMMRQYTSFHFASLEDVQAKVLEIPYKGKDLSMIVLLPNEIDGLQKLEEKLTAEKLMEWTSLQNMRETRVDLHLPRFKVEESYDLKDTLRTMGMVDIFNGDADLSGMTGSRGLVLSGVLHKAFVEVTEEGAEAAAATAVVGFGSSPTSTNEEFHLLCLLGFLCLLLSYLDVCVFEEADNFPVFADWLSLGKSFTSYSIQRFWAGPLGRFAAGVLSKAGLVLSQ

SEQ ID NO: 918024 - protein, 280 aa, Homo sapiens
MSGALDVLQMKEEDVLKFLAAGTHLGGTNLDFQMEQYIYKRKSDGIYIINLKRTWEKLLLAARAIVAIENPADVSVISSRNTGQRAVLKFAAATGATPIAGRFTPGTFTNQIQAAFREPRLLVVTDPRADHQPLTEASYVNLPTIALCNTDSPLRYVDIAIPCNNKGAHSVGLMWWMLAREVLRMRGTISREHPWEVMPDLYFYRDPEEIEKEEQAAAEKAVTKEEFQGEWTAPAPEFTATQPEVADWSEGVQVPSVPIQQFPTEDWSAQPATEDWPLNG

SEQ ID NO: 918025 - protein, 295 aa, Homo sapiens [sequence omitted]

SEQ ID NO: 918026 - protein, 289 aa, Homo sapiens
MSGALDVLQMKEEDVLKFLAAGTHLGGTNLDFQMEQYIYKRKSDGIYIINLKRTWEKLLLAARAIVAIENPADVSVISSRNTGQRAVLKFAAATGATPIAGRFTPGTFTNQIQAAFREPRLLVVTDPRADHQPLTEASYVNLPTIALCNTDSPLRYVDIAIPCNNKGAHSVGLMWWMLAREVLRMRGTISREHPWEVMPDLYFYRDPEEIEKEEQAAAEKAVTKEEFQGEWTAPAPEFTATQPEVADWSEGVQVPSVPIQQFPTEDWSAQPATEDWEGEFEEEAEEEVA

SEQ ID NO: 918027 - protein, 295 aa, Homo sapiens [sequence omitted]

SEQ ID NO: 918028 - protein, 295 aa, Homo sapiens [sequence omitted]

SEQ ID NO: 918029 - protein, 394 aa, Homo sapiens
SPGGIWMRRCVSAGEVELEEYYPAFLDMVRSLLEGSIDPTQYEDTLREMFTIHAYVGFTMDKLVQNIARQLRSDTFASAPSTFPPCARNGSLPITIHSSGHSPGWAPLMGHGFGDSNLACDTRRLDQMLHHLVSDDVCLKVVELYLNEKKRGAAGGNLSSRCVRAARETSYQWKAERCMADENCFKVMFLQRKGQVIMTIELLDTEEAQTEDPVEVQHLARYVEQYVGTEGASSSPTEGFLLKPVFLQRNLKKFRRRWQSEQARALRGEARSSWKRLVGVESACDVDCRFKLSTHKMVFIVNSEDYMYRRGTLCRAKQVQPLVLLRHHQHFEEWQQRWLEDNVTVEAASLVQDWLMGEEDEDMVPCKTLCETVHVHGLPVTRYRVQYSRRPASP

SEQ ID NO: 918030 - protein, 385 aa, Homo sapiens
SPGGIWMRRCVSAGEVELEEYYPAFLDMVRSLLEGSIDPTQYEDTLREMFTIHAYVGFTMDKLVQNIARQLRSDTFASAPSTFPPCARNGSLPITIHSSGHSPGWAPLMGHGFGDSNLACDTRRLDQMLHHLVSDDVCLKVVELYLNEKKRGAAGGNLSSRCVRAARETSYQWKAERCMADENCFKVMFLQRKGQVIMTIELLDTEEAQTEDPVEVQHLARYVEQYVGTEGASSSPTEGFLLKPVFLQREEALRCMLRSFLPGPRECPLCPDGGWTMAHCLGALSRCLLCAEAGPALLRLVVCSGGISNPRTVRCRRGKANPTMRQWVKSECPDWRETLPELVGPGQRRVAVAGPWTTSGRARMAPMGPVGAAGGCSDLGAFLVA

SEQ ID NO: 918031 - protein, 788 aa, Homo sapiens
MNFMVDETAAINSNKESQQLVQKTYTLEKKEAMEEDEAPQHRDADIVQGKGEAALWGEAGAVHEAPLRAWKPTAEQPELAEEFTEKREIPPGIERGAEGAAEAEGVRRLGEGGSDPIGQAAAKDAVGLSKDEAPEKQALMLTVLETDKAASEGEQGLEKAVLANEAAALNLEHLHEVAALREAATSEEGEAEGGVAVSDVGESEEEASIDLEDTGPMEDTASKREDGSEEAILGGEEPAKERKEVMRTETRLSPFTGEAEASRMQVSEGSPEEGSLAKEAFLCKEDVEGEEMVTEAEANREDDRKEILPKELDLARERRKAERPKTSLRKTDSEREEVTRANALKDEDAFKEEQKLKAEEGETETEVRAEEETKAPPNEMGSDAENEAPVEASELSDNPGLLGEDSLKETVVPIFEATPGFEKSLENITALRKEGGGERLSEARDTEHKDREELSSRENRALKEGHRQDGEGALAAPEAEPAGKVQAPEGLIPATGQAEELAAKDHDSCAGLEGRAEGQGGVDVVLRTQEAVAEEDPIMAEKFREEAVDEDPEEEEDKECTLETEAMQDRNSEGDGDMEGEGNTQKNEGMGGGRVVAVEVLHGGGETAETAAEEREVLAGSETAEEKTIANKASSFSDVAEEETWHQQDELVGKTAAAGKVVVEELARSGEEVPAAEEMTVTYTTEAGVGTPGALERKTSGLGQEQEEGSEGQEAATGSGDGRQETGAAEKFRLGLSREGERELSPESLQAMATLPVKPDFTETREKQQHMVQGESETADVSPNNVQV

SEQ ID NO: 918032 - protein, 163 aa, Homo sapiens
TPSGLTCVSLRFSFVMVNSVALNGDGCGICSETEEELIEVSHRLNCSREARGSSRCGPGPLLPTSAPVLLQHYPLYRRSDANCSGEDAAPPEERDIPFKENYDVLSREASQKLLWWLQPRLVLSGHTHSACEVHHGGRVPELSVPSFSWRNRNNPSFIMGTDA

SEQ ID NO: 918033 - protein, 191 aa, Homo sapiens
TPSGLTCVSLRFSFVMVNSVALNGDGCGICSETEEELIEVSHRLNCSREARGSSRCGPGPLLPTSAPVLLQVSWGRKGLMADSSSLWFHDSRLNSSLHPGQHYPLYRRSDANCSGEDAAPPEERDIPFKENYDVLSREASQKLLWWLQPRLVLSGHTHSACEVHHGGRVPELSVPSFSWRNRNNPSFIMVT

SEQ ID NO: 918034 - protein, 249 aa, Homo sapiens
TPSGLTCVSLRFSFVMVNSVALNGDGCGICSETEEELIEVSHRLNCSREARGSSRCGPGPLLPTSAPVLLQVSWGRKGLMADSSSLWFHDSRLNSSLHPGQHYPLYRRSDANCSGEDAAPPEERDIPFKENYDVLSREASQKLLWWLQPRLVLSGHTHSACEVHHGGRVPELSVPSFSWRNRNNPSFIMGSITPTDYTLSKCYLPREDVVLIIYCGVVGFLVVLTLTHFGLLASPFLSGLNLLGKRKTR

SEQ ID NO: 918035 - protein, 90 aa, Homo sapiens
TPSGLTCVSLRFSFVMVNSVALNGDGCGICSETEEELIEVSHRLNCSREARGSSRCGPGPLLPTSAPVLLQVSWGRKGLMADSRQPVVSR

SEQ ID NO: 918036 - protein, 771 aa, Homo sapiens
MAPGPFSSALLSPPPAALPFLLLLWAGASRGQPCPGRCICQNVAPTLTMLCAKTGLLFVPPAIDRRVVELRLTDNFIAAVRRRDFANMTSLVHLTLSRNTIGQVAAGAFADLRALRALHLDSNRLAEVRGDQLRGLGNLRHLILGNNQIRRVESAAFDAFLSTVEDLDLSYNNLEALPWEAVGQMVNLNTLTLDHNLIDHIAEGTFVQLHKLVRLDMTSNRLHKLPPDGLFLRSQGTGPKPPTPLTVSFGGNPLHCNCELLWLRRLTREDDLETCATPEHLTDRYFWSIPEEEFLCEPPLITRQAGGRALVVEGQAVSLRCRAVGDPEPVVHWVAPDGRLLGNSSRTRVRGDGTLDVTITTLRDSGTFTCIASNAAGEATAPVEVCVVPLPLMAPPPAAPPPLTEPGSSDIATPGRPGANDSAAERRLVAAELTSNSVLIRWPAQRPVPGIRMYQVQYNSSVDDSLVYRMIPSTSQTFLVNDLAAGRAYDLCVLAVYDDGATALPATRVVGCVQFTTAGDPAPCRPLRAHFLGGTMIIAIGGVIVASVLVFIVLLMIRYKVYGDGDSRRVKGSRSLPRVSHVCSQTNGAGTGAAQAPALPAQDHYEALREVESQAAPAVAVEAKAMEAETASAEPEVVLGRSLGGSATSLCLLPSEETSGEESRAAVGPRRSRSGALEPPTSAPPTLALVPGGAAARPRPQQRYSFDGDYGALFQSHSYPRRARRTKRHRSTPHLDGAGGGAAGEDGDLGLGSARACLAFTSTEWMLESTV

SEQ ID NO: 918037 - protein, 771 aa, Homo sapiens; identical to SEQ ID NO: 918036

SEQ ID NO: 918038 - protein, 141 aa, Homo sapiens
MKAEVVYTAESCGVGSALATSYFASYGDSVILPGPPSVFQVLPYPWIQGYHPGIPTTYRWELAPCSRPPGAPSGRPAAGLAAETPPAVAPGAARPLVAMAGFAAHLAEVGSAAELKFEHQGAVSAALPAGLHTRPAVLPGQ

SEQ ID NO: 918039 - protein, 193 aa, Homo sapiens
LQEKQQQQYLFVGTETRMLSAHRHGCSIRSKWHICIKPFEKARGKQLKQLIFFPMSISSALAMVFMGAKGNTAAQMSQALCFSKIGGEDGDIHRGFQSLLVAINRTDTEYVLRTANGLFGEKSYDFLTGFTDSCGKFYQATIKQLDFVNDTEKSTTRVNSWVADKTKGENILLFYFDNILNSFIVSSLQNCQI

SEQ ID NO: 918040 - protein, 217 aa, Homo sapiens
LQEKQQQQYLFVGTETRMLSAHRHGCSIRSKWHICIKPFEKARGKQLKQLIFFPMSISSALAMVFMGAKGNTAAQMSQALCFSKIGGEDGDIHRGFQSLLVAINRTDTEYVLRTANGLFGEKSYDFLTGFTDSCGKFYQATIKQLDFVNDTEKSTTRVNSWVADKTKAWKIIQTSLSHLEEPGIASSSCYCKACLPQPLLVHSIPKCNSPVTPHGMW

SEQ ID NO: 918041 - protein, 271 aa, Homo sapiens
LQEKQQQQYLFVGTETRMLSAHRHGCSIRSKWHICIKPFEKARGKQLKQLIFFPMSISSALAMVFMGAKGNTAAQMSQALCFSKIGGEDGDIHRGFQSLLVAINRTDTEYVLRTANGLFGEKSYDFLTGFTDSCGKFYQATIKQLDFVNDTEKSTTRVNSWVADKTKVHKGTKKHHQQRPHGLHDMALWTHQTLSCSASSTLSVPLQAWIRHGFHGAILCLFAPARTVFPTWDICVYNQTPRGQIISFVKDFKPPGICWKFHGGKQAFFIF

SEQ ID NO: 918042 - protein, 576 aa, Homo sapiens
MDSVAFEDVSVSFSQEEWALLAPSQKKLYRDVMQETFKNLASIGEKWEDPNVEDQHKNQGRNLRSHTGERLCEGKEGSQCAENFSPNLSVTKKTAGVKPYECTICGKAFMRLSSLTRHMRSHTGYELFEKPYKCKECEKAFSYLKSFQRHERSHTGEKPYKCKQCGKTFIYHQPFQRHERTHIGEKPYECKQCGKALSCSSSLRVHERIHTGEKPYECKQCGKAFSCSSSIRVHERTHTGEKPYACKECGKAFISHTSVLTHMITHNGDRPYKCKECGKAFIFPSFLRVHERIHTGEKPYKCKQCGKAFRCSTSIQIHERIHTGEKPYKCKECGKSFSARPAFRVHVRVHTGEKPYKCKECGKAFSRISYFRIHERTHTGEKPYECKKCGKTFNYPLDLKIHKRNHTGEKPYECKECAKTFISLENFRRHMITHTGDGPYKCRDCGKVFIFPSALRTHERTHTGEKPYECKQCGKAFSCSSYIRIHKRTHTGEKPYECKECGKAFIYPTSFQGHMRMHTGEKPYKCKECGKAFSLHSSFQRHTRIHNYEKPLECKQCGKAFSVSTSLKKHMRMHNR

SEQ ID NO: 918043 - protein, 169 aa, Homo sapiens
MLLPNGSIWGTARGHLIFLLRLCPEINSLSSNAVVTALPGSLVGVAEMGVAMIRHNTRPREEFCRLGTAGFAVRRRGPSKSLATAAEGDVSRFGRRLSVWSQRSVESGETQDQMSRGLDVAPSERPVGVSEGEPPVLRPCGTPRPGVLSGFTQWRSLALVIGRLALDYI

SEQ ID NO: 918044 - protein, 163 aa, Homo sapiens
MRYFTKEWVFNHHLSRRWATCPRDDSNRELFLAESSEGNQEIRGQGNPTLSVRLCKLHFLLHFPTNIVFLKSKSGCITLLFENANDSLLSMTHSHTGSSGPPGCRLLGPTRENFDGVLQVNSDVCGSDEDGQAMLREFSRLEGVNSFLEDRWKNPKASKTLIL

SEQ ID NO: 918045 - protein, 146 aa, Homo sapiens
MPVELQVTILNQHANWSLRQKQDGKRLPFGFWTQKLPEAGKPYTPFKKKFLACYWALLETEHLCFNHDVFMRPEIPTMTWVMSSTQSHQIGHAQESSIIKWKWYIQDQSKPKPKGLSLLHEGVKNLTAHGLNAPLKRYRIAEWIRI

SEQ ID NO: 918046 - protein, 146 aa, Homo sapiens; identical to SEQ ID NO: 918045

SEQ ID NO: 918047 - protein, 146 aa, Homo sapiens; identical to SEQ ID NO: 918045

SEQ ID NO: 918048 - protein, 146 aa, Homo sapiens; identical to SEQ ID NO: 918045

SEQ ID NO: 918049 - protein, 149 aa, Homo sapiens
PQSSILMYLLSHQSIERSRKSIAFIHEQNNNFLELSCWTQQHERDEEEAGLAEEKLSFNAGPTTLSVLWMSMTGAAFVSIVTMMLLHGSPIPRCSNTAIQDTLPFIIFSQTGKTEGILFNKGVSQNRINVTCFLGPVKYAVHLEALLLK

SEQ ID NO: 918050 - protein, 196 aa, Homo sapiens
MTGDCTPVLVLMAAVLTVTGAVPVARLHGALPDARGCHIAQFKSLSPQELQAFKRAKDALEESLLLKDCRCHSRLFPRTWDLRQLQVRERPMALEAELALTLKVLEATADTDPALVDVLDQPLHTLHHILSQFRACIQPQPTAGPRTRGRLHHWLYRLQEAPKKESPGCLEASVTFNLFRLLTRDLNCVASGDLCV

SEQ ID NO: 918051 - protein, 136 aa, Homo sapiens
MRTHGHKEGNITHQGVSGGQKAPHRRSSGPCTTCCVPSLGSATWKTDGREALSTRALLGEAFQNCCLHTVQAFYTINCASSHLLPLIAAERTMLTTAEQLLNQGRTFLPLQFNSHLKPTCELVQEMMDSDFHTPFL

SEQ ID NO: 918052 - protein, 136 aa, Homo sapiens; identical to SEQ ID NO: 918051

SEQ ID NO: 918053 - protein, 143 aa, Homo sapiens
MPCGQVPKSTGADSLILCPKDPWTFTSIRMFINSQERQLADMSLFIADSWLCYSGIICWKSLEHQAWIAGRNKNQHPAFVKSQDDALKPTNTFQPGRPHTRSCPEGCKSQLCLHGRKRGKHLDESQQRPATLPDAAHIWTFKK

SEQ ID NO: 918054 - protein, 200 aa, Homo sapiens
MGTRSSPEEGTPPPLVPECDVEVQPQGHPEESREQEASEVLAEPSSRGGAEQQAEEEEVGEGSSTESSRDAPEATPPIAMAATPPASTSSREGVRGAARRLQGQQLEALTRVALMEQRVKELQRQRKELRIEMEVEVALLRGELAGERVAARREEEQLRELLEQQAASEQRGRQQREQVCLAHRVFISSVLPGPWMLVCS

SEQ ID NO: 918055 - protein, 200 aa, Homo sapiens; identical to SEQ ID NO: 918054

SEQ ID NO: 918056 - protein, 172 aa, Homo sapiens
MCLEFLLSGGLVVPLASAVKLQTFTASVAALKAAHIKVLQVPLDSGVQLASHSGSRTRAAGGAACQSRAVRPHFSALGWSVGPGAAEQGAALVGEAQAAQEAMAENSSTAPGPGEPSAAAGPGAKPLTAQGRQRQPAAPSAGPRSPHPPGTHAGLQVQRAALVSTSPHLPTS

SEQ ID NO: 918057 - protein, 125 aa, Homo sapiens
MRKWICPQSLQKEGIPAGTMTSAQPCECLVVRVAPDLGERITLSGDKSLIEEVFPEIGDVMCNSVNAGWNHDSTHVIRFPLNGYCHLNSVQMEKCRGARDVGVELRTQRLMCAEHRLSALPWAMA

SEQ ID NO: 918058 - protein, 218 aa, Homo sapiens
MLIAKTMGKMSPGYFRDLHSRPSHHRPGGLGRKNSFFAPGPRPYCSVQPWDMVSCVPAVPAPAVDKRAQGTAQAVASEGARPKPLWLPGGVGPGNARENVGLESPHRVPTGALPSGAMKRGSLPFRPQNHRSTDSLHYAPGKAAGFQCQLVKAVVGLYTAEPQGLSCLWPWEPTPCISVPWVLSPDIYVVHLPVHSGLCSNDTPSRQAYHKRNLLLIN

SEQ ID NO: 918059 - protein, 263 aa, Homo sapiens
MPSISFKATRIFDYICCKQSAAVIKQKGQDNVSLSGPTCISTHRWTETNGKEKLTDFWRTTKTIWIQRLLRIPGNTLKTNYLFVLDGLCNENPRPARPLRFIDLTSPPTKKDTWILPVLPSPGYNGREEQANSLPVKDVTIWSMYTGVGHVGSQIYINFWQHTARKHRCPKGHQLKISSKTKPSLGQMHLSSNHHLSNNLPAVNWKFSFWELQPPSQRSKVLAPTAPAVEPKYGCFMEKAGKEGCAHCLRVATLIDNEGIVAF

SEQ ID NO: 918060 - protein, 263 aa, Homo sapiens; identical to SEQ ID NO: 918059

SEQ ID NO: 918061 - protein, 197 aa, Homo sapiens
VSSVWAWFMSTSCSRHMIGPNSPVLSGTLKPARGSGNSCRMRQKRPALMADEKTAALCSTWKHLWPKLIGTCVAGRTDVKFCGKEIQHKLAEHSNLKNKSESQSWRAHLWVLALIGKSYGFVGVIAADLSSSHRILPEPTLGSTQLMRGFLPRFLTKCSLIVVVVRRRKMLLLKRGFLEAATKALKRINSDHYIATI
